United States Patent Application Publication US 2007/0214517 A1 - sequence listing, part 82

SEQ ID NO: 105655 - DNA, 1295 bp, Arabidopsis thaliana
  misc_feature (1)..(1295): Ceres Seq. ID no. 13617698
  misc_feature: MA Experiment ID: 108462 Result: Down-regulated in Transcription
  misc_feature: MA Experiment 108462 PARAMETER Experiment Name: At_Germinating_Seeds_cDNA_P Parameter: Age (day) Value: 2 vs. 0
  misc_feature: MA Experiment 108462 PARAMETER Experiment Name: At_Germinating_Seeds_cDNA_P Parameter: Tissue Value: Germinating Seeds
  misc_feature: MA Experiment ID: 108463 Result: Down-regulated in Transcription
  misc_feature: MA Experiment 108463 PARAMETER Experiment Name: At_Germinating_Seeds_cDNA_P Parameter: Age (day) Value: 3 vs. 0
  misc_feature: MA Experiment 108463 PARAMETER Experiment Name: At_Germinating_Seeds_cDNA_P Parameter: Tissue Value: Germinating Seeds
  misc_feature: MA Experiment ID: 108464 Result: Down-regulated in Transcription
  misc_feature: MA Experiment 108464 PARAMETER Experiment Name: At_Germinating_Seeds_cDNA_P Parameter: Age (day) Value: 4 vs. 0
  misc_feature: MA Experiment 108464 PARAMETER Experiment Name: At_Germinating_Seeds_cDNA_P Parameter: Tissue Value: Germinating Seeds
  misc_feature: MA Experiment ID: 108488 Result: Up-regulated in Transcription
  misc_feature: MA Experiment ID: 108569 Result: Up-regulated in Transcription
  misc_feature: MA Experiment 108569 PARAMETER Experiment Name: At_0.001%_MeJA__cDNA_P Parameter: Timepoint (hr) Value: 6
  misc_feature: MA Experiment 108569 PARAMETER Experiment Name: At_0.001%_MeJA__cDNA_P Parameter: Tissue Value: Aerial
  misc_feature: MA Experiment 108569 PARAMETER Experiment Name: At_0.001%_MeJA__cDNA_P Parameter: Treatment Value: 0.001% MeJA vs. No Treatment
  misc_feature: MA Experiment ID: 108572 Result: Down-regulated in Transcription
  misc_feature: MA Experiment 108572 PARAMETER Experiment Name: At_Drought_cDNA_P Parameter: Timepoint (hr) Value: 1
  misc_feature: MA Experiment 108572 PARAMETER Experiment Name: At_Drought_cDNA_P Parameter: Tissue Value: Aerial
  misc_feature: MA Experiment 108572 PARAMETER Experiment Name: At_Drought_cDNA_P Parameter: Treatment Value: Drought vs. No Drought
  misc_feature: MA Experiment ID: 108577 Result: Up-regulated in Transcription
  misc_feature: MA Experiment 108577 PARAMETER Experiment Name: At_42deg_Heat_cDNA_P Parameter: Temperature (deg C) Value: 42 vs. 22
  misc_feature: MA Experiment 108577 PARAMETER Experiment Name: At_42deg_Heat_cDNA_P Parameter: Timepoint (hr) Value: 6
  misc_feature: MA Experiment 108577 PARAMETER Experiment Name: At_42deg_Heat_cDNA_P Parameter: Tissue Value: Aerial
  misc_feature: MA Experiment ID: 108579 Result: Up-regulated in Transcription
  misc_feature: MA Experiment 108579 PARAMETER Experiment Name: At_4deg_Cold_cDNA_P Parameter: Temperature (deg C) Value: 4 vs. 22
  misc_feature: MA Experiment 108579 PARAMETER Experiment Name: At_4deg_Cold_cDNA_P Parameter: Timepoint (hr) Value: 6
  misc_feature: MA Experiment 108579 PARAMETER Experiment Name: At_4deg_Cold_cDNA_P Parameter: Tissue Value: Aerial
  misc_feature: MA Experiment ID: 108595 Result: Down-regulated in Transcription
  misc_feature: MA Experiment 108595 PARAMETER Experiment Name: At_Ler-pi_Ovule_cDNA_P Parameter: Plant Line Value: null
  misc_feature: MA Experiment ID: 108605 Result: Down-regulated in Transcription
  misc_feature: MA Experiment 108605 PARAMETER Experiment Name: At_100uM_ABA_cDNA_P Parameter: Timepoint (hr) Value: 6
  misc_feature: MA Experiment 108605 PARAMETER Experiment Name: At_100uM_ABA_cDNA_P Parameter: Tissue Value: Aerial
  misc_feature: MA Experiment 108605 PARAMETER Experiment Name: At_100uM_ABA_cDNA_P Parameter: Treatment Value: 100uM ABA vs. No Treatment
  misc_feature: MA Experiment ID: 20000069 Result: Down-regulated in Transcription
  misc_feature: MA Experiment 20000069 PARAMETER Experiment Name: At_100uM_ABA_Mutants_cDNA_P Parameter: Plant Line Value: CS23
  misc_feature: MA Experiment 20000069 PARAMETER Experiment Name: At_100uM_ABA_Mutants_cDNA_P Parameter: Timepoint (hr) Value: 6
  misc_feature: MA Experiment 20000069 PARAMETER Experiment Name: At_100uM_ABA_Mutants_cDNA_P Parameter: Tissue Value: Aerial
  misc_feature: MA Experiment 20000069 PARAMETER Experiment Name: At_100uM_ABA_Mutants_cDNA_P Parameter: Treatment Value: 100uM ABA vs. No Treatment
  misc_feature: MA Experiment ID: 20000070 Result: Down-regulated in Transcription
  misc_feature: MA Experiment 20000070 PARAMETER Experiment Name: At_100uM_ABA_Mutants_cDNA_P Parameter: Plant Line Value: CS24
  misc_feature: MA Experiment 20000070 PARAMETER Experiment Name: At_100uM_ABA_Mutants_cDNA_P Parameter: Timepoint (hr) Value: 6
  misc_feature: MA Experiment 20000070 PARAMETER Experiment Name: At_100uM_ABA_Mutants_cDNA_P Parameter: Tissue Value: Aerial
  misc_feature: MA Experiment 20000070 PARAMETER Experiment Name: At_100uM_ABA_Mutants_cDNA_P Parameter: Treatment Value: 100uM ABA vs. No Treatment
  misc_feature: MA Experiment ID: 20000071 Result: Down-regulated in Transcription
  misc_feature: MA Experiment 20000071 PARAMETER Experiment Name: At_100uM_ABA_Mutants_cDNA_P Parameter: Plant Line Value: CS8104
  misc_feature: MA Experiment 20000071 PARAMETER Experiment Name: At_100uM_ABA_Mutants_cDNA_P Parameter: Timepoint (hr) Value: 6
  misc_feature: MA Experiment 20000071 PARAMETER Experiment Name: At_100uM_ABA_Mutants_cDNA_P Parameter: Tissue Value: Aerial
  misc_feature: MA Experiment 20000071 PARAMETER Experiment Name: At_100uM_ABA_Mutants_cDNA_P Parameter: Treatment Value: 100uM ABA vs. No Treatment
  misc_feature: MA Experiment ID: 20000086 Result: Down-regulated in Transcription
  misc_feature: MA Experiment 20000086 PARAMETER Experiment Name: At_100uM_ABA_Mutants_cDNA_P Parameter: Plant Line Value: CS22
  misc_feature: MA Experiment 20000086 PARAMETER Experiment Name: At_100uM_ABA_Mutants_cDNA_P Parameter: Timepoint (hr) Value: 6
  misc_feature: MA Experiment 20000086 PARAMETER Experiment Name: At_100uM_ABA_Mutants_cDNA_P Parameter: Tissue Value: Aerial
  misc_feature: MA Experiment 20000086 PARAMETER Experiment Name: At_100uM_ABA_Mutants_cDNA_P Parameter: Treatment Value: 100uM ABA vs. No Treatment
  misc_feature: MA Experiment ID: 20000087 Result: Down-regulated in Transcription
  misc_feature: MA Experiment 20000087 PARAMETER Experiment Name: At_100uM_ABA_Mutants_cDNA_P Parameter: Plant Line Value: WS
  misc_feature: MA Experiment 20000087 PARAMETER Experiment Name: At_100uM_ABA_Mutants_cDNA_P Parameter: Timepoint (hr) Value: 6
  misc_feature: MA Experiment 20000087 PARAMETER Experiment Name: At_100uM_ABA_Mutants_cDNA_P Parameter: Tissue Value: Aerial
  misc_feature: MA Experiment 20000087 PARAMETER Experiment Name: At_100uM_ABA_Mutants_cDNA_P Parameter: Treatment Value: 100uM ABA vs. No Treatment
  misc_feature: MA Experiment ID: 20000088 Result: Down-regulated in Transcription
  misc_feature: MA Experiment 20000088 PARAMETER Experiment Name: At_100uM_ABA_Mutants_cDNA_P Parameter: Plant Line Value: Landsberg
  misc_feature: MA Experiment 20000088 PARAMETER Experiment Name: At_100uM_ABA_Mutants_cDNA_P Parameter: Timepoint (hr) Value: 6
  misc_feature: MA Experiment 20000088 PARAMETER Experiment Name: At_100uM_ABA_Mutants_cDNA_P Parameter: Tissue Value: Aerial
  misc_feature: MA Experiment 20000088 PARAMETER Experiment Name: At_100uM_ABA_Mutants_cDNA_P Parameter: Treatment Value: 100uM ABA vs. No Treatment
  misc_feature: MA Experiment ID: 20000089 Result: Down-regulated in Transcription
  misc_feature: MA Experiment ID: 20000090 Result: Down-regulated in Transcription
  misc_feature: MA Experiment ID: 20000111 Result: Up-regulated in Transcription
  misc_feature: MA Experiment 20000111 PARAMETER Experiment Name: At_42deg_Heat_cDNA_P Parameter: Temperature (deg C) Value: 42 vs. 22
  misc_feature: MA Experiment 20000111 PARAMETER Experiment Name: At_42deg_Heat_cDNA_P Parameter: Timepoint (hr) Value: 6
  misc_feature: MA Experiment 20000111 PARAMETER Experiment Name: At_42deg_Heat_cDNA_P Parameter: Tissue Value: Aerial
  misc_feature: MA Experiment ID: 20000112 Result: Up-regulated in Transcription
  misc_feature: MA Experiment 20000112 PARAMETER Experiment Name: At_42deg_Heat_cDNA_P Parameter: Temperature (deg C) Value: 42 vs. 22
  misc_feature: MA Experiment 20000112 PARAMETER Experiment Name: At_42deg_Heat_cDNA_P Parameter: Timepoint (hr) Value: 2
  misc_feature: MA Experiment 20000112 PARAMETER Experiment Name: At_42deg_Heat_cDNA_P Parameter: Tissue Value: Aerial
  misc_feature: MA Experiment ID: 20000113 Result: Up-regulated in Transcription
  misc_feature: MA Experiment 20000113 PARAMETER Experiment Name: At_42deg_Heat_cDNA_P Parameter: Temperature (deg C) Value: 42 vs. 22
  misc_feature: MA Experiment 20000113 PARAMETER Experiment Name: At_42deg_Heat_cDNA_P Parameter: Timepoint (hr) Value: 8
  misc_feature: MA Experiment 20000113 PARAMETER Experiment Name: At_42deg_Heat_cDNA_P Parameter: Tissue Value: Aerial
  misc_feature: MA Experiment ID: 20000117 Result: Down-regulated in Transcription
  misc_feature: MA Experiment 20000117 PARAMETER Experiment Name: At_100uM_ABA_Mutants_cDNA_P Parameter: Plant Line Value: Columbia
  misc_feature: MA Experiment 20000117 PARAMETER Experiment Name: At_100uM_ABA_Mutants_cDNA_P Parameter: Timepoint (hr) Value: 6
  misc_feature: MA Experiment 20000117 PARAMETER Experiment Name: At_100uM_ABA_Mutants_cDNA_P Parameter: Tissue Value: Aerial
  misc_feature: MA Experiment 20000117 PARAMETER Experiment Name: At_100uM_ABA_Mutants_cDNA_P Parameter: Treatment Value: 100uM ABA vs. No Treatment
  misc_feature: MA Experiment ID: 20000169 Result: Down-regulated in Transcription
  misc_feature: MA Experiment 20000169 PARAMETER Experiment Name: At_100uM_ABA_P Parameter: Age (day) Value: 14
  misc_feature: MA Experiment 20000169 PARAMETER Experiment Name: At_100uM_ABA_P Parameter: Organism Value: A. thaliana
  misc_feature: MA Experiment 20000169 PARAMETER Experiment Name: At_100uM_ABA_P Parameter: Plant Line Value: WS
  misc_feature: MA Experiment 20000169 PARAMETER Experiment Name: At_100uM_ABA_P Parameter: Timepoint (hr) Value: 6
  misc_feature: MA Experiment 20000169 PARAMETER Experiment Name: At_100uM_ABA_P Parameter: Tissue Value: Aerial
  misc_feature: MA Experiment 20000169 PARAMETER Experiment Name: At_100uM_ABA_P Parameter: Treatment Value: 100uM ABA vs. No Treatment
  misc_feature: MA Experiment ID: 20000173 Result: Up-regulated in Transcription
  misc_feature: MA Experiment 20000173 PARAMETER Experiment Name: At_42deg_Heat_P Parameter: Age (day) Value: 14
  misc_feature: MA Experiment 20000173 PARAMETER Experiment Name: At_42deg_Heat_P Parameter: Organism Value: A. thaliana
  misc_feature: MA Experiment 20000173 PARAMETER Experiment Name: At_42deg_Heat_P Parameter: Plant Line Value: WS
  misc_feature: MA Experiment 20000173 PARAMETER Experiment Name: At_42deg_Heat_P Parameter: Temperature (deg C) Value: 42 vs. 22
  misc_feature: MA Experiment 20000173 PARAMETER Experiment Name: At_42deg_Heat_P Parameter: Timepoint (hr) Value: 6
  misc_feature: MA Experiment 20000173 PARAMETER Experiment Name: At_42deg_Heat_P Parameter: Tissue Value: Aerial
  misc_feature: MA Experiment ID: 20000184 Result: Up-regulated in Transcription
  misc_feature: MA Experiment 20000184 PARAMETER Experiment Name: At_Shoots__P Parameter: Age (day) Value: 7
  misc_feature: MA Experiment 20000184 PARAMETER Experiment Name: At_Shoots__P Parameter: Tissue Value: Shoots vs. Whole Plant
  misc_feature: MA Experiment ID: 20000437 Result: Down-regulated in Transcription
  misc_feature: MA Experiment 20000437 PARAMETER Experiment Name: At_Drought_P Parameter: Age (day) Value: 8
  misc_feature: MA Experiment 20000437 PARAMETER Experiment Name: At_Drought_P Parameter: Organism Value: A. thaliana
  misc_feature: MA Experiment 20000437 PARAMETER Experiment Name: At_Drought_P Parameter: Plant Line Value: WS
  misc_feature: MA Experiment 20000437 PARAMETER Experiment Name: At_Drought_P Parameter: Timepoint (hr) Value: 24
  misc_feature: MA Experiment 20000437 PARAMETER Experiment Name: At_Drought_P Parameter: Tissue Value: Whole Plant
  misc_feature: MA Experiment 20000437 PARAMETER Experiment Name: At_Drought_P Parameter: Treatment Value: Drought vs. No Drought
  misc_feature: MA Experiment ID: 20001248 Result: Down-regulated in Transcription
  misc_feature: MA Experiment 20001248 PARAMETER Experiment Name: At_Far-red-induction_P Parameter: Age (day) Value: 7
  misc_feature: MA Experiment 20001248 PARAMETER Experiment Name: At_Far-red-induction_P Parameter: Light Value: Far-red vs. White
  misc_feature: MA Experiment 20001248 PARAMETER Experiment Name: At_Far-red-induction_P Parameter: Organism Value: A. thaliana
  misc_feature: MA Experiment 20001248 PARAMETER Experiment Name: At_Far-red-induction_P Parameter: Plant Line Value: Columbia
  misc_feature: MA Experiment 20001248 PARAMETER Experiment Name: At_Far-red-induction_P Parameter: Timepoint (hr) Value: 4
  misc_feature: MA Experiment 20001248 PARAMETER Experiment Name: At_Far-red-induction_P Parameter: Tissue Value: Whole Plant
  misc_feature: MA Experiment ID: 20001450 Result: Down-regulated in Transcription
  misc_feature: MA Experiment 20001450 PARAMETER Experiment Name: At_Far-red-induction_P Parameter: Age (day) Value: 7
  misc_feature: MA Experiment 20001450 PARAMETER Experiment Name: At_Far-red-induction_P Parameter: Light Value: Far-red vs. White
  misc_feature: MA Experiment 20001450 PARAMETER Experiment Name: At_Far-red-induction_P Parameter: Organism Value: A. thaliana
  misc_feature: MA Experiment 20001450 PARAMETER Experiment Name: At_Far-red-induction_P Parameter: Plant Line Value: Columbia
  misc_feature: MA Experiment 20001450 PARAMETER Experiment Name: At_Far-red-induction_P Parameter: Timepoint (hr) Value: 8
  misc_feature: MA Experiment 20001450 PARAMETER Experiment Name: At_Far-red-induction_P Parameter: Tissue Value: Whole Plant
tcactataaagccgatccatagataaacgaggaccggccagaaatcgcttcaccattcccaaatctctcttccattttctccacacaaatttctcttcaatctccgataatggaaggaaccggcgttgtggcggtgtacggtaacggtgcgataacggaggcgaagaaatctcccttctccgtgaaggtcggtttggctcagatgctccgtggtggtgttatcatggatgtcgtcaacgccgagcaagctcgtatcgccgaggaggctggtgcttgcgccgtcatggctttggagcgtgttcctgctgatatccgcgctcaaggaggcgtcgctcgtatgagcgatccacaaatgattaaagaaatcaaacaagccgttacgattccggtgatggctaaggctaggattggtcatttcgttgaagctcagatccttgaagcaattggaatcgattacatcgatgagagcgaggttttgactcttgctgatgaagatcatcacatcaacaagcataatttccggatcccgttcgtttgcggttgccggaatctcggcgaggctctgaggaggatccgtgaaggtgcggcgatgattaggaccaaaggtgaagctggaaccggtaacattattgaagctgtgaggcatgtgaggtctgttaatggtgacattagggttttgcgaaacatggatgatgatgaggttttcactttcgctaagaaattagccgctccgtacgatctcgtgatgcagactaagcagcttggtcgtcttcctgtagtccaattcgccgccggtggagtggctactccggctgatgcagctctcatgatgcagcttggatgtgatggtgtctttgttggttctggtatcttcaagagcggtgacccagctcgtcgtgcacgtgccattgttcaggctgtgactcattacagtgaccctgagatgcttgtggaggtgagctgtgggcttggagaagccatggttgggatcaatctcaacgatgagaaggttgagaggttcgctaatcgctccgagtgatcaaagaaataaaaggtaaaatatctcagacgaaatggtttcagaattttctcagaccattttgcagtaatctctttgaaaagaagaagatgatgatattgttggtagtttgtatcctttgtgttttccttataatctttgatagtcttttgttattgtaactcgtaatccctttgcaagaacaagtttgtcagttataataatgtactactctcttgatcgatcagttggttttgaatctgatatattcttcgat

SEQ ID NO: 105656 - protein, 309 aa, Arabidopsis thaliana; identical to SEQ ID NO: 28173
  peptide (1)..(309): Ceres Seq. ID no. 13617699
  misc_feature (22)..(228): Pfam Name: SOR/SNZ family Pfam Description: SOR/SNZ family
  misc_feature (1)..(309): Homolog of NCBI NO: 15240972 NR Description: pyridoxine biosynthesis protein - like
  misc_feature (1)..(309): Homolog of NCBI NO: 21617922 NR Description: pyridoxine biosynthesis protein-like [Arabidopsis
  misc_feature (1)..(309): Homolog of NCBI NO: 2501578 NR Description: ETHYLENE-INDUCIBLE PROTEIN HEVER
  misc_feature (2)..(309): Homolog of NCBI NO: 10719739 NR Description: putative pyridoxine biosynthetic enzyme
  misc_feature (1)..(309): Homolog of NCBI NO: 15224470 NR Description: SOR1 from the fungus Cercospora nicotianae
  misc_feature (2)..(309): Homolog of NCBI NO: 34394152 NR Description: putative ethylene-inducible protein [Oryza sativa
  misc_feature (1)..(309): Homolog of NCBI NO: 13310484 NR Description: Sor-like protein [Ginkgo biloba]
  misc_feature (2)..(309): Homolog of NCBI NO: 37530308 NR Description: putative pyridoxine/pyridoxal 5-phosphate
  misc_feature (19)..(307): Homolog of NCBI NO: 22970419 NR Description: hypothetical protein [Chloroflexus aurantiacus]
  misc_feature (14)..(307): Homolog of NCBI NO: 11359355 NR Description: pyridoxine biosynthesis protein pyroA [validated] Emericella nidulans >gi|5733986|gb|AAD49809.1|AF133101_1 PYROA

SEQ ID NO: 105657 - protein, 278 aa, Arabidopsis thaliana; identical to SEQ ID NO: 28174
  peptide (1)..(278): Ceres Seq. ID no. 13617700
  misc_feature (1)..(197): Pfam Name: SOR/SNZ family Pfam Description: SOR/SNZ family
  misc_feature (1)..(278): Homolog of NCBI NO: 15240972 NR Description: pyridoxine biosynthesis protein - like
  misc_feature (1)..(278): Homolog of NCBI NO: 21617922 NR Description: pyridoxine biosynthesis protein-like [Arabidopsis
  misc_feature (1)..(278): Homolog of NCBI NO: 2501578 NR Description: ETHYLENE-INDUCIBLE PROTEIN HEVER
  misc_feature (1)..(278): Homolog of NCBI NO: 10719739 NR Description: putative pyridoxine biosynthetic enzyme
  misc_feature (1)..(278): Homolog of NCBI NO: 15224470 NR Description: SOR1 from the fungus Cercospora nicotianae
  misc_feature (1)..(278): Homolog of NCBI NO: 34394152 NR Description: putative ethylene-inducible protein [Oryza sativa
  misc_feature (1)..(278): Homolog of NCBI NO: 13310484 NR Description: Sor-like protein [Ginkgo biloba]
  misc_feature (1)..(278): Homolog of NCBI NO: 37530308 NR Description: putative pyridoxine/pyridoxal 5-phosphate
  misc_feature (1)..(276): Homolog of NCBI NO: 22970419 NR Description: hypothetical protein [Chloroflexus aurantiacus]
  misc_feature (1)..(276): Homolog of NCBI NO: 11359355 NR Description: pyridoxine biosynthesis protein pyroA [validated] Emericella nidulans >gi|5733986|gb|AAD49809.1|AF133101_1 PYROA

SEQ ID NO: 105658 - protein, 271 aa, Arabidopsis thaliana; identical to SEQ ID NO: 28175
  peptide (1)..(271): Ceres Seq. ID no. 13617701
  misc_feature (1)..(190): Pfam Name: SOR/SNZ family Pfam Description: SOR/SNZ family
  misc_feature (1)..(271): Homolog of NCBI NO: 15240972 NR Description: pyridoxine biosynthesis protein - like
  misc_feature (1)..(271): Homolog of NCBI NO: 21617922 NR Description: pyridoxine biosynthesis protein-like [Arabidopsis
  misc_feature (1)..(271): Homolog of NCBI NO: 2501578 NR Description: ETHYLENE-INDUCIBLE PROTEIN HEVER
  misc_feature (1)..(271): Homolog of NCBI NO: 10719739 NR Description: putative pyridoxine biosynthetic enzyme
  misc_feature (1)..(271): Homolog of NCBI NO: 15224470 NR Description: SOR1 from the fungus Cercospora nicotianae
  misc_feature (1)..(271): Homolog of NCBI NO: 34394152 NR Description: putative ethylene-inducible protein [Oryza sativa
  misc_feature (1)..(271): Homolog of NCBI NO: 13310484 NR Description: Sor-like protein [Ginkgo biloba]
  misc_feature (1)..(271): Homolog of NCBI NO: 37530308 NR Description: putative pyridoxine/pyridoxal 5-phosphate
  misc_feature (1)..(269): Homolog of NCBI NO: 22970419 NR Description: hypothetical protein [Chloroflexus aurantiacus]
  misc_feature (1)..(269): Homolog of NCBI NO: 11359355 NR Description: pyridoxine biosynthesis protein pyroA [validated] Emericella nidulans >gi|5733986|gb|AAD49809.1|AF133101_1 PYROA

SEQ ID NO: 105659 - DNA, 1635 bp, Arabidopsis thaliana
  misc_feature (1)..(1635): Ceres Seq. ID no. 13617708
  misc_feature: MA Experiment ID: 108434 Result: Up-regulated in Transcription
  misc_feature: MA Experiment 108434 PARAMETER Experiment Name: At_Root_Tips_cDNA_P Parameter: Tissue Value: Root Tips
  misc_feature: MA Experiment ID: 108461 Result: Up-regulated in Transcription
  misc_feature: MA Experiment 108461 PARAMETER Experiment Name: At_Germinating_Seeds_cDNA_P Parameter: Age (day) Value: 1 vs. 0
  misc_feature: MA Experiment 108461 PARAMETER Experiment Name: At_Germinating_Seeds_cDNA_P Parameter: Tissue Value: Germinating Seeds
  misc_feature: MA Experiment ID: 108462 Result: Up-regulated in Transcription
  misc_feature: MA Experiment 108462 PARAMETER Experiment Name: At_Germinating_Seeds_cDNA_P Parameter: Age (day) Value: 2 vs. 0
  misc_feature: MA Experiment 108462 PARAMETER Experiment Name: At_Germinating_Seeds_cDNA_P Parameter: Tissue Value: Germinating Seeds
  misc_feature: MA Experiment ID: 20000069 Result: Down-regulated in Transcription
  misc_feature: MA Experiment 20000069 PARAMETER Experiment Name: At_100uM_ABA_Mutants_cDNA_P Parameter: Plant Line Value: CS23
  misc_feature: MA Experiment 20000069 PARAMETER Experiment Name: At_100uM_ABA_Mutants_cDNA_P Parameter: Timepoint (hr) Value: 6
  misc_feature: MA Experiment 20000069 PARAMETER Experiment Name: At_100uM_ABA_Mutants_cDNA_P Parameter: Tissue Value: Aerial
  misc_feature: MA Experiment 20000069 PARAMETER Experiment Name: At_100uM_ABA_Mutants_cDNA_P Parameter: Treatment Value: 100uM ABA vs. No Treatment
  misc_feature: MA Experiment ID: 20000070 Result: Down-regulated in Transcription
  misc_feature: MA Experiment 20000070 PARAMETER Experiment Name: At_100uM_ABA_Mutants_cDNA_P Parameter: Plant Line Value: CS24
  misc_feature: MA Experiment 20000070 PARAMETER Experiment Name: At_100uM_ABA_Mutants_cDNA_P Parameter: Timepoint (hr) Value: 6
  misc_feature: MA Experiment 20000070 PARAMETER Experiment Name: At_100uM_ABA_Mutants_cDNA_P Parameter: Tissue Value: Aerial
  misc_feature: MA Experiment 20000070 PARAMETER Experiment Name: At_100uM_ABA_Mutants_cDNA_P Parameter: Treatment Value: 100uM ABA vs. No Treatment
agggatgcaatagagccaagaggaggagaaagatgggatctggtaaacaaaacacgtcaaagtcaaattacaaatttatattttataaaacagataacaacaacaaattaaacttttattaatctctctctgcctctactcactggatcatcatagctccaaacttgtaccagtcgcatcaaagcaagttttggtgaagaagaagagacgaggtcttcctcttactgtggtggtgacattttctctaaaaagaaagtctccgatatgtcgcagagatggagtagaaagaagagtagacttccattagcgggtctcctctttattctcgttgtcacctttatgattctcttcaacgagcgtagcattcagcagatccatcaccacgccgcgagtcacactcaaaatctccgagaaccttccacgttcgatttcgtcaagcctaatgttcctcggattaactacttgggagctcatgaggttttggatagattcagcaaatgcaactcgacgaaagagtacagtgggaagaaaatcggatgggttgacccgtttgaagaccacccgggtcaagtaacaaaggaggagcagaaatgtgatgtcttttctgggaaatgggtctttgataattcatcatcataccctttacacaaggaatctcagtgtccttacatgtccgaccagttggcttgtcagaagcatggtaggaaggatttggagtatcagcattggagatggcaacctcatgcctgcaacttgaagagatggaatgcgatagaaatgtgggagaagctgagaggaaagagattgatgtttgttggagactcgttaaacagaggccaatggatttcaatggtttgtctcttacagtctgtcattccacgtgacaagcagtctatgtctcctaacgctcacctcaccattttcagggctgaggactacaatgccacagtggagtttctctgggcaccgttgctcgtggagtcgaattctgatgaccctgttaatcacagattgagcgagcggattatccgacccgattctgttcttaaacatgcatcaaagtggcaacatgctgatattctaatcttcaacacctacttatggtggagacaagactctgtcaagctccgatggagcagtgaagaaaaagggtcatgcgaggaggtgaagagcgccgagggaatggagatggcaatggatagttggggtgattgggttgctaacaatgtcgatccaaacaaaaagcgagttttcttcgttacaatgtctcctacacatcaatggagccgagaatggaacccgggaagcgaaggaaactgctacggggagaagaaaccaatagaggaagagagttattggggaagtgggtcggacattccgacaatgaggatggtgaagagagttttggagagattgggaccaaaggtctcagttataaacatcactcagttgtctgagtatcgaaaagatggtcatccatcggtgtaccggaaattctgggaacctctaaatgaagaccggttgaaaaacccggcatcgtattctgactgtactcattggtgtgtacctggagttcctgatgtctggaatcaattgcttttccattttttgtgaaaatgaaatgaatataacctt

SEQ ID NO: 105660 - protein, 449 aa, Arabidopsis thaliana; identical to SEQ ID NO: 38720
  peptide (1)..(449): Ceres Seq. ID no. 13617709
  misc_feature (280)..(449): Pfam Name: Arabidopsis proteins of unknown function Pfam Description: Arabidopsis proteins of unknown function
  misc_feature (1)..(449): Homolog of NCBI NO: 18413698 NR Description: expressed protein [Arabidopsis thaliana] expressed protein [Arabidopsis thaliana] unknown protein [Arabidopsis thaliana]
  misc_feature (1)..(449): Homolog of NCBI NO: 11291876 NR Description: hypothetical protein F7A7.140 - Arabidopsis >gi|7327821|emb|CAB82278.1| putative protein [Arabidopsis
  misc_feature (1)..(449): Homolog of NCBI NO: 21536676 NR Description: unknown [Arabidopsis thaliana]
  misc_feature (108)..(449): Homolog of NCBI NO: 7487161 NR Description: hypothetical protein At2g38320 [imported] -
  misc_feature (108)..(449): Homolog of NCBI NO: 18404712 NR Description: expressed protein [Arabidopsis thaliana] unknown protein [Arabidopsis thaliana]
  misc_feature (110)..(446): Homolog of NCBI NO: 28876013 NR Description: unknown protein [Oryza sativa (japonica
  misc_feature (103)..(446): Homolog of NCBI NO: 28393743 NR Description: unknown protein [Arabidopsis thaliana]
  misc_feature (103)..(446): Homolog of NCBI NO: 15226647 NR Description: expressed protein [Arabidopsis thaliana]
  misc_feature (103)..(446): Homolog of NCBI NO: 15228429 NR Description: expressed protein [Arabidopsis thaliana] unknown protein [Arabidopsis thaliana] unknown protein [Arabidopsis thaliana]
  misc_feature (103)..(449): Homolog of NCBI NO: 15219382 NR Description: hypothetical protein [Arabidopsis thaliana]

SEQ ID NO: 105661 - protein, 424 aa, Arabidopsis thaliana; identical to SEQ ID NO: 38721
  peptide (1)..(424): Ceres Seq. ID no. 13617710
  misc_feature (255)..(424): Pfam Name: Arabidopsis proteins of unknown function Pfam Description: Arabidopsis proteins of unknown function
  misc_feature (1)..(424): Homolog of NCBI NO: 18413698 NR Description: expressed protein [Arabidopsis thaliana] expressed protein [Arabidopsis thaliana] unknown protein [Arabidopsis thaliana]
  misc_feature (1)..(424): Homolog of NCBI NO: 11291876 NR Description: hypothetical protein F7A7.140 - Arabidopsis >gi|7327821|emb|CAB82278.1| putative protein [Arabidopsis
  misc_feature (1)..(424): Homolog of NCBI NO: 21536676 NR Description: unknown [Arabidopsis thaliana]
  misc_feature (83)..(424): Homolog of NCBI NO: 7487161 NR Description: hypothetical protein At2g38320 [imported] -
  misc_feature (83)..(424): Homolog of NCBI NO: 18404712 NR Description: expressed protein [Arabidopsis thaliana] unknown protein [Arabidopsis thaliana]
  misc_feature (85)..(421): Homolog of NCBI NO: 28876013 NR Description: unknown protein [Oryza sativa (japonica
  misc_feature (78)..(421): Homolog of NCBI NO: 28393743 NR Description: unknown protein [Arabidopsis thaliana]
  misc_feature (78)..(421): Homolog of NCBI NO: 15226647 NR Description: expressed protein [Arabidopsis thaliana]
  misc_feature (78)..(421): Homolog of NCBI NO: 15228429 NR Description: expressed protein [Arabidopsis thaliana] unknown protein [Arabidopsis thaliana] unknown protein [Arabidopsis thaliana]
  misc_feature (78)..(424): Homolog of NCBI NO: 15219382 NR Description: hypothetical protein [Arabidopsis thaliana]

SEQ ID NO: 105662 - protein, 314 aa, Arabidopsis thaliana; identical to SEQ ID NO: 38722
  peptide (1)..(314): Ceres Seq. ID no. 13617711
  misc_feature (145)..(314): Pfam Name: Arabidopsis proteins of unknown function Pfam Description: Arabidopsis proteins of unknown function
  misc_feature (1)..(314): Homolog of NCBI NO: 18413698 NR Description: expressed protein [Arabidopsis thaliana] expressed protein [Arabidopsis thaliana] unknown protein [Arabidopsis thaliana]
  misc_feature (1)..(314): Homolog of NCBI NO: 11291876 NR Description: hypothetical protein F7A7.140 - Arabidopsis >gi|7327821|emb|CAB82278.1| putative protein [Arabidopsis
  misc_feature (1)..(314): Homolog of NCBI NO: 21536676 NR Description: unknown [Arabidopsis thaliana]
  misc_feature (1)..(314): Homolog of NCBI NO: 7487161 NR Description: hypothetical protein At2g38320 [imported] -
  misc_feature (1)..(314): Homolog of NCBI NO: 18404712 NR Description: expressed protein [Arabidopsis thaliana] unknown protein [Arabidopsis thaliana]
  misc_feature (1)..(311): Homolog of NCBI NO: 28876013 NR Description: unknown protein [Oryza sativa (japonica
  misc_feature (1)..(311): Homolog of NCBI NO: 28393743 NR Description: unknown protein [Arabidopsis thaliana]
  misc_feature (1)..(311): Homolog of NCBI NO: 15226647 NR Description: expressed protein [Arabidopsis thaliana]
  misc_feature (1)..(311): Homolog of NCBI NO: 15228429 NR Description: expressed protein [Arabidopsis thaliana] unknown protein [Arabidopsis thaliana] unknown protein [Arabidopsis thaliana]
  misc_feature (1)..(314): Homolog of NCBI NO: 15219382 NR Description: hypothetical protein [Arabidopsis thaliana]

SEQ ID NO: 105663 - DNA, 2115 bp, Arabidopsis thaliana
  misc_feature (1)..(2115): Ceres Seq. ID no. 13617712
  misc_feature: MA Experiment ID: 108434 Result: Down-regulated in Transcription
  misc_feature: MA Experiment 108434 PARAMETER Experiment Name: At_Root_Tips_cDNA_P Parameter: Tissue Value: Root Tips
  misc_feature: MA Experiment ID: 108569 Result: Down-regulated in Transcription
  misc_feature: MA Experiment 108569 PARAMETER Experiment Name: At_0.001%_MeJA__cDNA_P Parameter: Timepoint (hr) Value: 6
  misc_feature: MA Experiment 108569 PARAMETER Experiment Name: At_0.001%_MeJA__cDNA_P Parameter: Tissue Value: Aerial
  misc_feature: MA Experiment 108569 PARAMETER Experiment Name: At_0.001%_MeJA__cDNA_P Parameter: Treatment Value: 0.001% MeJA vs. No Treatment
  misc_feature: MA Experiment ID: 108595 Result: Up-regulated in Transcription
  misc_feature: MA Experiment 108595 PARAMETER Experiment Name: At_Ler-pi_Ovule_cDNA_P Parameter: Plant Line Value: null
  misc_feature: MA Experiment ID: 20000087 Result: Up-regulated in Transcription
  misc_feature: MA Experiment 20000087 PARAMETER Experiment Name: At_100uM_ABA_Mutants_cDNA_P Parameter: Plant Line Value: WS
  misc_feature: MA Experiment 20000087 PARAMETER Experiment Name: At_100uM_ABA_Mutants_cDNA_P Parameter: Timepoint (hr) Value: 6
  misc_feature: MA Experiment 20000087 PARAMETER Experiment Name: At_100uM_ABA_Mutants_cDNA_P Parameter: Tissue Value: Aerial
  misc_feature: MA Experiment 20000087 PARAMETER Experiment Name: At_100uM_ABA_Mutants_cDNA_P Parameter: Treatment Value: 100uM ABA vs. No Treatment
  misc_feature: MA Experiment ID: 20000111 Result: Up-regulated in Transcription
  misc_feature: MA Experiment 20000111 PARAMETER Experiment Name: At_42deg_Heat_cDNA_P Parameter: Temperature (deg C) Value: 42 vs. 22
  misc_feature: MA Experiment 20000111 PARAMETER Experiment Name: At_42deg_Heat_cDNA_P Parameter: Timepoint (hr) Value: 6
  misc_feature: MA Experiment 20000111 PARAMETER Experiment Name: At_42deg_Heat_cDNA_P Parameter: Tissue Value: Aerial
  misc_feature: MA Experiment ID: 20000171 Result: Down-regulated in Transcription
  misc_feature: MA Experiment 20000171 PARAMETER Experiment Name: At_42deg_Heat_P Parameter: Age (day) Value: 14
  misc_feature: MA Experiment 20000171 PARAMETER Experiment Name: At_42deg_Heat_P Parameter: Organism Value: A. thaliana
  misc_feature: MA Experiment 20000171 PARAMETER Experiment Name: At_42deg_Heat_P Parameter: Plant Line Value: WS
  misc_feature: MA Experiment 20000171 PARAMETER Experiment Name: At_42deg_Heat_P Parameter: Temperature (deg C) Value: 42 vs. 22
  misc_feature: MA Experiment 20000171 PARAMETER Experiment Name: At_42deg_Heat_P Parameter: Timepoint (hr) Value: 1
  misc_feature: MA Experiment 20000171 PARAMETER Experiment Name: At_42deg_Heat_P Parameter: Tissue Value: Aerial
  misc_feature: MA Experiment ID: 20000224 Result: Down-regulated in Transcription
  misc_feature: MA Experiment ID: 20001557 Result: Up-regulated in Transcription
  misc_feature: MA Experiment 20001557 PARAMETER Experiment Name: At_Drought_Soil_Dry_P Parameter: Age (day) Value: 27
  misc_feature: MA Experiment 20001557 PARAMETER Experiment Name: At_Drought_Soil_Dry_P Parameter: Organism Value: A. thaliana
  misc_feature: MA Experiment 20001557 PARAMETER Experiment Name: At_Drought_Soil_Dry_P Parameter: Plant Line Value: WS
  misc_feature: MA Experiment 20001557 PARAMETER Experiment Name: At_Drought_Soil_Dry_P Parameter: Post Timepoint (hr) Value: 3
  misc_feature: MA Experiment 20001557 PARAMETER Experiment Name: At_Drought_Soil_Dry_P Parameter: Post-Treatment Value: Re-Water vs. No Drought
  misc_feature: MA Experiment 20001557 PARAMETER Experiment Name: At_Drought_Soil_Dry_P Parameter: Timepoint (day) Value: 13
  misc_feature: MA Experiment 20001557 PARAMETER Experiment Name: At_Drought_Soil_Dry_P Parameter: Treatment Value: Drought vs. No Drought
ctcttttccgattcctctcaatctctctttcttcttctttttctctcgctccaaattccatgtctgtgtctctttcctcctccgccgtataattcgccggaaaaattatctccctttgattttcgaacacctccgcgaactatgcgcttcttttgcccttatcctccaactacttgtcggatctgcaattcttcttgtcaattcccaaccctaatcggagctaatcacacctctgctcgtttctcttctcgttagtctctgctccatctcctcctcagatttagggatatttgcttccaatttaacaaacaaaccaagagctattctttcgttctttattctctccgtcttgtaaagtagttttagcagtgagatacatacaaatggagacttccatggggaaacccagcttcttacggaatataatggttcgcgtgcttctctttggtgttcttatcatcgttgtgagatttgcttatgttgtcaccatcaccggtgaatcatgcaatcgcggcgacttctgcttcttctctctccctgagaatctcaactttgtcatctccggtgctgcctccggctcttctgctatcgacgccatcagatctacttcccctggggatgatctctacaccaccagggattggatcaaatccgttcagttttactcctccatcttccaggatctgatcgccgacggttatctatcgcctgaatcgaagacgctttgtgtagagacggcgattggacaagaggttcactcgctcagagagattggggtgaagaactccgtcgggatctctaagaaagcttctaggccgttggtggttagaggcgagggacatgctattccctttgaggataacgctttcgattttgtattctccggtggtgaccgccttgggaagtcgttgaagcagttggaattcgccgatgagattactcgaacactgaaacccgaagggtttgcggtggttcatgttggggctacagatacgtacagtttcaattcattccttgatttgtttaattcttgcagattggtgaagatgcgtgatatcgatggttttgatccttcgatgcctcatatcagagaatttgttattcagaaatactcagagattgatggtggtggtcatcaccaccgtggtggtggtgattctggtggaaagtgctggattccgggttacaaaagagatttgattcgggatgcagagccactgattcaagaggagcctcttaagccatggattacacttaagaggaacatcaagaatattaaatatgtgccttctatggttgatatacgtttcaagagtagatacgtttacgttgatgttggtgctagaagttatggatccagtattgggagttggttcaagaaagagtaccctaagcagaacaaaacttttgatgttttcgccattgaggctgacaaagcctttcacgaagagtataagataaagaagaaggtgaacctgttgccatacgcagcgtgggtgaggaacgagacgttatcgtttgagatcaatcacgatccgggaaaggaagtggaagccaaagcaaagggcagggggatgggcagaatccagccggttaaaaagtctgactcgagtgacttagctggagaggtgaatttgattcaagggtttgatttcgctgactggttgaagaagagtgtgagagagagggactttgttgtgatgaagatggatgttgaaggaaccgaattcgatctgatcccgaggctaatcaagacaggagcgatttgtctaatagatgagttgttccttgaatgccattacaacaggtggcagagatgttgtcctggtcaaaggagccaaaagtacaacaagacttataaccaatgcttagagctcttcaattcgctcagacaaagaggggtgcttgtccatcaatggtggtaatggttaggatgctgcataaaagtctccttcttctatgcatttggtgaaaaatgtactttcttcttctagaatatataaagcgggatattgtaggtttctattaaaaatacgttgtctgtgctgaaattcccttttactgtaagaaaaaagaagtttagctttaaatggaaatttgagtttcttttacgct

SEQ ID NO: 105664 - protein, 513 aa, Arabidopsis thaliana; identical to SEQ ID NO: 42328
  peptide (1)..(513): Ceres Seq. ID no. 13617713
  misc_feature (1)..(513): Homolog of NCBI NO: 15241038 NR Description: expressed protein [Arabidopsis thaliana]
  misc_feature (60)..(513): Homolog of NCBI NO: 34898214 NR Description: P0034A04.18 [Oryza sativa (japonica >gi|29837178|dbj|BAC75560.1| hypothetical protein [Oryza sativa
  misc_feature (81)..(228): Homolog of NCBI NO: 22328908 NR Description: expressed protein [Arabidopsis thaliana] unknown protein [Arabidopsis thaliana]
  misc_feature (81)..(228): Homolog of NCBI NO: 15221752 NR Description: hypothetical protein [Arabidopsis thaliana]
  misc_feature (81)..(228): Homolog of NCBI NO: 25403245 NR Description: protein F21J9.14 [imported] - Arabidopsis >gi|9743354|gb|AAF97978.1|AC000103_28 F21J9.14 [Arabidopsis
  misc_feature (81)..(228): Homolog of NCBI NO: 7486528 NR Description: hypothetical protein F6I7.10 - Arabidopsis >gi|4678259|emb|CAB41120.1| putative protein [Arabidopsis >gi|7269331|emb|CAB79390.1| putative protein [Arabidopsis
  misc_feature (271)..(357): Homolog of NCBI NO: 15231806 NR Description: expressed protein [Arabidopsis thaliana]
  misc_feature (422)..(471): Homolog of NCBI NO: 15231806 NR Description: expressed protein [Arabidopsis thaliana]
  misc_feature (492)..(513): Homolog of NCBI NO: 15231806 NR Description: expressed protein [Arabidopsis thaliana]
  misc_feature (396)..(513): Homolog of NCBI NO: 34906802 NR Description: contains ESTs Arabidopsis thaliana chromosome 1 T15M6.13~unknown protein [Oryza

SEQ ID NO: 105665 - protein, 509 aa, Arabidopsis thaliana; identical to SEQ ID NO: 42329
  peptide (1)..(509): Ceres Seq. ID no. 13617714
  misc_feature (1)..(509): Homolog of NCBI NO: 15241038 NR Description: expressed protein [Arabidopsis thaliana]
  misc_feature (56)..(509): Homolog of NCBI NO: 34898214 NR Description: P0034A04.18 [Oryza sativa (japonica >gi|29837178|dbj|BAC75560.1| hypothetical protein [Oryza sativa
  misc_feature (77)..(224): Homolog of NCBI NO: 22328908 NR Description: expressed protein [Arabidopsis thaliana] unknown protein [Arabidopsis thaliana]
  misc_feature (77)..(224): Homolog of NCBI NO: 15221752 NR Description: hypothetical protein [Arabidopsis thaliana]
  misc_feature (77)..(224): Homolog of NCBI NO: 25403245 NR Description: protein F21J9.14 [imported] - Arabidopsis >gi|9743354|gb|AAF97978.1|AC000103_28 F21J9.14 [Arabidopsis
  misc_feature (77)..(224): Homolog of NCBI NO: 7486528 NR Description: hypothetical protein F6I7.10 - Arabidopsis >gi|4678259|emb|CAB41120.1| putative protein [Arabidopsis >gi|7269331|emb|CAB79390.1| putative protein [Arabidopsis
  misc_feature (267)..(353): Homolog of NCBI NO: 15231806 NR Description: expressed protein [Arabidopsis thaliana]
  misc_feature (418)..(467): Homolog of NCBI NO: 15231806 NR Description: expressed protein [Arabidopsis thaliana]
  misc_feature (488)..(509): Homolog of NCBI NO: 15231806 NR Description: expressed protein [Arabidopsis thaliana]
  misc_feature (392)..(509): Homolog of NCBI NO: 34906802 NR Description: contains ESTs Arabidopsis thaliana chromosome 1 T15M6.13~unknown protein [Oryza

SEQ ID NO: 105666 - protein, 499 aa, Arabidopsis thaliana; identical to SEQ ID NO: 42330
  peptide (1)..(499): Ceres Seq. ID no. 13617715
  misc_feature (1)..(499): Homolog of NCBI NO: 15241038 NR Description: expressed protein [Arabidopsis thaliana]
  misc_feature (46)..(499): Homolog of NCBI NO: 34898214 NR Description: P0034A04.18 [Oryza sativa (japonica >gi|29837178|dbj|BAC75560.1| hypothetical protein [Oryza sativa
  misc_feature (67)..(214): Homolog of NCBI NO: 22328908 NR Description: expressed protein [Arabidopsis thaliana] unknown protein [Arabidopsis thaliana]
  misc_feature (67)..(214): Homolog of NCBI NO: 15221752 NR Description: hypothetical protein [Arabidopsis thaliana]
  misc_feature (67)..(214): Homolog of NCBI NO: 25403245 NR Description: protein F21J9.14 [imported] - Arabidopsis >gi|9743354|gb|AAF97978.1|AC000103_28 F21J9.14 [Arabidopsis
  misc_feature (67)..(214): Homolog of NCBI NO: 7486528 NR Description: hypothetical protein F6I7.10 - Arabidopsis >gi|4678259|emb|CAB41120.1| putative protein [Arabidopsis >gi|7269331|emb|CAB79390.1| putative protein [Arabidopsis
  misc_feature (257)..(343): Homolog of NCBI NO: 15231806 NR Description: expressed protein [Arabidopsis thaliana]
  misc_feature (408)..(457): Homolog of NCBI NO: 15231806 NR Description: expressed protein [Arabidopsis thaliana]
  misc_feature (478)..(499): Homolog of NCBI NO: 15231806 NR Description: expressed protein [Arabidopsis thaliana]
  misc_feature (382)..(499): Homolog of NCBI NO: 34906802 NR Description: contains ESTs Arabidopsis thaliana chromosome 1 T15M6.13~unknown protein [Oryza

SEQ ID NO: 105667 - DNA, 1728 bp, Arabidopsis thaliana
  misc_feature (1)..(1728): Ceres Seq. ID no. 13617720
  misc_feature: MA Experiment ID: 108561 Result: Up-regulated in Transcription
  misc_feature: MA Experiment 108561 PARAMETER Experiment Name: At_100uM_ABA_cDNA_P Parameter: Timepoint (hr) Value: 6
  misc_feature: MA Experiment 108561 PARAMETER Experiment Name: At_100uM_ABA_cDNA_P Parameter: Tissue Value: Aerial
  misc_feature: MA Experiment 108561 PARAMETER Experiment Name: At_100uM_ABA_cDNA_P Parameter: Treatment Value: 100uM ABA vs. No Treatment
  misc_feature: MA Experiment ID: 108572 Result: Down-regulated in Transcription
  misc_feature: MA Experiment 108572 PARAMETER Experiment Name: At_Drought_cDNA_P Parameter: Timepoint (hr) Value: 1
  misc_feature: MA Experiment 108572 PARAMETER Experiment Name: At_Drought_cDNA_P Parameter: Tissue Value: Aerial
  misc_feature: MA Experiment 108572 PARAMETER Experiment Name: At_Drought_cDNA_P Parameter: Treatment Value: Drought vs. No Drought
  misc_feature: MA Experiment ID: 108576 Result: Down-regulated in Transcription
  misc_feature: MA Experiment 108576 PARAMETER Experiment Name: At_42deg_Heat_cDNA_P Parameter: Temperature (deg C) Value: 42 vs. 22
  misc_feature: MA Experiment 108576 PARAMETER Experiment Name: At_42deg_Heat_cDNA_P Parameter: Timepoint (hr) Value: 1
  misc_feature: MA Experiment 108576 PARAMETER Experiment Name: At_42deg_Heat_cDNA_P Parameter: Tissue Value: Aerial
  misc_feature: MA Experiment ID: 108579 Result: Down-regulated in Transcription
  misc_feature: MA Experiment 108579 PARAMETER Experiment Name: At_4deg_Cold_cDNA_P Parameter: Temperature (deg C) Value: 4 vs. 22
  misc_feature: MA Experiment 108579 PARAMETER Experiment Name: At_4deg_Cold_cDNA_P Parameter: Timepoint (hr) Value: 6
  misc_feature: MA Experiment 108579 PARAMETER Experiment Name: At_4deg_Cold_cDNA_P Parameter: Tissue Value: Aerial
  misc_feature: MA Experiment ID: 108595 Result: Down-regulated in Transcription
  misc_feature: MA Experiment 108595 PARAMETER Experiment Name: At_Ler-pi_Ovule_cDNA_P Parameter: Plant Line Value: null
attttctctcaattcctcgcagctgaagctatttggcatatacttgtcttcgcttttcgtagctctttcgcgcataataataactgaggttgttgtttaatcaagaagagtgtgcaaaaattggaaggccagggaatgcagaaacatgtatttgaaagctgaactcaattgctctacaccaccctctcagatcctttgtccctttgggcccttgttctccctcatcccttatgtggacacccattttctaaacccctgcttccacaccttccagccttcctctcacaatgctagaaaaaacgccacttggaagcatgatctttgcgaagacggttgatccgacactaacagcctcctcctgagttcctcctctaccctttatgttgtctgcgttttagtatattctagggtggtctttttatttagtggtattagtagtgctctaagctaaccagttagtcaatggagaagaaaggatctgtgttgatgctccgttatgaggttgggaagtttctcggtcaaggtacctttgctaaggtataccatgctaggcatttgaaaactggtgatagtgtagcgattaaggtcatcgacaaagaaagaatcctcaaagttggcatgaccgagcagattaagcgagagatctctgccatgagactcttgaggcatcccaacatcgttgagctccatgaagtcatggccaccaaatctaaaatctacttcgtcatggaacatgttaagggtggtgagctcttcaacaaagtgtcaactgggaagctgagagaagacgttgcgagaaagtactttcagcagcttgtacgcgctgttgacttctgtcacagccgtggagtatgccacagggacctgaagccggagaatctcttgttggatgagcatgggaatcttaagatctctgattttggtctcagcgctctttctgactctagaaggcaagacgggttgctgcatactacatgcgggacccctgcatatgttgcaccggaggtgataagcaggaacgggtatgatgggtttaaagcggatgtgtggtcctgtggagtgatattgttcgtcttgctcgctggatatcttcctttccgtgattccaatctgatggagctgtataagaagataggcaaagctgaagtcaagttccccaactggcttgctccgggggcaaagagattgctcaagaggatcttggatcctaaccccaacacaagggtatcaactgagaaaataatgaagagctcttggttccgtaaaggcctacaagaggaggtgaaagaatcagttgaggaagagacagaagtggacgcagaggcagagggaaacgcaagtgcagagaaggaaaagaagcggtgtatcaacctgaacgcgtttgagatcatatctctgtccacggggtttgatctctcgggactgttcgagaagggagaggagaaggaggagatgaggtttacatcaaacagagaggcatctgagataacagagaagctggtggagattgggaaggaccttaagatgaaagtgaggaagaaggaacacgaatggagggtgaaaatgtcggctgaggctacagtggtggaagcggaagtgtttgagattgcgccgagctatcacatggtggtgctaaagaagagcggtggagatactgctgagtataagagagtcatgaaggagagtataagaccggctttgatcgactttgtattagcttggcactga

SEQ ID NO: 105668 - protein, 421 aa, Arabidopsis thaliana; identical to SEQ ID NO: 85000
  peptide (1)..(421): Ceres Seq. ID no. 13617721
  misc_feature (12)..(266): Pfam Name: Protein kinase domain Pfam Description: Protein kinase domain
  misc_feature (1)..(421): Homolog of NCBI NO: 15241066 NR Description: CBL-interacting protein kinase 15 [Arabidopsis
  misc_feature (1)..(421): Homolog of NCBI NO: 1777312 NR Description: novel serine/threonine protein kinase
  misc_feature (2)..(420): Homolog of NCBI NO: 33146431 NR Description: putative Serine/threonine Kinase [Oryza sativa
  misc_feature (1)..(420): Homolog of NCBI NO: 23428550 NR Description: Serine/threonine Kinase [Persea americana]
  misc_feature (1)..(420): Homolog of NCBI NO: 8777339 NR Description: serine/threonine protein kinase [Arabidopsis
  misc_feature (1)..(420): Homolog of NCBI NO: 9280636 NR Description: CBL-interacting protein kinase 2 [Arabidopsis
  misc_feature (1)..(420): Homolog of NCBI NO: 15240687 NR Description: CBL-interacting protein kinase 2 [Arabidopsis
  misc_feature (1)..(290): Homolog of NCBI NO: 18424099 NR Description: CBL-interacting protein kinase 10 [Arabidopsis
  misc_feature (303)..(420): Homolog of NCBI NO: 18424099 NR Description: CBL-interacting protein kinase 10 [Arabidopsis
  misc_feature (1)..(420): Homolog of NCBI NO: 34903780 NR Description: unnamed protein product [Oryza sativa (japonica group)] >gi|7340882|dbj|BAA92972.1| unnamed protein product

SEQ ID NO: 105669 - protein, 413 aa, Arabidopsis thaliana; identical to SEQ ID NO: 85001
  peptide (1)..(413): Ceres Seq. ID no. 13617722
  misc_feature (4)..(258): Pfam Name: Protein kinase domain Pfam Description: Protein kinase domain
  misc_feature (1)..(413): Homolog of NCBI NO: 15241066 NR Description: CBL-interacting protein kinase 15 [Arabidopsis
  misc_feature (1)..(413): Homolog of NCBI NO: 1777312 NR Description: novel serine/threonine protein kinase
  misc_feature (1)..(412): Homolog of NCBI NO: 33146431 NR Description: putative Serine/threonine Kinase [Oryza sativa
  misc_feature (1)..(412): Homolog of NCBI NO: 23428550 NR Description: Serine/threonine Kinase [Persea americana]
  misc_feature (1)..(412): Homolog of NCBI NO: 8777339 NR Description: serine/threonine protein kinase [Arabidopsis
  misc_feature (1)..(412): Homolog of NCBI NO: 9280636 NR Description: CBL-interacting protein kinase 2 [Arabidopsis
  misc_feature (1)..(412): Homolog of NCBI NO: 15240687 NR Description: CBL-interacting protein kinase 2 [Arabidopsis
  misc_feature (1)..(282): Homolog of NCBI NO: 18424099 NR Description: CBL-interacting protein kinase 10 [Arabidopsis
  misc_feature (295)..(412): Homolog of NCBI NO: 18424099 NR Description: CBL-interacting protein kinase 10 [Arabidopsis
  misc_feature (1)..(412): Homolog of NCBI NO: 34903780 NR Description: unnamed protein product [Oryza sativa (japonica group)] >gi|7340882|dbj|BAA92972.1| unnamed protein product

SEQ ID NO: 105670 - protein, 369 aa, Arabidopsis thaliana; identical to SEQ ID NO: 85002
  peptide (1)..(369): Ceres Seq. ID no. 13617723
  misc_feature (1)..(214): Pfam Name: Protein kinase domain Pfam Description: Protein kinase domain
  misc_feature (1)..(369): Homolog of NCBI NO: 15241066 NR Description: CBL-interacting protein kinase 15 [Arabidopsis
  misc_feature (1)..(369): Homolog of NCBI NO: 1777312 NR Description: novel serine/threonine protein kinase
  misc_feature (1)..(368): Homolog of NCBI NO: 33146431 NR Description: putative Serine/threonine Kinase [Oryza sativa
  misc_feature (1)..(368): Homolog of NCBI NO: 23428550 NR Description: Serine/threonine Kinase [Persea americana]
  misc_feature (1)..(368): Homolog of NCBI NO: 8777339 NR Description: serine/threonine protein kinase [Arabidopsis
  misc_feature (1)..(368): Homolog of NCBI NO: 9280636 NR Description: CBL-interacting protein kinase 2 [Arabidopsis
  misc_feature (1)..(368): Homolog of NCBI NO: 15240687 NR Description: CBL-interacting protein kinase 2 [Arabidopsis
  misc_feature (1)..(238): Homolog of NCBI NO: 18424099 NR Description: CBL-interacting protein kinase 10 [Arabidopsis
  misc_feature (251)..(368): Homolog of NCBI NO: 18424099 NR Description: CBL-interacting protein kinase 10 [Arabidopsis
  misc_feature (1)..(368): Homolog of NCBI NO: 34903780 NR Description: unnamed protein product [Oryza sativa (japonica group)] >gi|7340882|dbj|BAA92972.1| unnamed protein product

SEQ ID NO: 105671 - DNA, 1217 bp, Arabidopsis thaliana
  misc_feature (1)..(1217): Ceres Seq. ID no. 13617736
  misc_feature: MA Experiment ID: 108488 Result: Down-regulated in Transcription
  misc_feature: MA Experiment ID: 108573 Result: Up-regulated in Transcription
  misc_feature: MA Experiment 108573 PARAMETER Experiment Name: At_Drought_cDNA_P Parameter: Timepoint (hr) Value: 6
  misc_feature: MA Experiment 108573 PARAMETER Experiment Name: At_Drought_cDNA_P Parameter: Tissue Value: Aerial
  misc_feature: MA Experiment 108573 PARAMETER Experiment Name: At_Drought_cDNA_P Parameter: Treatment Value: Drought vs. No Drought
  misc_feature: MA Experiment ID: 108585 Result: Up-regulated in Transcription
  misc_feature: MA Experiment 108585 PARAMETER Experiment Name: At_5mM_NaNP_cDNA_P Parameter: Timepoint (hr) Value: 6
  misc_feature: MA Experiment 108585 PARAMETER Experiment Name: At_5mM_NaNP_cDNA_P Parameter: Tissue Value: Aerial
  misc_feature: MA Experiment 108585 PARAMETER Experiment Name: At_5mM_NaNP_cDNA_P Parameter: Treatment Value: null
  misc_feature: MA Experiment ID: 108668 Result: Up-regulated in Transcription
  misc_feature: MA Experiment 108668 PARAMETER Experiment Name: At_2mM_SA_cDNA_P Parameter: Plant Line Value: WS
  misc_feature: MA Experiment 108668 PARAMETER Experiment Name: At_2mM_SA_cDNA_P Parameter: Timepoint (hr) Value: 6
  misc_feature: MA Experiment 108668 PARAMETER Experiment Name: At_2mM_SA_cDNA_P Parameter: Treatment Value: 2mM SA vs. No Treatment
  misc_feature: MA Experiment ID: 20000113 Result: Down-regulated in Transcription
  misc_feature: MA Experiment 20000113 PARAMETER Experiment Name: At_42deg_Heat_cDNA_P Parameter: Temperature (deg C) Value: 42 vs. 22
  misc_feature: MA Experiment 20000113 PARAMETER Experiment Name: At_42deg_Heat_cDNA_P Parameter: Timepoint (hr) Value: 8
  misc_feature: MA Experiment 20000113 PARAMETER Experiment Name: At_42deg_Heat_cDNA_P Parameter: Tissue Value: Aerial
  misc_feature: MA Experiment ID: 20000182 Result: Up-regulated in Transcription
  misc_feature: MA Experiment 20000182 PARAMETER Experiment Name: At_2mM_SA_P Parameter: Age (day) Value: 14
  misc_feature: MA Experiment 20000182 PARAMETER Experiment Name: At_2mM_SA_P Parameter: Organism Value: A. thaliana
  misc_feature: MA Experiment 20000182 PARAMETER Experiment Name: At_2mM_SA_P Parameter: Plant Line Value: WS
  misc_feature: MA Experiment 20000182 PARAMETER Experiment Name: At_2mM_SA_P Parameter: Timepoint (hr) Value: 6
  misc_feature: MA Experiment 20000182 PARAMETER Experiment Name: At_2mM_SA_P Parameter: Tissue Value: Aerial
  misc_feature: MA Experiment 20000182 PARAMETER Experiment Name: At_2mM_SA_P Parameter: Treatment Value: 2mM SA vs. No Treatment
  misc_feature: MA Experiment ID: 20000227 Result: Down-regulated in Transcription
  misc_feature: MA Experiment 20000227 PARAMETER Experiment Name: At_Root-Tips-vs-Tops_P Parameter: Tissue Value: Root Tips vs. Root Tops
  misc_feature: MA Experiment ID: 20000437 Result: Up-regulated in Transcription
  misc_feature: MA Experiment 20000437 PARAMETER Experiment Name: At_Drought_P Parameter: Age (day) Value: 8
  misc_feature: MA Experiment 20000437 PARAMETER Experiment Name: At_Drought_P Parameter: Organism Value: A. thaliana
  misc_feature: MA Experiment 20000437 PARAMETER Experiment Name: At_Drought_P Parameter: Plant Line Value: WS
  misc_feature: MA Experiment 20000437 PARAMETER Experiment Name: At_Drought_P Parameter: Timepoint (hr) Value: 24
  misc_feature: MA Experiment 20000437 PARAMETER Experiment Name: At_Drought_P Parameter: Tissue Value: Whole Plant
  misc_feature: MA Experiment 20000437 PARAMETER Experiment Name: At_Drought_P Parameter: Treatment Value: Drought vs. No Drought
gaaaaccagactaaagggcagaaacgtcatttgacaaaaagaaggatgattctctccttcctctttccccaatgcaaagaaaaagcattatagacttttcaagttttccgatataagcacgaaatcgctgtttctctcttcgacgaagctttgataatttgatctcaatcgatcgattctattgagaatttgtgtacctgttttcttataaggttaactaaggattgtggaatcagaagtgttgtgtttttgtgatcggagattatggattggggaaacgtaacggttgatgatctcttcgatgctctccgagaagttgactggtcgtctccgccgcgtcctccgtctgagttcttctcaaggttcaccgttcctaaatctgtccctaaatgggatagtcgcctcaagtgcaatctctactactaccgaacaaactatttcatcatgatcgtcgttatacttggattgggagtccttacaaggcctttagcgatcttcgctgcgcttttgacagcattaagtttggcatttctaaatgacagctttgcaggttcttttagtgagaaggcgacacgaaccgtcagaagattctctccacagttagctgctaaaatgagacctcctttgacacctgtcactcgtgggcgtccatcatcaaagagagcaatccatgtatgtggtcaaccccgttgggtttttgtcttgacatgctcacttgtgagttttgctctttggtatatttcctctggtttgctcagagtctcggttgcgctactcattgcacatcttgcaacaattcttcatgcaagcttgagaacaccgaacttgaaggcacgttttaacacatttagggaggaattccgagcagtatggcgtaactacagcgagatttagagtaattctttggcagcttgtaccaccatgatcgtgttctgctgaggacataacgctgtaaagaccaaacttactgcctttctccaagataaacccggtttcgttaacactgtactatggatgttcaatctggatttgttgctcaatgactgggatcatctgttttttctttgatttgagatttgagctctgagctctttttgctagcaaaatcctctcttttttttgctaaagacttgtaaagctagctttgttgttcttcgttctaacacaaaaccctttgtgtaaagtcctagaatcgtttaatagcttgcatttttttc

SEQ ID NO: 105672 - protein, 209 aa, Arabidopsis thaliana; identical to SEQ ID NO: 30712
  peptide (1)..(209): Ceres Seq. ID no. 13617737
  misc_feature (1)..(209): Homolog of NCBI NO: 15241668 NR Description: expressed protein [Arabidopsis thaliana]
  misc_feature (1)..(209): Homolog of NCBI NO: 21553976 NR Description: unknown [Arabidopsis thaliana]
  misc_feature (1)..(161): Homolog of NCBI NO: 15810043 NR Description: AT5g02040/T7H20_90 [Arabidopsis thaliana]
  misc_feature (1)..(209): Homolog of NCBI NO: 30681215 NR Description: prenylated rab acceptor (PRA1) family thaliana] >gi|26452890|dbj|BAC43523.1| unknown protein thaliana] >gi|28973353|gb|AAO64001.1| unknown protein
  misc_feature (1)..(209): Homolog of NCBI NO: 18087519 NR Description: At3g11395 [Arabidopsis thaliana]
  misc_feature (1)..(209): Homolog of NCBI NO: 22330987 NR Description: CHP-rich zinc finger protein -related
  misc_feature (1)..(175): Homolog of NCBI NO: 34908286 NR Description: P0005H10.15 [Oryza sativa (japonica

SEQ ID NO: 105673 - protein, 149 aa, Arabidopsis thaliana; identical to SEQ ID NO: 30713
  peptide (1)..(149): Ceres Seq. ID no. 13617738
  misc_feature (1)..(149): Homolog of NCBI NO: 15241668 NR Description: expressed protein [Arabidopsis thaliana]
  misc_feature (1)..(149): Homolog of NCBI NO: 21553976 NR Description: unknown [Arabidopsis thaliana]
  misc_feature (1)..(101): Homolog of NCBI NO: 15810043 NR Description: AT5g02040/T7H20_90 [Arabidopsis thaliana]
  misc_feature (1)..(149): Homolog of NCBI NO: 30681215 NR Description: prenylated rab acceptor (PRA1) family thaliana] >gi|26452890|dbj|BAC43523.1| unknown protein thaliana] >gi|28973353|gb|AAO64001.1| unknown protein
  misc_feature (1)..(149): Homolog of NCBI NO: 18087519 NR Description: At3g11395 [Arabidopsis thaliana]
  misc_feature (1)..(149): Homolog of NCBI NO: 22330987 NR Description: CHP-rich zinc finger protein -related
  misc_feature (1)..(115): Homolog of NCBI NO: 34908286 NR Description: P0005H10.15 [Oryza sativa (japonica

SEQ ID NO: 105674 - DNA, 2007 bp, Arabidopsis thaliana
  misc_feature (1)..(2007): Ceres Seq. ID no. 13617745
  misc_feature: MA Experiment ID: 20000451 Result: Down-regulated in Transcription
  misc_feature: MA Experiment 20000451 PARAMETER Experiment Name: At_CS6879_Shoots-Roots_P Parameter: Age (day) Value: 14
  misc_feature: MA Experiment 20000451 PARAMETER Experiment Name: At_CS6879_Shoots-Roots_P Parameter: Organism Value: A. thaliana
  misc_feature: MA Experiment 20000451 PARAMETER Experiment Name: At_CS6879_Shoots-Roots_P Parameter: Plant Line Value: CS6879 vs. WS
  misc_feature: MA Experiment 20000451 PARAMETER Experiment Name: At_CS6879_Shoots-Roots_P Parameter: Tissue Value: Roots
  misc_feature: MA Experiment ID: 20000794 Result: Down-regulated in Transcription
  misc_feature: MA Experiment 20000794 PARAMETER Experiment Name: At_Petals_P Parameter: Age (day) Value: 23-25 days
  misc_feature: MA Experiment 20000794 PARAMETER Experiment Name: At_Petals_P Parameter: Plant Line Value: WS
  misc_feature: MA Experiment 20000794 PARAMETER Experiment Name: At_Petals_P Parameter: Tissue Value: Petals vs. Whole plant
aaatggttttctctccattgatatgtttccgtatatagaagaaatctctttgactcgccggaaaacaaaaccccgttgttctccgtctatctctccctctctctctctgcacatttcttctacctttctttgagatttgagaaaacagaggaagaagatgaaactcgacgaagaattcttacacgacagagaccattcgtttctgacagatgacgaggaaaatcaagcagcacttgcttgttccgacgatgaacacgacggagacgacgacggtcggagaggcggagaaaattcagattcctcctctccgttatcacgagaccgttctgataacaatctctcggatgtctcaaaccctccatggccacaaagctatcgacaatcaatggatttgttgaccggaatgactccaccttcggtgagtttcatgcctcaaagcagttcccggagattagcctcttccttccagaagaagcaacaatcttcgttttgcgattcgttgtcttcttcctcaagcaaaccccttctctctcaaccagttcctgacaaagaagaaacgattttacccgtcaaccctcaatctcagctcaagctctccgtcaccgatcttccattaccggaacctaacctctgctccttctctcaatctgttctcaatggaaccaatgtactgtgtggattagggttaataacaatgccttacgctattaaagaaagtggatggcttggtctgcccatactcttgttcttcggagtcataacttgctacacaggtgttctcatgaaaagatgtctagaaagttcccctggtattcaaacttaccccgatatcggtcaagccgcctttggaatcaccggtcgcttcatcatctctattcttctatacgtggagttgtacgcagcttgtgtggaatacataatcatgatgagcgataacttatcagggctattcccaaacgtttcattgagcattgcttcagggatatctttagattctcctcagatctttgcaatcttaaccactcttcttgttcttccaactgtctggcttaaagatcttagcttgctttcttacctttcagttggaggagtcttggcgtcaatcttactcggtatctgcctcttctgggtcggtgcagtcgatggaatagggtttcatgcaacaggacgagttttcgatttaagtaacttacctgtcactatagggatttttggatttggttactcgggtcattcggtttttcccaatatctattcttcaatgaaagatccttcaaggtttcctcttgtcttagttatctgctttagtttctgcacggtcttgtacatagctgttgcggtctgcggctacaccatgtttggcgaagcagtggaatcacagttcacattgaacatgcctaagcacttctttccatctaaagtcgcggtctggacagcggtcattacaccgatgaccaaatacgctttaacaatcaccccaatagttatgagtctcgaagaactcattccaacagctaagatgagatcacgtggtgtatcgatattatttagaacaatgctagttacctctactttggtggttgctctttcagttcctttcttcgcgatcgtggcagcactaatcggatcgttccttgcaatgcttgtggctcttatcttcccatgtctatgttatctcagtatcctcaagggtaaattaagcaacacacaaattggattatgcatattcattatagtcttcggggtggttagtggttgttgtggtacttactcggctatctcaagattagccaaccaaatgacagattaactgaaattttcgacggcgatttaaaattaggtgtgttgtgttctaatgtttattatattatctagtttttattcagttttggttcagatttcttttaattgttttaggaaacaagcagagataaaaccacatatacttcatttcagttttaacaaaatgtatctttcataccctatgtattatggtttgtatttaac

SEQ ID NO: 105675 - protein, 550 aa, Arabidopsis thaliana
  peptide (1)..(550): Ceres Seq. ID no. 13617746
  misc_feature (1)..(550): Homolog of NCBI NO: 30679549 NR Description: amino acid transporter family [Arabidopsis >gi|26449931|dbj|BAC42086.1| unknown protein [Arabidopsis
  misc_feature (1)..(550): Homolog of NCBI NO: 11358406 NR Description: hypothetical protein T7H20.230 - Arabidopsis >gi|7340692|emb|CAB82991.1| putative protein [Arabidopsis
  misc_feature (17)..(549): Homolog of NCBI NO: 22326569 NR Description: amino acid transporter family [Arabidopsis >gi|20856761|gb|AAM26683.1| AT5g02170/T7H20_220 [Arabidopsis >gi|29028738|gb|AAO64748.1| At5g02170/T7H20_220 [Arabidopsis
  misc_feature (17)..(549): Homolog of NCBI NO: 11358405 NR Description: hypothetical protein T7H20.220 - Arabidopsis >gi|7340691|emb|CAB82990.1| putative protein [Arabidopsis
  misc_feature (18)..(497): Homolog of NCBI NO: 15232639 NR Description: amino acid transporter family [Arabidopsis >gi|6478926|gb|AAF14031.1|AC011436_15 hypothetical protein
  misc_feature (19)..(457): Homolog of NCBI NO: 15232638 NR Description: amino acid transporter family [Arabidopsis >gi|6478925|gb|AAF14030.1|AC011436_14 hypothetical protein
  misc_feature (29)..(550): Homolog of NCBI NO: 30687791 NR Description: amino acid transporter family [Arabidopsis
  misc_feature (29)..(550): Homolog of NCBI NO: 15292735 NR Description: unknown protein [Arabidopsis thaliana]
  misc_feature (31)..(488): Homolog of NCBI NO: 15233103 NR Description: amino acid transporter family [Arabidopsis
  misc_feature (18)..(544): Homolog of NCBI NO: 18405629 NR Description: amino acid transporter family [Arabidopsis >gi|14532708|gb|AAK64155.1| unknown protein [Arabidopsis >gi|19310729|gb|AAL85095.1| unknown protein [Arabidopsis
MKLDEEFLHDRDHSFLTDDEENQAALACSDDEHDGDDDGRRGGENSDSSSPLSRDRSDNNLSDVSNPPWPQSYRQSMDLLTGMTPPSVSFMPQSSSRRLASSFQKKQQSSFCDSLSSSSSKPLLSQPVPDKEETILPVNPQSQLKLSVTDLPLPEPNLCSFSQSVLNGTNVLCGLGLITMPYAIKESGWLGLPILLFFGVITCYTGVLMKRCLESSPGIQTYPDIGQAAFGITGRFIISILLYVELYAACVEYIIMMSDNLSGLFPNVSLSIASGISLDSPQIFAILTTLLVLPTVWLKDLSLLSYLSVGGVLASILLGICLFWVGAVDGIGFHATGRVFDLSNLPVTIGIFGFGYSGHSVFPNIYSSMKDPSRFPLVLVICFSFCTVLYIAVAVCGYTMFGEAVESQFTLNMPKHFFPSKVAVWTAVITPMTKYALTITPIVMSLEELIPTAKMRSRGVSILFRTMLVTSTLVVALSVPFFAIVAALIGSFLAMLVALIFPCLCYLSILKGKLSNTQIGLCIFIIVFGVVSGCCGTYSAISRLANQMTD

SEQ ID NO: 105676 - protein, 474 aa, Arabidopsis thaliana
  peptide (1)..(474): Ceres Seq. ID no. 13617747
  misc_feature (1)..(474): Homolog of NCBI NO: 30679549 NR Description: amino acid transporter family [Arabidopsis >gi|26449931|dbj|BAC42086.1| unknown protein [Arabidopsis
  misc_feature (1)..(474): Homolog of NCBI NO: 11358406 NR Description: hypothetical protein T7H20.230 - Arabidopsis >gi|7340692|emb|CAB82991.1| putative protein [Arabidopsis
  misc_feature (1)..(473): Homolog of NCBI NO: 22326569 NR Description: amino acid transporter family [Arabidopsis >gi|20856761|gb|AAM26683.1| AT5g02170/T7H20_220 [Arabidopsis >gi|29028738|gb|AAO64748.1| At5g02170/T7H20_220 [Arabidopsis
  misc_feature (1)..(473): Homolog of NCBI NO: 11358405 NR Description: hypothetical protein T7H20.220 - Arabidopsis >gi|7340691|emb|CAB82990.1| putative protein [Arabidopsis
  misc_feature (1)..(421): Homolog of NCBI NO: 15232639 NR Description: amino acid transporter family [Arabidopsis >gi|6478926|gb|AAF14031.1|AC011436_15 hypothetical protein
  misc_feature (1)..(381): Homolog of NCBI NO: 15232638 NR Description: amino acid transporter family [Arabidopsis >gi|6478925|gb|AAF14030.1|AC011436_14 hypothetical protein
  misc_feature (1)..(474): Homolog of NCBI NO: 30687791 NR Description: amino acid transporter family [Arabidopsis
  misc_feature (1)..(474): Homolog of NCBI NO: 15292735 NR Description: unknown protein [Arabidopsis thaliana]
  misc_feature (1)..(412): Homolog of NCBI NO: 15233103 NR Description: amino acid transporter family [Arabidopsis
  misc_feature (1)..(468): Homolog of NCBI NO: 18405629 NR Description: amino acid transporter family [Arabidopsis >gi|14532708|gb|AAK64155.1| unknown protein [Arabidopsis >gi|19310729|gb|AAL85095.1| unknown protein [Arabidopsis
MDLLTGMTPPSVSFMPQSSSRRLASSFQKKQQSSFCDSLSSSSSKPLLSQPVPDKEETILPVNPQSQLKLSVTDLPLPEPNLCSFSQSVLNGTNVLCGLGLITMPYAIKESGWLGLPILLFFGVITCYTGVLMKRCLESSPGIQTYPDIGQAAFGITGRFIISILLYVELYAACVEYIIMMSDNLSGLFPNVSLSIASGISLDSPQIFAILTTLLVLPTVWLKDLSLLSYLSVGGVLASILLGICLFWVGAVDGIGFHATGRVFDLSNLPVTIGIFGFGYSGHSVFPNIYSSMKDPSRFPLVLVICFSFCTVLYIAVAVCGYTMFGEAVESQFTLNMPKHFFPSKVAVWTAVITPMTKYALTITPIVMSLEELIPTAKMRSRGVSILFRTMLVTSTLVVALSVPFFAIVAALIGSFLAMLVALIFPCLCYLSILKGKLSNTQIGLCIFIIVFGVVSGCCGTYSAISRLANQMTD

SEQ ID NO: 105677 - protein, 468 aa, Arabidopsis thaliana
  peptide (1)..(468): Ceres Seq. ID no. 13617748
  misc_feature (1)..(468): Homolog of NCBI NO: 30679549 NR Description: amino acid transporter family [Arabidopsis >gi|26449931|dbj|BAC42086.1| unknown protein [Arabidopsis
  misc_feature (1)..(468): Homolog of NCBI NO: 11358406 NR Description: hypothetical protein T7H20.230 - Arabidopsis >gi|7340692|emb|CAB82991.1| putative protein [Arabidopsis
  misc_feature (1)..(467): Homolog of NCBI NO: 22326569 NR Description: amino acid transporter family [Arabidopsis >gi|20856761|gb|AAM26683.1| AT5g02170/T7H20_220 [Arabidopsis >gi|29028738|gb|AAO64748.1| At5g02170/T7H20_220 [Arabidopsis
  misc_feature (1)..(467): Homolog of NCBI NO: 11358405 NR Description: hypothetical protein T7H20.220 - Arabidopsis >gi|7340691|emb|CAB82990.1| putative protein [Arabidopsis
  misc_feature (1)..(415): Homolog of NCBI NO: 15232639 NR Description: amino acid transporter family [Arabidopsis >gi|6478926|gb|AAF14031.1|AC011436_15 hypothetical protein
  misc_feature (1)..(375): Homolog of NCBI NO: 15232638 NR Description: amino acid transporter family [Arabidopsis >gi|6478925|gb|AAF14030.1|AC011436_14 hypothetical protein
  misc_feature (1)..(468): Homolog of NCBI NO: 30687791 NR Description: amino acid transporter family [Arabidopsis
  misc_feature (1)..(468): Homolog of NCBI NO: 15292735 NR Description: unknown protein [Arabidopsis thaliana]
  misc_feature (1)..(406): Homolog of NCBI NO: 15233103 NR Description: amino acid transporter family [Arabidopsis
  misc_feature (1)..(462): Homolog of NCBI NO: 18405629 NR Description: amino acid transporter family [Arabidopsis >gi|14532708|gb|AAK64155.1| unknown protein [Arabidopsis >gi|19310729|gb|AAL85095.1| unknown protein [Arabidopsis
MTPPSVSFMPQSSSRRLASSFQKKQQSSFCDSLSSSSSKPLLSQPVPDKEETILPVNPQSQLKLSVTDLPLPEPNLCSFSQSVLNGTNVLCGLGLITMPYAIKESGWLGLPILLFFGVITCYTGVLMKRCLESSPGIQTYPDIGQAAFGITGRFIISILLYVELYAACVEYIIMMSDNLSGLFPNVSLSIASGISLDSPQIFAILTTLLVLPTVWLKDLSLLSYLSVGGVLASILLGICLFWVGAVDGIGFHATGRVFDLSNLPVTIGIFGFGYSGHSVFPNIYSSMKDPSRFPLVLVICFSFCTVLYIAVAVCGYTMFGEAVESQFTLNMPKHFFPSKVAVWTAVITPMTKYALTITPIVMSLEELIPTAKMRSRGVSILFRTMLVTSTLVVALSVPFFAIVAALIGSFLAMLVALIFPCLCYLSILKGKLSNTQIGLCIFIIVFGVVSGCCGTYSAISRLANQMTD

SEQ ID NO: 105678 - DNA, 1063 bp, Arabidopsis thaliana
  misc_feature (1)..(1063): Ceres Seq. ID no. 13617749
  misc_feature: MA Experiment ID: 108434 Result: Down-regulated in Transcription
  misc_feature: MA Experiment 108434 PARAMETER Experiment Name: At_Root_Tips_cDNA_P Parameter: Tissue Value: Root Tips
  misc_feature: MA Experiment ID: 108462 Result: Up-regulated in Transcription
  misc_feature: MA Experiment 108462 PARAMETER Experiment Name: At_Germinating_Seeds_cDNA_P Parameter: Age (day) Value: 2 vs. 0
  misc_feature: MA Experiment 108462 PARAMETER Experiment Name: At_Germinating_Seeds_cDNA_P Parameter: Tissue Value: Germinating Seeds
  misc_feature: MA Experiment ID: 108561 Result: Up-regulated in Transcription
  misc_feature: MA Experiment 108561 PARAMETER Experiment Name: At_100uM_ABA_cDNA_P Parameter: Timepoint (hr) Value: 6
  misc_feature: MA Experiment 108561 PARAMETER Experiment Name: At_100uM_ABA_cDNA_P Parameter: Tissue Value: Aerial
  misc_feature: MA Experiment 108561 PARAMETER Experiment Name: At_100uM_ABA_cDNA_P Parameter: Treatment Value: 100uM ABA vs. No Treatment
  misc_feature: MA Experiment ID: 108576 Result: Down-regulated in Transcription
  misc_feature: MA Experiment 108576 PARAMETER Experiment Name: At_42deg_Heat_cDNA_P Parameter: Temperature (deg C) Value: 42 vs. 22
  misc_feature: MA Experiment 108576 PARAMETER Experiment Name: At_42deg_Heat_cDNA_P Parameter: Timepoint (hr) Value: 1
  misc_feature: MA Experiment 108576 PARAMETER Experiment Name: At_42deg_Heat_cDNA_P Parameter: Tissue Value: Aerial
  misc_feature: MA Experiment ID: 108577 Result: Down-regulated in Transcription
  misc_feature: MA Experiment 108577 PARAMETER Experiment Name: At_42deg_Heat_cDNA_P Parameter: Temperature (deg C) Value: 42 vs. 22
  misc_feature: MA Experiment 108577 PARAMETER Experiment Name: At_42deg_Heat_cDNA_P Parameter: Timepoint (hr) Value: 6
  misc_feature: MA Experiment 108577 PARAMETER Experiment Name: At_42deg_Heat_cDNA_P Parameter: Tissue Value: Aerial
  misc_feature: MA Experiment ID: 108579 Result: Up-regulated in Transcription
  misc_feature: MA Experiment 108579 PARAMETER Experiment Name: At_4deg_Cold_cDNA_P Parameter: Temperature (deg C) Value: 4 vs. 22
  misc_feature: MA Experiment 108579 PARAMETER Experiment Name: At_4deg_Cold_cDNA_P Parameter: Timepoint (hr) Value: 6
  misc_feature: MA Experiment 108579 PARAMETER Experiment Name: At_4deg_Cold_cDNA_P Parameter: Tissue Value: Aerial
  misc_feature: MA Experiment ID: 108594 Result: Up-regulated in Transcription
  misc_feature: MA Experiment 108594 PARAMETER Experiment Name: At_Ler-rhl_Root_cDNA_P Parameter: Plant Line Value: null
  misc_feature: MA Experiment ID: 108595 Result: Up-regulated in Transcription
  misc_feature: MA Experiment 108595 PARAMETER Experiment Name: At_Ler-pi_Ovule_cDNA_P Parameter: Plant Line Value: null
  misc_feature: MA Experiment ID: 108607 Result: Up-regulated in Transcription
  misc_feature: MA Experiment 108607 PARAMETER Experiment Name: At_100uM_ABA_cDNA_P Parameter: Timepoint (hr) Value: 4
  misc_feature: MA Experiment 108607 PARAMETER Experiment Name: At_100uM_ABA_cDNA_P Parameter: Tissue Value: Aerial
  misc_feature: MA Experiment 108607 PARAMETER Experiment Name: At_100uM_ABA_cDNA_P Parameter: Treatment Value: 100uM ABA vs. No Treatment
  misc_feature: MA Experiment ID: 108668 Result: Down-regulated in Transcription
  misc_feature: MA Experiment 108668 PARAMETER Experiment Name: At_2mM_SA_cDNA_P Parameter: Plant Line Value: WS
  misc_feature: MA Experiment 108668 PARAMETER Experiment Name: At_2mM_SA_cDNA_P Parameter: Timepoint (hr) Value: 6
  misc_feature: MA Experiment 108668 PARAMETER Experiment Name: At_2mM_SA_cDNA_P Parameter: Treatment Value: 2mM SA vs. No Treatment
  misc_feature: MA Experiment ID: 20000089 Result: Down-regulated in Transcription
  misc_feature: MA Experiment ID: 20000090 Result: Down-regulated in Transcription
  misc_feature: MA Experiment ID: 20000166 Result: Up-regulated in Transcription
  misc_feature: MA Experiment 20000166 PARAMETER Experiment Name: At_100uM_ABA_P Parameter: Age (day) Value: 14
  misc_feature: MA Experiment 20000166 PARAMETER Experiment Name: At_100uM_ABA_P Parameter: Organism Value: A. thaliana
  misc_feature: MA Experiment 20000166 PARAMETER Experiment Name: At_100uM_ABA_P Parameter: Plant Line Value: WS
  misc_feature: MA Experiment 20000166 PARAMETER Experiment Name: At_100uM_ABA_P Parameter: Timepoint (hr) Value: 1
  misc_feature: MA Experiment 20000166 PARAMETER Experiment Name: At_100uM_ABA_P Parameter: Tissue Value: Aerial
  misc_feature: MA Experiment 20000166 PARAMETER Experiment Name: At_100uM_ABA_P Parameter: Treatment Value: 100uM ABA vs. No Treatment
  misc_feature: MA Experiment ID: 20000169 Result: Up-regulated in Transcription
  misc_feature: MA Experiment 20000169 PARAMETER Experiment Name: At_100uM_ABA_P Parameter: Age (day) Value: 14
  misc_feature: MA Experiment 20000169 PARAMETER Experiment Name: At_100uM_ABA_P Parameter: Organism Value: A. thaliana
  misc_feature: MA Experiment 20000169 PARAMETER Experiment Name: At_100uM_ABA_P Parameter: Plant Line Value: WS
  misc_feature: MA Experiment 20000169 PARAMETER Experiment Name: At_100uM_ABA_P Parameter: Timepoint (hr) Value: 6
  misc_feature: MA Experiment 20000169 PARAMETER Experiment Name: At_100uM_ABA_P Parameter: Tissue Value: Aerial
  misc_feature: MA Experiment 20000169 PARAMETER Experiment Name: At_100uM_ABA_P Parameter: Treatment Value: 100uM ABA vs. No Treatment
  misc_feature: MA Experiment ID: 20000180 Result: Up-regulated in Transcription
  misc_feature: MA Experiment 20000180 PARAMETER Experiment Name: At_Germinating_Seeds_P Parameter: Age (hr) Value: 24 vs. 0
  misc_feature: MA Experiment 20000180 PARAMETER Experiment Name: At_Germinating_Seeds_P Parameter: Tissue Value: Germinating Seeds
  misc_feature: MA Experiment ID: 20000182 Result: Down-regulated in Transcription
  misc_feature: MA Experiment 20000182 PARAMETER Experiment Name: At_2mM_SA_P Parameter: Age (day) Value: 14
  misc_feature: MA Experiment 20000182 PARAMETER Experiment Name: At_2mM_SA_P Parameter: Organism Value: A. thaliana
  misc_feature: MA Experiment 20000182 PARAMETER Experiment Name: At_2mM_SA_P Parameter: Plant Line Value: WS
  misc_feature: MA Experiment 20000182 PARAMETER Experiment Name: At_2mM_SA_P Parameter: Timepoint (hr) Value: 6
  misc_feature: MA Experiment 20000182 PARAMETER Experiment Name: At_2mM_SA_P Parameter: Tissue Value: Aerial
  misc_feature: MA Experiment 20000182 PARAMETER Experiment Name: At_2mM_SA_P Parameter: Treatment Value: 2mM SA vs. No Treatment
  misc_feature: MA Experiment ID: 20000213 Result: Up-regulated in Transcription
  misc_feature: MA Experiment 20000213 PARAMETER Experiment Name: At_4deg_Cold_P Parameter: Timepoint (hr) Value: 2
  misc_feature: MA Experiment ID: 20000224 Result: Up-regulated in Transcription
  misc_feature: MA Experiment ID: 20000227 Result: Down-regulated in Transcription
  misc_feature: MA Experiment 20000227 PARAMETER Experiment Name: At_Root-Tips-vs-Tops_P Parameter: Tissue Value: Root Tips vs. Root Tops
  misc_feature: MA Experiment ID: 20000573 Result: Down-regulated in Transcription
  misc_feature: MA Experiment 20000573 PARAMETER Experiment Name: At_100uM_ABA_Mutants__P Parameter: Organism Value: A. thaliana
  misc_feature: MA Experiment 20000573 PARAMETER Experiment Name: At_100uM_ABA_Mutants__P Parameter: Plant Line Value: CS22 vs. Ler wt
  misc_feature: MA Experiment 20000573 PARAMETER Experiment Name: At_100uM_ABA_Mutants__P Parameter: Timepoint (hr) Value: N/A
  misc_feature: MA Experiment 20000573 PARAMETER Experiment Name: At_100uM_ABA_Mutants__P Parameter: Tissue Value: Whole Plant
  misc_feature: MA Experiment 20000573 PARAMETER Experiment Name: At_100uM_ABA_Mutants__P Parameter: Treatment Value: None
  misc_feature: MA Experiment ID: 20000794 Result: Up-regulated in Transcription
  misc_feature: MA Experiment 20000794 PARAMETER Experiment Name: At_Petals_P Parameter: Age (day) Value: 23-25 days
  misc_feature: MA Experiment 20000794 PARAMETER Experiment Name: At_Petals_P Parameter: Plant Line Value: WS
  misc_feature: MA Experiment 20000794 PARAMETER Experiment Name: At_Petals_P Parameter: Tissue Value: Petals vs. Whole plant
  misc_feature: MA Experiment ID: 20001248 Result: Down-regulated in Transcription
  misc_feature: MA Experiment 20001248 PARAMETER Experiment Name: At_Far-red-induction_P Parameter: Age (day) Value: 7
  misc_feature: MA Experiment 20001248 PARAMETER Experiment Name: At_Far-red-induction_P Parameter: Light Value: Far-red vs. White
  misc_feature: MA Experiment 20001248 PARAMETER Experiment Name: At_Far-red-induction_P Parameter: Organism Value: A. thaliana
  misc_feature: MA Experiment 20001248 PARAMETER Experiment Name: At_Far-red-induction_P Parameter: Plant Line Value: Columbia
  misc_feature: MA Experiment 20001248 PARAMETER Experiment Name: At_Far-red-induction_P Parameter: Timepoint (hr) Value: 4
  misc_feature: MA Experiment 20001248 PARAMETER Experiment Name: At_Far-red-induction_P Parameter: Tissue Value: Whole Plant
  misc_feature: MA Experiment ID: 20001450 Result: Down-regulated in Transcription
  misc_feature: MA Experiment 20001450 PARAMETER Experiment Name: At_Far-red-induction_P Parameter: Age (day) Value: 7
  misc_feature: MA Experiment 20001450 PARAMETER Experiment Name: At_Far-red-induction_P Parameter: Light Value: Far-red vs. White
  misc_feature: MA Experiment 20001450 PARAMETER Experiment Name: At_Far-red-induction_P Parameter: Organism Value: A. thaliana
  misc_feature: MA Experiment 20001450 PARAMETER Experiment Name: At_Far-red-induction_P Parameter: Plant Line Value: Columbia
  misc_feature: MA Experiment 20001450 PARAMETER Experiment Name: At_Far-red-induction_P Parameter: Timepoint (hr) Value: 8
  misc_feature: MA Experiment 20001450 PARAMETER Experiment Name: At_Far-red-induction_P Parameter: Tissue Value: Whole Plant
  misc_feature: MA Experiment ID: 20001451 Result: Up-regulated in Transcription
  misc_feature: MA Experiment 20001451 PARAMETER Experiment Name: At_Far-red-induction_P Parameter: Age (day) Value: 7
  misc_feature: MA Experiment 20001451 PARAMETER Experiment Name: At_Far-red-induction_P Parameter: Light Value: Far-red vs. White
  misc_feature: MA Experiment 20001451 PARAMETER Experiment Name: At_Far-red-induction_P Parameter: Organism Value: A. thaliana
  misc_feature: MA Experiment 20001451 PARAMETER Experiment Name: At_Far-red-induction_P Parameter: Plant Line Value: Columbia
  misc_feature: MA Experiment 20001451 PARAMETER Experiment Name: At_Far-red-induction_P Parameter: Timepoint (hr) Value: 24
  misc_feature: MA Experiment 20001451 PARAMETER Experiment Name: At_Far-red-induction_P Parameter: Tissue Value: Whole Plant
  misc_feature: MA Experiment ID: 20001554 Result: Up-regulated in Transcription
  misc_feature: MA Experiment 20001554 PARAMETER Experiment Name: At_Drought_Soil_Dry_P Parameter: Age (day) Value: 21
  misc_feature: MA Experiment 20001554 PARAMETER Experiment Name: At_Drought_Soil_Dry_P Parameter: Organism Value: A. thaliana
  misc_feature: MA Experiment 20001554 PARAMETER Experiment Name: At_Drought_Soil_Dry_P Parameter: Plant Line Value: WS
  misc_feature: MA Experiment 20001554 PARAMETER Experiment Name: At_Drought_Soil_Dry_P Parameter: Post Timepoint (hr) Value: None
  misc_feature: MA Experiment 20001554 PARAMETER Experiment Name: At_Drought_Soil_Dry_P Parameter: Post-Treatment Value: None
  misc_feature: MA Experiment 20001554 PARAMETER Experiment Name: At_Drought_Soil_Dry_P Parameter: Timepoint (day) Value: 7
  misc_feature: MA Experiment 20001554 PARAMETER Experiment Name: At_Drought_Soil_Dry_P Parameter: Treatment Value: Drought vs. No Drought
  misc_feature: MA Experiment ID: 20001557 Result: Down-regulated in Transcription
  misc_feature: MA Experiment 20001557 PARAMETER Experiment Name: At_Drought_Soil_Dry_P Parameter: Age (day) Value: 27
  misc_feature: MA Experiment 20001557 PARAMETER Experiment Name: At_Drought_Soil_Dry_P Parameter: Organism Value: A. thaliana
  misc_feature: MA Experiment 20001557 PARAMETER Experiment Name: At_Drought_Soil_Dry_P Parameter: Plant Line Value: WS
  misc_feature: MA Experiment 20001557 PARAMETER Experiment Name: At_Drought_Soil_Dry_P Parameter: Post Timepoint (hr) Value: 3
  misc_feature: MA Experiment 20001557 PARAMETER Experiment Name: At_Drought_Soil_Dry_P Parameter: Post-Treatment Value: Re-Water vs. No Drought
  misc_feature: MA Experiment 20001557 PARAMETER Experiment Name: At_Drought_Soil_Dry_P Parameter: Timepoint (day) Value: 13
  misc_feature: MA Experiment 20001557 PARAMETER Experiment Name: At_Drought_Soil_Dry_P Parameter: Treatment Value: Drought vs. No Drought
  misc_feature: MA Experiment ID: 20001560 Result: Down-regulated in Transcription
  misc_feature: MA Experiment 20001560 PARAMETER Experiment Name: At_Drought_Soil_Dry_P Parameter: Age (day) Value: 28
  misc_feature: MA Experiment 20001560 PARAMETER Experiment Name: At_Drought_Soil_Dry_P Parameter: Organism Value: A. thaliana
  misc_feature: MA Experiment 20001560 PARAMETER Experiment Name: At_Drought_Soil_Dry_P Parameter: Plant Line Value: WS
  misc_feature: MA Experiment 20001560 PARAMETER Experiment Name: At_Drought_Soil_Dry_P Parameter: Post Timepoint (hr) Value: None
  misc_feature: MA Experiment 20001560 PARAMETER Experiment Name: At_Drought_Soil_Dry_P Parameter: Post-Treatment Value: None
  misc_feature: MA Experiment 20001560 PARAMETER Experiment Name: At_Drought_Soil_Dry_P Parameter: Timepoint (day) Value: 14
  misc_feature: MA Experiment 20001560 PARAMETER Experiment Name: At_Drought_Soil_Dry_P Parameter: Treatment Value: Drought vs. No Drought
  misc_feature: MA Experiment ID: 20001911 Result: Up-regulated in Transcription
  misc_feature: MA Experiment 20001911 PARAMETER Experiment Name: At_Drought_Reproduction_P Parameter: Age (day) Value: 40
  misc_feature: MA Experiment 20001911 PARAMETER Experiment Name: At_Drought_Reproduction_P Parameter: Organism Value: A. thaliana
  misc_feature: MA Experiment 20001911 PARAMETER Experiment Name: At_Drought_Reproduction_P Parameter: Plant Line Value: WS
  misc_feature: MA Experiment 20001911 PARAMETER Experiment Name: At_Drought_Reproduction_P Parameter: Timepoint (day) Value: 10
  misc_feature: MA Experiment 20001911 PARAMETER Experiment Name: At_Drought_Reproduction_P Parameter: Tissue Value: Flowers
  misc_feature: MA Experiment 20001911 PARAMETER Experiment Name: At_Drought_Reproduction_P Parameter: Treatment Value: Drought vs. No Drought
agaactaaaaccctaaaaaagaaacacaaatatttaagattttcttccctgatccaatcaattgtttcagaaaaaatggagttcgagaaccggtacggacttgcaacgtcgcagaagtacgactgtctcttgttcgatttggacgatactctttatcctcttagctccggaatcgcaagagaatgtgggaacaacatcaaagattacatgaccgagaaactcggtatacctaaggacaaaatcgtcgaattgtctgatcttctatacaagaactatggaacaacaatggctggtcttagggcgatcggatatgaatttgactacgatgagtaccacagcttcgtccacggtcgtttaccctatgacaacataaaacccgaccttgttcttcgcagcctcttgcttagcctccctctccgcaaagtcatctttaccaacgcggacagagttcacgcggccaaggcgttgaagaagttgggattagaggattgtttcgaaggaatcatatgtttcgaaacgctaaacctcatgcacacaaacgctgcgtctaacaattccgagatttttgatatcgttggacattttaaccggtctgaaccggtcggttcacttcccaaaacgcctgttgtgtgtaaaccatctgaatctgctatcgagaaagctcttgaaatcgccaatattgatcctaaccgaacgctgttctttgaggacagtgtccgaaacgtacaagctggaaaacgcgttggtctttacacggttctggttggtaaatcgaccaaagtcaaaggagcggattacgcgttggaaaacattcacaacatgaaagaggcgataccggagttatgggaatccgacaggaaatcgtcggatgttggatattccggcaaggtcgccgttgagacttctgttagagcttaggaggagtactgtttcgccgttgtacctaattttccaccactgtcattttcattttcttttttcaaatgacgtaatgtcatttttgttttttttttcgacttgtgtttataaaagattaataaaaaatgagaaaataatttccatc

SEQ ID NO: 105679 - protein, 305 aa, Arabidopsis thaliana
  peptide (1)..(305): Ceres Seq. ID no. 13617750
  misc_feature (40)..(258): Pfam Name: haloacid dehalogenase-like hydrolase Pfam Description: haloacid dehalogenase-like hydrolase
  misc_feature (26)..(305): Homolog of NCBI NO: 15241720 NR Description: haloacid dehalogenase-like hydrolase family
  misc_feature (26)..(305): Homolog of NCBI NO: 21593165 NR Description: unknown [Arabidopsis thaliana]
  misc_feature (26)..(187): Homolog of NCBI NO: 7406669 NR Description: putative ripening-related protein [Vitis vinifera]
  misc_feature (173)..(305): Homolog of NCBI NO: 7406669 NR Description: putative ripening-related protein [Vitis vinifera]
  misc_feature (22)..(305): Homolog of NCBI NO: 8885554 NR Description: ripening-related protein-like; hydrolase-like
  misc_feature (26)..(305): Homolog of NCBI NO: 15238429 NR Description: haloacid dehalogenase-like hydrolase family
  misc_feature (26)..(301): Homolog of NCBI NO: 30697234 NR Description: haloacid dehalogenase-like hydrolase family
  misc_feature (26)..(301): Homolog of NCBI NO: 30697236 NR Description: haloacid dehalogenase-like hydrolase family
  misc_feature (26)..(301): Homolog of NCBI NO: 21618155 NR Description: putative ripening-related protein-like
  misc_feature (34)..(305): Homolog of NCBI NO: 40714684 NR Description: expressed protein [Oryza sativa (japonica
RTKTLKKKHKYLRFSSLIQSIVSEKMEFENRYGLATSQKYDCLLFDLDDTLYPLSSGIARECGNNIKDYMTEKLGIPKDKIVELSDLLYKNYGTTMAGLRAIGYEFDYDEYHSFVHGRLPYDNIKPDLVLRSLLLSLPLRKVIFTNADRVHAAKALKKLGLEDCFEGIICFETLNLMHTNAASNNSEIFDIVGHFNRSEPVGSLPKTPVVCKPSESAIEKALEIANIDPNRTLFFEDSVRNVQAGKRVGLYTVLVGKSTKVKGADYALENIHNMKEAIPELWESDRKSSDVGYSGKVAVETSVRA

SEQ ID NO: 105680 - protein, 280 aa, Arabidopsis thaliana; identical to SEQ ID NO: 29464
  peptide (1)..(280): Ceres Seq. ID no. 13617751
  misc_feature (15)..(233): Pfam Name: haloacid dehalogenase-like hydrolase Pfam Description: haloacid dehalogenase-like hydrolase
  misc_feature (1)..(280): Homolog of NCBI NO: 15241720 NR Description: haloacid dehalogenase-like hydrolase family
  misc_feature (1)..(280): Homolog of NCBI NO: 21593165 NR Description: unknown [Arabidopsis thaliana]
  misc_feature (1)..(162): Homolog of NCBI NO: 7406669 NR Description: putative ripening-related protein [Vitis vinifera]
  misc_feature (148)..(280): Homolog of NCBI NO: 7406669 NR Description: putative ripening-related protein [Vitis vinifera]
  misc_feature (1)..(280): Homolog of NCBI NO: 8885554 NR Description: ripening-related protein-like; hydrolase-like
  misc_feature (1)..(280): Homolog of NCBI NO: 15238429 NR Description: haloacid dehalogenase-like hydrolase family
  misc_feature (1)..(276): Homolog of NCBI NO: 30697234 NR Description: haloacid dehalogenase-like hydrolase family
  misc_feature (1)..(276): Homolog of NCBI NO: 30697236 NR Description: haloacid dehalogenase-like hydrolase family
  misc_feature (1)..(276): Homolog of NCBI NO: 21618155 NR Description: putative ripening-related protein-like
  misc_feature (9)..(280): Homolog of NCBI NO: 40714684 NR Description: expressed protein [Oryza sativa (japonica

SEQ ID NO: 105681 - protein, 236 aa, Arabidopsis thaliana; identical to SEQ ID NO: 23607
  peptide (1)..(236): Ceres Seq. ID no. 13617752
  misc_feature (1)..(189): Pfam Name: haloacid dehalogenase-like hydrolase Pfam Description: haloacid dehalogenase-like hydrolase
  misc_feature (1)..(236): Homolog of NCBI NO: 15241720 NR Description: haloacid dehalogenase-like hydrolase family
  misc_feature (1)..(236): Homolog of NCBI NO: 21593165 NR Description: unknown [Arabidopsis thaliana]
  misc_feature (1)..(118): Homolog of NCBI NO: 7406669 NR Description: putative ripening-related protein [Vitis vinifera]
  misc_feature (104)..(236): Homolog of NCBI NO: 7406669 NR Description: putative ripening-related protein [Vitis vinifera]
  misc_feature (1)..(236): Homolog of NCBI NO: 8885554 NR Description: ripening-related protein-like; hydrolase-like
  misc_feature (1)..(236): Homolog of NCBI NO: 15238429 NR Description: haloacid dehalogenase-like hydrolase family
  misc_feature (1)..(232): Homolog of NCBI NO: 30697234 NR Description: haloacid dehalogenase-like hydrolase family
  misc_feature (1)..(232): Homolog of NCBI NO: 30697236 NR Description: haloacid dehalogenase-like hydrolase family
  misc_feature (1)..(232): Homolog of NCBI NO: 21618155 NR Description: putative ripening-related protein-like
  misc_feature (1)..(236): Homolog of NCBI NO: 40714684 NR Description: expressed protein [Oryza sativa (japonica

SEQ ID NO: 105682 - DNA, 1188 bp, Arabidopsis thaliana
  misc_feature (1)..(1188): Ceres Seq. ID no. 13617766
  misc_feature: MA Experiment ID: 108434 Result: Down-regulated in Transcription
  misc_feature: MA Experiment 108434 PARAMETER Experiment Name: At_Root_Tips_cDNA_P Parameter: Tissue Value: Root Tips
  misc_feature: MA Experiment ID: 108464 Result: Up-regulated in Transcription
  misc_feature: MA Experiment 108464 PARAMETER Experiment Name: At_Germinating_Seeds_cDNA_P Parameter: Age (day) Value: 4 vs. 0
  misc_feature: MA Experiment 108464 PARAMETER Experiment Name: At_Germinating_Seeds_cDNA_P Parameter: Tissue Value: Germinating Seeds
  misc_feature: MA Experiment ID: 20000113 Result: Down-regulated in Transcription
  misc_feature: MA Experiment 20000113 PARAMETER Experiment Name: At_42deg_Heat_cDNA_P Parameter: Temperature (deg C) Value: 42 vs. 22
  misc_feature: MA Experiment 20000113 PARAMETER Experiment Name: At_42deg_Heat_cDNA_P Parameter: Timepoint (hr) Value: 8
  misc_feature: MA Experiment 20000113 PARAMETER Experiment Name: At_42deg_Heat_cDNA_P Parameter: Tissue Value: Aerial
  misc_feature: MA Experiment ID: 20000234 Result: Down-regulated in Transcription
  misc_feature: MA Experiment 20000234 PARAMETER Experiment Name: At_Siliques_P Parameter: Age (day) Value: 21
  misc_feature: MA Experiment 20000234 PARAMETER Experiment Name: At_Siliques_P Parameter: Organism Value: A. thaliana
  misc_feature: MA Experiment 20000234 PARAMETER Experiment Name: At_Siliques_P Parameter: Plant Line Value: WS
  misc_feature: MA Experiment 20000234 PARAMETER Experiment Name: At_Siliques_P Parameter: Tissue Value: Less Than 5mm Siliques vs. Whole Plant
  misc_feature: MA Experiment ID: 20000265 Result: Down-regulated in Transcription
  misc_feature: MA Experiment 20000265 PARAMETER Experiment Name: At_Open_Flower_P Parameter: Age (day) Value: 21
  misc_feature: MA Experiment 20000265 PARAMETER Experiment Name: At_Open_Flower_P Parameter: Plant Line Value: WS
  misc_feature: MA Experiment 20000265 PARAMETER Experiment Name: At_Open_Flower_P Parameter: Tissue Value: Closed Flower vs. Whole Plant
  misc_feature: MA Experiment ID: 20000437 Result: Up-regulated in Transcription
  misc_feature: MA Experiment 20000437 PARAMETER Experiment Name: At_Drought_P Parameter: Age (day) Value: 8
  misc_feature: MA Experiment 20000437 PARAMETER Experiment Name: At_Drought_P Parameter: Organism Value: A. thaliana
  misc_feature: MA Experiment 20000437 PARAMETER Experiment Name: At_Drought_P Parameter: Plant Line Value: WS
  misc_feature: MA Experiment 20000437 PARAMETER Experiment Name: At_Drought_P Parameter: Timepoint (hr) Value: 24
  misc_feature: MA Experiment 20000437 PARAMETER Experiment Name: At_Drought_P Parameter: Tissue Value: Whole Plant
  misc_feature: MA Experiment 20000437 PARAMETER Experiment Name: At_Drought_P Parameter: Treatment Value: Drought vs. No Drought
actaaagactttttcttaaatttcttgtaaaccatacaaaacatgttgtgtgcttctcaagcatcaacaacaaccctttgctcaaccatggatcaaacctcacaaccttcttcttcttcttcagccacgatccggctcggtggtcgagccattgaccgtcataacccaatcatacgtgacggtcggagactcactcctccaccttccccaaaccttaatccctcttcttcgtcttcttctacttatcatactcctcttatgactagactaggtctcgagagtagtgaacaaaaacggttagcgaagaggaagagcaagaaaggtgacagtgatgttggtaagtcaccggttagttgttttagcagtgacacacctcagggttcttcaaggtacttattgagtaacccggttttctttgacgggtttgtggattccgacccgattccaatacctattgatgaaccggagataaccaaagctgatgatttaaataattttcatgaagatcgactcataataaacgcctcaaagtatctatcaacttctgcttctttcttggagaagaagcaacccgatttcttcgaggggttcttggattatgaaccggttctatctcccgataatcctttctctgaacccacaaaagcttctcctacagcttctctgagctctcttgaagataaagatgtttcgtccccggatttcaaattctctcctcctcctcccccacctccttctcctcctcagtcgtcgccgccatcaccaccggagaaaaactcatcttccgatcaagtggttgttttgagagtgtcacttcattgcaaaggctgtgcagggaaagttaagaaacatctatcgaaattgaaaggagtgacgtcgtataacatagacttcgcagcaaagaaggttaccgtgacgggagacgtgacaccgttaactgtgttggcgagtatttccaaagttaaaaacgctcagttttggcctgagattattcagaagtaattctctttctttttccctctgttttcttctatgctcttatctttactttggaagacaaaacttgtgaagatgttactttcttttgtgcgtttatttgtctcggttatgattaaagattggtattcagaaatgttttatatgaacacacttcataatttgtttttgtgatactaaatctctactatt

SEQ ID NO: 105683 - protein, 319 aa, Arabidopsis thaliana
  peptide (1)..(319): Ceres Seq. ID no. 13617767
  misc_feature (1)..(319): Homolog of NCBI NO: 18413973 NR Description: heavy metal binding protein - related thaliana] >gi|21553967|gb|AAM63048.1| unknown [Arabidopsis >gi|26449554|dbj|BAC41903.1| unknown protein [Arabidopsis
  misc_feature (16)..(319): Homolog of NCBI NO: 11358213 NR Description: hypothetical protein T22P11.190 - Arabidopsis >gi|7413649|emb|CAB85997.1| putative protein [Arabidopsis
  misc_feature (1)..(148): Homolog of NCBI NO: 23092567 NR Description: hypothetical protein [Arabidopsis thaliana]
  misc_feature (1)..(148): Homolog of NCBI NO: 30687119 NR Description: expressed protein [Arabidopsis thaliana]
  misc_feature (247)..(313): Homolog of NCBI NO: 23092567 NR Description: hypothetical protein [Arabidopsis thaliana]
  misc_feature (247)..(313): Homolog of NCBI NO: 30687119 NR Description: expressed protein [Arabidopsis thaliana]
  misc_feature (203)..(313): Homolog of NCBI NO: 22331770 NR Description: heavy-metal-associated domain-containing protein thaliana] >gi|19424070|gb|AAL87355.1| unknown protein thaliana] >gi|21281175|gb|AAM45020.1| unknown protein
  misc_feature (244)..(313): Homolog of NCBI NO: 29124116 NR Description: unknown protein [Oryza sativa (japonica
  misc_feature (203)..(313): Homolog of NCBI NO: 11280705 NR Description: hypothetical protein F4P12.230 - Arabidopsis >gi|6729504|emb|CAB67660.1| putative protein [Arabidopsis
  misc_feature (243)..(314): Homolog of NCBI NO: 34906086 NR Description: P0459B04.21 [Oryza sativa (japonica
MLCASQASTTTLCSTMDQTSQPSSSSSATIRLGGRAIDRHNPIIRDGRRLTPPPSPNLNPSSSSSSTYHTPLMTRLGLESSEQKRLAKRKSKKGDSDVGKSPVSCFSSDTPQGSSRYLLSNPVFFDGFVDSDPIPIPIDEPEITKADDLNNFHEDRLIINASKYLSTSASFLEKKQPDFFEGFLDYEPVLSPDNPFSEPTKASPTASLSSLEDKDVSSPDFKFSPPPPPPPSPPQSSPPSPPEKNSSSDQVVVLRVSLHCKGCAGKVKKHLSKLKGVTSYNIDFAAKKVTVTGDVTPLTVLASISKVKNAQFWPEIIQK

SEQ ID NO: 105684 - protein, 304 aa, Arabidopsis thaliana
  peptide (1)..(304): Ceres Seq. ID no. 13617768
  misc_feature (1)..(304): Homolog of NCBI NO: 18413973 NR Description: heavy metal binding protein - related thaliana] >gi|21553967|gb|AAM63048.1| unknown [Arabidopsis >gi|26449554|dbj|BAC41903.1| unknown protein [Arabidopsis
  misc_feature (1)..(304): Homolog of NCBI NO: 11358213 NR Description: hypothetical protein T22P11.190 - Arabidopsis >gi|7413649|emb|CAB85997.1| putative protein [Arabidopsis
  misc_feature (1)..(133): Homolog of NCBI NO: 23092567 NR Description: hypothetical protein [Arabidopsis thaliana]
  misc_feature (1)..(133): Homolog of NCBI NO: 30687119 NR Description: expressed protein [Arabidopsis thaliana]
  misc_feature (232)..(298): Homolog of NCBI NO: 23092567 NR Description: hypothetical protein [Arabidopsis thaliana]
  misc_feature (232)..(298): Homolog of NCBI NO: 30687119 NR Description: expressed protein [Arabidopsis thaliana]
  misc_feature (188)..(298): Homolog of NCBI NO: 22331770 NR Description: heavy-metal-associated domain-containing protein thaliana] >gi|19424070|gb|AAL87355.1| unknown protein thaliana] >gi|21281175|gb|AAM45020.1| unknown protein
  misc_feature (229)..(298): Homolog of NCBI NO: 29124116 NR Description: unknown protein [Oryza sativa (japonica
  misc_feature (188)..(298): Homolog of NCBI NO: 11280705 NR Description: hypothetical protein F4P12.230 - Arabidopsis >gi|6729504|emb|CAB67660.1| putative protein [Arabidopsis
  misc_feature (228)..(299): Homolog of NCBI NO: 34906086 NR Description: P0459B04.21 [Oryza sativa (japonica
MDQTSQPSSSSSATIRLGGRAIDRHNPIIRDGRRLTPPPSPNLNPSSSSSSTYHTPLMTRLGLESSEQKRLAKRKSKKGDSDVGKSPVSCFSSDTPQGSSRYLLSNPVFFDGFVDSDPIPIPIDEPEITKADDLNNFHEDRLIINASKYLSTSASFLEKKQPDFFEGFLDYEPVLSPDNPFSEPTKASPTASLSSLEDKDVSSPDFKFSPPPPPPPSPPQSSPPSPPEKNSSSDQVVVLRVSLHCKGCAGKVKKHLSKLKGVTSYNIDFAAKKVTVTGDVTPLTVLASISKVKNAQFWPEIIQK

SEQ ID NO: 105685 - protein, 247 aa, Arabidopsis thaliana
  peptide (1)..(247): Ceres Seq. ID no. 13617769
  misc_feature (1)..(247): Homolog of NCBI NO: 18413973 NR Description: heavy metal binding protein - related thaliana] >gi|21553967|gb|AAM63048.1| unknown [Arabidopsis >gi|26449554|dbj|BAC41903.1| unknown protein [Arabidopsis
  misc_feature (1)..(247): Homolog of NCBI NO: 11358213 NR Description: hypothetical protein T22P11.190 - Arabidopsis >gi|7413649|emb|CAB85997.1| putative protein [Arabidopsis
  misc_feature (1)..(76): Homolog of NCBI NO: 23092567 NR Description: hypothetical protein [Arabidopsis thaliana]
  misc_feature (1)..(76): Homolog of NCBI NO: 30687119 NR Description: expressed protein [Arabidopsis thaliana]
  misc_feature (175)..(241): Homolog of NCBI NO: 23092567 NR Description: hypothetical protein [Arabidopsis thaliana]
  misc_feature (175)..(241): Homolog of NCBI NO: 30687119 NR Description: expressed protein [Arabidopsis thaliana]
  misc_feature (131)..(241): Homolog of NCBI NO: 22331770 NR Description: heavy-metal-associated domain-containing protein thaliana] >gi|19424070|gb|AAL87355.1| unknown protein thaliana] >gi|21281175|gb|AAM45020.1| unknown protein
  misc_feature (172)..(241): Homolog of NCBI NO: 29124116 NR Description: unknown protein [Oryza sativa (japonica
  misc_feature (131)..(241): Homolog of NCBI NO: 11280705 NR Description: hypothetical protein F4P12.230 - Arabidopsis >gi|6729504|emb|CAB67660.1| putative protein [Arabidopsis
  misc_feature (171)..(242): Homolog of NCBI NO: 34906086 NR Description: P0459B04.21 [Oryza sativa (japonica
MTRLGLESSEQKRLAKRKSKKGDSDVGKSPVSCFSSDTPQGSSRYLLSNPVFFDGFVDSDPIPIPIDEPEITKADDLNNFHEDRLIINASKYLSTSASFLEKKQPDFFEGFLDYEPVLSPDNPFSEPTKASPTASLSSLEDKDVSSPDFKFSPPPPPPPSPPQSSPPSPPEKNSSSDQVVVLRVSLHCKGCAGKVKKHLSKLKGVTSYNIDFAAKKVTVTGDVTPLTVLASISKVKNAQFWPEIIQK

SEQ ID NO: 105686 - DNA, 987 bp, Arabidopsis thaliana
  misc_feature (1)..(987): Ceres Seq. ID no. 13617784
  misc_feature: MA Experiment ID: 108434 Result: Up-regulated in Transcription
  misc_feature: MA Experiment 108434 PARAMETER Experiment Name: At_Root_Tips_cDNA_P Parameter: Tissue Value: Root Tips
  misc_feature: MA Experiment ID: 108573 Result: Up-regulated in Transcription
  misc_feature: MA Experiment 108573 PARAMETER Experiment Name: At_Drought_cDNA_P Parameter: Timepoint (hr) Value: 6
  misc_feature: MA Experiment 108573 PARAMETER Experiment Name: At_Drought_cDNA_P Parameter: Tissue Value: Aerial
  misc_feature: MA Experiment 108573 PARAMETER Experiment Name: At_Drought_cDNA_P Parameter: Treatment Value: Drought vs. No Drought
  misc_feature: MA Experiment ID: 108595 Result: Down-regulated in Transcription
  misc_feature: MA Experiment 108595 PARAMETER Experiment Name: At_Ler-pi_Ovule_cDNA_P Parameter: Plant Line Value: null
  misc_feature: MA Experiment ID: 20000069 Result: Down-regulated in Transcription
  misc_feature: MA Experiment 20000069 PARAMETER Experiment Name: At_100uM_ABA_Mutants_cDNA_P Parameter: Plant Line Value: CS23
  misc_feature: MA Experiment 20000069 PARAMETER Experiment Name: At_100uM_ABA_Mutants_cDNA_P Parameter: Timepoint (hr) Value: 6
  misc_feature: MA Experiment 20000069 PARAMETER Experiment Name: At_100uM_ABA_Mutants_cDNA_P Parameter: Tissue Value: Aerial
  misc_feature: MA Experiment 20000069 PARAMETER Experiment Name: At_100uM_ABA_Mutants_cDNA_P Parameter: Treatment Value: 100uM ABA vs. No Treatment
  misc_feature: MA Experiment ID: 20000070 Result: Down-regulated in Transcription
  misc_feature: MA Experiment 20000070 PARAMETER Experiment Name: At_100uM_ABA_Mutants_cDNA_P Parameter: Plant Line Value: CS24
  misc_feature: MA Experiment 20000070 PARAMETER Experiment Name: At_100uM_ABA_Mutants_cDNA_P Parameter: Timepoint (hr) Value: 6
  misc_feature: MA Experiment 20000070 PARAMETER Experiment Name: At_100uM_ABA_Mutants_cDNA_P Parameter: Tissue Value: Aerial
  misc_feature: MA Experiment 20000070 PARAMETER Experiment Name: At_100uM_ABA_Mutants_cDNA_P Parameter: Treatment Value: 100uM ABA vs. No Treatment
  misc_feature: MA Experiment ID: 20000086 Result: Down-regulated in Transcription
  misc_feature: MA Experiment 20000086 PARAMETER Experiment Name: At_100uM_ABA_Mutants_cDNA_P Parameter: Plant Line Value: CS22
  misc_feature: MA Experiment 20000086 PARAMETER Experiment Name: At_100uM_ABA_Mutants_cDNA_P Parameter: Timepoint (hr) Value: 6
  misc_feature: MA Experiment 20000086 PARAMETER Experiment Name: At_100uM_ABA_Mutants_cDNA_P Parameter: Tissue Value: Aerial
  misc_feature: MA Experiment 20000086 PARAMETER Experiment Name: At_100uM_ABA_Mutants_cDNA_P Parameter: Treatment Value: 100uM ABA vs. No Treatment
  misc_feature: MA Experiment ID: 20000113 Result: Up-regulated in Transcription
  misc_feature: MA Experiment 20000113 PARAMETER Experiment Name: At_42deg_Heat_cDNA_P Parameter: Temperature (deg C) Value: 42 vs. 22
  misc_feature: MA Experiment 20000113 PARAMETER Experiment Name: At_42deg_Heat_cDNA_P Parameter: Timepoint (hr) Value: 8
  misc_feature: MA Experiment 20000113 PARAMETER Experiment Name: At_42deg_Heat_cDNA_P Parameter: Tissue Value: Aerial
  misc_feature: MA Experiment ID: 20000184 Result: Up-regulated in Transcription
  misc_feature: MA Experiment 20000184 PARAMETER Experiment Name: At_Shoots__P Parameter: Age (day) Value: 7
  misc_feature: MA Experiment 20000184 PARAMETER Experiment Name: At_Shoots__P Parameter: Tissue Value: Shoots vs. Whole Plant
  misc_feature: MA Experiment ID: 20000185 Result: Up-regulated in Transcription
  misc_feature: MA Experiment 20000185 PARAMETER Experiment Name: At_Roots__P Parameter: Age (day) Value: 7 vs. 21
  misc_feature: MA Experiment 20000185 PARAMETER Experiment Name: At_Roots__P Parameter: Organism Value: A. thaliana
  misc_feature: MA Experiment 20000185 PARAMETER Experiment Name: At_Roots__P Parameter: Tissue Value: Roots vs. Whole Plant
  misc_feature: MA Experiment ID: 20000227 Result: Down-regulated in Transcription
  misc_feature: MA Experiment 20000227 PARAMETER Experiment Name: At_Root-Tips-vs-Tops_P Parameter: Tissue Value: Root Tips vs. Root Tops
  misc_feature: MA Experiment ID: 20000234 Result: Down-regulated in Transcription
  misc_feature: MA Experiment 20000234 PARAMETER Experiment Name: At_Siliques_P Parameter: Age (day) Value: 21
  misc_feature: MA Experiment 20000234 PARAMETER Experiment Name: At_Siliques_P Parameter: Organism Value: A. thaliana
  misc_feature: MA Experiment 20000234 PARAMETER Experiment Name: At_Siliques_P Parameter: Plant Line Value: WS
  misc_feature: MA Experiment 20000234 PARAMETER Experiment Name: At_Siliques_P Parameter: Tissue Value: Less Than 5mm Siliques vs. Whole Plant
  misc_feature: MA Experiment ID: 20000235 Result: Down-regulated in Transcription
  misc_feature: MA Experiment 20000235 PARAMETER Experiment Name: At_Siliques_P Parameter: Age (day) Value: 21
  misc_feature: MA Experiment 20000235 PARAMETER Experiment Name: At_Siliques_P Parameter: Organism Value: A. thaliana
  misc_feature: MA Experiment 20000235 PARAMETER Experiment Name: At_Siliques_P Parameter: Plant Line Value: WS
  misc_feature: MA Experiment 20000235 PARAMETER Experiment Name: At_Siliques_P Parameter: Tissue Value: 5-10mm Siliques vs. Whole Plant
  misc_feature: MA Experiment ID: 20000264 Result: Down-regulated in Transcription
  misc_feature: MA Experiment 20000264 PARAMETER Experiment Name: At_Open_Flower_P Parameter: Age (day) Value: 21
  misc_feature: MA Experiment 20000264 PARAMETER Experiment Name: At_Open_Flower_P Parameter: Plant Line Value: WS
  misc_feature: MA Experiment 20000264 PARAMETER Experiment Name: At_Open_Flower_P Parameter: Tissue Value: Open Flower vs. Whole Plant
  misc_feature: MA Experiment ID: 20000265 Result: Down-regulated in Transcription
  misc_feature: MA Experiment 20000265 PARAMETER Experiment Name: At_Open_Flower_P Parameter: Age (day) Value: 21
  misc_feature: MA Experiment 20000265 PARAMETER Experiment Name: At_Open_Flower_P Parameter: Plant Line Value: WS
  misc_feature: MA Experiment 20000265 PARAMETER Experiment Name: At_Open_Flower_P Parameter: Tissue Value: Closed Flower vs. Whole Plant
  misc_feature: MA Experiment ID: 20000269 Result: Down-regulated in Transcription
  misc_feature: MA Experiment 20000269 PARAMETER Experiment Name: At_1mM_KNO3_L-vs-H_Roots_P Parameter: Age (day) Value: 7,10,12
  misc_feature: MA Experiment 20000269 PARAMETER Experiment Name: At_1mM_KNO3_L-vs-H_Roots_P Parameter: Organism Value: A. thaliana
  misc_feature: MA Experiment 20000269 PARAMETER Experiment Name: At_1mM_KNO3_L-vs-H_Roots_P Parameter: Plant Line Value: WS
  misc_feature: MA Experiment 20000269 PARAMETER Experiment Name: At_1mM_KNO3_L-vs-H_Roots_P Parameter: Timepoint (day) Value: 7,10,12
  misc_feature: MA Experiment 20000269 PARAMETER Experiment Name: At_1mM_KNO3_L-vs-H_Roots_P Parameter: Tissue Value: Roots
  misc_feature: MA Experiment 20000269 PARAMETER Experiment Name: At_1mM_KNO3_L-vs-H_Roots_P Parameter: Treatment Value: 1mM KNO3 vs. 50mM KNO3
  misc_feature: MA Experiment ID: 20000286 Result: Down-regulated in Transcription
  misc_feature: MA Experiment 20000286 PARAMETER Experiment Name: At_Open_Flower_P Parameter: Age (day) Value: 21
  misc_feature: MA Experiment 20000286 PARAMETER Experiment Name: At_Open_Flower_P Parameter: Plant Line Value: WS
  misc_feature: MA Experiment 20000286 PARAMETER Experiment Name: At_Open_Flower_P Parameter: Tissue Value: Half Open vs. Whole Plant
  misc_feature: MA Experiment ID: 20000441 Result: Up-regulated in Transcription
  misc_feature: MA Experiment 20000441 PARAMETER Experiment Name: At_1uM_BR-BRZ__P Parameter: Tissue Value: Shoot Apices
  misc_feature: MA Experiment 20000441 PARAMETER Experiment Name: At_1uM_BR-BRZ__P Parameter: Treatment Value: 1uM BR vs. No Treatment
  misc_feature: MA Experiment ID: 20000443 Result: Up-regulated in Transcription
  misc_feature: MA Experiment 20000443 PARAMETER Experiment Name: At_1uM_BR-BRZ__P Parameter: Tissue Value: Shoot Apices
  misc_feature: MA Experiment 20000443 PARAMETER Experiment Name: At_1uM_BR-BRZ__P Parameter: Treatment Value: 1uM BRZ vs. No Treatment
  misc_feature: MA Experiment ID: 20000456 Result: Down-regulated in Transcription
  misc_feature: MA Experiment 20000456 PARAMETER Experiment Name: At_100uM_BA_P Parameter: Age (day) Value: 14
  misc_feature: MA Experiment 20000456 PARAMETER Experiment Name: At_100uM_BA_P Parameter: Organism Value: A. thaliana
  misc_feature: MA Experiment 20000456 PARAMETER Experiment Name: At_100uM_BA_P Parameter: Plant Line Value: WS
  misc_feature: MA Experiment 20000456 PARAMETER Experiment Name: At_100uM_BA_P Parameter: Timepoint (hr) Value: 6
  misc_feature: MA Experiment 20000456 PARAMETER Experiment Name: At_100uM_BA_P Parameter: Tissue Value: Aerial
  misc_feature: MA Experiment 20000456 PARAMETER Experiment Name: At_100uM_BA_P Parameter: Treatment Value: 100uM BA vs. No Treatment
  misc_feature: MA Experiment ID: 20000527 Result: Up-regulated in Transcription
  misc_feature: MA Experiment 20000527 PARAMETER Experiment Name: At_10percent_PEG_P Parameter: Age (day) Value: 20
  misc_feature: MA Experiment 20000527 PARAMETER Experiment Name: At_10percent_PEG_P Parameter: Organism Value: A. thaliana
  misc_feature: MA Experiment 20000527 PARAMETER Experiment Name: At_10percent_PEG_P Parameter: Plant Line Value: WS
  misc_feature: MA Experiment 20000527 PARAMETER Experiment Name: At_10percent_PEG_P Parameter: Timepoint (day) Value: 20
  misc_feature: MA Experiment 20000527 PARAMETER Experiment Name: At_10percent_PEG_P Parameter: Tissue Value: Whole Plant
  misc_feature: MA Experiment 20000527 PARAMETER Experiment Name: At_10percent_PEG_P Parameter: Treatment Value: 10percent PEG vs. No Treatment
  misc_feature: MA Experiment ID: 20000709 Result: Up-regulated in Transcription
  misc_feature: MA Experiment 20000709 PARAMETER Experiment Name: At_15mM_NH4NO3_L-to-H_P Parameter: Age (hr) Value: 14
  misc_feature: MA Experiment 20000709 PARAMETER Experiment Name: At_15mM_NH4NO3_L-to-H_P Parameter: Organism Value: A. thaliana
  misc_feature: MA Experiment 20000709 PARAMETER Experiment Name: At_15mM_NH4NO3_L-to-H_P Parameter: Plant Line Value: WS
  misc_feature: MA Experiment 20000709 PARAMETER Experiment Name: At_15mM_NH4NO3_L-to-H_P Parameter: Timepoint (hr) Value: 4
  misc_feature: MA Experiment 20000709 PARAMETER Experiment Name: At_15mM_NH4NO3_L-to-H_P Parameter: Tissue Value: Aerial
  misc_feature: MA Experiment 20000709 PARAMETER Experiment Name: At_15mM_NH4NO3_L-to-H_P Parameter: Treatment Value: 15mM NH4NO3 vs. 30mM Mannitol
  misc_feature: MA Experiment ID: 20001451 Result: Up-regulated in Transcription
  misc_feature: MA Experiment 20001451 PARAMETER Experiment Name: At_Far-red-induction_P Parameter: Age (day) Value: 7
  misc_feature: MA Experiment 20001451 PARAMETER Experiment Name: At_Far-red-induction_P Parameter: Light Value: Far-red vs. White
  misc_feature: MA Experiment 20001451 PARAMETER Experiment Name: At_Far-red-induction_P Parameter: Organism Value: A. thaliana
  misc_feature: MA Experiment 20001451 PARAMETER Experiment Name: At_Far-red-induction_P Parameter: Plant Line Value: Columbia
  misc_feature: MA Experiment 20001451 PARAMETER Experiment Name: At_Far-red-induction_P Parameter: Timepoint (hr) Value: 24
  misc_feature: MA Experiment 20001451 PARAMETER Experiment Name: At_Far-red-induction_P Parameter: Tissue Value: Whole Plant
  misc_feature: MA Experiment ID: 20001458 Result: Up-regulated in Transcription
  misc_feature: MA Experiment 20001458 PARAMETER Experiment Name: At_50mM_NH4NO3_L-to-H_P Parameter: Age (day) Value: Undefined
  misc_feature: MA Experiment 20001458 PARAMETER Experiment Name: At_50mM_NH4NO3_L-to-H_P Parameter: Organism Value: Undefined
  misc_feature: MA Experiment 20001458 PARAMETER Experiment Name: At_50mM_NH4NO3_L-to-H_P Parameter: Plant Line Value: Undefined
  misc_feature: MA Experiment 20001458 PARAMETER Experiment Name: At_50mM_NH4NO3_L-to-H_P Parameter: Timepoint (hr) Value: 2
  misc_feature: MA Experiment 20001458 PARAMETER Experiment Name: At_50mM_NH4NO3_L-to-H_P Parameter: Tissue Value: Siliques
  misc_feature: MA Experiment 20001458 PARAMETER Experiment Name: At_50mM_NH4NO3_L-to-H_P Parameter: Treatment Value: 50mM NH4NO3 vs. 100mM Manitol
  misc_feature: MA Experiment ID: 20001555 Result: Up-regulated in Transcription
  misc_feature: MA Experiment 20001555 PARAMETER Experiment Name: At_Drought_Soil_Dry_P Parameter: Age (day) Value: 24
  misc_feature: MA Experiment 20001555 PARAMETER Experiment Name: At_Drought_Soil_Dry_P Parameter: Organism Value: A. thaliana
  misc_feature: MA Experiment 20001555 PARAMETER Experiment Name: At_Drought_Soil_Dry_P Parameter: Plant Line Value: WS
  misc_feature: MA Experiment 20001555 PARAMETER Experiment Name: At_Drought_Soil_Dry_P Parameter: Post Timepoint (hr) Value: None
  misc_feature: MA Experiment 20001555 PARAMETER Experiment Name: At_Drought_Soil_Dry_P Parameter: Post-Treatment Value: None
  misc_feature: MA Experiment 20001555 PARAMETER Experiment Name: At_Drought_Soil_Dry_P Parameter: Timepoint (day) Value: 10
  misc_feature: MA Experiment 20001555 PARAMETER Experiment Name: At_Drought_Soil_Dry_P Parameter: Treatment Value: Drought vs. No Drought
  misc_feature: MA Experiment ID: 20001556 Result: Up-regulated in Transcription
  misc_feature: MA Experiment 20001556 PARAMETER Experiment Name: At_Drought_Soil_Dry_P Parameter: Age (day) Value: 26
  misc_feature: MA Experiment 20001556 PARAMETER Experiment Name: At_Drought_Soil_Dry_P Parameter: Organism Value: A. thaliana
  misc_feature: MA Experiment 20001556 PARAMETER Experiment Name: At_Drought_Soil_Dry_P Parameter: Plant Line Value: WS
  misc_feature: MA Experiment 20001556 PARAMETER Experiment Name: At_Drought_Soil_Dry_P Parameter: Post Timepoint (hr) Value: None
  misc_feature: MA Experiment 20001556 PARAMETER Experiment Name: At_Drought_Soil_Dry_P Parameter: Post-Treatment Value: None
  misc_feature: MA Experiment 20001556 PARAMETER Experiment Name: At_Drought_Soil_Dry_P Parameter: Timepoint (day) Value: 12
  misc_feature: MA Experiment 20001556 PARAMETER Experiment Name: At_Drought_Soil_Dry_P Parameter: Treatment Value: Drought vs. No Drought
  misc_feature: MA Experiment ID: 20001557 Result: Up-regulated in Transcription
  misc_feature: MA Experiment 20001557 PARAMETER Experiment Name: At_Drought_Soil_Dry_P Parameter: Age (day) Value: 27
  misc_feature: MA Experiment 20001557 PARAMETER Experiment Name: At_Drought_Soil_Dry_P Parameter: Organism Value: A. thaliana
  misc_feature: MA Experiment 20001557 PARAMETER Experiment Name: At_Drought_Soil_Dry_P Parameter: Plant Line Value: WS
  misc_feature: MA Experiment 20001557 PARAMETER Experiment Name: At_Drought_Soil_Dry_P Parameter: Post Timepoint (hr) Value: 3
  misc_feature: MA Experiment 20001557 PARAMETER Experiment Name: At_Drought_Soil_Dry_P Parameter: Post-Treatment Value: Re-Water vs. No Drought
  misc_feature: MA Experiment 20001557 PARAMETER Experiment Name: At_Drought_Soil_Dry_P Parameter: Timepoint (day) Value: 13
  misc_feature: MA Experiment 20001557 PARAMETER Experiment Name: At_Drought_Soil_Dry_P Parameter: Treatment Value: Drought vs. No Drought
  misc_feature: MA Experiment ID: 20001558 Result: Up-regulated in Transcription
  misc_feature: MA Experiment 20001558 PARAMETER Experiment Name: At_Drought_Soil_Dry_P Parameter: Age (day) Value: 27
  misc_feature: MA Experiment 20001558 PARAMETER Experiment Name: At_Drought_Soil_Dry_P Parameter: Organism Value: A. thaliana
  misc_feature: MA Experiment 20001558 PARAMETER Experiment Name: At_Drought_Soil_Dry_P Parameter: Plant Line Value: WS
  misc_feature: MA Experiment 20001558 PARAMETER Experiment Name: At_Drought_Soil_Dry_P Parameter: Post Timepoint (hr) Value: 6
  misc_feature: MA Experiment 20001558 PARAMETER Experiment Name: At_Drought_Soil_Dry_P Parameter: Post-Treatment Value: Re-Water vs. No Drought
  misc_feature: MA Experiment 20001558 PARAMETER Experiment Name: At_Drought_Soil_Dry_P Parameter: Timepoint (day) Value: 13
  misc_feature: MA Experiment 20001558 PARAMETER Experiment Name: At_Drought_Soil_Dry_P Parameter: Treatment Value: Drought vs. No Drought
  misc_feature: MA Experiment ID: 20001560 Result: Up-regulated in Transcription
  misc_feature: MA Experiment 20001560 PARAMETER Experiment Name: At_Drought_Soil_Dry_P Parameter: Age (day) Value: 28
  misc_feature: MA Experiment 20001560 PARAMETER Experiment Name: At_Drought_Soil_Dry_P Parameter: Organism Value: A. thaliana
  misc_feature: MA Experiment 20001560 PARAMETER Experiment Name: At_Drought_Soil_Dry_P Parameter: Plant Line Value: WS
  misc_feature: MA Experiment 20001560 PARAMETER Experiment Name: At_Drought_Soil_Dry_P Parameter: Post Timepoint (hr) Value: None
  misc_feature: MA Experiment 20001560 PARAMETER Experiment Name: At_Drought_Soil_Dry_P Parameter: Post-Treatment Value: None
  misc_feature: MA Experiment 20001560 PARAMETER Experiment Name: At_Drought_Soil_Dry_P Parameter: Timepoint (day) Value: 14
  misc_feature: MA Experiment 20001560 PARAMETER Experiment Name: At_Drought_Soil_Dry_P Parameter: Treatment Value: Drought vs. No Drought
  misc_feature: MA Experiment ID: 20001756 Result: Up-regulated in Transcription
  misc_feature: MA Experiment 20001756 PARAMETER Experiment Name: At_50mM_NH4NO3_L-to-H_P Parameter: Timepoint (hr) Value: 4
  misc_feature: MA Experiment 20001756 PARAMETER Experiment Name: At_50mM_NH4NO3_L-to-H_P Parameter: Tissue Value: Leaf
  misc_feature: MA Experiment 20001756 PARAMETER Experiment Name: At_50mM_NH4NO3_L-to-H_P Parameter: Treatment Value: 50mM NH4NO3 vs 100mM Mannitol
  misc_feature: MA Experiment ID: 20001757 Result: Up-regulated in Transcription
  misc_feature: MA Experiment 20001757 PARAMETER Experiment Name: At_50mM_NH4NO3_L-to-H_P Parameter: Timepoint (hr) Value: 6
  misc_feature: MA Experiment 20001757 PARAMETER Experiment Name: At_50mM_NH4NO3_L-to-H_P Parameter: Tissue Value: Leaf
  misc_feature: MA Experiment 20001757 PARAMETER Experiment Name: At_50mM_NH4NO3_L-to-H_P Parameter: Treatment Value: 50mM NH4NO3 vs 100mM Mannitol
  misc_feature: MA Experiment ID: 20001904 Result: Up-regulated in Transcription
  misc_feature: MA Experiment 20001904 PARAMETER Experiment Name: At_Drought_Reproduction_P Parameter: Age (day) Value: 37
  misc_feature: MA Experiment 20001904 PARAMETER Experiment Name: At_Drought_Reproduction_P Parameter: Organism Value: A. thaliana
  misc_feature: MA Experiment 20001904 PARAMETER Experiment Name: At_Drought_Reproduction_P Parameter: Plant Line Value: WS
  misc_feature: MA Experiment 20001904 PARAMETER Experiment Name: At_Drought_Reproduction_P Parameter: Timepoint (day) Value: 7
  misc_feature: MA Experiment 20001904 PARAMETER Experiment Name: At_Drought_Reproduction_P Parameter: Tissue Value: Rosettes
  misc_feature: MA Experiment 20001904 PARAMETER Experiment Name: At_Drought_Reproduction_P Parameter: Treatment Value: Drought vs. No Drought
  misc_feature: MA Experiment ID: 20001905 Result: Up-regulated in Transcription
  misc_feature: MA Experiment 20001905 PARAMETER Experiment Name: At_Drought_Reproduction_P Parameter: Age (day) Value: 40
  misc_feature: MA Experiment 20001905 PARAMETER Experiment Name: At_Drought_Reproduction_P Parameter: Organism Value: A. thaliana
  misc_feature: MA Experiment 20001905 PARAMETER Experiment Name: At_Drought_Reproduction_P Parameter: Plant Line Value: WS
  misc_feature: MA Experiment 20001905 PARAMETER Experiment Name: At_Drought_Reproduction_P Parameter: Timepoint (day) Value: 10
  misc_feature: MA Experiment 20001905 PARAMETER Experiment Name: At_Drought_Reproduction_P Parameter: Tissue Value: Rosettes
  misc_feature: MA Experiment 20001905 PARAMETER Experiment Name: At_Drought_Reproduction_P Parameter: Treatment Value: Drought vs. No Drought
gaaacttgttttctctttcccttcttcaatcaaaacctatttgcatgctctcaaacccgaattaaatcgacacttttcagtttttgttttaacaagtagagtttcccaaaatattggatatatttctttttcaaatttcggaaaagaaatgagttgcaatggatgtagagttcttcgaaaaggttgcagtgaaacatgcatccttcgtccttgccttcaatggatcgaatccgccgagtcacaaggccacgccaccgtcttcgtcgctaaattctttggtcgtgctggtctcatgtctttcatctcctccgtacctgaactccaacgtcctgctttgtttcagtcgttgttgtttgaagcgtgtgggagaacggtgaatccggttaacggagcggttggtatgttgtggaccaggaactggcacgtatgccaagcggcggttgagactgttcttcgcggcggaactttacgaccgatatcagatcttcttgaatctccgtcgttgatgatctcctgtgatgagtcttcagagatttggcatcaagacgtttcaagaaaccaaacccaccattgtcgcttctccacctccagatccacgacggagatgaaagactctctggttaaccgaaaacgattgaagtccgattcggatcttgatctccaagtgaaccacggtttaaccctaaccgctccggctgtaccggttccttttcttcctccgtcgtcgttttgtaaggtggttaagggtgatcgtccgggaagtccatcggaggaatctgtaacgacgtcgtgttgggaaaatgggatgagaggagataataaacaaaaaagaaacaaaggagagaaaaagttattgaacctttttgtttaaaaccgacgacgcaaaacactcaaagattttgaggctctcttttttagggttttgagtgggaatggatatttagttaatgatttttctctatcgagaaatatgataaaattttgggg

SEQ ID NO: 105687 - protein, 289 aa, Arabidopsis thaliana
  peptide (1)..(289): Ceres Seq. ID no. 13617785
  misc_feature (51)..(156): Pfam Name: Protein of unknown function DUF260 Pfam Description: Protein of unknown function DUF260
  misc_feature (50)..(289): Homolog of NCBI NO: 15235604 NR Description: lateral organ boundaries (LOB) domain family
  misc_feature (50)..(289): Homolog of NCBI NO: 21592894 NR Description: unknown [Arabidopsis thaliana]
  misc_feature (50)..(288): Homolog of NCBI NO: 15229644 NR Description: lateral organ boundaries (LOB) domain protein, [Arabidopsis thaliana] >gi|29428046|sp|Q9SN23|LB38_ARATH LOB
  misc_feature (50)..(288): Homolog of NCBI NO: 21553886 NR Description: unknown [Arabidopsis thaliana]
  misc_feature (50)..(289): Homolog of NCBI NO: 21593577 NR Description: unknown [Arabidopsis thaliana]
  misc_feature (50)..(289): Homolog of NCBI NO: 15240739 NR Description: lateral organ boundaries (LOB) domain protein 37 [Arabidopsis thaliana] >gi|27805497|sp|Q9FN11|LB37_ARATH LOB protein 37 >gi|9758441|dbj|BAB09027.1|
  misc_feature (50)..(289): Homolog of NCBI NO: 34394489 NR Description: putative lateral organ boundaries (LOB) domain
  misc_feature (50)..(160): Homolog of NCBI NO: 15219829 NR Description: lateral organ boundaries (LOB) domain family
  misc_feature (50)..(160): Homolog of NCBI NO: 40539088 NR Description: expressed protein [Oryza sativa (japonica
  misc_feature (50)..(189): Homolog of NCBI NO: 34895540 NR Description: unnamed protein product [Oryza sativa (japonica group)] >gi|9558469|dbj|BAB03390.1| unnamed protein product
KLVFSFPSSIKTYLHALKPELNRHFSVFVLTSRVSQNIGYISFSNFGKEMSCNGCRVLRKGCSETCILRPCLQWIESAESQGHATVFVAKFFGRAGLMSFISSVPELQRPALFQSLLFEACGRTVNPVNGAVGMLWTRNWHVCQAAVETVLRGGTLRPISDLLESPSLMISCDESSEIWHQDVSRNQTHHCRFSTSRSTTEMKDSLVNRKRLKSDSDLDLQVNHGLTLTAPAVPVPFLPPSSFCKVVKGDRPGSPSEESVTTSCWENGMRGDNKQKRNKGEKKLLNLFV

SEQ ID NO: 105688 - protein, 240 aa, Arabidopsis thaliana; identical to SEQ ID NO: 22523
  peptide (1)..(240): Ceres Seq. ID no. 13617786
  misc_feature (2)..(107): Pfam Name: Protein of unknown function DUF260 Pfam Description: Protein of unknown function DUF260
  misc_feature (1)..(240): Homolog of NCBI NO: 15235604 NR Description: lateral organ boundaries (LOB) domain family
  misc_feature (1)..(240): Homolog of NCBI NO: 21592894 NR Description: unknown [Arabidopsis thaliana]
  misc_feature (1)..(239): Homolog of NCBI NO: 15229644 NR Description: lateral organ boundaries (LOB) domain protein, [Arabidopsis thaliana] >gi|29428046|sp|Q9SN23|LB38_ARATH LOB
  misc_feature (1)..(239): Homolog of NCBI NO: 21553886 NR Description: unknown [Arabidopsis thaliana]
  misc_feature (1)..(240): Homolog of NCBI NO: 21593577 NR Description: unknown [Arabidopsis thaliana]
  misc_feature (1)..(240): Homolog of NCBI NO: 15240739 NR Description: lateral organ boundaries (LOB) domain protein 37 [Arabidopsis thaliana] >gi|27805497|sp|Q9FN11|LB37_ARATH LOB protein 37 >gi|9758441|dbj|BAB09027.1|
  misc_feature (1)..(240): Homolog of NCBI NO: 34394489 NR Description: putative lateral organ boundaries (LOB) domain
  misc_feature (1)..(111): Homolog of NCBI NO: 15219829 NR Description: lateral organ boundaries (LOB) domain family
  misc_feature (1)..(111): Homolog of NCBI NO: 40539088 NR Description: expressed protein [Oryza sativa (japonica
  misc_feature (1)..(140): Homolog of NCBI NO: 34895540 NR Description: unnamed protein product [Oryza sativa (japonica group)] >gi|9558469|dbj|BAB03390.1| unnamed protein product

SEQ ID NO: 105689 - protein, 192 aa, Arabidopsis thaliana; identical to SEQ ID NO: 22524
  peptide (1)..(192): Ceres Seq. ID no. 13617787
  misc_feature (1)..(59): Pfam Name: Protein of unknown function DUF260 Pfam Description: Protein of unknown function DUF260
  misc_feature (1)..(192): Homolog of NCBI NO: 15235604 NR Description: lateral organ boundaries (LOB) domain family
  misc_feature (1)..(192): Homolog of NCBI NO: 21592894 NR Description: unknown [Arabidopsis thaliana]
  misc_feature (1)..(191): Homolog of NCBI NO: 15229644 NR Description: lateral organ boundaries (LOB) domain protein, [Arabidopsis thaliana] >gi|29428046|sp|Q9SN23|LB38_ARATH LOB
  misc_feature (1)..(191): Homolog of NCBI NO: 21553886 NR Description: unknown [Arabidopsis thaliana]
  misc_feature (1)..(192): Homolog of NCBI NO: 21593577 NR Description: unknown [Arabidopsis thaliana]
  misc_feature (1)..(192): Homolog of NCBI NO: 15240739 NR Description: lateral organ boundaries (LOB) domain protein 37 [Arabidopsis thaliana] >gi|27805497|sp|Q9FN11|LB37_ARATH LOB protein 37 >gi|9758441|dbj|BAB09027.1|
  misc_feature (1)..(192): Homolog of NCBI NO: 34394489 NR Description: putative lateral organ boundaries (LOB) domain
  misc_feature (1)..(63): Homolog of NCBI NO: 15219829 NR Description: lateral organ boundaries (LOB) domain family
  misc_feature (1)..(63): Homolog of NCBI NO: 40539088 NR Description: expressed protein [Oryza sativa (japonica
  misc_feature (1)..(92): Homolog of NCBI NO: 34895540 NR Description: unnamed protein product [Oryza sativa (japonica group)] >gi|9558469|dbj|BAB03390.1| unnamed protein product

SEQ ID NO: 105690 - DNA, 1494 bp, Arabidopsis thaliana
  misc_feature (1)..(1494): Ceres Seq. ID no. 13617788
  misc_feature: MA Experiment ID: 108462 Result: Up-regulated in Transcription
  misc_feature: MA Experiment 108462 PARAMETER Experiment Name: At_Germinating_Seeds_cDNA_P Parameter: Age (day) Value: 2 vs. 0
  misc_feature: MA Experiment 108462 PARAMETER Experiment Name: At_Germinating_Seeds_cDNA_P Parameter: Tissue Value: Germinating Seeds
  misc_feature: MA Experiment ID: 108463 Result: Up-regulated in Transcription
  misc_feature: MA Experiment 108463 PARAMETER Experiment Name: At_Germinating_Seeds_cDNA_P Parameter: Age (day) Value: 3 vs. 0
  misc_feature: MA Experiment 108463 PARAMETER Experiment Name: At_Germinating_Seeds_cDNA_P Parameter: Tissue Value: Germinating Seeds
  misc_feature: MA Experiment ID: 108464 Result: Up-regulated in Transcription
  misc_feature: MA Experiment 108464 PARAMETER Experiment Name: At_Germinating_Seeds_cDNA_P Parameter: Age (day) Value: 4 vs. 0
  misc_feature: MA Experiment 108464 PARAMETER Experiment Name: At_Germinating_Seeds_cDNA_P Parameter: Tissue Value: Germinating Seeds
  misc_feature: MA Experiment ID: 108579 Result: Down-regulated in Transcription
  misc_feature: MA Experiment 108579 PARAMETER Experiment Name: At_4deg_Cold_cDNA_P Parameter: Temperature (deg C) Value: 4 vs. 22
  misc_feature: MA Experiment 108579 PARAMETER Experiment Name: At_4deg_Cold_cDNA_P Parameter: Timepoint (hr) Value: 6
  misc_feature: MA Experiment 108579 PARAMETER Experiment Name: At_4deg_Cold_cDNA_P Parameter: Tissue Value: Aerial
  misc_feature: MA Experiment ID: 108595 Result: Down-regulated in Transcription
  misc_feature: MA Experiment 108595 PARAMETER Experiment Name: At_Ler-pi_Ovule_cDNA_P Parameter: Plant Line Value: null
  misc_feature: MA Experiment ID: 20000089 Result: Down-regulated in Transcription
  misc_feature: MA Experiment ID: 20000090 Result: Down-regulated in Transcription
  misc_feature: MA Experiment ID: 20000224 Result: Up-regulated in Transcription
  misc_feature: MA Experiment ID: 20000307 Result: Up-regulated in Transcription
  misc_feature: MA Experiment 20000307 PARAMETER Experiment Name: At_Germinating_Seeds_Sub_P Parameter: Age (hr) Value: 24 vs. 0
  misc_feature: MA Experiment 20000307 PARAMETER Experiment Name: At_Germinating_Seeds_Sub_P Parameter: Organism Value: A. thaliana
  misc_feature: MA Experiment 20000307 PARAMETER Experiment Name: At_Germinating_Seeds_Sub_P Parameter: Plant Line Value: WS
  misc_feature: MA Experiment 20000307 PARAMETER Experiment Name: At_Germinating_Seeds_Sub_P Parameter: Tissue Value: Germinating Seeds
  misc_feature: MA Experiment ID: 20000314 Result: Down-regulated in Transcription
  misc_feature: MA Experiment 20000314 PARAMETER Experiment Name: At_14day_Shoots-Roots_Sub_P Parameter: Age (day) Value: 14
  misc_feature: MA Experiment 20000314 PARAMETER Experiment Name: At_14day_Shoots-Roots_Sub_P Parameter: Organism Value: A. thaliana
  misc_feature: MA Experiment 20000314 PARAMETER Experiment Name: At_14day_Shoots-Roots_Sub_P Parameter: Plant Line Value: WS
  misc_feature: MA Experiment 20000314 PARAMETER Experiment Name: At_14day_Shoots-Roots_Sub_P Parameter: Tissue Value: Roots vs. Whole Plant
  misc_feature: MA Experiment ID: 20000329 Result: Down-regulated in Transcription
  misc_feature: MA Experiment 20000329 PARAMETER Experiment Name: At_4deg_Cold_Sub_P Parameter: Age (day) Value: 14
  misc_feature: MA Experiment 20000329 PARAMETER Experiment Name: At_4deg_Cold_Sub_P Parameter: Organism Value: A. thaliana
  misc_feature: MA Experiment 20000329 PARAMETER Experiment Name: At_4deg_Cold_Sub_P Parameter: Plant Line Value: WS
  misc_feature: MA Experiment 20000329 PARAMETER Experiment Name: At_4deg_Cold_Sub_P Parameter: Temperature (deg C) Value: 4 vs. 22
  misc_feature: MA Experiment 20000329 PARAMETER Experiment Name: At_4deg_Cold_Sub_P Parameter: Timepoint (hr) Value: 6
  misc_feature: MA Experiment 20000329 PARAMETER Experiment Name: At_4deg_Cold_Sub_P Parameter: Tissue Value: Aerial
  misc_feature: MA Experiment ID: 20001807 Result: Up-regulated in Transcription
  misc_feature: MA Experiment 20001807 PARAMETER Experiment Name: At_50mM_NH4NO3_L-to-H_Sub_P Parameter: Timepoint (hr) Value: 6
  misc_feature: MA Experiment 20001807 PARAMETER Experiment Name: At_50mM_NH4NO3_L-to-H_Sub_P Parameter: Tissue Value: Leaf
  misc_feature: MA Experiment 20001807 PARAMETER Experiment Name: At_50mM_NH4NO3_L-to-H_Sub_P Parameter: Treatment Value: 50mM NH4NO3 vs 100mM Mannitol
gagagatcactgtacttattgggttttgatctttgatggctccactgagtccaagagtagtggtgaaggtggatttgaagaagaagccatggcagcaggaccagccattgcacaatagatggcatccggagataccaccagtagcagaggtcaaggctggtgagtttttccgggtagaaatgattgatgcaatgggaggtgttatcaaagacaatgactctgcaagcgatatcaagaacctagtcctaactactactcatcacctaagtgggccgattagggttgtagatgaggaaggtgttgcagctaaagcaggtgatcttcttgctgttgagatatgcaacttgggtcctcttccaggagatgaatggggattcactggttcgtttgatagagagaatggtggcggtttcttgactgaccatttcccttgtgcgaccaaagctatttggtactttgaagggatctatgcctactctcctcagattcctggagtacgatttccgggtttgacacacccaggagtcattggcactgcaccatcgaatgaactcttgagaatatggaatgatagggaaagacaattagaagaaagtggtgttgagtccctaacactatgtgaggtagtgcatcagcggccattagcatgcctaccaacaactaaaggatgtctcctcgggaatattgaagaaggaacaccagaatgggaaaggattgcaaacgaggctgcgaggacaataccaggaagagaaaacggaggaaactgtgacattaaaaacctaagcagaggctctaaaatatatcttccagtatttgttgaaggggctaatctaagcacaggagacatgcatttctcacaaggtgatggtgagatctcgttctgcggagccatcgagatgagtggatttctagaactcaagtgtgaaatcataagaaatgggatgcaagagtaccttacgccaatgggacctacccctctccatgtaaacccaatctttgagataggaccagtggaaccgaggttctcagagtggcttgtcttcgaaggtatcagtgtcgatgagagcggaaaacagcattacctagatgcaacagttgcttacaaacgggcagttctcaacgccatagactatcttttcaaatttggttactcaaaagaacaggtgtacctcttactctcatgttgtccatgtgaaggaagactatctgggatagttgattctccgaatgccgttgctacactagcaatacctacagccatctttgatcaggatattaggccaaagaatcggaaggttccagtaggacctcgggttgtgaggaaaccagatgtactgaagagcacatatgatggaaagcttccaattacaaagaatccaagttcttcctcttagcttctacaaaaaaattaaaattaaaatttagaagctaataccaagattgtataatcaagcatatgttccaataataaagcaataacttggtgttttcttt

SEQ ID NO: 105691 - protein, 452 aa, Arabidopsis thaliana
  peptide (1)..(452): Ceres Seq. ID no. 13617789
  misc_feature (8)..(202): Pfam Name: Acetamidase/Formamidase family Pfam Description: Acetamidase/Formamidase family
  misc_feature (1)..(452): Homolog of NCBI NO: 18420069 NR Description: formamidase - like protein [Arabidopsis thaliana]
  misc_feature (1)..(452): Homolog of NCBI NO: 21592429 NR Description: formamidase-like protein [Arabidopsis thaliana]
  misc_feature (214)..(452): Homolog of NCBI NO: 7488106 NR Description: probable formamidase (EC 3.5.1.49) F19F18.40 -
  misc_feature (1)..(202): Homolog of NCBI NO: 7488106 NR Description: probable formamidase (EC 3.5.1.49) F19F18.40 -
  misc_feature (1)..(452): Homolog of NCBI NO: 18420071 NR Description: formamidase - like protein [Arabidopsis thaliana]
  misc_feature (1)..(452): Homolog of NCBI NO: 14334654 NR Description: putative formamidase [Arabidopsis thaliana]
  misc_feature (1)..(451): Homolog of NCBI NO: 34909818 NR Description: putative formamidase [Oryza sativa (japonica group)] >gi|15289900|dbj|BAB63595.1| putative formamidase [Oryza
  misc_feature (4)..(419): Homolog of NCBI NO: 19115927 NR Description: formamidase-like protein [Schizosaccharomyces
  misc_feature (12)..(416): Homolog of NCBI NO: 33600391 NR Description: formamidase [Bordetella bronchiseptica]
  misc_feature (12)..(416): Homolog of NCBI NO: 33592607 NR Description: formamidase [Bordetella pertussis]
MAPLSPRVVVKVDLKKKPWQQDQPLHNRWHPEIPPVAEVKAGEFFRVEMIDAMGGVIKDNDSASDIKNLVLTTTHHLSGPIRVVDEEGVAAKAGDLLAVEICNLGPLPGDEWGFTGSFDRENGGGFLTDHFPCATKAIWYFEGIYAYSPQIPGVRFPGLTHPGVIGTAPSNELLRIWNDRERQLEESGVESLTLCEVVHQRPLACLPTTKGCLLGNIEEGTPEWERIANEAARTIPGRENGGNCDIKNLSRGSKIYLPVFVEGANLSTGDMHFSQGDGEISFCGAIEMSGFLELKCEIIRNGMQEYLTPMGPTPLHVNPIFEIGPVEPRFSEWLVFEGISVDESGKQHYLDATVAYKRAVLNAIDYLFKFGYSKEQVYLLLSCCPCEGRLSGIVDSPNAVATLAIPTAIFDQDIRPKNRKVPVGPRVVRKPDVLKSTYDGKLPITKNPSSSS

SEQ ID NO: 105692 - protein, 404 aa, Arabidopsis thaliana
  peptide (1)..(404): Ceres Seq. ID no. 13617790
  misc_feature (1)..(154): Pfam Name: Acetamidase/Formamidase family Pfam Description: Acetamidase/Formamidase family
  misc_feature (1)..(404): Homolog of NCBI NO: 18420069 NR Description: formamidase - like protein [Arabidopsis thaliana]
  misc_feature (1)..(404): Homolog of NCBI NO: 21592429 NR Description: formamidase-like protein [Arabidopsis thaliana]
  misc_feature (166)..(404): Homolog of NCBI NO: 7488106 NR Description: probable formamidase (EC 3.5.1.49) F19F18.40 -
  misc_feature (1)..(154): Homolog of NCBI NO: 7488106 NR Description: probable formamidase (EC 3.5.1.49) F19F18.40 -
  misc_feature (1)..(404): Homolog of NCBI NO: 18420071 NR Description: formamidase - like protein [Arabidopsis thaliana]
  misc_feature (1)..(404): Homolog of NCBI NO: 14334654 NR Description: putative formamidase [Arabidopsis thaliana]
  misc_feature (1)..(403): Homolog of NCBI NO: 34909818 NR Description: putative formamidase [Oryza sativa (japonica group)] >gi|15289900|dbj|BAB63595.1| putative formamidase [Oryza
  misc_feature (1)..(371): Homolog of NCBI NO: 19115927 NR Description: formamidase-like protein [Schizosaccharomyces
  misc_feature (1)..(368): Homolog of NCBI NO: 33600391 NR Description: formamidase [Bordetella bronchiseptica]
  misc_feature (1)..(368): Homolog of NCBI NO: 33592607 NR Description: formamidase [Bordetella pertussis]
MIDAMGGVIKDNDSASDIKNLVLTTTHHLSGPIRVVDEEGVAAKAGDLLAVEICNLGPLPGDEWGFTGSFDRENGGGFLTDHFPCATKAIWYFEGIYAYSPQIPGVRFPGLTHPGVIGTAPSNELLRIWNDRERQLEESGVESLTLCEVVHQRPLACLPTTKGCLLGNIEEGTPEWERIANEAARTIPGRENGGNCDIKNLSRGSKIYLPVFVEGANLSTGDMHFSQGDGEISFCGAIEMSGFLELKCEIIRNGMQEYLTPMGPTPLHVNPIFEIGPVEPRFSEWLVFEGISVDESGKQHYLDATVAYKRAVLNAIDYLFKFGYSKEQVYLLLSCCPCEGRLSGIVDSPNAVATLAIPTAIFDQDIRPKNRKVPVGPRVVRKPDVLKSTYDGKLPITKNPSSSS

SEQ ID NO: 105693 - protein, 400 aa, Arabidopsis thaliana
  peptide (1)..(400): Ceres Seq. ID no. 13617791
  misc_feature (1)..(150): Pfam Name: Acetamidase/Formamidase family Pfam Description: Acetamidase/Formamidase family
  misc_feature (1)..(400): Homolog of NCBI NO: 18420069 NR Description: formamidase - like protein [Arabidopsis thaliana]
  misc_feature (1)..(400): Homolog of NCBI NO: 21592429 NR Description: formamidase-like protein [Arabidopsis thaliana]
  misc_feature (162)..(400): Homolog of NCBI NO: 7488106 NR Description: probable formamidase (EC 3.5.1.49) F19F18.40 -
  misc_feature (1)..(150): Homolog of NCBI NO: 7488106 NR Description: probable formamidase (EC 3.5.1.49) F19F18.40 -
  misc_feature (1)..(400): Homolog of NCBI NO: 18420071 NR Description: formamidase - like protein [Arabidopsis thaliana]
  misc_feature (1)..(400): Homolog of NCBI NO: 14334654 NR Description: putative formamidase [Arabidopsis thaliana]
  misc_feature (1)..(399): Homolog of NCBI NO: 34909818 NR Description: putative formamidase [Oryza sativa (japonica group)] >gi|15289900|dbj|BAB63595.1| putative formamidase [Oryza
  misc_feature (1)..(367): Homolog of NCBI NO: 19115927 NR Description: formamidase-like protein [Schizosaccharomyces
  misc_feature (1)..(364): Homolog of NCBI NO: 33600391 NR Description: formamidase [Bordetella bronchiseptica]
  misc_feature (1)..(364): Homolog of NCBI NO: 33592607 NR Description: formamidase [Bordetella pertussis]
MGGVIKDNDSASDIKNLVLTTTHHLSGPIRVVDEEGVAAKAGDLLAVEICNLGPLPGDEWGFTGSFDRENGGGFLTDHFPCATKAIWYFEGIYAYSPQIPGVRFPGLTHPGVIGTAPSNELLRIWNDRERQLEESGVESLTLCEVVHQRPLACLPTTKGCLLGNIEEGTPEWERIANEAARTIPGRENGGNCDIKNLSRGSKIYLPVFVEGANLSTGDMHFSQGDGEISFCGAIEMSGFLELKCEIIRNGMQEYLTPMGPTPLHVNPIFEIGPVEPRFSEWLVFEGISVDESGKQHYLDATVAYKRAVLNAIDYLFKFGYSKEQVYLLLSCCPCEGRLSGIVDSPNAVATLAIPTAIFDQDIRPKNRKVPVGPRVVRKPDVLKSTYDGKLPITKNPSSSS

SEQ ID NO: 105694 - DNA, 1405 bp, Arabidopsis thaliana
  misc_feature (1)..(1405): Ceres Seq. ID no. 13617796
  misc_feature: MA Experiment ID: 20000171 Result: Down-regulated in Transcription
  misc_feature: MA Experiment 20000171 PARAMETER Experiment Name: At_42deg_Heat_P Parameter: Age (day) Value: 14
  misc_feature: MA Experiment 20000171 PARAMETER Experiment Name: At_42deg_Heat_P Parameter: Organism Value: A. thaliana
  misc_feature: MA Experiment 20000171 PARAMETER Experiment Name: At_42deg_Heat_P Parameter: Plant Line Value: WS
  misc_feature: MA Experiment 20000171 PARAMETER Experiment Name: At_42deg_Heat_P Parameter: Temperature (deg C) Value: 42 vs. 22
  misc_feature: MA Experiment 20000171 PARAMETER Experiment Name: At_42deg_Heat_P Parameter: Timepoint (hr) Value: 1
  misc_feature: MA Experiment 20000171 PARAMETER Experiment Name: At_42deg_Heat_P Parameter: Tissue Value: Aerial
  misc_feature: MA Experiment ID: 20000179 Result: Up-regulated in Transcription
  misc_feature: MA Experiment 20000179 PARAMETER Experiment Name: At_Germinating_Seeds_P Parameter: Age (hr) Value: 6 vs. 0
  misc_feature: MA Experiment 20000179 PARAMETER Experiment Name: At_Germinating_Seeds_P Parameter: Tissue Value: Germinating Seeds
  misc_feature: MA Experiment ID: 20000180 Result: Up-regulated in Transcription
  misc_feature: MA Experiment 20000180 PARAMETER Experiment Name: At_Germinating_Seeds_P Parameter: Age (hr) Value: 24 vs. 0
  misc_feature: MA Experiment 20000180 PARAMETER Experiment Name: At_Germinating_Seeds_P Parameter: Tissue Value: Germinating Seeds
  misc_feature: MA Experiment ID: 20000185 Result: Down-regulated in Transcription
  misc_feature: MA Experiment 20000185 PARAMETER Experiment Name: At_Roots__P Parameter: Age (day) Value: 7 vs. 21
  misc_feature: MA Experiment 20000185 PARAMETER Experiment Name: At_Roots__P Parameter: Organism Value: A. thaliana
  misc_feature: MA Experiment 20000185 PARAMETER Experiment Name: At_Roots__P Parameter: Tissue Value: Roots vs. Whole Plant
  misc_feature: MA Experiment ID: 20000234 Result: Down-regulated in Transcription
  misc_feature: MA Experiment 20000234 PARAMETER Experiment Name: At_Siliques_P Parameter: Age (day) Value: 21
  misc_feature: MA Experiment 20000234 PARAMETER Experiment Name: At_Siliques_P Parameter: Organism Value: A. thaliana
  misc_feature: MA Experiment 20000234 PARAMETER Experiment Name: At_Siliques_P Parameter: Plant Line Value: WS
  misc_feature: MA Experiment 20000234 PARAMETER Experiment Name: At_Siliques_P Parameter: Tissue Value: Less Than 5mm Siliques vs. Whole Plant
  misc_feature: MA Experiment ID: 20000264 Result: Down-regulated in Transcription
  misc_feature: MA Experiment 20000264 PARAMETER Experiment Name: At_Open_Flower_P Parameter: Age (day) Value: 21
  misc_feature: MA Experiment 20000264 PARAMETER Experiment Name: At_Open_Flower_P Parameter: Plant Line Value: WS
  misc_feature: MA Experiment 20000264 PARAMETER Experiment Name: At_Open_Flower_P Parameter: Tissue Value: Open Flower vs. Whole Plant
  misc_feature: MA Experiment ID: 20000265 Result: Down-regulated in Transcription
  misc_feature: MA Experiment 20000265 PARAMETER Experiment Name: At_Open_Flower_P Parameter: Age (day) Value: 21
  misc_feature: MA Experiment 20000265 PARAMETER Experiment Name: At_Open_Flower_P Parameter: Plant Line Value: WS
  misc_feature: MA Experiment 20000265 PARAMETER Experiment Name: At_Open_Flower_P Parameter: Tissue Value: Closed Flower vs. Whole Plant
  misc_feature: MA Experiment ID: 20000268 Result: Down-regulated in Transcription
  misc_feature: MA Experiment 20000268 PARAMETER Experiment Name: At_100mM_NaCl__P Parameter: Age (day) Value: 14
  misc_feature: MA Experiment 20000268 PARAMETER Experiment Name: At_100mM_NaCl__P Parameter: Organism Value: A. thaliana
  misc_feature: MA Experiment 20000268 PARAMETER Experiment Name: At_100mM_NaCl__P Parameter: Plant Line Value: WS
  misc_feature: MA Experiment 20000268 PARAMETER Experiment Name: At_100mM_NaCl__P Parameter: Timepoint (hr) Value: 6
  misc_feature: MA Experiment 20000268 PARAMETER Experiment Name: At_100mM_NaCl__P Parameter: Tissue Value: Whole Plant
  misc_feature: MA Experiment 20000268 PARAMETER Experiment Name: At_100mM_NaCl__P Parameter: Treatment Value: 100mM NaCl vs. No Treatment
  misc_feature: MA Experiment ID: 20000286 Result: Down-regulated in Transcription
  misc_feature: MA Experiment 20000286 PARAMETER Experiment Name: At_Open_Flower_P Parameter: Age (day) Value: 21
  misc_feature: MA Experiment 20000286 PARAMETER Experiment Name: At_Open_Flower_P Parameter: Plant Line Value: WS
  misc_feature: MA Experiment 20000286 PARAMETER Experiment Name: At_Open_Flower_P Parameter: Tissue Value: Half Open vs. Whole Plant
  misc_feature: MA Experiment ID: 20000436 Result: Down-regulated in Transcription
  misc_feature: MA Experiment 20000436 PARAMETER Experiment Name: At_Drought_P Parameter: Age (day) Value: 7
  misc_feature: MA Experiment 20000436 PARAMETER Experiment Name: At_Drought_P Parameter: Organism Value: A. thaliana
  misc_feature: MA Experiment 20000436 PARAMETER Experiment Name: At_Drought_P Parameter: Plant Line Value: WS
  misc_feature: MA Experiment 20000436 PARAMETER Experiment Name: At_Drought_P Parameter: Timepoint (hr) Value: 12
  misc_feature: MA Experiment 20000436 PARAMETER Experiment Name: At_Drought_P Parameter: Tissue Value: Whole Plant
  misc_feature: MA Experiment 20000436 PARAMETER Experiment Name: At_Drought_P Parameter: Treatment Value: Drought vs. No Drought
  misc_feature: MA Experiment ID: 20000437 Result: Down-regulated in Transcription
  misc_feature: MA Experiment 20000437 PARAMETER Experiment Name: At_Drought_P Parameter: Age (day) Value: 8
  misc_feature: MA Experiment 20000437 PARAMETER Experiment Name: At_Drought_P Parameter: Organism Value: A. thaliana
  misc_feature: MA Experiment 20000437 PARAMETER Experiment Name: At_Drought_P Parameter: Plant Line Value: WS
  misc_feature: MA Experiment 20000437 PARAMETER Experiment Name: At_Drought_P Parameter: Timepoint (hr) Value: 24
  misc_feature: MA Experiment 20000437 PARAMETER Experiment Name: At_Drought_P Parameter: Tissue Value: Whole Plant
  misc_feature: MA Experiment 20000437 PARAMETER Experiment Name: At_Drought_P Parameter: Treatment Value: Drought vs. No Drought
  misc_feature: MA Experiment ID: 20000439 Result: Down-regulated in Transcription
  misc_feature: MA Experiment 20000439 PARAMETER Experiment Name: At_Roots__P Parameter: Age (day) Value: 14 vs. 21
  misc_feature: MA Experiment 20000439 PARAMETER Experiment Name: At_Roots__P Parameter: Organism Value: A. thaliana
  misc_feature: MA Experiment 20000439 PARAMETER Experiment Name: At_Roots__P Parameter: Tissue Value: Roots vs. Whole Plant
  misc_feature: MA Experiment ID: 20000441 Result: Up-regulated in Transcription
  misc_feature: MA Experiment 20000441 PARAMETER Experiment Name: At_1uM_BR-BRZ__P Parameter: Tissue Value: Shoot Apices
  misc_feature: MA Experiment 20000441 PARAMETER Experiment Name: At_1uM_BR-BRZ__P Parameter: Treatment Value: 1uM BR vs. No Treatment
  misc_feature: MA Experiment ID: 20000443 Result: Up-regulated in Transcription
  misc_feature: MA Experiment 20000443 PARAMETER Experiment Name: At_1uM_BR-BRZ__P Parameter: Tissue Value: Shoot Apices
  misc_feature: MA Experiment 20000443 PARAMETER Experiment Name: At_1uM_BR-BRZ__P Parameter: Treatment Value: 1uM BRZ vs. No Treatment
  misc_feature: MA Experiment ID: 20000456 Result: Down-regulated in Transcription
  misc_feature: MA Experiment 20000456 PARAMETER Experiment Name: At_100uM_BA_P Parameter: Age (day) Value: 14
  misc_feature: MA Experiment 20000456 PARAMETER Experiment Name: At_100uM_BA_P Parameter: Organism Value: A. thaliana
  misc_feature: MA Experiment 20000456 PARAMETER Experiment Name: At_100uM_BA_P Parameter: Plant Line Value: WS
  misc_feature: MA Experiment 20000456 PARAMETER Experiment Name: At_100uM_BA_P Parameter: Timepoint (hr) Value: 6
  misc_feature: MA Experiment 20000456 PARAMETER Experiment Name: At_100uM_BA_P Parameter: Tissue Value: Aerial
  misc_feature: MA Experiment 20000456 PARAMETER Experiment Name: At_100uM_BA_P Parameter: Treatment Value: 100uM BA vs. No Treatment
  misc_feature: MA Experiment ID: 20000460 Result: Up-regulated in Transcription
  misc_feature: MA Experiment 20000460 PARAMETER Experiment Name: At_10percent_PEG_P Parameter: Age (day) Value: 12
  misc_feature: MA Experiment 20000460 PARAMETER Experiment Name: At_10percent_PEG_P Parameter: Organism Value: A. thaliana
  misc_feature: MA Experiment 20000460 PARAMETER Experiment Name: At_10percent_PEG_P Parameter: Plant Line Value: WS
  misc_feature: MA Experiment 20000460 PARAMETER Experiment Name: At_10percent_PEG_P Parameter: Timepoint (day) Value: 12
  misc_feature: MA Experiment 20000460 PARAMETER Experiment Name: At_10percent_PEG_P Parameter: Tissue Value: Whole Plant
  misc_feature: MA Experiment 20000460 PARAMETER Experiment Name: At_10percent_PEG_P Parameter: Treatment Value: 10percent PEG vs. No Treatment
  misc_feature: MA Experiment ID: 20000496 Result: Up-regulated in Transcription
  misc_feature: MA Experiment 20000496 PARAMETER Experiment Name: At_Guard_Cells_P Parameter: Harvest Date Value: 7/19/2002
  misc_feature: MA Experiment 20000496 PARAMETER Experiment Name: At_Guard_Cells_P Parameter: Organism Value: Canola
  misc_feature: MA Experiment 20000496 PARAMETER Experiment Name: At_Guard_Cells_P Parameter: Tissue Value: Guard Cells vs. Leaves
  misc_feature: MA Experiment ID: 20000527 Result: Up-regulated in Transcription
  misc_feature: MA Experiment 20000527 PARAMETER Experiment Name: At_10percent_PEG_P Parameter: Age (day) Value: 20
  misc_feature: MA Experiment 20000527 PARAMETER Experiment Name: At_10percent_PEG_P Parameter: Organism Value: A. thaliana
  misc_feature: MA Experiment 20000527 PARAMETER Experiment Name: At_10percent_PEG_P Parameter: Plant Line Value: WS
  misc_feature: MA Experiment 20000527 PARAMETER Experiment Name: At_10percent_PEG_P Parameter: Timepoint (day) Value: 20
  misc_feature: MA Experiment 20000527 PARAMETER Experiment Name: At_10percent_PEG_P Parameter: Tissue Value: Whole Plant
  misc_feature: MA Experiment 20000527 PARAMETER Experiment Name: At_10percent_PEG_P Parameter: Treatment Value: 10percent PEG vs. No Treatment
  misc_feature: MA Experiment ID: 20000573 Result: Down-regulated in Transcription
  misc_feature: MA Experiment 20000573 PARAMETER Experiment Name: At_100uM_ABA_Mutants__P Parameter: Organism Value: A. thaliana
  misc_feature: MA Experiment 20000573 PARAMETER Experiment Name: At_100uM_ABA_Mutants__P Parameter: Plant Line Value: CS22 vs. Ler wt
  misc_feature: MA Experiment 20000573 PARAMETER Experiment Name: At_100uM_ABA_Mutants__P Parameter: Timepoint (hr) Value: N/A
  misc_feature: MA Experiment 20000573 PARAMETER Experiment Name: At_100uM_ABA_Mutants__P Parameter: Tissue Value: Whole Plant
  misc_feature: MA Experiment 20000573 PARAMETER Experiment Name: At_100uM_ABA_Mutants__P Parameter: Treatment Value: None
  misc_feature: MA Experiment ID: 20000574 Result: Down-regulated in Transcription
  misc_feature: MA Experiment 20000574 PARAMETER Experiment Name: At_100uM_ABA_Mutants__P Parameter: Organism Value: A. thaliana
  misc_feature: MA Experiment 20000574 PARAMETER Experiment Name: At_100uM_ABA_Mutants__P Parameter: Plant Line Value: CS23 vs. Ler wt
  misc_feature: MA Experiment 20000574 PARAMETER Experiment Name: At_100uM_ABA_Mutants__P Parameter: Timepoint (hr) Value: N/A
  misc_feature: MA Experiment 20000574 PARAMETER Experiment Name: At_100uM_ABA_Mutants__P Parameter: Tissue Value: Whole Plant
  misc_feature: MA Experiment 20000574 PARAMETER Experiment Name: At_100uM_ABA_Mutants__P Parameter: Treatment Value: None
  misc_feature: MA Experiment ID: 20000709 Result: Up-regulated in Transcription
  misc_feature: MA Experiment 20000709 PARAMETER Experiment Name: At_15mM_NH4NO3_L-to-H_P Parameter: Age (hr) Value: 14
  misc_feature: MA Experiment 20000709 PARAMETER Experiment Name: At_15mM_NH4NO3_L-to-H_P Parameter: Organism Value: A. thaliana
  misc_feature: MA Experiment 20000709 PARAMETER Experiment Name: At_15mM_NH4NO3_L-to-H_P Parameter: Plant Line Value: WS
  misc_feature: MA Experiment 20000709 PARAMETER Experiment Name: At_15mM_NH4NO3_L-to-H_P Parameter: Timepoint (hr) Value: 4
  misc_feature: MA Experiment 20000709 PARAMETER Experiment Name: At_15mM_NH4NO3_L-to-H_P Parameter: Tissue Value: Aerial
  misc_feature: MA Experiment 20000709 PARAMETER Experiment Name: At_15mM_NH4NO3_L-to-H_P Parameter: Treatment Value: 15mM NH4NO3 vs. 30mM Mannitol
  misc_feature: MA Experiment ID: 20001248 Result: Up-regulated in Transcription
  misc_feature: MA Experiment 20001248 PARAMETER Experiment Name: At_Far-red-induction_P Parameter: Age (day) Value: 7
  misc_feature: MA Experiment 20001248 PARAMETER Experiment Name: At_Far-red-induction_P Parameter: Light Value: Far-red vs. White
  misc_feature: MA Experiment 20001248 PARAMETER Experiment Name: At_Far-red-induction_P Parameter: Organism Value: A. thaliana
  misc_feature: MA Experiment 20001248 PARAMETER Experiment Name: At_Far-red-induction_P Parameter: Plant Line Value: Columbia
  misc_feature: MA Experiment 20001248 PARAMETER Experiment Name: At_Far-red-induction_P Parameter: Timepoint (hr) Value: 4
  misc_feature: MA Experiment 20001248 PARAMETER Experiment Name: At_Far-red-induction_P Parameter: Tissue Value: Whole Plant
  misc_feature: MA Experiment ID: 20001450 Result: Up-regulated in Transcription
  misc_feature: MA Experiment 20001450 PARAMETER Experiment Name: At_Far-red-induction_P Parameter: Age (day) Value: 7
  misc_feature: MA Experiment 20001450 PARAMETER Experiment Name: At_Far-red-induction_P Parameter: Light Value: Far-red vs. White
  misc_feature: MA Experiment 20001450 PARAMETER Experiment Name: At_Far-red-induction_P Parameter: Organism Value: A. thaliana
  misc_feature: MA Experiment 20001450 PARAMETER Experiment Name: At_Far-red-induction_P Parameter: Plant Line Value: Columbia
  misc_feature: MA Experiment 20001450 PARAMETER Experiment Name: At_Far-red-induction_P Parameter: Timepoint (hr) Value: 8
  misc_feature: MA Experiment 20001450 PARAMETER Experiment Name: At_Far-red-induction_P Parameter: Tissue Value: Whole Plant
  misc_feature: MA Experiment ID: 20001451 Result: Up-regulated in Transcription
  misc_feature: MA Experiment 20001451 PARAMETER Experiment Name: At_Far-red-induction_P Parameter: Age (day) Value: 7
  misc_feature: MA Experiment 20001451 PARAMETER Experiment Name: At_Far-red-induction_P Parameter: Light Value: Far-red vs. White
  misc_feature: MA Experiment 20001451 PARAMETER Experiment Name: At_Far-red-induction_P Parameter: Organism Value: A. thaliana
  misc_feature: MA Experiment 20001451 PARAMETER Experiment Name: At_Far-red-induction_P Parameter: Plant Line Value: Columbia
  misc_feature: MA Experiment 20001451 PARAMETER Experiment Name: At_Far-red-induction_P Parameter: Timepoint (hr) Value: 24
  misc_feature: MA Experiment 20001451 PARAMETER Experiment Name: At_Far-red-induction_P Parameter: Tissue Value: Whole Plant
  misc_feature: MA Experiment ID: 20001458 Result: Up-regulated in Transcription
  misc_feature: MA Experiment 20001458 PARAMETER Experiment Name: At_50mM_NH4NO3_L-to-H_P Parameter: Age (day) Value: Undefined
  misc_feature: MA Experiment 20001458 PARAMETER Experiment Name: At_50mM_NH4NO3_L-to-H_P Parameter: Organism Value: Undefined
  misc_feature: MA Experiment 20001458 PARAMETER Experiment Name: At_50mM_NH4NO3_L-to-H_P Parameter: Plant Line Value: Undefined
  misc_feature: MA Experiment 20001458 PARAMETER Experiment Name: At_50mM_NH4NO3_L-to-H_P Parameter: Timepoint (hr) Value: 2
  misc_feature: MA Experiment 20001458 PARAMETER Experiment Name: At_50mM_NH4NO3_L-to-H_P Parameter: Tissue Value: Siliques
  misc_feature: MA Experiment 20001458 PARAMETER Experiment Name: At_50mM_NH4NO3_L-to-H_P Parameter: Treatment Value: 50mM NH4NO3 vs. 100mM Manitol
  misc_feature: MA Experiment ID: 20001553 Result: Down-regulated in Transcription
  misc_feature: MA Experiment 20001553 PARAMETER Experiment Name: At_Drought_Soil_Dry_P Parameter: Age (day) Value: 19
  misc_feature: MA Experiment 20001553 PARAMETER Experiment Name: At_Drought_Soil_Dry_P Parameter: Organism Value: A. thaliana
  misc_feature: MA Experiment 20001553 PARAMETER Experiment Name: At_Drought_Soil_Dry_P Parameter: Plant Line Value: WS
  misc_feature: MA Experiment 20001553 PARAMETER Experiment Name: At_Drought_Soil_Dry_P Parameter: Post Timepoint (hr) Value: None
  misc_feature: MA Experiment 20001553 PARAMETER Experiment Name: At_Drought_Soil_Dry_P Parameter: Post-Treatment Value: None
  misc_feature: MA Experiment 20001553 PARAMETER Experiment Name: At_Drought_Soil_Dry_P Parameter: Timepoint (day) Value: 5
  misc_feature: MA Experiment 20001553 PARAMETER Experiment Name: At_Drought_Soil_Dry_P Parameter: Treatment Value: Drought vs. No Drought
  misc_feature: MA Experiment ID: 20001554 Result: Down-regulated in Transcription
  misc_feature: MA Experiment 20001554 PARAMETER Experiment Name: At_Drought_Soil_Dry_P Parameter: Age (day) Value: 21
  misc_feature: MA Experiment 20001554 PARAMETER Experiment Name: At_Drought_Soil_Dry_P Parameter: Organism Value: A. thaliana
  misc_feature: MA Experiment 20001554 PARAMETER Experiment Name: At_Drought_Soil_Dry_P Parameter: Plant Line Value: WS
  misc_feature: MA Experiment 20001554 PARAMETER Experiment Name: At_Drought_Soil_Dry_P Parameter: Post Timepoint (hr) Value: None
  misc_feature: MA Experiment 20001554 PARAMETER Experiment Name: At_Drought_Soil_Dry_P Parameter: Post-Treatment Value: None
  misc_feature: MA Experiment 20001554 PARAMETER Experiment Name: At_Drought_Soil_Dry_P Parameter: Timepoint (day) Value: 7
  misc_feature: MA Experiment 20001554 PARAMETER Experiment Name: At_Drought_Soil_Dry_P Parameter: Treatment Value: Drought vs. No Drought
  misc_feature: MA Experiment ID: 20001555 Result: Down-regulated in Transcription
  misc_feature: MA Experiment 20001555 PARAMETER Experiment Name: At_Drought_Soil_Dry_P Parameter: Age (day) Value: 24
  misc_feature: MA Experiment 20001555 PARAMETER Experiment Name: At_Drought_Soil_Dry_P Parameter: Organism Value: A. thaliana
  misc_feature: MA Experiment 20001555 PARAMETER Experiment Name: At_Drought_Soil_Dry_P Parameter: Plant Line Value: WS
  misc_feature: MA Experiment 20001555 PARAMETER Experiment Name: At_Drought_Soil_Dry_P Parameter: Post Timepoint (hr) Value: None
  misc_feature: MA Experiment 20001555 PARAMETER Experiment Name: At_Drought_Soil_Dry_P Parameter: Post-Treatment Value: None
  misc_feature: MA Experiment 20001555 PARAMETER Experiment Name: At_Drought_Soil_Dry_P Parameter: Timepoint (day) Value: 10
  misc_feature: MA Experiment 20001555 PARAMETER Experiment Name: At_Drought_Soil_Dry_P Parameter: Treatment Value: Drought vs. No Drought
  misc_feature: MA Experiment ID: 20001556 Result: Down-regulated in Transcription
  misc_feature: MA Experiment 20001556 PARAMETER Experiment Name: At_Drought_Soil_Dry_P Parameter: Age (day) Value: 26
  misc_feature: MA Experiment 20001556 PARAMETER Experiment Name: At_Drought_Soil_Dry_P Parameter: Organism Value: A. thaliana
  misc_feature: MA Experiment 20001556 PARAMETER Experiment Name: At_Drought_Soil_Dry_P Parameter: Plant Line Value: WS
  misc_feature: MA Experiment 20001556 PARAMETER Experiment Name: At_Drought_Soil_Dry_P Parameter: Post Timepoint (hr) Value: None
  misc_feature: MA Experiment 20001556 PARAMETER Experiment Name: At_Drought_Soil_Dry_P Parameter: Post-Treatment Value: None
  misc_feature: MA Experiment 20001556 PARAMETER Experiment Name: At_Drought_Soil_Dry_P Parameter: Timepoint (day) Value: 12
  misc_feature: MA Experiment 20001556 PARAMETER Experiment Name: At_Drought_Soil_Dry_P Parameter: Treatment Value: Drought vs. No Drought
  misc_feature: MA Experiment ID: 20001557 Result: Down-regulated in Transcription
  misc_feature: MA Experiment 20001557 PARAMETER Experiment Name: At_Drought_Soil_Dry_P Parameter: Age (day) Value: 27
  misc_feature: MA Experiment 20001557 PARAMETER Experiment Name: At_Drought_Soil_Dry_P Parameter: Organism Value: A. thaliana
  misc_feature: MA Experiment 20001557 PARAMETER Experiment Name: At_Drought_Soil_Dry_P Parameter: Plant Line Value: WS
  misc_feature: MA Experiment 20001557 PARAMETER Experiment Name: At_Drought_Soil_Dry_P Parameter: Post Timepoint (hr) Value: 3
  misc_feature: MA Experiment 20001557 PARAMETER Experiment Name: At_Drought_Soil_Dry_P Parameter: Post-Treatment Value: Re-Water vs. No Drought
  misc_feature: MA Experiment 20001557 PARAMETER Experiment Name: At_Drought_Soil_Dry_P Parameter: Timepoint (day) Value: 13
  misc_feature: MA Experiment 20001557 PARAMETER Experiment Name: At_Drought_Soil_Dry_P Parameter: Treatment Value: Drought vs. No Drought
  misc_feature: MA Experiment ID: 20001757 Result: Up-regulated in Transcription
  misc_feature: MA Experiment 20001757 PARAMETER Experiment Name: At_50mM_NH4NO3_L-to-H_P Parameter: Timepoint (hr) Value: 6
  misc_feature: MA Experiment 20001757 PARAMETER Experiment Name: At_50mM_NH4NO3_L-to-H_P Parameter: Tissue Value: Leaf
  misc_feature: MA Experiment 20001757 PARAMETER Experiment Name: At_50mM_NH4NO3_L-to-H_P Parameter: Treatment Value: 50mM NH4NO3 vs 100mM Mannitol
  misc_feature: MA Experiment ID: 20001759 Result: Up-regulated in Transcription
  misc_feature: MA Experiment 20001759 PARAMETER Experiment Name: At_50mM_NH4NO3_L-to-H_P Parameter: Timepoint (hr) Value: 1
  misc_feature: MA Experiment 20001759 PARAMETER Experiment Name: At_50mM_NH4NO3_L-to-H_P Parameter: Tissue Value: Siliques
  misc_feature: MA Experiment 20001759 PARAMETER Experiment Name: At_50mM_NH4NO3_L-to-H_P Parameter: Treatment Value: 50mM NH4NO3 vs 100mM Mannitol
  misc_feature: MA Experiment ID: 20001761 Result: Up-regulated in Transcription
  misc_feature: MA Experiment 20001761 PARAMETER Experiment Name: At_50mM_NH4NO3_L-to-H_P Parameter: Timepoint (hr) Value: 4
  misc_feature: MA Experiment 20001761 PARAMETER Experiment Name: At_50mM_NH4NO3_L-to-H_P Parameter: Tissue Value: Siliques
  misc_feature: MA Experiment 20001761 PARAMETER Experiment Name: At_50mM_NH4NO3_L-to-H_P Parameter: Treatment Value: 50mM NH4NO3 vs 100mM Mannitol
  misc_feature: MA Experiment ID: 20001774 Result: Down-regulated in Transcription
  misc_feature: MA Experiment 20001774 PARAMETER Experiment Name: At_Far-red-enriched-adult_P Parameter: Age (day) Value: 31
  misc_feature: MA Experiment 20001774 PARAMETER Experiment Name: At_Far-red-enriched-adult_P Parameter: Light Value: Far-red enriched vs. White
  misc_feature: MA Experiment 20001774 PARAMETER Experiment Name: At_Far-red-enriched-adult_P Parameter: Organism Value: A. thaliana
  misc_feature: MA Experiment 20001774 PARAMETER Experiment Name: At_Far-red-enriched-adult_P Parameter: Plant Line Value: Columbia
  misc_feature: MA Experiment 20001774 PARAMETER Experiment Name: At_Far-red-enriched-adult_P Parameter: Timepoint (hr) Value: 72
  misc_feature: MA Experiment 20001774 PARAMETER Experiment Name: At_Far-red-enriched-adult_P Parameter: Tissue Value: Aerial
  misc_feature: MA Experiment ID: 20001904 Result: Down-regulated in Transcription
  misc_feature: MA Experiment 20001904 PARAMETER Experiment Name: At_Drought_Reproduction_P Parameter: Age (day) Value: 37
  misc_feature: MA Experiment 20001904 PARAMETER Experiment Name: At_Drought_Reproduction_P Parameter: Organism Value: A. thaliana
  misc_feature: MA Experiment 20001904 PARAMETER Experiment Name: At_Drought_Reproduction_P Parameter: Plant Line Value: WS
  misc_feature: MA Experiment 20001904 PARAMETER Experiment Name: At_Drought_Reproduction_P Parameter: Timepoint (day) Value: 7
  misc_feature: MA Experiment 20001904 PARAMETER Experiment Name: At_Drought_Reproduction_P Parameter: Tissue Value: Rosettes
  misc_feature: MA Experiment 20001904 PARAMETER Experiment Name: At_Drought_Reproduction_P Parameter: Treatment Value: Drought vs. No Drought
  misc_feature: MA Experiment ID: 20001905 Result: Up-regulated in Transcription
  misc_feature: MA Experiment 20001905 PARAMETER Experiment Name: At_Drought_Reproduction_P Parameter: Age (day) Value: 40
  misc_feature: MA Experiment 20001905 PARAMETER Experiment Name: At_Drought_Reproduction_P Parameter: Organism Value: A. thaliana
  misc_feature: MA Experiment 20001905 PARAMETER Experiment Name: At_Drought_Reproduction_P Parameter: Plant Line Value: WS
  misc_feature: MA Experiment 20001905 PARAMETER Experiment Name: At_Drought_Reproduction_P Parameter: Timepoint (day) Value: 10
  misc_feature: MA Experiment 20001905 PARAMETER Experiment Name: At_Drought_Reproduction_P Parameter: Tissue Value: Rosettes
  misc_feature: MA Experiment 20001905 PARAMETER Experiment Name: At_Drought_Reproduction_P Parameter: Treatment Value: Drought vs. No Drought
  misc_feature: MA Experiment ID: 20001906 Result: Down-regulated in Transcription
  misc_feature: MA Experiment 20001906 PARAMETER Experiment Name: At_Drought_Reproduction_P Parameter: Age (day) Value: 35
  misc_feature: MA Experiment 20001906 PARAMETER Experiment Name: At_Drought_Reproduction_P Parameter: Organism Value: A. thaliana
  misc_feature: MA Experiment 20001906 PARAMETER Experiment Name: At_Drought_Reproduction_P Parameter: Plant Line Value: WS
  misc_feature: MA Experiment 20001906 PARAMETER Experiment Name: At_Drought_Reproduction_P Parameter: Timepoint (day) Value: 5
  misc_feature: MA Experiment 20001906 PARAMETER Experiment Name: At_Drought_Reproduction_P Parameter: Tissue Value: Siliques
  misc_feature: MA Experiment 20001906 PARAMETER Experiment Name: At_Drought_Reproduction_P Parameter: Treatment Value: Drought vs. No Drought
  misc_feature: MA Experiment ID: 20001907 Result: Down-regulated in Transcription
  misc_feature: MA Experiment 20001907 PARAMETER Experiment Name: At_Drought_Reproduction_P Parameter: Age (day) Value: 37
  misc_feature: MA Experiment 20001907 PARAMETER Experiment Name: At_Drought_Reproduction_P Parameter: Organism Value: A. thaliana
  misc_feature: MA Experiment 20001907 PARAMETER Experiment Name: At_Drought_Reproduction_P Parameter: Plant Line Value: WS
  misc_feature: MA Experiment 20001907 PARAMETER Experiment Name: At_Drought_Reproduction_P Parameter: Timepoint (day) Value: 7
  misc_feature: MA Experiment 20001907 PARAMETER Experiment Name: At_Drought_Reproduction_P Parameter: Tissue Value: Siliques
  misc_feature: MA Experiment 20001907 PARAMETER Experiment Name: At_Drought_Reproduction_P Parameter: Treatment Value: Drought vs. No Drought
  misc_feature: MA Experiment ID: 20001910 Result: Down-regulated in Transcription
  misc_feature: MA Experiment 20001910 PARAMETER Experiment Name: At_Drought_Reproduction_P Parameter: Age (day) Value: 37
  misc_feature: MA Experiment 20001910 PARAMETER Experiment Name: At_Drought_Reproduction_P Parameter: Organism Value: A. thaliana
  misc_feature: MA Experiment 20001910 PARAMETER Experiment Name: At_Drought_Reproduction_P Parameter: Plant Line Value: WS
  misc_feature: MA Experiment 20001910 PARAMETER Experiment Name: At_Drought_Reproduction_P Parameter: Timepoint (day) Value: 7
  misc_feature: MA Experiment 20001910 PARAMETER Experiment Name: At_Drought_Reproduction_P Parameter: Tissue Value: Flowers
  misc_feature: MA Experiment 20001910 PARAMETER Experiment Name: At_Drought_Reproduction_P Parameter: Treatment Value: Drought vs. No Drought
attttcctattcttgaaaacacacaacacatctcatttctccgctgtttcgtcggcaaattttcccatttttgattccgaagataatagatattatcaacagaggataaggataaaacccagaacaatcattataatttagtggtgaagttgaccaaatttataaactgatccaattttaaaatctaagagatatggagaacatggacgatttctcaccggagaatgttttagcaccaccaccaccacctcctccaatgaagaagtcaacggatctgtttatgcaaagaagcaatagctttgtttctaaagctacgagagattcatgggatcgtatgttcgacgaagctcatggagctgatgttttgattcatactgatgataatggtttgatttacgcacattctaatgtcatcggaatggcttcagatgtaatcagaggaatgatgaagcaacataagagaaaatctcatcgtaaatcgatttcaatcctcggtgttcctcaccacgctcttcgagttttcattcgattcttatactcttcttgctatgagaaacaagatatggaggattttgcaatacatctacttgtgttatcacatgtctacgttgtaccgcatttgaagcgagtctgcgaatcagaattcgaaagtagtttgctcaacaaagagaatgtgattgatgtgtttcagctagctcttctatgtgatgctcctcgtctcggtcttctctgtcatagaatgattctaaacaactttgaagaagtttctacttctgaaggatggcaagcaatgaaagagagccatcctagacttcaaaaagagcttttacgctctgtcgcttacgagcttaatagcttgaagcaaagaaacaggaaacagaaggagatacagacttatacacagctctatgaagcaatggaggcttttgttcatatatgtagagatggatgcagagaaataggtccaacaaagaccgaaaccccgcatatgtcatgcggatttcaagcgtgtaatggtttagagcagctattgaaacatttggcgggatgcaaactaagatcaatccctggtggttgtagccgttgcaagagaatgtggcagcttcttgagcttcattcgcgcatttgcgtagactcggaacaatgcaaagtccctctttgcagtagtttgaaagagaggatgaagacacagagcaggaaagatgagaaaagatggaaacttttggtgaggaatgttttgagcaccaagagaattggaggatctccattctttttgcaagcaattgatgttactttatgagttatgacattattatttgattgcttttagatgtagaaattacatatttatacatgtacataggttgcagattctttgtaaagatagattcaaaattttcaaacc

SEQ ID NO: 105695 - protein, 368 aa, Arabidopsis thaliana
  peptide (1)..(368): Ceres Seq. ID no. 13617797
  misc_feature (226)..(323): Pfam Name: TAZ zinc finger Pfam Description: TAZ zinc finger
  misc_feature (1)..(368): Homolog of NCBI NO: 18420081 NR Description: expressed protein [Arabidopsis thaliana]
  misc_feature (1)..(368): Homolog of NCBI NO: 26453150 NR Description: unknown protein [Arabidopsis thaliana]
  misc_feature (4)..(368): Homolog of NCBI NO: 7485765 NR Description: hypothetical protein F19F18.100 - Arabidopsis >gi|4468986|emb|CAB38300.1| putative protein [Arabidopsis >gi|7270743|emb|CAB80426.1| putative protein [Arabidopsis
  misc_feature (1)..(368): Homolog of NCBI NO: 21537174 NR Description: unknown [Arabidopsis thaliana]
  misc_feature (8)..(361): Homolog of NCBI NO: 15240763 NR Description: expressed protein [Arabidopsis thaliana] gene_id:K9I9.4~pir||T04718~strong similarity to unknown protein thaliana] >gi|15529178|gb|AAK97683.1| AT5g67480/K9I9_4
  misc_feature (8)..(323): Homolog of NCBI NO: 15221235 NR Description: hypothetical protein [Arabidopsis thaliana]
  misc_feature (14)..(293): Homolog of NCBI NO: 34907566 NR Description: B1078G07.24 [Oryza sativa (japonica
  misc_feature (55)..(352): Homolog of NCBI NO: 18408618 NR Description: expressed protein [Arabidopsis thaliana] unknown protein [Arabidopsis thaliana] unknown protein [Arabidopsis thaliana]
  misc_feature (55)..(352): Homolog of NCBI NO: 7487530 NR Description: hypothetical protein T29H11.120 - Arabidopsis >gi|4678352|emb|CAB41162.1| putative protein [Arabidopsis
  misc_feature (56)..(352): Homolog of NCBI NO: 15242656 NR Description: expressed protein [Arabidopsis thaliana] contains similarity to unknown
MENMDDFSPENVLAPPPPPPPMKKSTDLFMQRSNSFVSKATRDSWDRMFDEAHGADVLIHTDDNGLIYAHSNVIGMASDVIRGMMKQHKRKSHRKSISILGVPHHALRVFIRFLYSSCYEKQDMEDFAIHLLVLSHVYVVPHLKRVCESEFESSLLNKENVIDVFQLALLCDAPRLGLLCHRMILNNFEEVSTSEGWQAMKESHPRLQKELLRSVAYELNSLKQRNRKQKEIQTYTQLYEAMEAFVHICRDGCREIGPTKTETPHMSCGFQACNGLEQLLKHLAGCKLRSIPGGCSRCKRMWQLLELHSRICVDSEQCKVPLCSSLKERMKTQSRKDEKRWKLLVRNVLSTKRIGGSPFFLQAIDVTL

SEQ ID NO: 105696 - protein, 365 aa, Arabidopsis thaliana
  peptide (1)..(365): Ceres Seq. ID no. 13617798
  misc_feature (223)..(320): Pfam Name: TAZ zinc finger Pfam Description: TAZ zinc finger
  misc_feature (1)..(365): Homolog of NCBI NO: 18420081 NR Description: expressed protein [Arabidopsis thaliana]
  misc_feature (1)..(365): Homolog of NCBI NO: 26453150 NR Description: unknown protein [Arabidopsis thaliana]
  misc_feature (1)..(365): Homolog of NCBI NO: 7485765 NR Description: hypothetical protein F19F18.100 - Arabidopsis >gi|4468986|emb|CAB38300.1| putative protein [Arabidopsis >gi|7270743|emb|CAB80426.1| putative protein [Arabidopsis
  misc_feature (1)..(365): Homolog of NCBI NO: 21537174 NR Description: unknown [Arabidopsis thaliana]
  misc_feature (5)..(358): Homolog of NCBI NO: 15240763 NR Description: expressed protein [Arabidopsis thaliana] gene_id:K9I9.4~pir||T04718~strong similarity to unknown protein thaliana] >gi|15529178|gb|AAK97683.1| AT5g67480/K9I9_4
  misc_feature (5)..(320): Homolog of NCBI NO: 15221235 NR Description: hypothetical protein [Arabidopsis thaliana]
  misc_feature (11)..(290): Homolog of NCBI NO: 34907566 NR Description: B1078G07.24 [Oryza sativa (japonica
  misc_feature (52)..(349): Homolog of NCBI NO: 18408618 NR Description: expressed protein [Arabidopsis thaliana] unknown protein [Arabidopsis thaliana] unknown protein [Arabidopsis thaliana]
  misc_feature (52)..(349): Homolog of NCBI NO: 7487530 NR Description: hypothetical protein T29H11.120 - Arabidopsis >gi|4678352|emb|CAB41162.1| putative protein [Arabidopsis
  misc_feature (53)..(349): Homolog of NCBI NO: 15242656 NR Description: expressed protein [Arabidopsis thaliana] contains similarity to unknown
MDDFSPENVLAPPPPPPPMKKSTDLFMQRSNSFVSKATRDSWDRMFDEAHGADVLIHTDDNGLIYAHSNVIGMASDVIRGMMKQHKRKSHRKSISILGVPHHALRVFIRFLYSSCYEKQDMEDFAIHLLVLSHVYVVPHLKRVCESEFESSLLNKENVIDVFQLALLCDAPRLGLLCHRMILNNFEEVSTSEGWQAMKESHPRLQKELLRSVAYELNSLKQRNRKQKEIQTYTQLYEAMEAFVHICRDGCREIGPTKTETPHMSCGFQACNGLEQLLKHLAGCKLRSIPGGCSRCKRMWQLLELHSRICVDSEQCKVPLCSSLKERMKTQSRKDEKRWKLLVRNVLSTKRIGGSPFFLQAIDVTL

SEQ ID NO: 105697 - protein, 347 aa, Arabidopsis thaliana
  peptide (1)..(347): Ceres Seq. ID no. 13617799
  misc_feature (205)..(302): Pfam Name: TAZ zinc finger Pfam Description: TAZ zinc finger
  misc_feature (1)..(347): Homolog of NCBI NO: 18420081 NR Description: expressed protein [Arabidopsis thaliana]
  misc_feature (1)..(347): Homolog of NCBI NO: 26453150 NR Description: unknown protein [Arabidopsis thaliana]
  misc_feature (1)..(347): Homolog of NCBI NO: 7485765 NR Description: hypothetical protein F19F18.100 - Arabidopsis >gi|4468986|emb|CAB38300.1| putative protein [Arabidopsis >gi|7270743|emb|CAB80426.1| putative protein [Arabidopsis
  misc_feature (1)..(347): Homolog of NCBI NO: 21537174 NR Description: unknown [Arabidopsis thaliana]
  misc_feature (1)..(340): Homolog of NCBI NO: 15240763 NR Description: expressed protein [Arabidopsis thaliana] gene_id:K9I9.4~pir||T04718~strong similarity to unknown protein thaliana] >gi|15529178|gb|AAK97683.1| AT5g67480/K9I9_4
  misc_feature (1)..(302): Homolog of NCBI NO: 15221235 NR Description: hypothetical protein [Arabidopsis thaliana]
  misc_feature (1)..(272): Homolog of NCBI NO: 34907566 NR Description: B1078G07.24 [Oryza sativa (japonica
  misc_feature (34)..(331): Homolog of NCBI NO: 18408618 NR Description: expressed protein [Arabidopsis thaliana] unknown protein [Arabidopsis thaliana] unknown protein [Arabidopsis thaliana]
  misc_feature (34)..(331): Homolog of NCBI NO: 7487530 NR Description: hypothetical protein T29H11.120 - Arabidopsis >gi|4678352|emb|CAB41162.1| putative protein [Arabidopsis
  misc_feature (35)..(331): Homolog of NCBI NO: 15242656 NR Description: expressed protein [Arabidopsis thaliana] contains similarity to unknown
MKKSTDLFMQRSNSFVSKATRDSWDRMFDEAHGADVLIHTDDNGLIYAHSNVIGMASDVIRGMMKQHKRKSHRKSISILGVPHHALRVFIRFLYSSCYEKQDMEDFAIHLLVLSHVYVVPHLKRVCESEFESSLLNKENVIDVFQLALLCDAPRLGLLCHRMILNNFEEVSTSEGWQAMKESHPRLQKELLRSVAYELNSLKQRNRKQKEIQTYTQLYEAMEAFVHICRDGCREIGPTKTETPHMSCGFQACNGLEQLLKHLAGCKLRSIPGGCSRCKRMWQLLELHSRICVDSEQCKVPLCSSLKERMKTQSRKDEKRWKLLVRNVLSTKRIGGSPFFLQAIDVTL

SEQ ID NO: 105698 - DNA, 1710 bp, Arabidopsis thaliana
  misc_feature (1)..(1710): Ceres Seq. ID no. 13617800
  misc_feature: MA Experiment ID: 108605 Result: Down-regulated in Transcription
  misc_feature: MA Experiment 108605 PARAMETER Experiment Name: At_100uM_ABA_cDNA_P Parameter: Timepoint (hr) Value: 6
  misc_feature: MA Experiment 108605 PARAMETER Experiment Name: At_100uM_ABA_cDNA_P Parameter: Tissue Value: Aerial
  misc_feature: MA Experiment 108605 PARAMETER Experiment Name: At_100uM_ABA_cDNA_P Parameter: Treatment Value: 100uM ABA vs. No Treatment
  misc_feature: MA Experiment ID: 20000173 Result: Down-regulated in Transcription
  misc_feature: MA Experiment 20000173 PARAMETER Experiment Name: At_42deg_Heat_P Parameter: Age (day) Value: 14
  misc_feature: MA Experiment 20000173 PARAMETER Experiment Name: At_42deg_Heat_P Parameter: Organism Value: A. thaliana
  misc_feature: MA Experiment 20000173 PARAMETER Experiment Name: At_42deg_Heat_P Parameter: Plant Line Value: WS
  misc_feature: MA Experiment 20000173 PARAMETER Experiment Name: At_42deg_Heat_P Parameter: Temperature (deg C) Value: 42 vs. 22
  misc_feature: MA Experiment 20000173 PARAMETER Experiment Name: At_42deg_Heat_P Parameter: Timepoint (hr) Value: 6
  misc_feature: MA Experiment 20000173 PARAMETER Experiment Name: At_42deg_Heat_P Parameter: Tissue Value: Aerial
  misc_feature: MA Experiment ID: 20000185 Result: Up-regulated in Transcription
  misc_feature: MA Experiment 20000185 PARAMETER Experiment Name: At_Roots__P Parameter: Age (day) Value: 7 vs. 21
  misc_feature: MA Experiment 20000185 PARAMETER Experiment Name: At_Roots__P Parameter: Organism Value: A. thaliana
  misc_feature: MA Experiment 20000185 PARAMETER Experiment Name: At_Roots__P Parameter: Tissue Value: Roots vs. Whole Plant
  misc_feature: MA Experiment ID: 20000227 Result: Up-regulated in Transcription
  misc_feature: MA Experiment 20000227 PARAMETER Experiment Name: At_Root-Tips-vs-Tops_P Parameter: Tissue Value: Root Tips vs. Root Tops
  misc_feature: MA Experiment ID: 20000234 Result: Up-regulated in Transcription
  misc_feature: MA Experiment 20000234 PARAMETER Experiment Name: At_Siliques_P Parameter: Age (day) Value: 21
  misc_feature: MA Experiment 20000234 PARAMETER Experiment Name: At_Siliques_P Parameter: Organism Value: A. thaliana
  misc_feature: MA Experiment 20000234 PARAMETER Experiment Name: At_Siliques_P Parameter: Plant Line Value: WS
  misc_feature: MA Experiment 20000234 PARAMETER Experiment Name: At_Siliques_P Parameter: Tissue Value: Less Than 5mm Siliques vs. Whole Plant
  misc_feature: MA Experiment ID: 20000265 Result: Up-regulated in Transcription
  misc_feature: MA Experiment 20000265 PARAMETER Experiment Name: At_Open_Flower_P Parameter: Age (day) Value: 21
  misc_feature: MA Experiment 20000265 PARAMETER Experiment Name: At_Open_Flower_P Parameter: Plant Line Value: WS
  misc_feature: MA Experiment 20000265 PARAMETER Experiment Name: At_Open_Flower_P Parameter: Tissue Value: Closed Flower vs. Whole Plant
  misc_feature: MA Experiment ID: 20000286 Result: Up-regulated in Transcription
  misc_feature: MA Experiment 20000286 PARAMETER Experiment Name: At_Open_Flower_P Parameter: Age (day) Value: 21
  misc_feature: MA Experiment 20000286 PARAMETER Experiment Name: At_Open_Flower_P Parameter: Plant Line Value: WS
  misc_feature: MA Experiment 20000286 PARAMETER Experiment Name: At_Open_Flower_P Parameter: Tissue Value: Half Open vs. Whole Plant
  misc_feature: MA Experiment ID: 20000439 Result: Up-regulated in Transcription
  misc_feature: MA Experiment 20000439 PARAMETER Experiment Name: At_Roots__P Parameter: Age (day) Value: 14 vs. 21
  misc_feature: MA Experiment 20000439 PARAMETER Experiment Name: At_Roots__P Parameter: Organism Value: A. thaliana
  misc_feature: MA Experiment 20000439 PARAMETER Experiment Name: At_Roots__P Parameter: Tissue Value: Roots vs. Whole Plant
  misc_feature: MA Experiment ID: 20001451 Result: Down-regulated in Transcription
  misc_feature: MA Experiment 20001451 PARAMETER Experiment Name: At_Far-red-induction_P Parameter: Age (day) Value: 7
  misc_feature: MA Experiment 20001451 PARAMETER Experiment Name: At_Far-red-induction_P Parameter: Light Value: Far-red vs. White
  misc_feature: MA Experiment 20001451 PARAMETER Experiment Name: At_Far-red-induction_P Parameter: Organism Value: A. thaliana
  misc_feature: MA Experiment 20001451 PARAMETER Experiment Name: At_Far-red-induction_P Parameter: Plant Line Value: Columbia
  misc_feature: MA Experiment 20001451 PARAMETER Experiment Name: At_Far-red-induction_P Parameter: Timepoint (hr) Value: 24
  misc_feature: MA Experiment 20001451 PARAMETER Experiment Name: At_Far-red-induction_P Parameter: Tissue Value: Whole Plant
  misc_feature: MA Experiment ID: 20001905 Result: Up-regulated in Transcription
  misc_feature: MA Experiment 20001905 PARAMETER Experiment Name: At_Drought_Reproduction_P Parameter: Age (day) Value: 40
  misc_feature: MA Experiment 20001905 PARAMETER Experiment Name: At_Drought_Reproduction_P Parameter: Organism Value: A. thaliana
  misc_feature: MA Experiment 20001905 PARAMETER Experiment Name: At_Drought_Reproduction_P Parameter: Plant Line Value: WS
  misc_feature: MA Experiment 20001905 PARAMETER Experiment Name: At_Drought_Reproduction_P Parameter: Timepoint (day) Value: 10
  misc_feature: MA Experiment 20001905 PARAMETER Experiment Name: At_Drought_Reproduction_P Parameter: Tissue Value: Rosettes
  misc_feature: MA Experiment 20001905 PARAMETER Experiment Name: At_Drought_Reproduction_P Parameter: Treatment Value: Drought vs. No Drought
  misc_feature: MA Experiment ID: 20001911 Result: Down-regulated in Transcription
  misc_feature: MA Experiment 20001911 PARAMETER Experiment Name: At_Drought_Reproduction_P Parameter: Age (day) Value: 40
  misc_feature: MA Experiment 20001911 PARAMETER Experiment Name: At_Drought_Reproduction_P Parameter: Organism Value: A. thaliana
  misc_feature: MA Experiment 20001911 PARAMETER Experiment Name: At_Drought_Reproduction_P Parameter: Plant Line Value: WS
  misc_feature: MA Experiment 20001911 PARAMETER Experiment Name: At_Drought_Reproduction_P Parameter: Timepoint (day) Value: 10
  misc_feature: MA Experiment 20001911 PARAMETER Experiment Name: At_Drought_Reproduction_P Parameter: Tissue Value: Flowers
  misc_feature: MA Experiment 20001911 PARAMETER Experiment Name: At_Drought_Reproduction_P Parameter: Treatment Value: Drought vs. No Drought
aaccgattcatatctttcttcttcttcctctacagcttcttcataaatctctctctcttctcctctcttctcaaagatcgaacctttcgatttcagtctcttcagagttctttcgttttcatcgaaacaatggcgaagaacgttgggattttggctatggatatctatttccctcccacctgtgttcaacaggaagctttggaagcacatgatggagcaagtaaagggaaatacactattggacttggccaagattgtttagctttttgcactgagcttgaagatgttatctctatgagtttcaatgcggtgacatcactttttgagaagtataagattgaccctaaccaaatcgggcgtcttgaagtaggaagtgagactgttattgacaaaagcaagtccatcaagaccttcttgatgcagctctttgagaaatgtggaaacactgatgtcgaaggtgttgactcgaccaatgcttgctatggtggaactgcagctttgttaaactgtgtcaattgggttgagagtaactcttgggatggacgttatggcctcgtcatttgtactgacagcgcggtttatgcagaaggacccgcaaggcccactggaggagctgcagcgattgctatgttgataggacctgatgctcctatcgttttcgaaagcaaattgagagcaagccacatggctcatgtctatgacttttacaagcccaatcttgctagcgagtacccggttgttgatggtaagctttcacagacttgctacctcatggctcttgactcctgctataaacatttatgcaacaagttcgagaagatcgagggcaaagagttctccataaatgatgctgattacattgttttccattctccatacaataaacttgtacagaaaagctttgctcgtctcttgtacaacgacttcttgagaaacgcaagctccattgacgaggctgccaaagaaaagttcaccccttattcatctttgacccttgacgagagttaccaaagccgtgatcttgaaaaggtgtcacaacaaattgcgaaaccgttttatgatgctaaagtgcaaccaacgactttaataccaaaggaagtcggtaacatgtacactgcttctctctacgctgcatttgcttccctcatccacaagaaacacaatgatttggcgggaaagcgggtggttatgttctcttatggaagtggctcaaccgcaacaatgttctcattacgcctcaacgacaataagcctcctttcagcatttcaaacattgcatctgtaatggatgttggcggtaaattgaaagctagacatgagtatgcacctgagaagtttgtggagacaatgaagctaatggaacataggtatggagcaaaggactttgtgacaaccaaggagggtattatagatcttttggcaccgggaacttattatctgaaagaggttgattccttgtaccggagattctatggcaagaaaggtgaagatggatctgtagccaatggacactgattcttgaaaaggaacaaatcataaaaagtcacctgaaaatgttatgttttacttgcaccattttaatcgttttataagtttgttgttactttgatttagggacaaagaaggaatgtattctctgtttttatttactgtttgatttactctctcatgcaaatgataatttggaaattattggaatctctattttgt

SEQ ID NO: 105699 - protein, 504 aa, Arabidopsis thaliana
  peptide (1)..(504): Ceres Seq. ID no. 13617801
  misc_feature (44)..(494): Pfam Name: Hydroxymethylglutaryl-coenzyme A synthase Pfam Description: Hydroxymethylglutaryl-coenzyme A synthase
  misc_feature (44)..(504): Homolog of NCBI NO: 15234313 NR Description: hydroxymethylglutaryl-CoA synthase [Arabidopsis
  misc_feature (44)..(504): Homolog of NCBI NO: 1143390 NR Description: hydroxymethylglutaryl-CoA synthase [Arabidopsis
  misc_feature (44)..(504): Homolog of NCBI NO: 7799986 NR Description: HMG-CoA synthase [Brassica juncea]
  misc_feature (44)..(504): Homolog of NCBI NO: 11192005 NR Description: HMG-CoA synthase [Brassica juncea]
  misc_feature (44)..(504): Homolog of NCBI NO: 11192003 NR Description: HMG-CoA synthase [Brassica juncea]
  misc_feature (44)..(503): Homolog of NCBI NO: 11192007 NR Description: HMG-CoA synthase [Brassica juncea]
  misc_feature (99)..(504): Homolog of NCBI NO: 30681902 NR Description: hydroxymethylglutaryl-CoA synthase [Arabidopsis
  misc_feature (44)..(504): Homolog of NCBI NO: 16417956 NR Description: hydroxymethylglutaryl coenzyme A synthase [Hevea
  misc_feature (44)..(504): Homolog of NCBI NO: 14916100 NR Description: hydroxymethylglutaryl coenzyme A synthase [Hevea
  misc_feature (46)..(504): Homolog of NCBI NO: 34902200 NR Description: Putative hydroxymethylglutaryl coenzyme A
NRFISFFFFLYSFFINLSLFSSLLKDRTFRFQSLQSSFVFIETMAKNVGILAMDIYFPPTCVQQEALEAHDGASKGKYTIGLGQDCLAFCTELEDVISMSFNAVTSLFEKYKIDPNQIGRLEVGSETVIDKSKSIKTFLMQLFEKCGNTDVEGVDSTNACYGGTAALLNCVNWVESNSWDGRYGLVICTDSAVYAEGPARPTGGAAAIAMLIGPDAPIVFESKLRASHMAHVYDFYKPNLASEYPVVDGKLSQTCYLMALDSCYKHLCNKFEKIEGKEFSINDADYIVFHSPYNKLVQKSFARLLYNDFLRNASSIDEAAKEKFTPYSSLTLDESYQSRDLEKVSQQIAKPFYDAKVQPTTLIPKEVGNMYTASLYAAFASLIHKKHNDLAGKRVVMFSYGSGSTATMFSLRLNDNKPPFSISNIASVMDVGGKLKARHEYAPEKFVETMKLMEHRYGAKDFVTTKEGIIDLLAPGTYYLKEVDSLYRRFYGKKGEDGSVANGH

SEQ ID NO: 105700 - protein, 461 aa, Arabidopsis thaliana
  peptide (1)..(461): Ceres Seq. ID no. 13617802
  misc_feature (1)..(451): Pfam Name: Hydroxymethylglutaryl-coenzyme A synthase Pfam Description: Hydroxymethylglutaryl-coenzyme A synthase
  misc_feature (1)..(461): Homolog of NCBI NO: 15234313 NR Description: hydroxymethylglutaryl-CoA synthase [Arabidopsis
  misc_feature (1)..(461): Homolog of NCBI NO: 1143390 NR Description: hydroxymethylglutaryl-CoA synthase [Arabidopsis
  misc_feature (1)..(461): Homolog of NCBI NO: 7799986 NR Description: HMG-CoA synthase [Brassica juncea]
  misc_feature (1)..(461): Homolog of NCBI NO: 11192005 NR Description: HMG-CoA synthase [Brassica juncea]
  misc_feature (1)..(461): Homolog of NCBI NO: 11192003 NR Description: HMG-CoA synthase [Brassica juncea]
  misc_feature (1)..(460): Homolog of NCBI NO: 11192007 NR Description: HMG-CoA synthase [Brassica juncea]
  misc_feature (56)..(461): Homolog of NCBI NO: 30681902 NR Description: hydroxymethylglutaryl-CoA synthase [Arabidopsis
  misc_feature (1)..(461): Homolog of NCBI NO: 16417956 NR Description: hydroxymethylglutaryl coenzyme A synthase [Hevea
  misc_feature (1)..(461): Homolog of NCBI NO: 14916100 NR Description: hydroxymethylglutaryl coenzyme A synthase [Hevea
  misc_feature (3)..(461): Homolog of NCBI NO: 34902200 NR Description: Putative hydroxymethylglutaryl coenzyme A
MAKNVGILAMDIYFPPTCVQQEALEAHDGASKGKYTIGLGQDCLAFCTELEDVISMSFNAVTSLFEKYKIDPNQIGRLEVGSETVIDKSKSIKTFLMQLFEKCGNTDVEGVDSTNACYGGTAALLNCVNWVESNSWDGRYGLVICTDSAVYAEGPARPTGGAAAIAMLIGPDAPIVFESKLRASHMAHVYDFYKPNLASEYPVVDGKLSQTCYLMALDSCYKHLCNKFEKIEGKEFSINDADYIVFHSPYNKLVQKSFARLLYNDFLRNASSIDEAAKEKFTPYSSLTLDESYQSRDLEKVSQQIAKPFYDAKVQPTTLIPKEVGNMYTASLYAAFASLIHKKHNDLAGKRVVMFSYGSGSTATMFSLRLNDNKPPFSISNIASVMDVGGKLKARHEYAPEKFVETMKLMEHRYGAKDFVTTKEGIIDLLAPGTYYLKEVDSLYRRFYGKKGEDGSVANGH

SEQ ID NO: 105701 - protein, 452 aa, Arabidopsis thaliana
  peptide (1)..(452): Ceres Seq. ID no. 13617803
  misc_feature (1)..(442): Pfam Name: Hydroxymethylglutaryl-coenzyme A synthase Pfam Description: Hydroxymethylglutaryl-coenzyme A synthase
  misc_feature (1)..(452): Homolog of NCBI NO: 15234313 NR Description: hydroxymethylglutaryl-CoA synthase [Arabidopsis
  misc_feature (1)..(452): Homolog of NCBI NO: 1143390 NR Description: hydroxymethylglutaryl-CoA synthase [Arabidopsis
  misc_feature (1)..(452): Homolog of NCBI NO: 7799986 NR Description: HMG-CoA synthase [Brassica juncea]
  misc_feature (1)..(452): Homolog of NCBI NO: 11192005 NR Description: HMG-CoA synthase [Brassica juncea]
  misc_feature (1)..(452): Homolog of NCBI NO: 11192003 NR Description: HMG-CoA synthase [Brassica juncea]
  misc_feature (1)..(451): Homolog of NCBI NO: 11192007 NR Description: HMG-CoA synthase [Brassica juncea]
  misc_feature (47)..(452): Homolog of NCBI NO: 30681902 NR Description: hydroxymethylglutaryl-CoA synthase [Arabidopsis
  misc_feature (1)..(452): Homolog of NCBI NO: 16417956 NR Description: hydroxymethylglutaryl coenzyme A synthase [Hevea
  misc_feature (1)..(452): Homolog of NCBI NO: 14916100 NR Description: hydroxymethylglutaryl coenzyme A synthase [Hevea
  misc_feature (1)..(452): Homolog of NCBI NO: 34902200 NR Description: Putative hydroxymethylglutaryl coenzyme A
MDIYFPPTCVQQEALEAHDGASKGKYTIGLGQDCLAFCTELEDVISMSFNAVTSLFEKYKIDPNQIGRLEVGSETVIDKSKSIKTFLMQLFEKCGNTDVEGVDSTNACYGGTAALLNCVNWVESNSWDGRYGLVICTDSAVYAEGPARPTGGAAAIAMLIGPDAPIVFESKLRASHMAHVYDFYKPNLASEYPVVDGKLSQTCYLMALDSCYKHLCNKFEKIEGKEFSINDADYIVFHSPYNKLVQKSFARLLYNDFLRNASSIDEAAKEKFTPYSSLTLDESYQSRDLEKVSQQIAKPFYDAKVQPTTLIPKEVGNMYTASLYAAFASLIHKKHNDLAGKRVVMFSYGSGSTATMFSLRLNDNKPPFSISNIASVMDVGGKLKARHEYAPEKFVETMKLMEHRYGAKDFVTTKEGIIDLLAPGTYYLKEVDSLYRRFYGKKGEDGSVANGH

SEQ ID NO: 105702 - DNA, 892 bp, Arabidopsis thaliana
  misc_feature (1)..(892): Ceres Seq. ID no. 13617804
  misc_feature: MA Experiment ID: 20000234 Result: Down-regulated in Transcription
  misc_feature: MA Experiment 20000234 PARAMETER Experiment Name: At_Siliques_P Parameter: Age (day) Value: 21
  misc_feature: MA Experiment 20000234 PARAMETER Experiment Name: At_Siliques_P Parameter: Organism Value: A. thaliana
  misc_feature: MA Experiment 20000234 PARAMETER Experiment Name: At_Siliques_P Parameter: Plant Line Value: WS
  misc_feature: MA Experiment 20000234 PARAMETER Experiment Name: At_Siliques_P Parameter: Tissue Value: Less Than 5mm Siliques vs. Whole Plant
  misc_feature: MA Experiment ID: 20000265 Result: Down-regulated in Transcription
  misc_feature: MA Experiment 20000265 PARAMETER Experiment Name: At_Open_Flower_P Parameter: Age (day) Value: 21
  misc_feature: MA Experiment 20000265 PARAMETER Experiment Name: At_Open_Flower_P Parameter: Plant Line Value: WS
  misc_feature: MA Experiment 20000265 PARAMETER Experiment Name: At_Open_Flower_P Parameter: Tissue Value: Closed Flower vs. Whole Plant
  misc_feature: MA Experiment ID: 20000286 Result: Down-regulated in Transcription
  misc_feature: MA Experiment 20000286 PARAMETER Experiment Name: At_Open_Flower_P Parameter: Age (day) Value: 21
  misc_feature: MA Experiment 20000286 PARAMETER Experiment Name: At_Open_Flower_P Parameter: Plant Line Value: WS
  misc_feature: MA Experiment 20000286 PARAMETER Experiment Name: At_Open_Flower_P Parameter: Tissue Value: Half Open vs. Whole Plant
  misc_feature: MA Experiment ID: 20000437 Result: Up-regulated in Transcription
  misc_feature: MA Experiment 20000437 PARAMETER Experiment Name: At_Drought_P Parameter: Age (day) Value: 8
  misc_feature: MA Experiment 20000437 PARAMETER Experiment Name: At_Drought_P Parameter: Organism Value: A. thaliana
  misc_feature: MA Experiment 20000437 PARAMETER Experiment Name: At_Drought_P Parameter: Plant Line Value: WS
  misc_feature: MA Experiment 20000437 PARAMETER Experiment Name: At_Drought_P Parameter: Timepoint (hr) Value: 24
  misc_feature: MA Experiment 20000437 PARAMETER Experiment Name: At_Drought_P Parameter: Tissue Value: Whole Plant
  misc_feature: MA Experiment 20000437 PARAMETER Experiment Name: At_Drought_P Parameter: Treatment Value: Drought vs. No Drought
  misc_feature: MA Experiment ID: 20001451 Result: Up-regulated in Transcription
  misc_feature: MA Experiment 20001451 PARAMETER Experiment Name: At_Far-red-induction_P Parameter: Age (day) Value: 7
  misc_feature: MA Experiment 20001451 PARAMETER Experiment Name: At_Far-red-induction_P Parameter: Light Value: Far-red vs. White
  misc_feature: MA Experiment 20001451 PARAMETER Experiment Name: At_Far-red-induction_P Parameter: Organism Value: A. thaliana
  misc_feature: MA Experiment 20001451 PARAMETER Experiment Name: At_Far-red-induction_P Parameter: Plant Line Value: Columbia
  misc_feature: MA Experiment 20001451 PARAMETER Experiment Name: At_Far-red-induction_P Parameter: Timepoint (hr) Value: 24
  misc_feature: MA Experiment 20001451 PARAMETER Experiment Name: At_Far-red-induction_P Parameter: Tissue Value: Whole Plant
caaccattgttgcgtgtttggttatctcttctttcttctctctcacctaaatcaagggatttgttctgatcaactttgaacagaatttacaacaaatccctagaaaaatctgacccttccttcttcctcaggaagatttaagatacttgttgataaggatattcggaagaagcttttgaaatttttggcaaaggtctcatttgatccgacttttctgttgaaggtgaaatagatacaaaaaaaatgggctcagaggaaaacaacagcacaagctttccaccaacagagccaaagctctgtgataacggatgtggattcttcgggtcaccatccaacatgaatctctgctcgaaatgttacagaagcttaagagccgaggaagatcaaaccgcggtagcgaaagctgcggtgaagaactctttaaagcttccatcttgcagtatcattgcacctggacaaaaacatcctctggaaattaaaccagctcatttggaaaccgttgttgtaaccgctgagccgtcttctgtacctgtagccgcggaacaggacgaggctgagccgtcgagacctgttagaccgaacaacaggtgtttcagctgtaacaagaaggttggtgtaatggggtttaagtgcaaatgcggtagcacgttttgcgggagtcataggtacccggagaagcatgagtgtagcttcgatttcaaagaagttggacgtgatgcaattgcaaaggctaatcctttggttaaggcggataaagttcagaggatttgaagaaaacaaactttgttatttttaagtattttcgttgtcttctgcatttgatcagtttctgcctgggatgttcgatgtttggtttccatgaatcaaaatgaaaattgctgttcttgctttc

SEQ ID NO: 105703 - protein, 175 aa, Arabidopsis thaliana; identical to SEQ ID NO: 25636
  peptide (1)..(175): Ceres Seq. ID no. 13617805
  misc_feature (116)..(156): Pfam Name: AN1-like Zinc finger Pfam Description: AN1-like Zinc finger
  misc_feature (1)..(175): Homolog of NCBI NO: 15234402 NR Description: expressed protein [Arabidopsis thaliana]
  misc_feature (1)..(174): Homolog of NCBI NO: 15235819 NR Description: zinc finger -related protein [Arabidopsis
  misc_feature (1)..(175): Homolog of NCBI NO: 8778645 NR Description: F5O11.17 [Arabidopsis thaliana]
  misc_feature (1)..(175): Homolog of NCBI NO: 15221329 NR Description: expressed protein [Arabidopsis thaliana]
  misc_feature (15)..(175): Homolog of NCBI NO: 15225894 NR Description: zinc finger protein -related [Arabidopsis
  misc_feature (12)..(175): Homolog of NCBI NO: 18403408 NR Description: expressed protein [Arabidopsis thaliana]
  misc_feature (12)..(175): Homolog of NCBI NO: 25082726 NR Description: expressed protein [Arabidopsis thaliana]
  misc_feature (13)..(175): Homolog of NCBI NO: 18404102 NR Description: expressed protein [Arabidopsis thaliana]
  misc_feature (13)..(175): Homolog of NCBI NO: 15231686 NR Description: zinc finger - like protein [Arabidopsis thaliana]
  misc_feature (13)..(175): Homolog of NCBI NO: 35187687 NR Description: zinc-finger protein [Oryza sativa (indica

SEQ ID NO: 105704 - protein, 144 aa, Arabidopsis thaliana; identical to SEQ ID NO: 25637
  peptide (1)..(144): Ceres Seq. ID no. 13617806
  misc_feature (85)..(125): Pfam Name: AN1-like Zinc finger Pfam Description: AN1-like Zinc finger
  misc_feature (1)..(144): Homolog of NCBI NO: 15234402 NR Description: expressed protein [Arabidopsis thaliana]
  misc_feature (1)..(143): Homolog of NCBI NO: 15235819 NR Description: zinc finger -related protein [Arabidopsis
  misc_feature (1)..(144): Homolog of NCBI NO: 8778645 NR Description: F5O11.17 [Arabidopsis thaliana]
  misc_feature (1)..(144): Homolog of NCBI NO: 15221329 NR Description: expressed protein [Arabidopsis thaliana]
  misc_feature (1)..(144): Homolog of NCBI NO: 15225894 NR Description: zinc finger protein -related [Arabidopsis
  misc_feature (1)..(144): Homolog of NCBI NO: 18403408 NR Description: expressed protein [Arabidopsis thaliana]
  misc_feature (1)..(144): Homolog of NCBI NO: 25082726 NR Description: expressed protein [Arabidopsis thaliana]
  misc_feature (1)..(144): Homolog of NCBI NO: 18404102 NR Description: expressed protein [Arabidopsis thaliana]
  misc_feature (1)..(144): Homolog of NCBI NO: 15231686 NR Description: zinc finger - like protein [Arabidopsis thaliana]
  misc_feature (1)..(144): Homolog of NCBI NO: 35187687 NR Description: zinc-finger protein [Oryza sativa (indica

SEQ ID NO: 105705 - DNA, 868 bp, Arabidopsis thaliana
  misc_feature (1)..(868): Ceres Seq. ID no. 13617807
  misc_feature: MA Experiment ID: 108434 Result: Up-regulated in Transcription
  misc_feature: MA Experiment 108434 PARAMETER Experiment Name: At_Root_Tips_cDNA_P Parameter: Tissue Value: Root Tips
  misc_feature: MA Experiment ID: 108595 Result: Down-regulated in Transcription
  misc_feature: MA Experiment 108595 PARAMETER Experiment Name: At_Ler-pi_Ovule_cDNA_P Parameter: Plant Line Value: null
  misc_feature: MA Experiment ID: 20000495 Result: Down-regulated in Transcription
  misc_feature: MA Experiment 20000495 PARAMETER Experiment Name: At_Guard_Cells_P Parameter: Harvest Date Value: 8/2/2002
  misc_feature: MA Experiment 20000495 PARAMETER Experiment Name: At_Guard_Cells_P Parameter: Organism Value: A. thaliana
  misc_feature: MA Experiment 20000495 PARAMETER Experiment Name: At_Guard_Cells_P Parameter: Tissue Value: Guard Cells vs. Leaves
  misc_feature: MA Experiment ID: 20001248 Result: Down-regulated in Transcription
  misc_feature: MA Experiment 20001248 PARAMETER Experiment Name: At_Far-red-induction_P Parameter: Age (day) Value: 7
  misc_feature: MA Experiment 20001248 PARAMETER Experiment Name: At_Far-red-induction_P Parameter: Light Value: Far-red vs. White
  misc_feature: MA Experiment 20001248 PARAMETER Experiment Name: At_Far-red-induction_P Parameter: Organism Value: A. thaliana
  misc_feature: MA Experiment 20001248 PARAMETER Experiment Name: At_Far-red-induction_P Parameter: Plant Line Value: Columbia
  misc_feature: MA Experiment 20001248 PARAMETER Experiment Name: At_Far-red-induction_P Parameter: Timepoint (hr) Value: 4
  misc_feature: MA Experiment 20001248 PARAMETER Experiment Name: At_Far-red-induction_P Parameter: Tissue Value: Whole Plant
  misc_feature: MA Experiment ID: 20001450 Result: Down-regulated in Transcription
  misc_feature: MA Experiment 20001450 PARAMETER Experiment Name: At_Far-red-induction_P Parameter: Age (day) Value: 7
  misc_feature: MA Experiment 20001450 PARAMETER Experiment Name: At_Far-red-induction_P Parameter: Light Value: Far-red vs. White
  misc_feature: MA Experiment 20001450 PARAMETER Experiment Name: At_Far-red-induction_P Parameter: Organism Value: A. thaliana
  misc_feature: MA Experiment 20001450 PARAMETER Experiment Name: At_Far-red-induction_P Parameter: Plant Line Value: Columbia
  misc_feature: MA Experiment 20001450 PARAMETER Experiment Name: At_Far-red-induction_P Parameter: Timepoint (hr) Value: 8
  misc_feature: MA Experiment 20001450 PARAMETER Experiment Name: At_Far-red-induction_P Parameter: Tissue Value: Whole Plant
  misc_feature: MA Experiment ID: 20001451 Result: Down-regulated in Transcription
  misc_feature: MA Experiment 20001451 PARAMETER Experiment Name: At_Far-red-induction_P Parameter: Age (day) Value: 7
  misc_feature: MA Experiment 20001451 PARAMETER Experiment Name: At_Far-red-induction_P Parameter: Light Value: Far-red vs. White
  misc_feature: MA Experiment 20001451 PARAMETER Experiment Name: At_Far-red-induction_P Parameter: Organism Value: A. thaliana
  misc_feature: MA Experiment 20001451 PARAMETER Experiment Name: At_Far-red-induction_P Parameter: Plant Line Value: Columbia
  misc_feature: MA Experiment 20001451 PARAMETER Experiment Name: At_Far-red-induction_P Parameter: Timepoint (hr) Value: 24
  misc_feature: MA Experiment 20001451 PARAMETER Experiment Name: At_Far-red-induction_P Parameter: Tissue Value: Whole Plant
gacgttctttcatttttcccgttatccagacacactcgcgaaaatggcggctcactcttcttgcaactttgctttgacgaatccgatcatctcacaaatcgattctttctctaagaagaaactatctgttccattatacttcttctctacaagaaaagcattgacgaatccttggttaggcgttgttgattcatccctctctctcacttctccagtctccgctctacaaactaatcgcccaagaagaatccataaatccgccatctccagcttacccaccgcgaatccagatttagtggtttctgatgcgaaaaagcccaaatggtcatggagggcaattaaatcatttgcaatgggagagcttgaagctaggaagctcaagtatccaaatactggaactgaagcacttctcatgggtattttgattgaaggaactagttttacttcaaagtttttgcgggcgaataagattatgctttacaaagtgcgtgaagaaacggtcaagttactaggaaaggcagatatgtatttctttagcccggaacatcctcctttaactgaagatgctcaaagagcacttgactctgctctggatcagaatctaaaagcaggtggtatcggggaagtaatgccagcacatatactacttgggatttggtctgaagttgaatctccaggtcacaagatactggcaactcttggtttcactgatgagaaatctaaagagttagagtcttttgcctctgaatctggctttttagatgaatagtatattacatccatatcatttctccattaatgcaaaatctccaagttcatagttgctgtttgcaataatattcgtatgtgttcgtctttgctcattctt

SEQ ID NO: 105706 - protein, 255 aa, Arabidopsis thaliana; identical to SEQ ID NO: 22051
  peptide (1)..(255): Ceres Seq. ID no. 13617808
  misc_feature (119)..(171): Pfam Name: Clp amino terminal domain Pfam Description: Clp amino terminal domain
  misc_feature (15)..(255): Homolog of NCBI NO: 18413740 NR Description: expressed protein [Arabidopsis thaliana]
  misc_feature (15)..(255): Homolog of NCBI NO: 21592785 NR Description: unknown [Arabidopsis thaliana]
  misc_feature (15)..(242): Homolog of NCBI NO: 7485569 NR Description: hypothetical protein F16J13.130 - Arabidopsis >gi|4586111|emb|CAB40947.1| putative protein [Arabidopsis >gi|7267907|emb|CAB78249.1| putative protein [Arabidopsis
  misc_feature (49)..(249): Homolog of NCBI NO: 18416540 NR Description: expressed protein [Arabidopsis thaliana] unknown protein [Arabidopsis thaliana] unknown protein [Arabidopsis thaliana]
  misc_feature (49)..(248): Homolog of NCBI NO: 7487579 NR Description: hypothetical protein T30C3.40 - Arabidopsis >gi|5123926|emb|CAB45514.1| putative protein [Arabidopsis >gi|7269388|emb|CAB81348.1| putative protein [Arabidopsis
  misc_feature (107)..(234): Homolog of NCBI NO: 23039549 NR Description: hypothetical protein [Trichodesmium erythraeum
  misc_feature (100)..(234): Homolog of NCBI NO: 399212 NR Description: ATP-dependent clp protease ATP-binding subunit homolog CD4A, chloroplast precursor >gi|100189|pir||A35905
  misc_feature (100)..(234): Homolog of NCBI NO: 15983763 NR Description: AT3g48870/T21J18_140 [Arabidopsis thaliana]
  misc_feature (90)..(234): Homolog of NCBI NO: 1168972 NR Description: ATP-dependent clp protease ATP-binding subunit
  misc_feature (100)..(234): Homolog of NCBI NO: 399213 NR Description: ATP-dependent clp protease ATP-binding subunit homolog CD4B, chloroplast precursor >gi|100190|pir||B35905

SEQ ID NO: 105707 - protein, 241 aa, Arabidopsis thaliana; identical to SEQ ID NO: 22052
  peptide (1)..(241): Ceres Seq. ID no. 13617809
  misc_feature (105)..(157): Pfam Name: Clp amino terminal domain Pfam Description: Clp amino terminal domain
  misc_feature (1)..(241): Homolog of NCBI NO: 18413740 NR Description: expressed protein [Arabidopsis thaliana]
  misc_feature (1)..(241): Homolog of NCBI NO: 21592785 NR Description: unknown [Arabidopsis thaliana]
  misc_feature (1)..(228): Homolog of NCBI NO: 7485569 NR Description: hypothetical protein F16J13.130 - Arabidopsis >gi|4586111|emb|CAB40947.1| putative protein [Arabidopsis >gi|7267907|emb|CAB78249.1| putative protein [Arabidopsis
  misc_feature (35)..(235): Homolog of NCBI NO: 18416540 NR Description: expressed protein [Arabidopsis thaliana] unknown protein [Arabidopsis thaliana] unknown protein [Arabidopsis thaliana]
  misc_feature (35)..(234): Homolog of NCBI NO: 7487579 NR Description: hypothetical protein T30C3.40 - Arabidopsis >gi|5123926|emb|CAB45514.1| putative protein [Arabidopsis >gi|7269388|emb|CAB81348.1| putative protein [Arabidopsis
  misc_feature (93)..(220): Homolog of NCBI NO: 23039549 NR Description: hypothetical protein [Trichodesmium erythraeum
  misc_feature (86)..(220): Homolog of NCBI NO: 399212 NR Description: ATP-dependent clp protease ATP-binding subunit homolog CD4A, chloroplast precursor >gi|100189|pir||A35905
  misc_feature (86)..(220): Homolog of NCBI NO: 15983763 NR Description: AT3g48870/T21J18_140 [Arabidopsis thaliana]
  misc_feature (76)..(220): Homolog of NCBI NO: 1168972 NR Description: ATP-dependent clp protease ATP-binding subunit
  misc_feature (86)..(220): Homolog of NCBI NO: 399213 NR Description: ATP-dependent clp protease ATP-binding subunit homolog CD4B, chloroplast precursor >gi|100190|pir||B35905

SEQ ID NO: 105708 - protein, 138 aa, Arabidopsis thaliana; identical to SEQ ID NO: 22053
  peptide (1)..(138): Ceres Seq. ID no. 13617810
  misc_feature (2)..(54): Pfam Name: Clp amino terminal domain Pfam Description: Clp amino terminal domain
  misc_feature (1)..(138): Homolog of NCBI NO: 18413740 NR Description: expressed protein [Arabidopsis thaliana]
  misc_feature (1)..(138): Homolog of NCBI NO: 21592785 NR Description: unknown [Arabidopsis thaliana]
  misc_feature (1)..(125): Homolog of NCBI NO: 7485569 NR Description: hypothetical protein F16J13.130 - Arabidopsis >gi|4586111|emb|CAB40947.1| putative protein [Arabidopsis >gi|7267907|emb|CAB78249.1| putative protein [Arabidopsis
  misc_feature (1)..(132): Homolog of NCBI NO: 18416540 NR Description: expressed protein [Arabidopsis thaliana] unknown protein [Arabidopsis thaliana] unknown protein [Arabidopsis thaliana]
  misc_feature (1)..(131): Homolog of NCBI NO: 7487579 NR Description: hypothetical protein T30C3.40 - Arabidopsis >gi|5123926|emb|CAB45514.1| putative protein [Arabidopsis >gi|7269388|emb|CAB81348.1| putative protein [Arabidopsis
  misc_feature (1)..(117): Homolog of NCBI NO: 23039549 NR Description: hypothetical protein [Trichodesmium erythraeum
  misc_feature (1)..(117): Homolog of NCBI NO: 399212 NR Description: ATP-dependent clp protease ATP-binding subunit homolog CD4A, chloroplast precursor >gi|100189|pir||A35905
  misc_feature (1)..(117): Homolog of NCBI NO: 15983763 NR Description: AT3g48870/T21J18_140 [Arabidopsis thaliana]
  misc_feature (1)..(117): Homolog of NCBI NO: 1168972 NR Description: ATP-dependent clp protease ATP-binding subunit
  misc_feature (1)..(117): Homolog of NCBI NO: 399213 NR Description: ATP-dependent clp protease ATP-binding subunit homolog CD4B, chloroplast precursor >gi|100190|pir||B35905

SEQ ID NO: 105709 - DNA, 844 bp, Arabidopsis thaliana
  misc_feature (1)..(844): Ceres Seq. ID no. 13617827
  misc_feature: MA Experiment ID: 108464 Result: Down-regulated in Transcription
  misc_feature: MA Experiment 108464 PARAMETER Experiment Name: At_Germinating_Seeds_cDNA_P Parameter: Age (day) Value: 4 vs. 0
  misc_feature: MA Experiment 108464 PARAMETER Experiment Name: At_Germinating_Seeds_cDNA_P Parameter: Tissue Value: Germinating Seeds
  misc_feature: MA Experiment ID: 20000113 Result: Up-regulated in Transcription
  misc_feature: MA Experiment 20000113 PARAMETER Experiment Name: At_42deg_Heat_cDNA_P Parameter: Temperature (deg C) Value: 42 vs. 22
  misc_feature: MA Experiment 20000113 PARAMETER Experiment Name: At_42deg_Heat_cDNA_P Parameter: Timepoint (hr) Value: 8
  misc_feature: MA Experiment 20000113 PARAMETER Experiment Name: At_42deg_Heat_cDNA_P Parameter: Tissue Value: Aerial
  misc_feature: MA Experiment ID: 20000184 Result: Down-regulated in Transcription
  misc_feature: MA Experiment 20000184 PARAMETER Experiment Name: At_Shoots__P Parameter: Age (day) Value: 7
  misc_feature: MA Experiment 20000184 PARAMETER Experiment Name: At_Shoots__P Parameter: Tissue Value: Shoots vs. Whole Plant
  misc_feature: MA Experiment ID: 20000224 Result: Up-regulated in Transcription
  misc_feature: MA Experiment ID: 20001451 Result: Up-regulated in Transcription
  misc_feature: MA Experiment 20001451 PARAMETER Experiment Name: At_Far-red-induction_P Parameter: Age (day) Value: 7
  misc_feature: MA Experiment 20001451 PARAMETER Experiment Name: At_Far-red-induction_P Parameter: Light Value: Far-red vs. White
  misc_feature: MA Experiment 20001451 PARAMETER Experiment Name: At_Far-red-induction_P Parameter: Organism Value: A. thaliana
  misc_feature: MA Experiment 20001451 PARAMETER Experiment Name: At_Far-red-induction_P Parameter: Plant Line Value: Columbia
  misc_feature: MA Experiment 20001451 PARAMETER Experiment Name: At_Far-red-induction_P Parameter: Timepoint (hr) Value: 24
  misc_feature: MA Experiment 20001451 PARAMETER Experiment Name: At_Far-red-induction_P Parameter: Tissue Value: Whole Plant
atgacttttgaactaatagcgtcgcagtttcgcagctgtaacaagatttcttctggcgaagaagagagaatcgccgttcaccgattcgtttctttgttcatctcctcccaggtaattatgggagatttctcgattcagatcagttctaagctgatcaatcagctagctgaaggtaacgatcaaccaaagaggagggcaaagaaaaccaaacctaaagtctcaccacagagcaaacagaaaacaaaccaagatgaagagaagaaacctaatccagtggctgaattaccgatgcagccaccgtttttcttcccaataccaccacaaggagcagcaagcacagagctggaatcgataaaatccgttgtgaaagagagtgagaaggttcttgagaagctggagttacaagagaagaacattgttcgtgaagttacggagagagccaaggatctgagggagaaagagtttaagatcccggaacctaaaccaatgccttgttcgtcagatcacgaagcctggatgaaatgctacaaggagaacatcggtagtccgttgaaatgtagcggtttcgttaagagtttccaggattgtgcacgccggtccagacagcaagtgaatcctgaagaaaagtagagataataagattcaaaaggacttttttgagacacgaagggaatagtttttgctttctgagatcatatgaatgacacagaagaattgtgcttgtttccttttgatttcatgaaagcaaaaaagaaagaaaaaaaataagcagaatctgtgattatgttcatgagataaaactttcaaaactatgttcttgattaactattttggcttatcttct

SEQ ID NO: 105710 - protein, 209 aa, Arabidopsis thaliana
  peptide (1)..(209): Ceres Seq. ID no. 13617828
  misc_feature (40)..(209): Homolog of NCBI NO: 18413789 NR Description: expressed protein [Arabidopsis thaliana]
MTFELIASQFRSCNKISSGEEERIAVHRFVSLFISSQVIMGDFSIQISSKLINQLAEGNDQPKRRAKKTKPKVSPQSKQKTNQDEEKKPNPVAELPMQPPFFFPIPPQGAASTELESIKSVVKESEKVLEKLELQEKNIVREVTERAKDLREKEFKIPEPKPMPCSSDHEAWMKCYKENIGSPLKCSGFVKSFQDCARRSRQQVNPEEK

SEQ ID NO: 105711 - protein, 170 aa, Arabidopsis thaliana; identical to SEQ ID NO: 35053
  peptide (1)..(170): Ceres Seq. ID no. 13617829
  misc_feature (1)..(170): Homolog of NCBI NO: 18413789 NR Description: expressed protein [Arabidopsis thaliana]

SEQ ID NO: 105712 - protein, 113 aa, Arabidopsis thaliana; identical to SEQ ID NO: 35054
  peptide (1)..(113): Ceres Seq. ID no. 13617830
  misc_feature (1)..(113): Homolog of NCBI NO: 18413789 NR Description: expressed protein [Arabidopsis thaliana]

SEQ ID NO: 105713 - DNA, 715 bp, Arabidopsis thaliana
  misc_feature (1)..(715): Ceres Seq. ID no. 13617831
  misc_feature: MA Experiment ID: 108434 Result: Up-regulated in Transcription
  misc_feature: MA Experiment 108434 PARAMETER Experiment Name: At_Root_Tips_cDNA_P Parameter: Tissue Value: Root Tips
  misc_feature: MA Experiment ID: 108461 Result: Down-regulated in Transcription
  misc_feature: MA Experiment 108461 PARAMETER Experiment Name: At_Germinating_Seeds_cDNA_P Parameter: Age (day) Value: 1 vs. 0
  misc_feature: MA Experiment 108461 PARAMETER Experiment Name: At_Germinating_Seeds_cDNA_P Parameter: Tissue Value: Germinating Seeds
  misc_feature: MA Experiment ID: 108462 Result: Down-regulated in Transcription
  misc_feature: MA Experiment 108462 PARAMETER Experiment Name: At_Germinating_Seeds_cDNA_P Parameter: Age (day) Value: 2 vs. 0
  misc_feature: MA Experiment 108462 PARAMETER Experiment Name: At_Germinating_Seeds_cDNA_P Parameter: Tissue Value: Germinating Seeds
  misc_feature: MA Experiment ID: 108463 Result: Down-regulated in Transcription
  misc_feature: MA Experiment 108463 PARAMETER Experiment Name: At_Germinating_Seeds_cDNA_P Parameter: Age (day) Value: 3 vs. 0
  misc_feature: MA Experiment 108463 PARAMETER Experiment Name: At_Germinating_Seeds_cDNA_P Parameter: Tissue Value: Germinating Seeds
  misc_feature: MA Experiment ID: 108464 Result: Down-regulated in Transcription
  misc_feature: MA Experiment 108464 PARAMETER Experiment Name: At_Germinating_Seeds_cDNA_P Parameter: Age (day) Value: 4 vs. 0
  misc_feature: MA Experiment 108464 PARAMETER Experiment Name: At_Germinating_Seeds_cDNA_P Parameter: Tissue Value: Germinating Seeds
  misc_feature: MA Experiment ID: 108488 Result: Up-regulated in Transcription
  misc_feature: MA Experiment ID: 108489 Result: Up-regulated in Transcription
  misc_feature: MA Experiment ID: 108572 Result: Down-regulated in Transcription
  misc_feature: MA Experiment 108572 PARAMETER Experiment Name: At_Drought_cDNA_P Parameter: Timepoint (hr) Value: 1
  misc_feature: MA Experiment 108572 PARAMETER Experiment Name: At_Drought_cDNA_P Parameter: Tissue Value: Aerial
  misc_feature: MA Experiment 108572 PARAMETER Experiment Name: At_Drought_cDNA_P Parameter: Treatment Value: Drought vs. No Drought
  misc_feature: MA Experiment ID: 108573 Result: Down-regulated in Transcription
  misc_feature: MA Experiment 108573 PARAMETER Experiment Name: At_Drought_cDNA_P Parameter: Timepoint (hr) Value: 6
  misc_feature: MA Experiment 108573 PARAMETER Experiment Name: At_Drought_cDNA_P Parameter: Tissue Value: Aerial
  misc_feature: MA Experiment 108573 PARAMETER Experiment Name: At_Drought_cDNA_P Parameter: Treatment Value: Drought vs. No Drought
  misc_feature: MA Experiment ID: 108595 Result: Down-regulated in Transcription
  misc_feature: MA Experiment 108595 PARAMETER Experiment Name: At_Ler-pi_Ovule_cDNA_P Parameter: Plant Line Value: null
  misc_feature: MA Experiment ID: 108607 Result: Down-regulated in Transcription
  misc_feature: MA Experiment 108607 PARAMETER Experiment Name: At_100uM_ABA_cDNA_P Parameter: Timepoint (hr) Value: 4
  misc_feature: MA Experiment 108607 PARAMETER Experiment Name: At_100uM_ABA_cDNA_P Parameter: Tissue Value: Aerial
  misc_feature: MA Experiment 108607 PARAMETER Experiment Name: At_100uM_ABA_cDNA_P Parameter: Treatment Value: 100uM ABA vs. No Treatment
  misc_feature: MA Experiment ID: 20000090 Result: Up-regulated in Transcription
  misc_feature: MA Experiment ID: 20000111 Result: Up-regulated in Transcription
  misc_feature: MA Experiment 20000111 PARAMETER Experiment Name: At_42deg_Heat_cDNA_P Parameter: Temperature (deg C) Value: 42 vs. 22
  misc_feature: MA Experiment 20000111 PARAMETER Experiment Name: At_42deg_Heat_cDNA_P Parameter: Timepoint (hr) Value: 6
  misc_feature: MA Experiment 20000111 PARAMETER Experiment Name: At_42deg_Heat_cDNA_P Parameter: Tissue Value: Aerial
  misc_feature: MA Experiment ID: 20000113 Result: Up-regulated in Transcription
  misc_feature: MA Experiment 20000113 PARAMETER Experiment Name: At_42deg_Heat_cDNA_P Parameter: Temperature (deg C) Value: 42 vs. 22
  misc_feature: MA Experiment 20000113 PARAMETER Experiment Name: At_42deg_Heat_cDNA_P Parameter: Timepoint (hr) Value: 8
  misc_feature: MA Experiment 20000113 PARAMETER Experiment Name: At_42deg_Heat_cDNA_P Parameter: Tissue Value: Aerial
  misc_feature: MA Experiment ID: 20000173 Result: Up-regulated in Transcription
  misc_feature: MA Experiment 20000173 PARAMETER Experiment Name: At_42deg_Heat_P Parameter: Age (day) Value: 14
  misc_feature: MA Experiment 20000173 PARAMETER Experiment Name: At_42deg_Heat_P Parameter: Organism Value: A. thaliana
  misc_feature: MA Experiment 20000173 PARAMETER Experiment Name: At_42deg_Heat_P Parameter: Plant Line Value: WS
  misc_feature: MA Experiment 20000173 PARAMETER Experiment Name: At_42deg_Heat_P Parameter: Temperature (deg C) Value: 42 vs. 22
  misc_feature: MA Experiment 20000173 PARAMETER Experiment Name: At_42deg_Heat_P Parameter: Timepoint (hr) Value: 6
  misc_feature: MA Experiment 20000173 PARAMETER Experiment Name: At_42deg_Heat_P Parameter: Tissue Value: Aerial
  misc_feature: MA Experiment ID: 20000180 Result: Down-regulated in Transcription
  misc_feature: MA Experiment 20000180 PARAMETER Experiment Name: At_Germinating_Seeds_P Parameter: Age (hr) Value: 24 vs. 0
  misc_feature: MA Experiment 20000180 PARAMETER Experiment Name: At_Germinating_Seeds_P Parameter: Tissue Value: Germinating Seeds
  misc_feature: MA Experiment ID: 20000227 Result: Up-regulated in Transcription
  misc_feature: MA Experiment 20000227 PARAMETER Experiment Name: At_Root-Tips-vs-Tops_P Parameter: Tissue Value: Root Tips vs. Root Tops
  misc_feature: MA Experiment ID: 20000437 Result: Down-regulated in Transcription
  misc_feature: MA Experiment 20000437 PARAMETER Experiment Name: At_Drought_P Parameter: Age (day) Value: 8
  misc_feature: MA Experiment 20000437 PARAMETER Experiment Name: At_Drought_P Parameter: Organism Value: A. thaliana
  misc_feature: MA Experiment 20000437 PARAMETER Experiment Name: At_Drought_P Parameter: Plant Line Value: WS
  misc_feature: MA Experiment 20000437 PARAMETER Experiment Name: At_Drought_P Parameter: Timepoint (hr) Value: 24
  misc_feature: MA Experiment 20000437 PARAMETER Experiment Name: At_Drought_P Parameter: Tissue Value: Whole Plant
  misc_feature: MA Experiment 20000437 PARAMETER Experiment Name: At_Drought_P Parameter: Treatment Value: Drought vs. No Drought
  misc_feature: MA Experiment ID: 20000456 Result: Up-regulated in Transcription
  misc_feature: MA Experiment 20000456 PARAMETER Experiment Name: At_100uM_BA_P Parameter: Age (day) Value: 14
  misc_feature: MA Experiment 20000456 PARAMETER Experiment Name: At_100uM_BA_P Parameter: Organism Value: A. thaliana
  misc_feature: MA Experiment 20000456 PARAMETER Experiment Name: At_100uM_BA_P Parameter: Plant Line Value: WS
  misc_feature: MA Experiment 20000456 PARAMETER Experiment Name: At_100uM_BA_P Parameter: Timepoint (hr) Value: 6
  misc_feature: MA Experiment 20000456 PARAMETER Experiment Name: At_100uM_BA_P Parameter: Tissue Value: Aerial
  misc_feature: MA Experiment 20000456 PARAMETER Experiment Name: At_100uM_BA_P Parameter: Treatment Value: 100uM BA vs. No Treatment
  misc_feature: MA Experiment ID: 20000794 Result: Down-regulated in Transcription
  misc_feature: MA Experiment 20000794 PARAMETER Experiment Name: At_Petals_P Parameter: Age (day) Value: 23-25 days
  misc_feature: MA Experiment 20000794 PARAMETER Experiment Name: At_Petals_P Parameter: Plant Line Value: WS
  misc_feature: MA Experiment 20000794 PARAMETER Experiment Name: At_Petals_P Parameter: Tissue Value: Petals vs. Whole plant
  misc_feature: MA Experiment ID: 20001557 Result: Up-regulated in Transcription
  misc_feature: MA Experiment 20001557 PARAMETER Experiment Name: At_Drought_Soil_Dry_P Parameter: Age (day) Value: 27
  misc_feature: MA Experiment 20001557 PARAMETER Experiment Name: At_Drought_Soil_Dry_P Parameter: Organism Value: A. thaliana
  misc_feature: MA Experiment 20001557 PARAMETER Experiment Name: At_Drought_Soil_Dry_P Parameter: Plant Line Value: WS
  misc_feature: MA Experiment 20001557 PARAMETER Experiment Name: At_Drought_Soil_Dry_P Parameter: Post Timepoint (hr) Value: 3
  misc_feature: MA Experiment 20001557 PARAMETER Experiment Name: At_Drought_Soil_Dry_P Parameter: Post-Treatment Value: Re-Water vs. No Drought
  misc_feature: MA Experiment 20001557 PARAMETER Experiment Name: At_Drought_Soil_Dry_P Parameter: Timepoint (day) Value: 13
  misc_feature: MA Experiment 20001557 PARAMETER Experiment Name: At_Drought_Soil_Dry_P Parameter: Treatment Value: Drought vs. No Drought
  misc_feature: MA Experiment ID: 20001558 Result: Up-regulated in Transcription
  misc_feature: MA Experiment 20001558 PARAMETER Experiment Name: At_Drought_Soil_Dry_P Parameter: Age (day) Value: 27
  misc_feature: MA Experiment 20001558 PARAMETER Experiment Name: At_Drought_Soil_Dry_P Parameter: Organism Value: A. thaliana
  misc_feature: MA Experiment 20001558 PARAMETER Experiment Name: At_Drought_Soil_Dry_P Parameter: Plant Line Value: WS
  misc_feature: MA Experiment 20001558 PARAMETER Experiment Name: At_Drought_Soil_Dry_P Parameter: Post Timepoint (hr) Value: 6
  misc_feature: MA Experiment 20001558 PARAMETER Experiment Name: At_Drought_Soil_Dry_P Parameter: Post-Treatment Value: Re-Water vs. No Drought
  misc_feature: MA Experiment 20001558 PARAMETER Experiment Name: At_Drought_Soil_Dry_P Parameter: Timepoint (day) Value: 13
  misc_feature: MA Experiment 20001558 PARAMETER Experiment Name: At_Drought_Soil_Dry_P Parameter: Treatment Value: Drought vs. No Drought
  misc_feature: MA Experiment ID: 20001560 Result: Up-regulated in Transcription
  misc_feature: MA Experiment 20001560 PARAMETER Experiment Name: At_Drought_Soil_Dry_P Parameter: Age (day) Value: 28
  misc_feature: MA Experiment 20001560 PARAMETER Experiment Name: At_Drought_Soil_Dry_P Parameter: Organism Value: A. thaliana
  misc_feature: MA Experiment 20001560 PARAMETER Experiment Name: At_Drought_Soil_Dry_P Parameter: Plant Line Value: WS
  misc_feature: MA Experiment 20001560 PARAMETER Experiment Name: At_Drought_Soil_Dry_P Parameter: Post Timepoint (hr) Value: None
  misc_feature: MA Experiment 20001560 PARAMETER Experiment Name: At_Drought_Soil_Dry_P Parameter: Post-Treatment Value: None
  misc_feature: MA Experiment 20001560 PARAMETER Experiment Name: At_Drought_Soil_Dry_P Parameter: Timepoint (day) Value: 14
  misc_feature: MA Experiment 20001560 PARAMETER Experiment Name: At_Drought_Soil_Dry_P Parameter: Treatment Value: Drought vs. No Drought
  misc_feature: MA Experiment ID: 20001757 Result: Up-regulated in Transcription
  misc_feature: MA Experiment 20001757 PARAMETER Experiment Name: At_50mM_NH4NO3_L-to-H_P Parameter: Timepoint (hr) Value: 6
  misc_feature: MA Experiment 20001757 PARAMETER Experiment Name: At_50mM_NH4NO3_L-to-H_P Parameter: Tissue Value: Leaf
  misc_feature: MA Experiment 20001757 PARAMETER Experiment Name: At_50mM_NH4NO3_L-to-H_P Parameter: Treatment Value: 50mM NH4NO3 vs 100mM Mannitol
aaactaaaaccctagctaccttgttctcctcaccgcttctttcttccctgaactcagaacttagaacaaagaactctcgtagacgaagaagaagatgacggtagaaggagtgaaccctaaggcgtatccgttagctgattctcagttatcgataacgattcttgatcttgttcaacaagctacgaattacaaacagttaaagaaaggagctaatgaagctaccaagacattgaaccgtgggatctctgagttcattgttatggctgctgatactgagcctctcgagattcttcttcatcttcctcttcttgctgaagataagaatgtgccgtatgtgtttgtgccatcgaaacaagcccttggaagagcatgtgatgtaaccagacccgtgatcgcttgttccgttacatcaaacgaggctagtcagttgaaatctcaaattcagcaccttaaggatgccattgagaagctcctcatctagattcttggtggaatgaatgaatgatgggtctctccatttatgaagaggcttggactgaagtgagtttatgtgcaactttttagcctatgagaaaaacaaaaaacttgtgaacgaatcctatcctttttgaagattgtaatgctttttatttgatattgtgttggtgccaatgcatttatgaacaacaagaatccttttaaagtgagtttcttcaatttggttatttgtttggtg

SEQ ID NO: 105714 - protein, 128 aa, Arabidopsis thaliana; identical to SEQ ID NO: 22375
  peptide (1)..(128): Ceres Seq. ID no. 13617832
  misc_feature (20)..(114): Pfam Name: Ribosomal protein L7Ae/L30e/S12e/Gadd45 family Pfam Description: Ribosomal protein L7Ae/L30e/S12e/Gadd45 family
  misc_feature (1)..(128): Homolog of NCBI NO: 15235416 NR Description: ribosomal protein L7Ae family [Arabidopsis
  misc_feature (1)..(128): Homolog of NCBI NO: 21592866 NR Description: Ribosomal protein L7Ae-like [Arabidopsis thaliana]
  misc_feature (1)..(128): Homolog of NCBI NO: 15241276 NR Description: ribosomal protein L7Ae family [Arabidopsis >gi|15081642|gb|AAK82476.1| AT5g20160/F5O24_50 [Arabidopsis >gi|20334836|gb|AAM16174.1| AT5g20160/F5O24_50 [Arabidopsis
  misc_feature (1)..(128): Homolog of NCBI NO: 15236127 NR Description: Ribosomal protein L7Ae family [Arabidopsis
  misc_feature (42)..(128): Homolog of NCBI NO: 30687670 NR Description: ribosomal protein L7Ae family [Arabidopsis
  misc_feature (1)..(46): Homolog of NCBI NO: 30687670 NR Description: ribosomal protein L7Ae family [Arabidopsis
  misc_feature (6)..(128): Homolog of NCBI NO: 37530712 NR Description: putative ribosomal protein L7Ae-like [Oryza
  misc_feature (1)..(108): Homolog of NCBI NO: 25295061 NR Description: Ribosomal protein L7Ae-like (partial) [imported] -
  misc_feature (1)..(128): Homolog of NCBI NO: 17535189 NR Description: Ribosomal protein L7Ae/L30e/S12e/Gadd45 family kD) [Caenorhabditis elegans] >gi|2500347|sp|Q21568|NHPX_CAEEL family protein YEL026W homolog >gi|7506095|pir||T23808
  misc_feature (1)..(128): Homolog of NCBI NO: 38174386 NR Description: Unknown (protein for MGC:75724) [Silurana

SEQ ID NO: 105715 - protein, 73 aa, Arabidopsis thaliana; identical to SEQ ID NO: 22376
  peptide (1)..(73): Ceres Seq. ID no. 13617833
  misc_feature (1)..(59): Pfam Name: Ribosomal protein L7Ae/L30e/S12e/Gadd45 family Pfam Description: Ribosomal protein L7Ae/L30e/S12e/Gadd45 family
  misc_feature (1)..(73): Homolog of NCBI NO: 15235416 NR Description: ribosomal protein L7Ae family [Arabidopsis
  misc_feature (1)..(73): Homolog of NCBI NO: 21592866 NR Description: Ribosomal protein L7Ae-like [Arabidopsis thaliana]
  misc_feature (1)..(73): Homolog of NCBI NO: 15241276 NR Description: ribosomal protein L7Ae family [Arabidopsis >gi|15081642|gb|AAK82476.1| AT5g20160/F5O24_50 [Arabidopsis >gi|20334836|gb|AAM16174.1| AT5g20160/F5O24_50 [Arabidopsis
  misc_feature (1)..(73): Homolog of NCBI NO: 15236127 NR Description: Ribosomal protein L7Ae family [Arabidopsis
  misc_feature (1)..(73): Homolog of NCBI NO: 30687670 NR Description: ribosomal protein L7Ae family [Arabidopsis
  misc_feature (1)..(73): Homolog of NCBI NO: 37530712 NR Description: putative ribosomal protein L7Ae-like [Oryza
  misc_feature (1)..(53): Homolog of NCBI NO: 25295061 NR Description: Ribosomal protein L7Ae-like (partial) [imported] -
  misc_feature (1)..(73): Homolog of NCBI NO: 17535189 NR Description: Ribosomal protein L7Ae/L30e/S12e/Gadd45 family kD) [Caenorhabditis elegans] >gi|2500347|sp|Q21568|NHPX_CAEEL family protein YEL026W homolog >gi|7506095|pir||T23808
  misc_feature (1)..(73): Homolog of NCBI NO: 38174386 NR Description: Unknown (protein for MGC:75724) [Silurana
  misc_feature (1)..(73): Homolog of NCBI NO: 39597398 NR Description: Hypothetical protein CBG03041 [Caenorhabditis

SEQ ID NO: 105716 - DNA, 1955 bp, Arabidopsis thaliana
  misc_feature (1)..(1955): Ceres Seq. ID no. 13617838
  misc_feature: MA Experiment ID: 108461 Result: Up-regulated in Transcription
  misc_feature: MA Experiment 108461 PARAMETER Experiment Name: At_Germinating_Seeds_cDNA_P Parameter: Age (day) Value: 1 vs. 0
  misc_feature: MA Experiment 108461 PARAMETER Experiment Name: At_Germinating_Seeds_cDNA_P Parameter: Tissue Value: Germinating Seeds
  misc_feature: MA Experiment ID: 108462 Result: Up-regulated in Transcription
  misc_feature: MA Experiment 108462 PARAMETER Experiment Name: At_Germinating_Seeds_cDNA_P Parameter: Age (day) Value: 2 vs. 0
  misc_feature: MA Experiment 108462 PARAMETER Experiment Name: At_Germinating_Seeds_cDNA_P Parameter: Tissue Value: Germinating Seeds
  misc_feature: MA Experiment ID: 108463 Result: Up-regulated in Transcription
  misc_feature: MA Experiment 108463 PARAMETER Experiment Name: At_Germinating_Seeds_cDNA_P Parameter: Age (day) Value: 3 vs. 0
  misc_feature: MA Experiment 108463 PARAMETER Experiment Name: At_Germinating_Seeds_cDNA_P Parameter: Tissue Value: Germinating Seeds
  misc_feature: MA Experiment ID: 108464 Result: Up-regulated in Transcription
  misc_feature: MA Experiment 108464 PARAMETER Experiment Name: At_Germinating_Seeds_cDNA_P Parameter: Age (day) Value: 4 vs. 0
  misc_feature: MA Experiment 108464 PARAMETER Experiment Name: At_Germinating_Seeds_cDNA_P Parameter: Tissue Value: Germinating Seeds
  misc_feature: MA Experiment ID: 108577 Result: Down-regulated in Transcription
  misc_feature: MA Experiment 108577 PARAMETER Experiment Name: At_42deg_Heat_cDNA_P Parameter: Temperature (deg C) Value: 42 vs. 22
  misc_feature: MA Experiment 108577 PARAMETER Experiment Name: At_42deg_Heat_cDNA_P Parameter: Timepoint (hr) Value: 6
  misc_feature: MA Experiment 108577 PARAMETER Experiment Name: At_42deg_Heat_cDNA_P Parameter: Tissue Value: Aerial
  misc_feature: MA Experiment ID: 108595 Result: Down-regulated in Transcription
  misc_feature: MA Experiment 108595 PARAMETER Experiment Name: At_Ler-pi_Ovule_cDNA_P Parameter: Plant Line Value: null
  misc_feature: MA Experiment ID: 20000113 Result: Down-regulated in Transcription
  misc_feature: MA Experiment 20000113 PARAMETER Experiment Name: At_42deg_Heat_cDNA_P Parameter: Temperature (deg C) Value: 42 vs. 22
  misc_feature: MA Experiment 20000113 PARAMETER Experiment Name: At_42deg_Heat_cDNA_P Parameter: Timepoint (hr) Value: 8
  misc_feature: MA Experiment 20000113 PARAMETER Experiment Name: At_42deg_Heat_cDNA_P Parameter: Tissue Value: Aerial
  misc_feature: MA Experiment ID: 20000144 Result: Down-regulated in Transcription
  misc_feature: MA Experiment 20000144 PARAMETER Experiment Name: At_42deg_Heat_cDNA_P Parameter: Temperature (deg C) Value: 42 vs. 22
  misc_feature: MA Experiment 20000144 PARAMETER Experiment Name: At_42deg_Heat_cDNA_P Parameter: Timepoint (hr) Value: 1
  misc_feature: MA Experiment 20000144 PARAMETER Experiment Name: At_42deg_Heat_cDNA_P Parameter: Tissue Value: Aerial
  misc_feature: MA Experiment ID: 20000180 Result: Up-regulated in Transcription
  misc_feature: MA Experiment 20000180 PARAMETER Experiment Name: At_Germinating_Seeds_P Parameter: Age (hr) Value: 24 vs. 0
  misc_feature: MA Experiment 20000180 PARAMETER Experiment Name: At_Germinating_Seeds_P Parameter: Tissue Value: Germinating Seeds
  misc_feature: MA Experiment ID: 20000224 Result: Down-regulated in Transcription
atgtcgataataaagtatctgataataaatatgttagagagtccattttcttcttcttcctcacaccaaaaagcttccattgatttcgcatcagatcttgctctctcttctatctctgcgattcttctggatcttctcaaatccatgaaggaatcagatctaaccaccgaaccaatcgcacaaaatctaatcaagctaataagcaatgtctgtttctcagtcttcgttttcacagttctcatcttcacagtaatcgcagtaacttaccaaccaccagatccatggcttgaatctgctccagcactcaccaaactcctaaccgaaaccgaaaacgcaactttcaaaatcgacggttcgattctcaaaaccggcgaagatctcgcttcatctccgtcatcatcacctccgtcgaactccacagagcaagtcacggaggcgacgattgagaaatccgaggcgaaaatcggtaatatgactgtgaagaactctatagattgtgatgaggatttgaagattgtgaattgttctgatccgagagttttagttgctgttgagaggtttaatttgaaggtttttaaatctattgtgttcttagagtacgaaactccggttaacggatcgaaactagacgaatgcgatgtttcttggaggtttaggaataagaaggagaagtcatggaggagatacagagatttcaggaggtttaggtttggatttggtgagaattgtacttataaagtgtttcatactagtggttggcattctggtgttaatgctcgtaggcctaggattagtagaccgagctcgagtcgaggagctcgcggtggtgattcggagattaatgatacgattccgactcttggttcgcagacgagtttccggagagggaagtatttgtattattcgcggggtggtgattattgtaagggtatgaatcagtatatgtggagtttcttgtgtggtttaggtgaagcaatgtatttgaataggacttttgtgatggatttgagtttgtgtttgtcttcgagttatagttctaaggggaaagatgaggaaggtaaggattttcggtattattttgatttcgagcatcttaaggagacggcttcgattgttgaagagggtgagttcttgagagattggaagaaatggaatcggttgcataaacggaaagttcctgttaggaaggttaagacgcatagagtgtcgcctttgcagcttagtaaagataagagtacgattatatggaggcagtttgatactcctgagcctgaaaactattggtatagagtttgtgaagggcaagcatcgaagtatgttgagaggccgtggcatgcgttgtggaagtcgaagaggttgatgaatattgtctctgagattagtgggaaaatggactgggattttgatgctgttcatgtggttagaggcgagaaagcgaagaacaagaagctatggccacatttggatgcagacacatggcctgatgcgatattgaccaaacttaaaggattggttcaggtgtggaggaatttgtacgttgcaactaatgaaccgttttataattactttgacaagttgaggtctcagtacaaggttcacttgcttgatgactatagctacttgtggggaaataagagtgaatggtacaatgagactagtctcttgaacaatgggaaaccagttgagtttgatgggtacatgagagtagctgttgatacagaggtgttttatagaggaaagactcgcgtcgagacgttctataaccttaccacggactgcaaagacgggatcaatacatgctaaattgatcattcaggttgtgatatgttttcattgttttatttgtttgtgtatcaaattcagttatgcttgtgttgtttaccttgtgttctactagctattgaagagtgtacgtaacgtttacattttttgattcatatccttaattctgtaag

SEQ ID NO: 105717 - protein, 600 aa, Arabidopsis thaliana
  peptide (1)..(600): Ceres Seq. ID no. 13617839
  misc_feature (49)..(600): Homolog of NCBI NO: 15236611 NR Description: expressed protein [Arabidopsis thaliana]
  misc_feature (50)..(600): Homolog of NCBI NO: 34913308 NR Description: P0519E12.32 [Oryza sativa (japonica
  misc_feature (57)..(600): Homolog of NCBI NO: 18395698 NR Description: expressed protein [Arabidopsis thaliana]
  misc_feature (57)..(600): Homolog of NCBI NO: 15235454 NR Description: expressed protein [Arabidopsis thaliana]
  misc_feature (280)..(600): Homolog of NCBI NO: 37534994 NR Description: unknown protein [Oryza sativa (japonica
  misc_feature (161)..(473): Homolog of NCBI NO: 34909040 NR Description: P0034E02.33 [Oryza sativa (japonica
  misc_feature (365)..(584): Homolog of NCBI NO: 34909040 NR Description: P0034E02.33 [Oryza sativa (japonica
MSIIKYLIINMLESPFSSSSSHQKASIDFASDLALSSISAILLDLLKSMKESDLTTEPIAQNLIKLISNVCFSVFVFTVLIFTVIAVTYQPPDPWLESAPALTKLLTETENATFKIDGSILKTGEDLASSPSSSPPSNSTEQVTEATIEKSEAKIGNMTVKNSIDCDEDLKIVNCSDPRVLVAVERFNLKVFKSIVFLEYETPVNGSKLDECDVSWRFRNKKEKSWRRYRDFRRFRFGFGENCTYKVFHTSGWHSGVNARRPRISRPSSSRGARGGDSEINDTIPTLGSQTSFRRGKYLYYSRGGDYCKGMNQYMWSFLCGLGEAMYLNRTFVMDLSLCLSSSYSSKGKDEEGKDFRYYFDFEHLKETASIVEEGEFLRDWKKWNRLHKRKVPVRKVKTHRVSPLQLSKDKSTIIWRQFDTPEPENYWYRVCEGQASKYVERPWHALWKSKRLMNIVSEISGKMDWDFDAVHVVRGEKAKNKKLWPHLDADTWPDAILTKLKGLVQVWRNLYVATNEPFYNYFDKLRSQYKVHLLDDYSYLWGNKSEWYNETSLLNNGKPVEFDGYMRVAVDTEVFYRGKTRVETFYNLTTDCKDGINTC

SEQ ID NO: 105718 - protein, 590 aa, Arabidopsis thaliana
  peptide (1)..(590): Ceres Seq. ID no. 13617840
  misc_feature (39)..(590): Homolog of NCBI NO: 15236611 NR Description: expressed protein [Arabidopsis thaliana]
  misc_feature (40)..(590): Homolog of NCBI NO: 34913308 NR Description: P0519E12.32 [Oryza sativa (japonica
  misc_feature (47)..(590): Homolog of NCBI NO: 18395698 NR Description: expressed protein [Arabidopsis thaliana]
  misc_feature (47)..(590): Homolog of NCBI NO: 15235454 NR Description: expressed protein [Arabidopsis thaliana]
  misc_feature (270)..(590): Homolog of NCBI NO: 37534994 NR Description: unknown protein [Oryza sativa (japonica
  misc_feature (151)..(463): Homolog of NCBI NO: 34909040 NR Description: P0034E02.33 [Oryza sativa (japonica
  misc_feature (355)..(574): Homolog of NCBI NO: 34909040 NR Description: P0034E02.33 [Oryza sativa (japonica
MLESPFSSSSSHQKASIDFASDLALSSISAILLDLLKSMKESDLTTEPIAQNLIKLISNVCFSVFVFTVLIFTVIAVTYQPPDPWLESAPALTKLLTETENATFKIDGSILKTGEDLASSPSSSPPSNSTEQVTEATIEKSEAKIGNMTVKNSIDCDEDLKIVNCSDPRVLVAVERFNLKVFKSIVFLEYETPVNGSKLDECDVSWRFRNKKEKSWRRYRDFRRFRFGFGENCTYKVFHTSGWHSGVNARRPRISRPSSSRGARGGDSEINDTIPTLGSQTSFRRGKYLYYSRGGDYCKGMNQYMWSFLCGLGEAMYLNRTFVMDLSLCLSSSYSSKGKDEEGKDFRYYFDFEHLKETASIVEEGEFLRDWKKWNRLHKRKVPVRKVKTHRVSPLQLSKDKSTIIWRQFDTPEPENYWYRVCEGQASKYVERPWHALWKSKRLMNIVSEISGKMDWDFDAVHVVRGEKAKNKKLWPHLDADTWPDAILTKLKGLVQVWRNLYVATNEPFYNYFDKLRSQYKVHLLDDYSYLWGNKSEWYNETSLLNNGKPVEFDGYMRVAVDTEVFYRGKTRVETFYNLTTDCKDGINTC

SEQ ID NO: 105719 - protein, 552 aa, Arabidopsis thaliana; identical to SEQ ID NO: 23115
  peptide (1)..(552): Ceres Seq. ID no. 13617841
  misc_feature (1)..(552): Homolog of NCBI NO: 15236611 NR Description: expressed protein [Arabidopsis thaliana]
  misc_feature (2)..(552): Homolog of NCBI NO: 34913308 NR Description: P0519E12.32 [Oryza sativa (japonica
  misc_feature (9)..(552): Homolog of NCBI NO: 18395698 NR Description: expressed protein [Arabidopsis thaliana]
  misc_feature (9)..(552): Homolog of NCBI NO: 15235454 NR Description: expressed protein [Arabidopsis thaliana]
  misc_feature (232)..(552): Homolog of NCBI NO: 37534994 NR Description: unknown protein [Oryza sativa (japonica
  misc_feature (113)..(425): Homolog of NCBI NO: 34909040 NR Description: P0034E02.33 [Oryza sativa (japonica
  misc_feature (317)..(536): Homolog of NCBI NO: 34909040 NR Description: P0034E02.33 [Oryza sativa (japonica

SEQ ID NO: 105720 - DNA, 1276 bp, Arabidopsis thaliana
  misc_feature (1)..(1276): Ceres Seq. ID no. 13617842
  misc_feature: MA Experiment ID: 108434 Result: Down-regulated in Transcription
  misc_feature: MA Experiment 108434 PARAMETER Experiment Name: At_Root_Tips_cDNA_P Parameter: Tissue Value: Root Tips
  misc_feature: MA Experiment ID: 108435 Result: Down-regulated in Transcription
  misc_feature: MA Experiment 108435 PARAMETER Experiment Name: At_stm_Mutants_cDNA_P Parameter: Plant Line Value: wt Landsburg vs stm
  misc_feature: MA Experiment 108435 PARAMETER Experiment Name: At_stm_Mutants_cDNA_P Parameter: Tissue Value: Shoot Apical Meristem Region
  misc_feature: MA Experiment ID: 108462 Result: Up-regulated in Transcription
  misc_feature: MA Experiment 108462 PARAMETER Experiment Name: At_Germinating_Seeds_cDNA_P Parameter: Age (day) Value: 2 vs. 0
  misc_feature: MA Experiment 108462 PARAMETER Experiment Name: At_Germinating_Seeds_cDNA_P Parameter: Tissue Value: Germinating Seeds
  misc_feature: MA Experiment ID: 108463 Result: Up-regulated in Transcription
  misc_feature: MA Experiment 108463 PARAMETER Experiment Name: At_Germinating_Seeds_cDNA_P Parameter: Age (day) Value: 3 vs. 0
  misc_feature: MA Experiment 108463 PARAMETER Experiment Name: At_Germinating_Seeds_cDNA_P Parameter: Tissue Value: Germinating Seeds
  misc_feature: MA Experiment ID: 108464 Result: Up-regulated in Transcription
  misc_feature: MA Experiment 108464 PARAMETER Experiment Name: At_Germinating_Seeds_cDNA_P Parameter: Age (day) Value: 4 vs. 0
  misc_feature: MA Experiment 108464 PARAMETER Experiment Name: At_Germinating_Seeds_cDNA_P Parameter: Tissue Value: Germinating Seeds
  misc_feature: MA Experiment ID: 108469 Result: Down-regulated in Transcription
  misc_feature: MA Experiment ID: 108488 Result: Up-regulated in Transcription
  misc_feature: MA Experiment ID: 108501 Result: Down-regulated in Transcription
  misc_feature: MA Experiment 108501 PARAMETER Experiment Name: At_ap2_floral_buds_cDNA_P Parameter: Plant Line Value: ap2 (Ler.)
  misc_feature: MA Experiment 108501 PARAMETER Experiment Name: At_ap2_floral_buds_cDNA_P Parameter: Tissue Value: Closed Flower
  misc_feature: MA Experiment ID: 108569 Result: Up-regulated in Transcription
  misc_feature: MA Experiment 108569 PARAMETER Experiment Name: At_0.001%_MeJA__cDNA_P Parameter: Timepoint (hr) Value: 6
  misc_feature: MA Experiment 108569 PARAMETER Experiment Name: At_0.001%_MeJA__cDNA_P Parameter: Tissue Value: Aerial
  misc_feature: MA Experiment 108569 PARAMETER Experiment Name: At_0.001%_MeJA__cDNA_P Parameter: Treatment Value: 0.001% MeJA vs. No Treatment
  misc_feature: MA Experiment ID: 108574 Result: Up-regulated in Transcription
  misc_feature: MA Experiment 108574 PARAMETER Experiment Name: At_Wounding__cDNA_P Parameter: Timepoint (hr) Value: 1
  misc_feature: MA Experiment 108574 PARAMETER Experiment Name: At_Wounding__cDNA_P Parameter: Tissue Value: Aerial
  misc_feature: MA Experiment 108574 PARAMETER Experiment Name: At_Wounding__cDNA_P Parameter: Treatment Value: Wounding vs. No Wounding
  misc_feature: MA Experiment ID: 108579 Result: Up-regulated in Transcription
  misc_feature: MA Experiment 108579 PARAMETER Experiment Name: At_4deg_Cold_cDNA_P Parameter: Temperature (deg C) Value: 4 vs. 22
  misc_feature: MA Experiment 108579 PARAMETER Experiment Name: At_4deg_Cold_cDNA_P Parameter: Timepoint (hr) Value: 6
  misc_feature: MA Experiment 108579 PARAMETER Experiment Name: At_4deg_Cold_cDNA_P Parameter: Tissue Value: Aerial
  misc_feature: MA Experiment ID: 108595 Result: Down-regulated in Transcription
  misc_feature: MA Experiment 108595 PARAMETER Experiment Name: At_Ler-pi_Ovule_cDNA_P Parameter: Plant Line Value: null
  misc_feature: MA Experiment ID: 108607 Result: Up-regulated in Transcription
  misc_feature: MA Experiment 108607 PARAMETER Experiment Name: At_100uM_ABA_cDNA_P Parameter: Timepoint (hr) Value: 4
  misc_feature: MA Experiment 108607 PARAMETER Experiment Name: At_100uM_ABA_cDNA_P Parameter: Tissue Value: Aerial
  misc_feature: MA Experiment 108607 PARAMETER Experiment Name: At_100uM_ABA_cDNA_P Parameter: Treatment Value: 100uM ABA vs. No Treatment
  misc_feature: MA Experiment ID: 20000089 Result: Down-regulated in Transcription
  misc_feature: MA Experiment ID: 20000090 Result: Down-regulated in Transcription
  misc_feature: MA Experiment ID: 20000169 Result: Up-regulated in Transcription
  misc_feature: MA Experiment 20000169 PARAMETER Experiment Name: At_100uM_ABA_P Parameter: Age (day) Value: 14
  misc_feature: MA Experiment 20000169 PARAMETER Experiment Name: At_100uM_ABA_P Parameter: Organism Value: A. thaliana
  misc_feature: MA Experiment 20000169 PARAMETER Experiment Name: At_100uM_ABA_P Parameter: Plant Line Value: WS
  misc_feature: MA Experiment 20000169 PARAMETER Experiment Name: At_100uM_ABA_P Parameter: Timepoint (hr) Value: 6
  misc_feature: MA Experiment 20000169 PARAMETER Experiment Name: At_100uM_ABA_P Parameter: Tissue Value: Aerial
  misc_feature: MA Experiment 20000169 PARAMETER Experiment Name: At_100uM_ABA_P Parameter: Treatment Value: 100uM ABA vs. No Treatment
  misc_feature: MA Experiment ID: 20000184 Result: Up-regulated in Transcription
  misc_feature: MA Experiment 20000184 PARAMETER Experiment Name: At_Shoots__P Parameter: Age (day) Value: 7
  misc_feature: MA Experiment 20000184 PARAMETER Experiment Name: At_Shoots__P Parameter: Tissue Value: Shoots vs. Whole Plant
  misc_feature: MA Experiment ID: 20000185 Result: Down-regulated in Transcription
  misc_feature: MA Experiment 20000185 PARAMETER Experiment Name: At_Roots__P Parameter: Age (day) Value: 7 vs. 21
  misc_feature: MA Experiment 20000185 PARAMETER Experiment Name: At_Roots__P Parameter: Organism Value: A. thaliana
  misc_feature: MA Experiment 20000185 PARAMETER Experiment Name: At_Roots__P Parameter: Tissue Value: Roots vs. Whole Plant
  misc_feature: MA Experiment ID: 20000211 Result: Up-regulated in Transcription
  misc_feature: MA Experiment 20000211 PARAMETER Experiment Name: At_0.001percent_MeJA__P Parameter: Age (day) Value: 14
  misc_feature: MA Experiment 20000211 PARAMETER Experiment Name: At_0.001percent_MeJA__P Parameter: Organism Value: A. thaliana
  misc_feature: MA Experiment 20000211 PARAMETER Experiment Name: At_0.001percent_MeJA__P Parameter: Plant Line Value: WS
  misc_feature: MA Experiment 20000211 PARAMETER Experiment Name: At_0.001percent_MeJA__P Parameter: Timepoint (hr) Value: 1
  misc_feature: MA Experiment 20000211 PARAMETER Experiment Name: At_0.001percent_MeJA__P Parameter: Tissue Value: Aerial
  misc_feature: MA Experiment 20000211 PARAMETER Experiment Name: At_0.001percent_MeJA__P Parameter: Treatment Value: 0.001percent MeJA vs. No Treatment
  misc_feature: MA Experiment ID: 20000224 Result: Up-regulated in Transcription
  misc_feature: MA Experiment ID: 20000308 Result: Up-regulated in Transcription
  misc_feature: MA Experiment 20000308 PARAMETER Experiment Name: At_100mM_NaCl__P Parameter: Age (day) Value: 17
  misc_feature: MA Experiment 20000308 PARAMETER Experiment Name: At_100mM_NaCl__P Parameter: Organism Value: A. thaliana
  misc_feature: MA Experiment 20000308 PARAMETER Experiment Name: At_100mM_NaCl__P Parameter: Plant Line Value: WS
  misc_feature: MA Experiment 20000308 PARAMETER Experiment Name: At_100mM_NaCl__P Parameter: Timepoint (hr) Value: 72
  misc_feature: MA Experiment 20000308 PARAMETER Experiment Name: At_100mM_NaCl__P Parameter: Tissue Value: Whole Plant
  misc_feature: MA Experiment 20000308 PARAMETER Experiment Name: At_100mM_NaCl__P Parameter: Treatment Value: 100mM NaCl vs. No Treatment
  misc_feature: MA Experiment ID: 20000437 Result: Down-regulated in Transcription
  misc_feature: MA Experiment 20000437 PARAMETER Experiment Name: At_Drought_P Parameter: Age (day) Value: 8
  misc_feature: MA Experiment 20000437 PARAMETER Experiment Name: At_Drought_P Parameter: Organism Value: A. thaliana
  misc_feature: MA Experiment 20000437 PARAMETER Experiment Name: At_Drought_P Parameter: Plant Line Value: WS
  misc_feature: MA Experiment 20000437 PARAMETER Experiment Name: At_Drought_P Parameter: Timepoint (hr) Value: 24
  misc_feature: MA Experiment 20000437 PARAMETER Experiment Name: At_Drought_P Parameter: Tissue Value: Whole Plant
  misc_feature: MA Experiment 20000437 PARAMETER Experiment Name: At_Drought_P Parameter: Treatment Value: Drought vs. No Drought
  misc_feature: MA Experiment ID: 20000439 Result: Down-regulated in Transcription
  misc_feature: MA Experiment 20000439 PARAMETER Experiment Name: At_Roots__P Parameter: Age (day) Value: 14 vs. 21
  misc_feature: MA Experiment 20000439 PARAMETER Experiment Name: At_Roots__P Parameter: Organism Value: A. thaliana
  misc_feature: MA Experiment 20000439 PARAMETER Experiment Name: At_Roots__P Parameter: Tissue Value: Roots vs. Whole Plant
  misc_feature: MA Experiment ID: 20000452 Result: Up-regulated in Transcription
  misc_feature: MA Experiment 20000452 PARAMETER Experiment Name: At_CS6879_Shoots-Roots_P Parameter: Age (day) Value: 14
  misc_feature: MA Experiment 20000452 PARAMETER Experiment Name: At_CS6879_Shoots-Roots_P Parameter: Organism Value: A. thaliana
  misc_feature: MA Experiment 20000452 PARAMETER Experiment Name: At_CS6879_Shoots-Roots_P Parameter: Plant Line Value: CS6879 vs. WS
  misc_feature: MA Experiment 20000452 PARAMETER Experiment Name: At_CS6879_Shoots-Roots_P Parameter: Tissue Value: Shoots
  misc_feature: MA Experiment ID: 20000495 Result: Down-regulated in Transcription
  misc_feature: MA Experiment 20000495 PARAMETER Experiment Name: At_Guard_Cells_P Parameter: Harvest Date Value: 8/2/2002
  misc_feature: MA Experiment 20000495 PARAMETER Experiment Name: At_Guard_Cells_P Parameter: Organism Value: A. thaliana
  misc_feature: MA Experiment 20000495 PARAMETER Experiment Name: At_Guard_Cells_P Parameter: Tissue Value: Guard Cells vs. Leaves
  misc_feature: MA Experiment ID: 20000506 Result: Up-regulated in Transcription
  misc_feature: MA Experiment 20000506 PARAMETER Experiment Name: At_Wounding_P Parameter: Organism Value: A. thaliana
  misc_feature: MA Experiment 20000506 PARAMETER Experiment Name: At_Wounding_P Parameter: Plant Line Value: WS
  misc_feature: MA Experiment 20000506 PARAMETER Experiment Name: At_Wounding_P Parameter: Timepoint (hr) Value: 6
  misc_feature: MA Experiment 20000506 PARAMETER Experiment Name: At_Wounding_P Parameter: Tissue Value: Aerial
  misc_feature: MA Experiment 20000506 PARAMETER Experiment Name: At_Wounding_P Parameter: Treatment Value: Wounding vs. No Wounding
  misc_feature: MA Experiment ID: 20000527 Result: Down-regulated in Transcription
  misc_feature: MA Experiment 20000527 PARAMETER Experiment Name: At_10percent_PEG_P Parameter: Age (day) Value: 20
  misc_feature: MA Experiment 20000527 PARAMETER Experiment Name: At_10percent_PEG_P Parameter: Organism Value: A. thaliana
  misc_feature: MA Experiment 20000527 PARAMETER Experiment Name: At_10percent_PEG_P Parameter: Plant Line Value: WS
  misc_feature: MA Experiment 20000527 PARAMETER Experiment Name: At_10percent_PEG_P Parameter: Timepoint (day) Value: 20
  misc_feature: MA Experiment 20000527 PARAMETER Experiment Name: At_10percent_PEG_P Parameter: Tissue Value: Whole Plant
  misc_feature: MA Experiment 20000527 PARAMETER Experiment Name: At_10percent_PEG_P Parameter: Treatment Value: 10percent PEG vs. No Treatment
  misc_feature: MA Experiment ID: 20000606 Result: Down-regulated in Transcription
  misc_feature: MA Experiment 20000606 PARAMETER Experiment Name: At_CS8548_Mutant_P Parameter: Age (day) Value: 14
  misc_feature: MA Experiment 20000606 PARAMETER Experiment Name: At_CS8548_Mutant_P Parameter: Plant Line Value: CS8548 vs. wt
  misc_feature: MA Experiment 20000606 PARAMETER Experiment Name: At_CS8548_Mutant_P Parameter: Tissue Value: Whole Plant
  misc_feature: MA Experiment ID: 20000709 Result: Down-regulated in Transcription
  misc_feature: MA Experiment 20000709 PARAMETER Experiment Name: At_15mM_NH4NO3_L-to-H_P Parameter: Age (hr) Value: 14
  misc_feature: MA Experiment 20000709 PARAMETER Experiment Name: At_15mM_NH4NO3_L-to-H_P Parameter: Organism Value: A. thaliana
  misc_feature: MA Experiment 20000709 PARAMETER Experiment Name: At_15mM_NH4NO3_L-to-H_P Parameter: Plant Line Value: WS
  misc_feature: MA Experiment 20000709 PARAMETER Experiment Name: At_15mM_NH4NO3_L-to-H_P Parameter: Timepoint (hr) Value: 4
  misc_feature: MA Experiment 20000709 PARAMETER Experiment Name: At_15mM_NH4NO3_L-to-H_P Parameter: Tissue Value: Aerial
  misc_feature: MA Experiment 20000709 PARAMETER Experiment Name: At_15mM_NH4NO3_L-to-H_P Parameter: Treatment Value: 15mM NH4NO3 vs. 30mM Mannitol
  misc_feature: MA Experiment ID: 20000794 Result: Down-regulated in Transcription
  misc_feature: MA Experiment 20000794 PARAMETER Experiment Name: At_Petals_P Parameter: Age (day) Value: 23-25 days
  misc_feature: MA Experiment 20000794 PARAMETER Experiment Name: At_Petals_P Parameter: Plant Line Value: WS
  misc_feature: MA Experiment 20000794 PARAMETER Experiment Name: At_Petals_P Parameter: Tissue Value: Petals vs. Whole plant
  misc_feature: MA Experiment ID: 20001248 Result: Down-regulated in Transcription
  misc_feature: MA Experiment 20001248 PARAMETER Experiment Name: At_Far-red-induction_P Parameter: Age (day) Value: 7
  misc_feature: MA Experiment 20001248 PARAMETER Experiment Name: At_Far-red-induction_P Parameter: Light Value: Far-red vs. White
  misc_feature: MA Experiment 20001248 PARAMETER Experiment Name: At_Far-red-induction_P Parameter: Organism Value: A. thaliana
  misc_feature: MA Experiment 20001248 PARAMETER Experiment Name: At_Far-red-induction_P Parameter: Plant Line Value: Columbia
  misc_feature: MA Experiment 20001248 PARAMETER Experiment Name: At_Far-red-induction_P Parameter: Timepoint (hr) Value: 4
  misc_feature: MA Experiment 20001248 PARAMETER Experiment Name: At_Far-red-induction_P Parameter: Tissue Value: Whole Plant
  misc_feature: MA Experiment ID: 20001450 Result: Down-regulated in Transcription
  misc_feature: MA Experiment 20001450 PARAMETER Experiment Name: At_Far-red-induction_P Parameter: Age (day) Value: 7
  misc_feature: MA Experiment 20001450 PARAMETER Experiment Name: At_Far-red-induction_P Parameter: Light Value: Far-red vs. White
  misc_feature: MA Experiment 20001450 PARAMETER Experiment Name: At_Far-red-induction_P Parameter: Organism Value: A. thaliana
  misc_feature: MA Experiment 20001450 PARAMETER Experiment Name: At_Far-red-induction_P Parameter: Plant Line Value: Columbia
  misc_feature: MA Experiment 20001450 PARAMETER Experiment Name: At_Far-red-induction_P Parameter: Timepoint (hr) Value: 8
  misc_feature: MA Experiment 20001450 PARAMETER Experiment Name: At_Far-red-induction_P Parameter: Tissue Value: Whole Plant
  misc_feature: MA Experiment ID: 20001904 Result: Down-regulated in Transcription
  misc_feature: MA Experiment 20001904 PARAMETER Experiment Name: At_Drought_Reproduction_P Parameter: Age (day) Value: 37
  misc_feature: MA Experiment 20001904 PARAMETER Experiment Name: At_Drought_Reproduction_P Parameter: Organism Value: A. thaliana
  misc_feature: MA Experiment 20001904 PARAMETER Experiment Name: At_Drought_Reproduction_P Parameter: Plant Line Value: WS
  misc_feature: MA Experiment 20001904 PARAMETER Experiment Name: At_Drought_Reproduction_P Parameter: Timepoint (day) Value: 7
  misc_feature: MA Experiment 20001904 PARAMETER Experiment Name: At_Drought_Reproduction_P Parameter: Tissue Value: Rosettes
  misc_feature: MA Experiment 20001904 PARAMETER Experiment Name: At_Drought_Reproduction_P Parameter: Treatment Value: Drought vs. No Drought
  misc_feature: MA Experiment ID: 20001905 Result: Down-regulated in Transcription
  misc_feature: MA Experiment 20001905 PARAMETER Experiment Name: At_Drought_Reproduction_P Parameter: Age (day) Value: 40
  misc_feature: MA Experiment 20001905 PARAMETER Experiment Name: At_Drought_Reproduction_P Parameter: Organism Value: A. thaliana
  misc_feature: MA Experiment 20001905 PARAMETER Experiment Name: At_Drought_Reproduction_P Parameter: Plant Line Value: WS
  misc_feature: MA Experiment 20001905 PARAMETER Experiment Name: At_Drought_Reproduction_P Parameter: Timepoint (day) Value: 10
  misc_feature: MA Experiment 20001905 PARAMETER Experiment Name: At_Drought_Reproduction_P Parameter: Tissue Value: Rosettes
  misc_feature: MA Experiment 20001905 PARAMETER Experiment Name: At_Drought_Reproduction_P Parameter: Treatment Value: Drought vs. No Drought
  misc_feature: MA Experiment ID: 20001906 Result: Down-regulated in Transcription
  misc_feature: MA Experiment 20001906 PARAMETER Experiment Name: At_Drought_Reproduction_P Parameter: Age (day) Value: 35
  misc_feature: MA Experiment 20001906 PARAMETER Experiment Name: At_Drought_Reproduction_P Parameter: Organism Value: A. thaliana
  misc_feature: MA Experiment 20001906 PARAMETER Experiment Name: At_Drought_Reproduction_P Parameter: Plant Line Value: WS
  misc_feature: MA Experiment 20001906 PARAMETER Experiment Name: At_Drought_Reproduction_P Parameter: Timepoint (day) Value: 5
  misc_feature: MA Experiment 20001906 PARAMETER Experiment Name: At_Drought_Reproduction_P Parameter: Tissue Value: Siliques
  misc_feature: MA Experiment 20001906 PARAMETER Experiment Name: At_Drought_Reproduction_P Parameter: Treatment Value: Drought vs. No Drought
  misc_feature: MA Experiment ID: 20001907 Result: Down-regulated in Transcription
  misc_feature: MA Experiment 20001907 PARAMETER Experiment Name: At_Drought_Reproduction_P Parameter: Age (day) Value: 37
  misc_feature: MA Experiment 20001907 PARAMETER Experiment Name: At_Drought_Reproduction_P Parameter: Organism Value: A. thaliana
  misc_feature: MA Experiment 20001907 PARAMETER Experiment Name: At_Drought_Reproduction_P Parameter: Plant Line Value: WS
  misc_feature: MA Experiment 20001907 PARAMETER Experiment Name: At_Drought_Reproduction_P Parameter: Timepoint (day) Value: 7
  misc_feature: MA Experiment 20001907 PARAMETER Experiment Name: At_Drought_Reproduction_P Parameter: Tissue Value: Siliques
  misc_feature: MA Experiment 20001907 PARAMETER Experiment Name: At_Drought_Reproduction_P Parameter: Treatment Value: Drought vs. No Drought
  misc_feature: MA Experiment ID: 20001908 Result: Down-regulated in Transcription
  misc_feature: MA Experiment 20001908 PARAMETER Experiment Name: At_Drought_Reproduction_P Parameter: Age (day) Value: 40
  misc_feature: MA Experiment 20001908 PARAMETER Experiment Name: At_Drought_Reproduction_P Parameter: Organism Value: A. thaliana
  misc_feature: MA Experiment 20001908 PARAMETER Experiment Name: At_Drought_Reproduction_P Parameter: Plant Line Value: WS
  misc_feature: MA Experiment 20001908 PARAMETER Experiment Name: At_Drought_Reproduction_P Parameter: Timepoint (day) Value: 10
  misc_feature: MA Experiment 20001908 PARAMETER Experiment Name: At_Drought_Reproduction_P Parameter: Tissue Value: Siliques
  misc_feature: MA Experiment 20001908 PARAMETER Experiment Name: At_Drought_Reproduction_P Parameter: Treatment Value: Drought vs. No Drought
  misc_feature: MA Experiment ID: 20001911 Result: Down-regulated in Transcription
  misc_feature: MA Experiment 20001911 PARAMETER Experiment Name: At_Drought_Reproduction_P Parameter: Age (day) Value: 40
  misc_feature: MA Experiment 20001911 PARAMETER Experiment Name: At_Drought_Reproduction_P Parameter: Organism Value: A. thaliana
  misc_feature: MA Experiment 20001911 PARAMETER Experiment Name: At_Drought_Reproduction_P Parameter: Plant Line Value: WS
  misc_feature: MA Experiment 20001911 PARAMETER Experiment Name: At_Drought_Reproduction_P Parameter: Timepoint (day) Value: 10
  misc_feature: MA Experiment 20001911 PARAMETER Experiment Name: At_Drought_Reproduction_P Parameter: Tissue Value: Flowers
  misc_feature: MA Experiment 20001911 PARAMETER Experiment Name: At_Drought_Reproduction_P Parameter: Treatment Value: Drought vs. No Drought
acttatacctcactgacttactacaaatcagatatgtggaagattgggcagagaggagttccctatttccagagactcattgctgcgccgttcacgaccttgcggtccttgccaacttctttggtcgagacagggcagaaccgtgtcattgatgcttcgttaactctcatccgtgaaagggcaaaactcaaaggagagttagtgcgactcataggaggagcaaaagctacaacagctcttcttggagtaccacttggtcacaactcttcttttcttgaaggcccagccttggctcctcctcatgtaagggaagctatttggtgtggtagtacaaactccaccactgaagaagggaaggagctaaaagatccacgtgttctaagtgatgttggtgatattccggtacaagagattagagaaatgggggttgatgatgatagacttatgaaagtagtaagtgaatctgtgaagctggtgatggaagaggaaccattgcgcccgctggtcataggtggagaccattccatatcttatcctgttgtgagagctgtttcggagaaacttggaggacccgtggatattcttcatcttgatgcacatcccgatatatatgaccgttttgaaggcaattattactctcatgcatcttcttttgctcgtatcatggaaggtggctatgcgcggcggcttttacaggttgggatcagatccataaacaaagaaggacgggaacaaggcaagaggtttggagtagaacagtatgagatgcgaaccttctcaaaagatcgccaaatgttggaaaacttgaaactaggggaaggagtgaagggcgtgtatatctcgatcgatgttgactgtctcgatccgggattcgcgcacggagtgtcccacttcgaaccaggaggtctttctttccgagacgtccttaacatattacacaaccttcagggagatttggtgggggctgatgttgttgagtacaatccacagcgtgataccgctgatgacatgacggcaatggtcgcggctaagtttgttagagagctagccgcaaaaatgtcaaaatgaatttaaatggtactttggagtttaatcgttgaagcttgtaatatgcaataagtgtggtctcatagacatggtatcgaataagcttaatatcaattgggtttttaggccaaaatatcaatgtataatttgttaaattatgataagatgcattgtaataagttgtaaaagtaatttatcatattgcaatatatgtaaaaataaatttagc

SEQ ID NO: 105721 - protein, 355 aa, Arabidopsis thaliana; identical to SEQ ID NO: 22619
  peptide (1)..(355): Ceres Seq. ID no. 13617843
  misc_feature (74)..(354): Pfam Name: Arginase family Pfam Description: Arginase family
  misc_feature (12)..(355): Homolog of NCBI NO: 15236635 NR Description: arginase -related [Arabidopsis thaliana]
  misc_feature (12)..(355): Homolog of NCBI NO: 21592908 NR Description: putative arginase [Arabidopsis thaliana]
  misc_feature (15)..(355): Homolog of NCBI NO: 15236640 NR Description: arginase [Arabidopsis thaliana]
  misc_feature (15)..(347): Homolog of NCBI NO: 13182957 NR Description: arginase [Brassica napus]
  misc_feature (16)..(355): Homolog of NCBI NO: 32488415 NR Description: OSJNBb0085F13.5 [Oryza sativa (japonica
  misc_feature (33)..(355): Homolog of NCBI NO: 12802155 NR Description: arginase [Pinus taeda]

SEQ ID NO: 105722 - protein, 344 aa, Arabidopsis thaliana; identical to SEQ ID NO: 22620
  peptide (1)..(344): Ceres Seq. ID no. 13617844
  misc_feature (63)..(343): Pfam Name: Arginase family Pfam Description: Arginase family
  misc_feature (1)..(344): Homolog of NCBI NO: 15236635 NR Description: arginase -related [Arabidopsis thaliana]
  misc_feature (1)..(344): Homolog of NCBI NO: 21592908 NR Description: putative arginase [Arabidopsis thaliana]
  misc_feature (4)..(344): Homolog of NCBI NO: 15236640 NR Description: arginase [Arabidopsis thaliana]
  misc_feature (4)..(336): Homolog of NCBI NO: 13182957 NR Description: arginase [Brassica napus]
  misc_feature (5)..(344): Homolog of NCBI NO: 32488415 NR Description: OSJNBb0085F13.5 [Oryza sativa (japonica
  misc_feature (22)..(344): Homolog of NCBI NO: 12802155 NR Description: arginase [Pinus taeda]

SEQ ID NO: 105723 - protein, 215 aa, Arabidopsis thaliana; identical to SEQ ID NO: 22621
  peptide (1)..(215): Ceres Seq. ID no. 13617845
  misc_feature (1)..(214): Pfam Name: Arginase family Pfam Description: Arginase family
  misc_feature (1)..(215): Homolog of NCBI NO: 15236635 NR Description: arginase -related [Arabidopsis thaliana]
  misc_feature (1)..(215): Homolog of NCBI NO: 21592908 NR Description: putative arginase [Arabidopsis thaliana]
  misc_feature (1)..(215): Homolog of NCBI NO: 15236640 NR Description: arginase [Arabidopsis thaliana]
  misc_feature (1)..(207): Homolog of NCBI NO: 13182957 NR Description: arginase [Brassica napus]
  misc_feature (1)..(215): Homolog of NCBI NO: 32488415 NR Description: OSJNBb0085F13.5 [Oryza sativa (japonica
  misc_feature (1)..(215): Homolog of NCBI NO: 12802155 NR Description: arginase [Pinus taeda]

SEQ ID NO: 105724 - DNA, 1212 bp, Arabidopsis thaliana
  misc_feature (1)..(1212): Ceres Seq. ID no. 13617850
  misc_feature: MA Experiment ID: 108433 Result: Down-regulated in Transcription
  misc_feature: MA Experiment 108433 PARAMETER Experiment Name: At_rhl_Mutant2_cDNA_P Parameter: Age (day) Value: 7
  misc_feature: MA Experiment 108433 PARAMETER Experiment Name: At_rhl_Mutant2_cDNA_P Parameter: Organism Value: A. thaliana
  misc_feature: MA Experiment 108433 PARAMETER Experiment Name: At_rhl_Mutant2_cDNA_P Parameter: Plant Line Value: rhl Mutant vs. wt landsburg
  misc_feature: MA Experiment 108433 PARAMETER Experiment Name: At_rhl_Mutant2_cDNA_P Parameter: Tissue Value: Roots
  misc_feature: MA Experiment ID: 108434 Result: Down-regulated in Transcription
  misc_feature: MA Experiment 108434 PARAMETER Experiment Name: At_Root_Tips_cDNA_P Parameter: Tissue Value: Root Tips
  misc_feature: MA Experiment ID: 108473 Result: Down-regulated in Transcription
  misc_feature: MA Experiment 108473 PARAMETER Experiment Name: At_Drought_Flowers_cDNA_P Parameter: Timepoint (hr) Value: 7 d
  misc_feature: MA Experiment 108473 PARAMETER Experiment Name: At_Drought_Flowers_cDNA_P Parameter: Tissue Value: Flower
  misc_feature: MA Experiment 108473 PARAMETER Experiment Name: At_Drought_Flowers_cDNA_P Parameter: Treatment Value: Drought vs. No Drought
  misc_feature: MA Experiment ID: 108488 Result: Down-regulated in Transcription
  misc_feature: MA Experiment ID: 108572 Result: Down-regulated in Transcription
  misc_feature: MA Experiment 108572 PARAMETER Experiment Name: At_Drought_cDNA_P Parameter: Timepoint (hr) Value: 1
  misc_feature: MA Experiment 108572 PARAMETER Experiment Name: At_Drought_cDNA_P Parameter: Tissue Value: Aerial
  misc_feature: MA Experiment 108572 PARAMETER Experiment Name: At_Drought_cDNA_P Parameter: Treatment Value: Drought vs. No Drought
  misc_feature: MA Experiment ID: 108577 Result: Down-regulated in Transcription
  misc_feature: MA Experiment 108577 PARAMETER Experiment Name: At_42deg_Heat_cDNA_P Parameter: Temperature (deg C) Value: 42 vs. 22
  misc_feature: MA Experiment 108577 PARAMETER Experiment Name: At_42deg_Heat_cDNA_P Parameter: Timepoint (hr) Value: 6
  misc_feature: MA Experiment 108577 PARAMETER Experiment Name: At_42deg_Heat_cDNA_P Parameter: Tissue Value: Aerial
  misc_feature: MA Experiment ID: 108595 Result: Up-regulated in Transcription
  misc_feature: MA Experiment 108595 PARAMETER Experiment Name: At_Ler-pi_Ovule_cDNA_P Parameter: Plant Line Value: null
  misc_feature: MA Experiment ID: 108667 Result: Up-regulated in Transcription
  misc_feature: MA Experiment 108667 PARAMETER Experiment Name: At_2mM_SA_cDNA_P Parameter: Plant Line Value: WS
  misc_feature: MA Experiment 108667 PARAMETER Experiment Name: At_2mM_SA_cDNA_P Parameter: Timepoint (hr) Value: 1
  misc_feature: MA Experiment 108667 PARAMETER Experiment Name: At_2mM_SA_cDNA_P Parameter: Treatment Value: 2mM SA vs. No Treatment
  misc_feature: MA Experiment ID: 20000030 Result: Down-regulated in Transcription
  misc_feature: MA Experiment 20000030 PARAMETER Experiment Name: At_CS6630_Roots_cDNA_P Parameter: Plant Line Value: CS6630 vs. WS
  misc_feature: MA Experiment 20000030 PARAMETER Experiment Name: At_CS6630_Roots_cDNA_P Parameter: Tissue Value: Roots
  misc_feature: MA Experiment ID: 20000068 Result: Down-regulated in Transcription
  misc_feature: MA Experiment ID: 20000069 Result: Down-regulated in Transcription
  misc_feature: MA Experiment 20000069 PARAMETER Experiment Name: At_100uM_ABA_Mutants_cDNA_P Parameter: Plant Line Value: CS23
  misc_feature: MA Experiment 20000069 PARAMETER Experiment Name: At_100uM_ABA_Mutants_cDNA_P Parameter: Timepoint (hr) Value: 6
  misc_feature: MA Experiment 20000069 PARAMETER Experiment Name: At_100uM_ABA_Mutants_cDNA_P Parameter: Tissue Value: Aerial
  misc_feature: MA Experiment 20000069 PARAMETER Experiment Name: At_100uM_ABA_Mutants_cDNA_P Parameter: Treatment Value: 100uM ABA vs. No Treatment
  misc_feature: MA Experiment ID: 20000089 Result: Down-regulated in Transcription
  misc_feature: MA Experiment ID: 20000090 Result: Down-regulated in Transcription
  misc_feature: MA Experiment ID: 20000113 Result: Up-regulated in Transcription
  misc_feature: MA Experiment 20000113 PARAMETER Experiment Name: At_42deg_Heat_cDNA_P Parameter: Temperature (deg C) Value: 42 vs. 22
  misc_feature: MA Experiment 20000113 PARAMETER Experiment Name: At_42deg_Heat_cDNA_P Parameter: Timepoint (hr) Value: 8
  misc_feature: MA Experiment 20000113 PARAMETER Experiment Name: At_42deg_Heat_cDNA_P Parameter: Tissue Value: Aerial
  misc_feature: MA Experiment ID: 20000180 Result: Down-regulated in Transcription
  misc_feature: MA Experiment 20000180 PARAMETER Experiment Name: At_Germinating_Seeds_P Parameter: Age (hr) Value: 24 vs. 0
  misc_feature: MA Experiment 20000180 PARAMETER Experiment Name: At_Germinating_Seeds_P Parameter: Tissue Value: Germinating Seeds
  misc_feature: MA Experiment ID: 20000268 Result: Down-regulated in Transcription
  misc_feature: MA Experiment 20000268 PARAMETER Experiment Name: At_100mM_NaCl__P Parameter: Age (day) Value: 14
  misc_feature: MA Experiment 20000268 PARAMETER Experiment Name: At_100mM_NaCl__P Parameter: Organism Value: A. thaliana
  misc_feature: MA Experiment 20000268 PARAMETER Experiment Name: At_100mM_NaCl__P Parameter: Plant Line Value: WS
  misc_feature: MA Experiment 20000268 PARAMETER Experiment Name: At_100mM_NaCl__P Parameter: Timepoint (hr) Value: 6
  misc_feature: MA Experiment 20000268 PARAMETER Experiment Name: At_100mM_NaCl__P Parameter: Tissue Value: Whole Plant
  misc_feature: MA Experiment 20000268 PARAMETER Experiment Name: At_100mM_NaCl__P Parameter: Treatment Value: 100mM NaCl vs. No Treatment
  misc_feature: MA Experiment ID: 20000308 Result: Down-regulated in Transcription
  misc_feature: MA Experiment 20000308 PARAMETER Experiment Name: At_100mM_NaCl__P Parameter: Age (day) Value: 17
  misc_feature: MA Experiment 20000308 PARAMETER Experiment Name: At_100mM_NaCl__P Parameter: Organism Value: A. thaliana
  misc_feature: MA Experiment 20000308 PARAMETER Experiment Name: At_100mM_NaCl__P Parameter: Plant Line Value: WS
  misc_feature: MA Experiment 20000308 PARAMETER Experiment Name: At_100mM_NaCl__P Parameter: Timepoint (hr) Value: 72
  misc_feature: MA Experiment 20000308 PARAMETER Experiment Name: At_100mM_NaCl__P Parameter: Tissue Value: Whole Plant
  misc_feature: MA Experiment 20000308 PARAMETER Experiment Name: At_100mM_NaCl__P Parameter: Treatment Value: 100mM NaCl vs. No Treatment
  misc_feature: MA Experiment ID: 20000437 Result: Down-regulated in Transcription
  misc_feature: MA Experiment 20000437 PARAMETER Experiment Name: At_Drought_P Parameter: Age (day) Value: 8
  misc_feature: MA Experiment 20000437 PARAMETER Experiment Name: At_Drought_P Parameter: Organism Value: A. thaliana
  misc_feature: MA Experiment 20000437 PARAMETER Experiment Name: At_Drought_P Parameter: Plant Line Value: WS
  misc_feature: MA Experiment 20000437 PARAMETER Experiment Name: At_Drought_P Parameter: Timepoint (hr) Value: 24
  misc_feature: MA Experiment 20000437 PARAMETER Experiment Name: At_Drought_P Parameter: Tissue Value: Whole Plant
  misc_feature: MA Experiment 20000437 PARAMETER Experiment Name: At_Drought_P Parameter: Treatment Value: Drought vs. No Drought
  misc_feature: MA Experiment ID: 20000439 Result: Down-regulated in Transcription
  misc_feature: MA Experiment 20000439 PARAMETER Experiment Name: At_Roots__P Parameter: Age (day) Value: 14 vs. 21
  misc_feature: MA Experiment 20000439 PARAMETER Experiment Name: At_Roots__P Parameter: Organism Value: A. thaliana
  misc_feature: MA Experiment 20000439 PARAMETER Experiment Name: At_Roots__P Parameter: Tissue Value: Roots vs. Whole Plant
  misc_feature: MA Experiment ID: 20000441 Result: Up-regulated in Transcription
  misc_feature: MA Experiment 20000441 PARAMETER Experiment Name: At_1uM_BR-BRZ__P Parameter: Tissue Value: Shoot Apices
  misc_feature: MA Experiment 20000441 PARAMETER Experiment Name: At_1uM_BR-BRZ__P Parameter: Treatment Value: 1uM BR vs. No Treatment
  misc_feature: MA Experiment ID: 20000443 Result: Up-regulated in Transcription
  misc_feature: MA Experiment 20000443 PARAMETER Experiment Name: At_1uM_BR-BRZ__P Parameter: Tissue Value: Shoot Apices
  misc_feature: MA Experiment 20000443 PARAMETER Experiment Name: At_1uM_BR-BRZ__P Parameter: Treatment Value: 1uM BRZ vs. No Treatment
  misc_feature: MA Experiment ID: 20000452 Result: Down-regulated in Transcription
  misc_feature: MA Experiment 20000452 PARAMETER Experiment Name: At_CS6879_Shoots-Roots_P Parameter: Age (day) Value: 14
  misc_feature: MA Experiment 20000452 PARAMETER Experiment Name: At_CS6879_Shoots-Roots_P Parameter: Organism Value: A. thaliana
  misc_feature: MA Experiment 20000452 PARAMETER Experiment Name: At_CS6879_Shoots-Roots_P Parameter: Plant Line Value: CS6879 vs. WS
  misc_feature: MA Experiment 20000452 PARAMETER Experiment Name: At_CS6879_Shoots-Roots_P Parameter: Tissue Value: Shoots
  misc_feature: MA Experiment ID: 20000460 Result: Up-regulated in Transcription
  misc_feature: MA Experiment 20000460 PARAMETER Experiment Name: At_10percent_PEG_P Parameter: Age (day) Value: 12
  misc_feature: MA Experiment 20000460 PARAMETER Experiment Name: At_10percent_PEG_P Parameter: Organism Value: A. thaliana
  misc_feature: MA Experiment 20000460 PARAMETER Experiment Name: At_10percent_PEG_P Parameter: Plant Line Value: WS
  misc_feature: MA Experiment 20000460 PARAMETER Experiment Name: At_10percent_PEG_P Parameter: Timepoint (day) Value: 12
  misc_feature: MA Experiment 20000460 PARAMETER Experiment Name: At_10percent_PEG_P Parameter: Tissue Value: Whole Plant
  misc_feature: MA Experiment 20000460 PARAMETER Experiment Name: At_10percent_PEG_P Parameter: Treatment Value: 10percent PEG vs. No Treatment
  misc_feature: MA Experiment ID: 20000527 Result: Up-regulated in Transcription
  misc_feature: MA Experiment 20000527 PARAMETER Experiment Name: At_10percent_PEG_P Parameter: Age (day) Value: 20
  misc_feature: MA Experiment 20000527 PARAMETER Experiment Name: At_10percent_PEG_P Parameter: Organism Value: A. thaliana
  misc_feature: MA Experiment 20000527 PARAMETER Experiment Name: At_10percent_PEG_P Parameter: Plant Line Value: WS
  misc_feature: MA Experiment 20000527 PARAMETER Experiment Name: At_10percent_PEG_P Parameter: Timepoint (day) Value: 20
  misc_feature: MA Experiment 20000527 PARAMETER Experiment Name: At_10percent_PEG_P Parameter: Tissue Value: Whole Plant
  misc_feature: MA Experiment 20000527 PARAMETER Experiment Name: At_10percent_PEG_P Parameter: Treatment Value: 10percent PEG vs. No Treatment
  misc_feature: MA Experiment ID: 20000606 Result: Up-regulated in Transcription
  misc_feature: MA Experiment 20000606 PARAMETER Experiment Name: At_CS8548_Mutant_P Parameter: Age (day) Value: 14
  misc_feature: MA Experiment 20000606 PARAMETER Experiment Name: At_CS8548_Mutant_P Parameter: Plant Line Value: CS8548 vs. wt
  misc_feature: MA Experiment 20000606 PARAMETER Experiment Name: At_CS8548_Mutant_P Parameter: Tissue Value: Whole Plant
  misc_feature: MA Experiment ID: 20000794 Result: Down-regulated in Transcription
  misc_feature: MA Experiment 20000794 PARAMETER Experiment Name: At_Petals_P Parameter: Age (day) Value: 23-25 days
  misc_feature: MA Experiment 20000794 PARAMETER Experiment Name: At_Petals_P Parameter: Plant Line Value: WS
  misc_feature: MA Experiment 20000794 PARAMETER Experiment Name: At_Petals_P Parameter: Tissue Value: Petals vs. Whole plant
  misc_feature: MA Experiment ID: 20001247 Result: Up-regulated in Transcription
  misc_feature: MA Experiment 20001247 PARAMETER Experiment Name: At_Far-red-induction_P Parameter: Age (day) Value: 7
  misc_feature: MA Experiment 20001247 PARAMETER Experiment Name: At_Far-red-induction_P Parameter: Light Value: Far-red vs. White
  misc_feature: MA Experiment 20001247 PARAMETER Experiment Name: At_Far-red-induction_P Parameter: Organism Value: A. thaliana
  misc_feature: MA Experiment 20001247 PARAMETER Experiment Name: At_Far-red-induction_P Parameter: Plant Line Value: Columbia
  misc_feature: MA Experiment 20001247 PARAMETER Experiment Name: At_Far-red-induction_P Parameter: Timepoint (hr) Value: 1
  misc_feature: MA Experiment 20001247 PARAMETER Experiment Name: At_Far-red-induction_P Parameter: Tissue Value: Whole Plant
  misc_feature: MA Experiment ID: 20001450 Result: Up-regulated in Transcription
  misc_feature: MA Experiment 20001450 PARAMETER Experiment Name: At_Far-red-induction_P Parameter: Age (day) Value: 7
  misc_feature: MA Experiment 20001450 PARAMETER Experiment Name: At_Far-red-induction_P Parameter: Light Value: Far-red vs. White
  misc_feature: MA Experiment 20001450 PARAMETER Experiment Name: At_Far-red-induction_P Parameter: Organism Value: A. thaliana
  misc_feature: MA Experiment 20001450 PARAMETER Experiment Name: At_Far-red-induction_P Parameter: Plant Line Value: Columbia
  misc_feature: MA Experiment 20001450 PARAMETER Experiment Name: At_Far-red-induction_P Parameter: Timepoint (hr) Value: 8
  misc_feature: MA Experiment 20001450 PARAMETER Experiment Name: At_Far-red-induction_P Parameter: Tissue Value: Whole Plant
  misc_feature: MA Experiment ID: 20001555 Result: Down-regulated in Transcription
  misc_feature: MA Experiment 20001555 PARAMETER Experiment Name: At_Drought_Soil_Dry_P Parameter: Age (day) Value: 24
  misc_feature: MA Experiment 20001555 PARAMETER Experiment Name: At_Drought_Soil_Dry_P Parameter: Organism Value: A. thaliana
  misc_feature: MA Experiment 20001555 PARAMETER Experiment Name: At_Drought_Soil_Dry_P Parameter: Plant Line Value: WS
  misc_feature: MA Experiment 20001555 PARAMETER Experiment Name: At_Drought_Soil_Dry_P Parameter: Post Timepoint (hr) Value: None
  misc_feature: MA Experiment 20001555 PARAMETER Experiment Name: At_Drought_Soil_Dry_P Parameter: Post-Treatment Value: None
  misc_feature: MA Experiment 20001555 PARAMETER Experiment Name: At_Drought_Soil_Dry_P Parameter: Timepoint (day) Value: 10
  misc_feature: MA Experiment 20001555 PARAMETER Experiment Name: At_Drought_Soil_Dry_P Parameter: Treatment Value: Drought vs. No Drought
  misc_feature: MA Experiment ID: 20001556 Result: Down-regulated in Transcription
  misc_feature: MA Experiment 20001556 PARAMETER Experiment Name: At_Drought_Soil_Dry_P Parameter: Age (day) Value: 26
  misc_feature: MA Experiment 20001556 PARAMETER Experiment Name: At_Drought_Soil_Dry_P Parameter: Organism Value: A. thaliana
  misc_feature: MA Experiment 20001556 PARAMETER Experiment Name: At_Drought_Soil_Dry_P Parameter: Plant Line Value: WS
  misc_feature: MA Experiment 20001556 PARAMETER Experiment Name: At_Drought_Soil_Dry_P Parameter: Post Timepoint (hr) Value: None
  misc_feature: MA Experiment 20001556 PARAMETER Experiment Name: At_Drought_Soil_Dry_P Parameter: Post-Treatment Value: None
  misc_feature: MA Experiment 20001556 PARAMETER Experiment Name: At_Drought_Soil_Dry_P Parameter: Timepoint (day) Value: 12
  misc_feature: MA Experiment 20001556 PARAMETER Experiment Name: At_Drought_Soil_Dry_P Parameter: Treatment Value: Drought vs. No Drought
  misc_feature: MA Experiment ID: 20001557 Result: Up-regulated in Transcription
  misc_feature: MA Experiment 20001557 PARAMETER Experiment Name: At_Drought_Soil_Dry_P Parameter: Age (day) Value: 27
  misc_feature: MA Experiment 20001557 PARAMETER Experiment Name: At_Drought_Soil_Dry_P Parameter: Organism Value: A. thaliana
  misc_feature: MA Experiment 20001557 PARAMETER Experiment Name: At_Drought_Soil_Dry_P Parameter: Plant Line Value: WS
  misc_feature: MA Experiment 20001557 PARAMETER Experiment Name: At_Drought_Soil_Dry_P Parameter: Post Timepoint (hr) Value: 3
  misc_feature: MA Experiment 20001557 PARAMETER Experiment Name: At_Drought_Soil_Dry_P Parameter: Post-Treatment Value: Re-Water vs. No Drought
  misc_feature: MA Experiment 20001557 PARAMETER Experiment Name: At_Drought_Soil_Dry_P Parameter: Timepoint (day) Value: 13
  misc_feature: MA Experiment 20001557 PARAMETER Experiment Name: At_Drought_Soil_Dry_P Parameter: Treatment Value: Drought vs. No Drought
  misc_feature: MA Experiment ID: 20001558 Result: Up-regulated in Transcription
  misc_feature: MA Experiment 20001558 PARAMETER Experiment Name: At_Drought_Soil_Dry_P Parameter: Age (day) Value: 27
  misc_feature: MA Experiment 20001558 PARAMETER Experiment Name: At_Drought_Soil_Dry_P Parameter: Organism Value: A. thaliana
  misc_feature: MA Experiment 20001558 PARAMETER Experiment Name: At_Drought_Soil_Dry_P Parameter: Plant Line Value: WS
  misc_feature: MA Experiment 20001558 PARAMETER Experiment Name: At_Drought_Soil_Dry_P Parameter: Post Timepoint (hr) Value: 6
  misc_feature: MA Experiment 20001558 PARAMETER Experiment Name: At_Drought_Soil_Dry_P Parameter: Post-Treatment Value: Re-Water vs. No Drought
  misc_feature: MA Experiment 20001558 PARAMETER Experiment Name: At_Drought_Soil_Dry_P Parameter: Timepoint (day) Value: 13
  misc_feature: MA Experiment 20001558 PARAMETER Experiment Name: At_Drought_Soil_Dry_P Parameter: Treatment Value: Drought vs. No Drought
  misc_feature: MA Experiment ID: 20001560 Result: Up-regulated in Transcription
  misc_feature: MA Experiment 20001560 PARAMETER Experiment Name: At_Drought_Soil_Dry_P Parameter: Age (day) Value: 28
  misc_feature: MA Experiment 20001560 PARAMETER Experiment Name: At_Drought_Soil_Dry_P Parameter: Organism Value: A. thaliana
  misc_feature: MA Experiment 20001560 PARAMETER Experiment Name: At_Drought_Soil_Dry_P Parameter: Plant Line Value: WS
  misc_feature: MA Experiment 20001560 PARAMETER Experiment Name: At_Drought_Soil_Dry_P Parameter: Post Timepoint (hr) Value: None
  misc_feature: MA Experiment 20001560 PARAMETER Experiment Name: At_Drought_Soil_Dry_P Parameter: Post-Treatment Value: None
  misc_feature: MA Experiment 20001560 PARAMETER Experiment Name: At_Drought_Soil_Dry_P Parameter: Timepoint (day) Value: 14
  misc_feature: MA Experiment 20001560 PARAMETER Experiment Name: At_Drought_Soil_Dry_P Parameter: Treatment Value: Drought vs. No Drought
  misc_feature: MA Experiment ID: 20001904 Result: Down-regulated in Transcription
  misc_feature: MA Experiment 20001904 PARAMETER Experiment Name: At_Drought_Reproduction_P Parameter: Age (day) Value: 37
  misc_feature: MA Experiment 20001904 PARAMETER Experiment Name: At_Drought_Reproduction_P Parameter: Organism Value: A. thaliana
  misc_feature: MA Experiment 20001904 PARAMETER Experiment Name: At_Drought_Reproduction_P Parameter: Plant Line Value: WS
  misc_feature: MA Experiment 20001904 PARAMETER Experiment Name: At_Drought_Reproduction_P Parameter: Timepoint (day) Value: 7
  misc_feature: MA Experiment 20001904 PARAMETER Experiment Name: At_Drought_Reproduction_P Parameter: Tissue Value: Rosettes
  misc_feature: MA Experiment 20001904 PARAMETER Experiment Name: At_Drought_Reproduction_P Parameter: Treatment Value: Drought vs. No Drought
  misc_feature: MA Experiment ID: 20001906 Result: Down-regulated in Transcription
  misc_feature: MA Experiment 20001906 PARAMETER Experiment Name: At_Drought_Reproduction_P Parameter: Age (day) Value: 35
  misc_feature: MA Experiment 20001906 PARAMETER Experiment Name: At_Drought_Reproduction_P Parameter: Organism Value: A. thaliana
  misc_feature: MA Experiment 20001906 PARAMETER Experiment Name: At_Drought_Reproduction_P Parameter: Plant Line Value: WS
  misc_feature: MA Experiment 20001906 PARAMETER Experiment Name: At_Drought_Reproduction_P Parameter: Timepoint (day) Value: 5
  misc_feature: MA Experiment 20001906 PARAMETER Experiment Name: At_Drought_Reproduction_P Parameter: Tissue Value: Siliques
  misc_feature: MA Experiment 20001906 PARAMETER Experiment Name: At_Drought_Reproduction_P Parameter: Treatment Value: Drought vs. No Drought
  misc_feature: MA Experiment ID: 20001907 Result: Down-regulated in Transcription
  misc_feature: MA Experiment 20001907 PARAMETER Experiment Name: At_Drought_Reproduction_P Parameter: Age (day) Value: 37
  misc_feature: MA Experiment 20001907 PARAMETER Experiment Name: At_Drought_Reproduction_P Parameter: Organism Value: A. thaliana
  misc_feature: MA Experiment 20001907 PARAMETER Experiment Name: At_Drought_Reproduction_P Parameter: Plant Line Value: WS
  misc_feature: MA Experiment 20001907 PARAMETER Experiment Name: At_Drought_Reproduction_P Parameter: Timepoint (day) Value: 7
  misc_feature: MA Experiment 20001907 PARAMETER Experiment Name: At_Drought_Reproduction_P Parameter: Tissue Value: Siliques
  misc_feature: MA Experiment 20001907 PARAMETER Experiment Name: At_Drought_Reproduction_P Parameter: Treatment Value: Drought vs. No Drought
  misc_feature: MA Experiment ID: 20001910 Result: Down-regulated in Transcription
  misc_feature: MA Experiment 20001910 PARAMETER Experiment Name: At_Drought_Reproduction_P Parameter: Age (day) Value: 37
  misc_feature: MA Experiment 20001910 PARAMETER Experiment Name: At_Drought_Reproduction_P Parameter: Organism Value: A. thaliana
  misc_feature: MA Experiment 20001910 PARAMETER Experiment Name: At_Drought_Reproduction_P Parameter: Plant Line Value: WS
  misc_feature: MA Experiment 20001910 PARAMETER Experiment Name: At_Drought_Reproduction_P Parameter: Timepoint (day) Value: 7
  misc_feature: MA Experiment 20001910 PARAMETER Experiment Name: At_Drought_Reproduction_P Parameter: Tissue Value: Flowers
  misc_feature: MA Experiment 20001910 PARAMETER Experiment Name: At_Drought_Reproduction_P Parameter: Treatment Value: Drought vs. No Drought
  misc_feature: MA Experiment ID: 20001911 Result: Down-regulated in Transcription
  misc_feature: MA Experiment 20001911 PARAMETER Experiment Name: At_Drought_Reproduction_P Parameter: Age (day) Value: 40
  misc_feature: MA Experiment 20001911 PARAMETER Experiment Name: At_Drought_Reproduction_P Parameter: Organism Value: A. thaliana
  misc_feature: MA Experiment 20001911 PARAMETER Experiment Name: At_Drought_Reproduction_P Parameter: Plant Line Value: WS
  misc_feature: MA Experiment 20001911 PARAMETER Experiment Name: At_Drought_Reproduction_P Parameter: Timepoint (day) Value: 10
  misc_feature: MA Experiment 20001911 PARAMETER Experiment Name: At_Drought_Reproduction_P Parameter: Tissue Value: Flowers
  misc_feature: MA Experiment 20001911 PARAMETER Experiment Name: At_Drought_Reproduction_P Parameter: Treatment Value: Drought vs. No Drought
atctcacaaaccaatctaaacatcaaagacaaaaaccaaacctctttcactattacacttttcctcaaaaaaaagaaaaatgtatttgttagtgtttaaactctttctatttttgtctcttcttcaaatctctgtctctgctagaaacctagcttcacaagaaccaaaccagtttcaactactcaagtaccacaaaggagctcttctctccggcaaaatctccgttaacctaatctggtacggcaaattcaaaccatctcaaagagcaatcatctccgacttcattacctcactcacacacacttctcctacgtccaaaactctccaccaaccatctgttgccacgtggtggaaaaccacagaaaaatactacaaactcgcaacacccagcaaaaactcatcacctctgtctctaactctcgggaaacaaatcatcgacgagtcttgctctctaggaaaatctttaaccgataaaaagattcaaaccctagcttcgaaaggagaccaacgcaacgccatcaacgtcgttttgacttcagctgacgttacggttacaggatttggtatgagtcgttgcgggactcacggacacgctcgtggtttaggtaaacgtggctccaagtttgcttacatttgggttggaaactctgagacacaatgtcctggtcaatgcgcgtggcctttccacgcgccggtgtacggtccacagagtccaccactagtggcaccaaacaatgacgtgggactcgatgggatggttattaacttagctagtcttttagctggaaccgcaacgaacccttttggtaatggttactatcaaggtccacaaaacgcaccgcttgaagctgcttctgcttgtcctggcgtttatggtaaaggagcttatcctggttacgctggagatttgcttgtggatactacaacgggaggtagttttaatgcgtatggtgcaaacggcaggaagtttttgcttcctgctttgtatgatcctacgacgtcggcttgctctactatggtctgaatactaaaaaaaagtccaatgtttggtctttggtagtagaaaataatattctagcgtaattcttttgttatgtttggttacaaattctagtataattcaatttattcattaatattattctcatttttcccttcatgttgtatgactgaaatcttgtcgcttggactataatttaacggaatattatt

SEQ ID NO: 105725 - protein, 314 aa, Arabidopsis thaliana; identical to SEQ ID NO: 26705
  peptide (1)..(314): Ceres Seq. ID no. 13617851
  misc_feature (35)..(314): Pfam Name: Phosphate-induced protein 1 conserved region Pfam Description: Phosphate-induced protein 1 conserved region
  misc_feature (1)..(314): Homolog of NCBI NO: 15236667 NR Description: phi-1 phosphate-induced protein -related
  misc_feature (1)..(314): Homolog of NCBI NO: 21593043 NR Description: putative phi-1-like phosphate-induced protein
  misc_feature (5)..(314): Homolog of NCBI NO: 3759184 NR Description: phi-1 [Nicotiana tabacum]
  misc_feature (1)..(313): Homolog of NCBI NO: 15219504 NR Description: phosphate-induced (phi-1) protein -related
  misc_feature (6)..(314): Homolog of NCBI NO: 15237656 NR Description: phi-1-related protein [Arabidopsis thaliana]
  misc_feature (1)..(245): Homolog of NCBI NO: 11762144 NR Description: At1g35140 [Arabidopsis thaliana]
  misc_feature (85)..(314): Homolog of NCBI NO: 31074969 NR Description: erg-1 [Solanum tuberosum]
  misc_feature (43)..(314): Homolog of NCBI NO: 15242420 NR Description: expressed protein [Arabidopsis thaliana] putative protein [Arabidopsis thaliana]
  misc_feature (137)..(313): Homolog of NCBI NO: 13194680 NR Description: phosphate-induced protein 1-like protein
  misc_feature (35)..(313): Homolog of NCBI NO: 37533672 NR Description: putative phosphate-induced protein [Oryza sativa

SEQ ID NO: 105726 - DNA, 1331 bp, Arabidopsis thaliana
  misc_feature (1)..(1331): Ceres Seq. ID no. 13617860
  misc_feature: MA Experiment ID: 108434 Result: Up-regulated in Transcription
  misc_feature: MA Experiment 108434 PARAMETER Experiment Name: At_Root_Tips_cDNA_P Parameter: Tissue Value: Root Tips
  misc_feature: MA Experiment ID: 108462 Result: Down-regulated in Transcription
  misc_feature: MA Experiment 108462 PARAMETER Experiment Name: At_Germinating_Seeds_cDNA_P Parameter: Age (day) Value: 2 vs. 0
  misc_feature: MA Experiment 108462 PARAMETER Experiment Name: At_Germinating_Seeds_cDNA_P Parameter: Tissue Value: Germinating Seeds
  misc_feature: MA Experiment ID: 108463 Result: Down-regulated in Transcription
  misc_feature: MA Experiment 108463 PARAMETER Experiment Name: At_Germinating_Seeds_cDNA_P Parameter: Age (day) Value: 3 vs. 0
  misc_feature: MA Experiment 108463 PARAMETER Experiment Name: At_Germinating_Seeds_cDNA_P Parameter: Tissue Value: Germinating Seeds
  misc_feature: MA Experiment ID: 108464 Result: Down-regulated in Transcription
  misc_feature: MA Experiment 108464 PARAMETER Experiment Name: At_Germinating_Seeds_cDNA_P Parameter: Age (day) Value: 4 vs. 0
  misc_feature: MA Experiment 108464 PARAMETER Experiment Name: At_Germinating_Seeds_cDNA_P Parameter: Tissue Value: Germinating Seeds
  misc_feature: MA Experiment ID: 108561 Result: Down-regulated in Transcription
  misc_feature: MA Experiment 108561 PARAMETER Experiment Name: At_100uM_ABA_cDNA_P Parameter: Timepoint (hr) Value: 6
  misc_feature: MA Experiment 108561 PARAMETER Experiment Name: At_100uM_ABA_cDNA_P Parameter: Tissue Value: Aerial
  misc_feature: MA Experiment 108561 PARAMETER Experiment Name: At_100uM_ABA_cDNA_P Parameter: Treatment Value: 100uM ABA vs. No Treatment
  misc_feature: MA Experiment ID: 108577 Result: Down-regulated in Transcription
  misc_feature: MA Experiment 108577 PARAMETER Experiment Name: At_42deg_Heat_cDNA_P Parameter: Temperature (deg C) Value: 42 vs. 22
  misc_feature: MA Experiment 108577 PARAMETER Experiment Name: At_42deg_Heat_cDNA_P Parameter: Timepoint (hr) Value: 6
  misc_feature: MA Experiment 108577 PARAMETER Experiment Name: At_42deg_Heat_cDNA_P Parameter: Tissue Value: Aerial
  misc_feature: MA Experiment ID: 108585 Result: Down-regulated in Transcription
  misc_feature: MA Experiment 108585 PARAMETER Experiment Name: At_5mM_NaNP_cDNA_P Parameter: Timepoint (hr) Value: 6
  misc_feature: MA Experiment 108585 PARAMETER Experiment Name: At_5mM_NaNP_cDNA_P Parameter: Tissue Value: Aerial
  misc_feature: MA Experiment 108585 PARAMETER Experiment Name: At_5mM_NaNP_cDNA_P Parameter: Treatment Value: null
  misc_feature: MA Experiment ID: 108595 Result: Down-regulated in Transcription
  misc_feature: MA Experiment 108595 PARAMETER Experiment Name: At_Ler-pi_Ovule_cDNA_P Parameter: Plant Line Value: null
  misc_feature: MA Experiment ID: 108668 Result: Down-regulated in Transcription
  misc_feature: MA Experiment 108668 PARAMETER Experiment Name: At_2mM_SA_cDNA_P Parameter: Plant Line Value: WS
  misc_feature: MA Experiment 108668 PARAMETER Experiment Name: At_2mM_SA_cDNA_P Parameter: Timepoint (hr) Value: 6
  misc_feature: MA Experiment 108668 PARAMETER Experiment Name: At_2mM_SA_cDNA_P Parameter: Treatment Value: 2mM SA vs. No Treatment
  misc_feature: MA Experiment ID: 20000070 Result: Down-regulated in Transcription
  misc_feature: MA Experiment 20000070 PARAMETER Experiment Name: At_100uM_ABA_Mutants_cDNA_P Parameter: Plant Line Value: CS24
  misc_feature: MA Experiment 20000070 PARAMETER Experiment Name: At_100uM_ABA_Mutants_cDNA_P Parameter: Timepoint (hr) Value: 6
  misc_feature: MA Experiment 20000070 PARAMETER Experiment Name: At_100uM_ABA_Mutants_cDNA_P Parameter: Tissue Value: Aerial
  misc_feature: MA Experiment 20000070 PARAMETER Experiment Name: At_100uM_ABA_Mutants_cDNA_P Parameter: Treatment Value: 100uM ABA vs. No Treatment
  misc_feature: MA Experiment ID: 20000071 Result: Down-regulated in Transcription
  misc_feature: MA Experiment 20000071 PARAMETER Experiment Name: At_100uM_ABA_Mutants_cDNA_P Parameter: Plant Line Value: CS8104
  misc_feature: MA Experiment 20000071 PARAMETER Experiment Name: At_100uM_ABA_Mutants_cDNA_P Parameter: Timepoint (hr) Value: 6
  misc_feature: MA Experiment 20000071 PARAMETER Experiment Name: At_100uM_ABA_Mutants_cDNA_P Parameter: Tissue Value: Aerial
  misc_feature: MA Experiment 20000071 PARAMETER Experiment Name: At_100uM_ABA_Mutants_cDNA_P Parameter: Treatment Value: 100uM ABA vs. No Treatment
  misc_feature: MA Experiment ID: 20000072 Result: Down-regulated in Transcription
  misc_feature: MA Experiment 20000072 PARAMETER Experiment Name: At_100uM_ABA_Mutants_cDNA_P Parameter: Plant Line Value: CS8105
  misc_feature: MA Experiment 20000072 PARAMETER Experiment Name: At_100uM_ABA_Mutants_cDNA_P Parameter: Timepoint (hr) Value: 6
  misc_feature: MA Experiment 20000072 PARAMETER Experiment Name: At_100uM_ABA_Mutants_cDNA_P Parameter: Tissue Value: Aerial
  misc_feature: MA Experiment 20000072 PARAMETER Experiment Name: At_100uM_ABA_Mutants_cDNA_P Parameter: Treatment Value: 100uM ABA vs. No Treatment
  misc_feature: MA Experiment ID: 20000087 Result: Down-regulated in Transcription
  misc_feature: MA Experiment 20000087 PARAMETER Experiment Name: At_100uM_ABA_Mutants_cDNA_P Parameter: Plant Line Value: WS
  misc_feature: MA Experiment 20000087 PARAMETER Experiment Name: At_100uM_ABA_Mutants_cDNA_P Parameter: Timepoint (hr) Value: 6
  misc_feature: MA Experiment 20000087 PARAMETER Experiment Name: At_100uM_ABA_Mutants_cDNA_P Parameter: Tissue Value: Aerial
  misc_feature: MA Experiment 20000087 PARAMETER Experiment Name: At_100uM_ABA_Mutants_cDNA_P Parameter: Treatment Value: 100uM ABA vs. No Treatment
  misc_feature: MA Experiment ID: 20000314 Result: Down-regulated in Transcription
  misc_feature: MA Experiment 20000314 PARAMETER Experiment Name: At_14day_Shoots-Roots_Sub_P Parameter: Age (day) Value: 14
  misc_feature: MA Experiment 20000314 PARAMETER Experiment Name: At_14day_Shoots-Roots_Sub_P Parameter: Organism Value: A. thaliana
  misc_feature: MA Experiment 20000314 PARAMETER Experiment Name: At_14day_Shoots-Roots_Sub_P Parameter: Plant Line Value: WS
  misc_feature: MA Experiment 20000314 PARAMETER Experiment Name: At_14day_Shoots-Roots_Sub_P Parameter: Tissue Value: Roots vs. Whole Plant
  misc_feature: MA Experiment ID: 20001807 Result: Up-regulated in Transcription
  misc_feature: MA Experiment 20001807 PARAMETER Experiment Name: At_50mM_NH4NO3_L-to-H_Sub_P Parameter: Timepoint (hr) Value: 6
  misc_feature: MA Experiment 20001807 PARAMETER Experiment Name: At_50mM_NH4NO3_L-to-H_Sub_P Parameter: Tissue Value: Leaf
  misc_feature: MA Experiment 20001807 PARAMETER Experiment Name: At_50mM_NH4NO3_L-to-H_Sub_P Parameter: Treatment Value: 50mM NH4NO3 vs 100mM Mannitol
atccaaaactctctcagtcatggctcttcttcgtcttcctggcatttccctccaaattctaggtcacaaatcaaaccagaagaaccctaatcccaatgttgccttcaccaatcactctctctctttatctactccttcactatgtcgtctccatcgtcacgcgacgtttccagactcaattccagcaaaatccagaaacctcacttcgtacttctccaccacaacacaagagccagtcctcgaatcttcttcttcttcttcttcagctcctgaggtagtagaagaagagatttctaaaaccagattgattgctcagaatgttccatggacatctacacctgaagatattagatcgttgttcgagaagtacgggagtgttatcgacattgagatgtctatgcataagaaggaaagaaatagaggtttggtgttcattgaaatggcttctcctgaagaagctgcaacagctcttaaatctcttgaatcgtgtgaatatgagggtcgtcgtttgaaggtagactatgcaaagaccaaaaagaagaagacatatgcgccgcgtgagacgccttcaccagtgcctacattcaatttgtttgttgcaaacttggcatttgaagcaagggccaagcatcttaaggagttctttgatgcagacactggtaatgttgtctccactgaagttatattccatgaaaatccaaggaggtcgagtggttacgggtttgtctctttcaaaaccaagaaacaggccgaggcagcgcttattgagttccaaggaaaggattttttgggaaggccaatccgattagctaaaagcaaacagtttgtgaagttgcaagcaaaagaagggttgcagccaccagaggaggaagcagaggaggaaccatctcagtctgagacaatgacccaagagcacgaaactccggctgcataaaacttagaagtcttcgttgcaggatcattgttggagatattggaattgacgaagaagcttcgagcttttaggtctttattcttcttagtttttgaccaacaagaggagtgggtacatacaagtagtacctaccttgagtaaatggtggagaggtaagaagtacaagaccgattttgttagaactgaaaactagtaagagacaggtattaccaaacgtcagtatcagaccagatcaaatctcaagaaacaaactcatgtggctcctacgaaacttgctttgttcagttaaacacaatgcttctttgtttgtcatctactttcgattacttgtttgcgtttgttatatgcttagtgtgtaacttcatatatgaacccgtactcttaagaaagttatgtt

SEQ ID NO: 105727 - protein, 310 aa, Arabidopsis thaliana
  peptide (1)..(310): Ceres Seq. ID no. 13617861
  misc_feature (197)..(269): Pfam Name: RNA recognition motif. (a.k.a. RRM, RBD, or RNP domain) Pfam Description: RNA recognition motif. (a.k.a. RRM, RBD, or RNP
  misc_feature (7)..(310): Homolog of NCBI NO: 22328520 NR Description: RNA recognition motif (RRM)-containing protein
  misc_feature (141)..(310): Homolog of NCBI NO: 25407472 NR Description: hypothetical protein AT4g09040 [imported] - thaliana >gi|7267547|emb|CAB78028.1| putative protein
  misc_feature (7)..(163): Homolog of NCBI NO: 25407474 NR Description: hypothetical protein AT4g09050 [imported] - thaliana >gi|7267548|emb|CAB78029.1| putative protein
  misc_feature (16)..(306): Homolog of NCBI NO: 15226983 NR Description: 33 kDa ribonucleoprotein, chloroplast protein cp33), putative [Arabidopsis thaliana]
  misc_feature (79)..(269): Homolog of NCBI NO: 38346724 NR Description: OSJNBa0086O06.22 [Oryza sativa (japonica
  misc_feature (101)..(300): Homolog of NCBI NO: 34394882 NR Description: putative RNA-binding protein [Oryza sativa
  misc_feature (50)..(300): Homolog of NCBI NO: 681912 NR Description: cp33 [Arabidopsis thaliana]
  misc_feature (81)..(274): Homolog of NCBI NO: 7446361 NR Description: RNA-binding protein - fava bean (fragment)
  misc_feature (50)..(300): Homolog of NCBI NO: 17064758 NR Description: ubiquitin / ribosomal protein CEP52 [Arabidopsis
  misc_feature (96)..(282): Homolog of NCBI NO: 8163877 NR Description: enhancer binding protein-1; EBP1 [Entamoeba
SKTLSVMALLRLPGISLQILGHKSNQKNPNPNVAFTNHSLSLSTPSLCRLHRHATFPDSIPAKSRNLTSYFSTTTQEPVLESSSSSSSAPEVVEEEISKTRLIAQNVPWTSTPEDIRSLFEKYGSVIDIEMSMHKKERNRGLVFIEMASPEEAATALKSLESCEYEGRRLKVDYAKTKKKKTYAPRETPSPVPTFNLFVANLAFEARAKHLKEFFDADTGNVVSTEVIFHENPRRSSGYGFVSFKTKKQAEAALIEFQGKDFLGRPIRLAKSKQFVKLQAKEGLQPPEEEAEEEPSQSETMTQEHETPAA

SEQ ID NO: 105728 - protein, 304 aa, Arabidopsis thaliana
  peptide (1)..(304): Ceres Seq. ID no. 13617862
  misc_feature (191)..(263): Pfam Name: RNA recognition motif. (a.k.a. RRM, RBD, or RNP domain) Pfam Description: RNA recognition motif. (a.k.a. RRM, RBD, or RNP
  misc_feature (1)..(304): Homolog of NCBI NO: 22328520 NR Description: RNA recognition motif (RRM)-containing protein
  misc_feature (135)..(304): Homolog of NCBI NO: 25407472 NR Description: hypothetical protein AT4g09040 [imported] - thaliana >gi|7267547|emb|CAB78028.1| putative protein
  misc_feature (1)..(157): Homolog of NCBI NO: 25407474 NR Description: hypothetical protein AT4g09050 [imported] - thaliana >gi|7267548|emb|CAB78029.1| putative protein
  misc_feature (10)..(300): Homolog of NCBI NO: 15226983 NR Description: 33 kDa ribonucleoprotein, chloroplast protein cp33), putative [Arabidopsis thaliana]
  misc_feature (73)..(263): Homolog of NCBI NO: 38346724 NR Description: OSJNBa0086O06.22 [Oryza sativa (japonica
  misc_feature (95)..(294): Homolog of NCBI NO: 34394882 NR Description: putative RNA-binding protein [Oryza sativa
  misc_feature (44)..(294): Homolog of NCBI NO: 681912 NR Description: cp33 [Arabidopsis thaliana]
  misc_feature (75)..(268): Homolog of NCBI NO: 7446361 NR Description: RNA-binding protein - fava bean (fragment)
  misc_feature (44)..(294): Homolog of NCBI NO: 17064758 NR Description: ubiquitin / ribosomal protein CEP52 [Arabidopsis
  misc_feature (90)..(276): Homolog of NCBI NO: 8163877 NR Description: enhancer binding protein-1; EBP1 [Entamoeba
MALLRLPGISLQILGHKSNQKNPNPNVAFTNHSLSLSTPSLCRLHRHATFPDSIPAKSRNLTSYFSTTTQEPVLESSSSSSSAPEVVEEEISKTRLIAQNVPWTSTPEDIRSLFEKYGSVIDIEMSMHKKERNRGLVFIEMASPEEAATALKSLESCEYEGRRLKVDYAKTKKKKTYAPRETPSPVPTFNLFVANLAFEARAKHLKEFFDADTGNVVSTEVIFHENPRRSSGYGFVSFKTKKQAEAALIEFQGKDFLGRPIRLAKSKQFVKLQAKEGLQPPEEEAEEEPSQSETMTQEHETPAA

SEQ ID NO: 105729 - protein, 180 aa, Arabidopsis thaliana; identical to SEQ ID NO: 41784
  peptide (1)..(180): Ceres Seq. ID no. 13617863
  misc_feature (67)..(139): Pfam Name: RNA recognition motif. (a.k.a. RRM, RBD, or RNP domain) Pfam Description: RNA recognition motif. (a.k.a. RRM, RBD, or RNP
  misc_feature (1)..(180): Homolog of NCBI NO: 22328520 NR Description: RNA recognition motif (RRM)-containing protein
  misc_feature (11)..(180): Homolog of NCBI NO: 25407472 NR Description: hypothetical protein AT4g09040 [imported] - thaliana >gi|7267547|emb|CAB78028.1| putative protein
  misc_feature (1)..(33): Homolog of NCBI NO: 25407474 NR Description: hypothetical protein AT4g09050 [imported] - thaliana >gi|7267548|emb|CAB78029.1| putative protein
  misc_feature (1)..(176): Homolog of NCBI NO: 15226983 NR Description: 33 kDa ribonucleoprotein, chloroplast protein cp33), putative [Arabidopsis thaliana]
  misc_feature (1)..(139): Homolog of NCBI NO: 38346724 NR Description: OSJNBa0086O06.22 [Oryza sativa (japonica
  misc_feature (1)..(170): Homolog of NCBI NO: 34394882 NR Description: putative RNA-binding protein [Oryza sativa
  misc_feature (1)..(170): Homolog of NCBI NO: 681912 NR Description: cp33 [Arabidopsis thaliana]
  misc_feature (1)..(144): Homolog of NCBI NO: 7446361 NR Description: RNA-binding protein - fava bean (fragment)
  misc_feature (1)..(170): Homolog of NCBI NO: 17064758 NR Description: ubiquitin / ribosomal protein CEP52 [Arabidopsis
  misc_feature (1)..(152): Homolog of NCBI NO: 8163877 NR Description: enhancer binding protein-1; EBP1 [Entamoeba

SEQ ID NO: 105730 - DNA, 2006 bp, Arabidopsis thaliana
  misc_feature (1)..(2006): Ceres Seq. ID no. 13617874
  misc_feature: MA Experiment ID: 20000179 Result: Up-regulated in Transcription
  misc_feature: MA Experiment 20000179 PARAMETER Experiment Name: At_Germinating_Seeds_P Parameter: Age (hr) Value: 6 vs. 0
  misc_feature: MA Experiment 20000179 PARAMETER Experiment Name: At_Germinating_Seeds_P Parameter: Tissue Value: Germinating Seeds
  misc_feature: MA Experiment ID: 20000794 Result: Up-regulated in Transcription
  misc_feature: MA Experiment 20000794 PARAMETER Experiment Name: At_Petals_P Parameter: Age (day) Value: 23-25 days
  misc_feature: MA Experiment 20000794 PARAMETER Experiment Name: At_Petals_P Parameter: Plant Line Value: WS
  misc_feature: MA Experiment 20000794 PARAMETER Experiment Name: At_Petals_P Parameter: Tissue Value: Petals vs. Whole plant
aagtcgccgggaaaagtaaaataaaaagccgtcacgtctccgataaataatagagtatcgttagataggtagcttcaacgtaaggaatctaaattggttcagctcaaaaaacgaaaacgatgggttccatcgaagaagaagcaagacctctcatcgaagaaggtttaattttacaggaagtgaaattgtatgctgaagatggttcagtggactttaatggaaacccaccattgaaggagaaaacaggaaactggaaagcttgtccttttattcttggtaatgaatgttgtgagaggctagcttactatggtattgctgggaatttaatcacttacctcaccactaagcttcaccaaggaaatgtttctgctgctacaaacgttaccacatggcaagggacttgttatctcactcctctcattggagctgttctggctgatgcttactggggacgttactggaccatcgcttgtttctccgggatttatttcatcgggatgtctgcgttaactctttcagcttcagttccggcattgaagccagcggaatgtattggtgacttttgtccatctgcaacgccagctcagtatgcgatgttctttggtgggctttacctgatcgctcttggaactggaggtatcaaaccgtgtgtctcatccttcggtgccgatcagtttgatgacacggactctcgggaacgagttagaaaagcttcgttctttaactggttttacttctccatcaatattggagcacttgtgtcatctagtcttctagtttggattcaagagaatcgcgggtggggtttagggtttgggataccaacagtgttcatgggactagccattgcaagtttcttctttggcacacctctttataggtttcagaaacctggaggaagccctataactcggatttcccaagtcgtggttgcttcgttccggaaatcgtctgtcaaagtccctgaagacgccacacttctgtatgaaactcaagacaagaactctgctattgctggaagtagaaaaatcgagcataccgatgattgccagtatcttgacaaagccgctgttatctcagaagaagaatcgaaatccggagattattccaactcgtggagactatgcacggttacgcaagtcgaagaactcaagattctgatccgaatgttcccaatctgggcttctggtatcattttctcagctgtatacgcacaaatgtccacaatgtttgttcaacaaggccgagccatgaactgcaaaattggatcattccagcttcctcctgcagcactcgggacattcgacacagcaagcgtcatcatctgggtgccgctctacgaccggttcatcgttcccttagcaagaaagttcacaggagtagacaaaggattcactgagatacaaagaatgggaattggtctgtttgtctctgttctctgtatggcagctgcagctatcgtcgaaatcatccgtctccatatggccaacgatcttggattagtcgagtcaggagccccagttcccatatccgtcttgtggcagattccacagtacttcattctcggtgcagccgaagtattctacttcatcggtcagctcgagttcttctacgaccaatctccagatgcaatgagaagcttgtgcagtgccttggctcttttgaccaatgcacttggtaactacttgagctcgttgatcctcacgctcgtgacttattttacaacaagaaatgggcaagaaggttggatttcggataatctcaattcaggtcatctcgattacttcttctggctcttggctggtcttagccttgtgaacatggcggtttacttcttctctgctgctaggtataagcaaaagaaagcttcgtcgtagtaatgctgttatctatctactttcattacatacaaaagtttgtttctttcaactgtaactgtctctgtatcaataacaacattgctgtgtacttttcctttcaatttcaaaagtttaagtcgcatttgc

SEQ ID NO: 105731 - protein, 585 aa, Arabidopsis thaliana; identical to SEQ ID NO: 23352
  peptide (1)..(585): Ceres Seq. ID no. 13617875
  misc_feature (113)..(517): Pfam Name: POT family Pfam Description: POT family
  misc_feature (1)..(585): Homolog of NCBI NO: 1076331 NR Description: histidine transport protein - Arabidopsis thaliana
  misc_feature (15)..(584): Homolog of NCBI NO: 4102839 NR Description: LeOPT1 [Lycopersicon esculentum]
  misc_feature (1)..(584): Homolog of NCBI NO: 31088360 NR Description: peptide transporter 1 [Vicia faba]
  misc_feature (1)..(584): Homolog of NCBI NO: 15076661 NR Description: peptide transporter [Oryza sativa (japonica >gi|15076663|dbj|BAB62327.1| peptide transporter [Oryza sativa
  misc_feature (1)..(556): Homolog of NCBI NO: 6635838 NR Description: amino acid/peptide transporter [Prunus dulcis]
  misc_feature (5)..(583): Homolog of NCBI NO: 30696666 NR Description: oligopeptide transporter -related [Arabidopsis >gi|16604436|gb|AAL24224.1| At1g62200/F19K23_13 [Arabidopsis
  misc_feature (26)..(583): Homolog of NCBI NO: 25404366 NR Description: hypothetical protein F19K23.13 [imported] - thaliana >gi|2160144|gb|AAB60766.1| Strong similarity to
  misc_feature (1)..(286): Homolog of NCBI NO: 15226856 NR Description: peptide/amino acid transporter -related thaliana] >gi|25410951|pir||A84432 probable peptide/amino acid
  misc_feature (319)..(582): Homolog of NCBI NO: 15226856 NR Description: peptide/amino acid transporter -related thaliana] >gi|25410951|pir||A84432 probable peptide/amino acid
  misc_feature (18)..(583): Homolog of NCBI NO: 15232435 NR Description: peptide transport - like protein [Arabidopsis

SEQ ID NO: 105732 - protein, 459 aa, Arabidopsis thaliana; identical to SEQ ID NO: 23353
  peptide (1)..(459): Ceres Seq. ID no. 13617876
  misc_feature (1)..(391): Pfam Name: POT family Pfam Description: POT family
  misc_feature (1)..(459): Homolog of NCBI NO: 1076331 NR Description: histidine transport protein - Arabidopsis thaliana
  misc_feature (1)..(458): Homolog of NCBI NO: 4102839 NR Description: LeOPT1 [Lycopersicon esculentum]
  misc_feature (1)..(458): Homolog of NCBI NO: 31088360 NR Description: peptide transporter 1 [Vicia faba]
  misc_feature (1)..(458): Homolog of NCBI NO: 15076661 NR Description: peptide transporter [Oryza sativa (japonica >gi|15076663|dbj|BAB62327.1| peptide transporter [Oryza sativa
  misc_feature (1)..(430): Homolog of NCBI NO: 6635838 NR Description: amino acid/peptide transporter [Prunus dulcis]
  misc_feature (1)..(457): Homolog of NCBI NO: 30696666 NR Description: oligopeptide transporter -related [Arabidopsis >gi|16604436|gb|AAL24224.1| At1g62200/F19K23_13 [Arabidopsis
  misc_feature (1)..(457): Homolog of NCBI NO: 25404366 NR Description: hypothetical protein F19K23.13 [imported] - thaliana >gi|2160144|gb|AAB60766.1| Strong similarity to
  misc_feature (1)..(160): Homolog of NCBI NO: 15226856 NR Description: peptide/amino acid transporter -related thaliana] >gi|25410951|pir||A84432 probable peptide/amino acid
  misc_feature (193)..(456): Homolog of NCBI NO: 15226856 NR Description: peptide/amino acid transporter -related thaliana] >gi|25410951|pir||A84432 probable peptide/amino acid
  misc_feature (1)..(457): Homolog of NCBI NO: 15232435 NR Description: peptide transport - like protein [Arabidopsis

SEQ ID NO: 105733 - protein, 427 aa, Arabidopsis thaliana; identical to SEQ ID NO: 23354
  peptide (1)..(427): Ceres Seq. ID no. 13617877
  misc_feature (1)..(359): Pfam Name: POT family Pfam Description: POT family
  misc_feature (1)..(427): Homolog of NCBI NO: 1076331 NR Description: histidine transport protein - Arabidopsis thaliana
  misc_feature (1)..(426): Homolog of NCBI NO: 4102839 NR Description: LeOPT1 [Lycopersicon esculentum]
  misc_feature (1)..(426): Homolog of NCBI NO: 31088360 NR Description: peptide transporter 1 [Vicia faba]
  misc_feature (1)..(426): Homolog of NCBI NO: 15076661 NR Description: peptide transporter [Oryza sativa (japonica >gi|15076663|dbj|BAB62327.1| peptide transporter [Oryza sativa
  misc_feature (1)..(398): Homolog of NCBI NO: 6635838 NR Description: amino acid/peptide transporter [Prunus dulcis]
  misc_feature (1)..(425): Homolog of NCBI NO: 30696666 NR Description: oligopeptide transporter -related [Arabidopsis >gi|16604436|gb|AAL24224.1| At1g62200/F19K23_13 [Arabidopsis
  misc_feature (1)..(425): Homolog of NCBI NO: 25404366 NR Description: hypothetical protein F19K23.13 [imported] - thaliana >gi|2160144|gb|AAB60766.1| Strong similarity to
  misc_feature (1)..(128): Homolog of NCBI NO: 15226856 NR Description: peptide/amino acid transporter -related thaliana] >gi|25410951|pir||A84432 probable peptide/amino acid
  misc_feature (161)..(424): Homolog of NCBI NO: 15226856 NR Description: peptide/amino acid transporter -related thaliana] >gi|25410951|pir||A84432 probable peptide/amino acid
  misc_feature (1)..(425): Homolog of NCBI NO: 15232435 NR Description: peptide transport - like protein [Arabidopsis

SEQ ID NO: 105734 - DNA, 1320 bp, Arabidopsis thaliana
  misc_feature (1)..(1320): Ceres Seq. ID no. 13617890
  misc_feature: MA Experiment ID: 108434 Result: Down-regulated in Transcription
  misc_feature: MA Experiment 108434 PARAMETER Experiment Name: At_Root_Tips_cDNA_P Parameter: Tissue Value: Root Tips
  misc_feature: MA Experiment ID: 108464 Result: Up-regulated in Transcription
  misc_feature: MA Experiment 108464 PARAMETER Experiment Name: At_Germinating_Seeds_cDNA_P Parameter: Age (day) Value: 4 vs. 0
  misc_feature: MA Experiment 108464 PARAMETER Experiment Name: At_Germinating_Seeds_cDNA_P Parameter: Tissue Value: Germinating Seeds
  misc_feature: MA Experiment ID: 108573 Result: Up-regulated in Transcription
  misc_feature: MA Experiment 108573 PARAMETER Experiment Name: At_Drought_cDNA_P Parameter: Timepoint (hr) Value: 6
  misc_feature: MA Experiment 108573 PARAMETER Experiment Name: At_Drought_cDNA_P Parameter: Tissue Value: Aerial
  misc_feature: MA Experiment 108573 PARAMETER Experiment Name: At_Drought_cDNA_P Parameter: Treatment Value: Drought vs. No Drought
  misc_feature: MA Experiment ID: 108585 Result: Up-regulated in Transcription
  misc_feature: MA Experiment 108585 PARAMETER Experiment Name: At_5mM_NaNP_cDNA_P Parameter: Timepoint (hr) Value: 6
  misc_feature: MA Experiment 108585 PARAMETER Experiment Name: At_5mM_NaNP_cDNA_P Parameter: Tissue Value: Aerial
  misc_feature: MA Experiment 108585 PARAMETER Experiment Name: At_5mM_NaNP_cDNA_P Parameter: Treatment Value: null
  misc_feature: MA Experiment ID: 108595 Result: Down-regulated in Transcription
  misc_feature: MA Experiment 108595 PARAMETER Experiment Name: At_Ler-pi_Ovule_cDNA_P Parameter: Plant Line Value: null
  misc_feature: MA Experiment ID: 20000234 Result: Down-regulated in Transcription
  misc_feature: MA Experiment 20000234 PARAMETER Experiment Name: At_Siliques_P Parameter: Age (day) Value: 21
  misc_feature: MA Experiment 20000234 PARAMETER Experiment Name: At_Siliques_P Parameter: Organism Value: A. thaliana
  misc_feature: MA Experiment 20000234 PARAMETER Experiment Name: At_Siliques_P Parameter: Plant Line Value: WS
  misc_feature: MA Experiment 20000234 PARAMETER Experiment Name: At_Siliques_P Parameter: Tissue Value: Less Than 5mm Siliques vs. Whole Plant
  misc_feature: MA Experiment ID: 20000235 Result: Down-regulated in Transcription
  misc_feature: MA Experiment 20000235 PARAMETER Experiment Name: At_Siliques_P Parameter: Age (day) Value: 21
  misc_feature: MA Experiment 20000235 PARAMETER Experiment Name: At_Siliques_P Parameter: Organism Value: A. thaliana
  misc_feature: MA Experiment 20000235 PARAMETER Experiment Name: At_Siliques_P Parameter: Plant Line Value: WS
  misc_feature: MA Experiment 20000235 PARAMETER Experiment Name: At_Siliques_P Parameter: Tissue Value: 5-10mm Siliques vs. Whole Plant
  misc_feature: MA Experiment ID: 20000437 Result: Up-regulated in Transcription
  misc_feature: MA Experiment 20000437 PARAMETER Experiment Name: At_Drought_P Parameter: Age (day) Value: 8
  misc_feature: MA Experiment 20000437 PARAMETER Experiment Name: At_Drought_P Parameter: Organism Value: A. thaliana
  misc_feature: MA Experiment 20000437 PARAMETER Experiment Name: At_Drought_P Parameter: Plant Line Value: WS
  misc_feature: MA Experiment 20000437 PARAMETER Experiment Name: At_Drought_P Parameter: Timepoint (hr) Value: 24
  misc_feature: MA Experiment 20000437 PARAMETER Experiment Name: At_Drought_P Parameter: Tissue Value: Whole Plant
  misc_feature: MA Experiment 20000437 PARAMETER Experiment Name: At_Drought_P Parameter: Treatment Value: Drought vs. No Drought
  misc_feature: MA Experiment ID: 20001247 Result: Up-regulated in Transcription
  misc_feature: MA Experiment 20001247 PARAMETER Experiment Name: At_Far-red-induction_P Parameter: Age (day) Value: 7
  misc_feature: MA Experiment 20001247 PARAMETER Experiment Name: At_Far-red-induction_P Parameter: Light Value: Far-red vs. White
  misc_feature: MA Experiment 20001247 PARAMETER Experiment Name: At_Far-red-induction_P Parameter: Organism Value: A. thaliana
  misc_feature: MA Experiment 20001247 PARAMETER Experiment Name: At_Far-red-induction_P Parameter: Plant Line Value: Columbia
  misc_feature: MA Experiment 20001247 PARAMETER Experiment Name: At_Far-red-induction_P Parameter: Timepoint (hr) Value: 1
  misc_feature: MA Experiment 20001247 PARAMETER Experiment Name: At_Far-red-induction_P Parameter: Tissue Value: Whole Plant
  misc_feature: MA Experiment ID: 20001248 Result: Up-regulated in Transcription
  misc_feature: MA Experiment 20001248 PARAMETER Experiment Name: At_Far-red-induction_P Parameter: Age (day) Value: 7
  misc_feature: MA Experiment 20001248 PARAMETER Experiment Name: At_Far-red-induction_P Parameter: Light Value: Far-red vs. White
  misc_feature: MA Experiment 20001248 PARAMETER Experiment Name: At_Far-red-induction_P Parameter: Organism Value: A. thaliana
  misc_feature: MA Experiment 20001248 PARAMETER Experiment Name: At_Far-red-induction_P Parameter: Plant Line Value: Columbia
  misc_feature: MA Experiment 20001248 PARAMETER Experiment Name: At_Far-red-induction_P Parameter: Timepoint (hr) Value: 4
  misc_feature: MA Experiment 20001248 PARAMETER Experiment Name: At_Far-red-induction_P Parameter: Tissue Value: Whole Plant
  misc_feature: MA Experiment ID: 20001450 Result: Up-regulated in Transcription
  misc_feature: MA Experiment 20001450 PARAMETER Experiment Name: At_Far-red-induction_P Parameter: Age (day) Value: 7
  misc_feature: MA Experiment 20001450 PARAMETER Experiment Name: At_Far-red-induction_P Parameter: Light Value: Far-red vs. White
  misc_feature: MA Experiment 20001450 PARAMETER Experiment Name: At_Far-red-induction_P Parameter: Organism Value: A. thaliana
  misc_feature: MA Experiment 20001450 PARAMETER Experiment Name: At_Far-red-induction_P Parameter: Plant Line Value: Columbia
  misc_feature: MA Experiment 20001450 PARAMETER Experiment Name: At_Far-red-induction_P Parameter: Timepoint (hr) Value: 8
  misc_feature: MA Experiment 20001450 PARAMETER Experiment Name: At_Far-red-induction_P Parameter: Tissue Value: Whole Plant
  misc_feature: MA Experiment ID: 20001560 Result: Down-regulated in Transcription
  misc_feature: MA Experiment 20001560 PARAMETER Experiment Name: At_Drought_Soil_Dry_P Parameter: Age (day) Value: 28
  misc_feature: MA Experiment 20001560 PARAMETER Experiment Name: At_Drought_Soil_Dry_P Parameter: Organism Value: A. thaliana
  misc_feature: MA Experiment 20001560 PARAMETER Experiment Name: At_Drought_Soil_Dry_P Parameter: Plant Line Value: WS
  misc_feature: MA Experiment 20001560 PARAMETER Experiment Name: At_Drought_Soil_Dry_P Parameter: Post Timepoint (hr) Value: None
  misc_feature: MA Experiment 20001560 PARAMETER Experiment Name: At_Drought_Soil_Dry_P Parameter: Post-Treatment Value: None
  misc_feature: MA Experiment 20001560 PARAMETER Experiment Name: At_Drought_Soil_Dry_P Parameter: Timepoint (day) Value: 14
  misc_feature: MA Experiment 20001560 PARAMETER Experiment Name: At_Drought_Soil_Dry_P Parameter: Treatment Value: Drought vs. No Drought
atttcgggaaaataacaaaaaaagaaagaaataaaaagaggtgattcaaatccagagagttctcattatgtatattcaaaatctgaatcgagaaggaatctgactcgtgtagatgagaatcggcggcgtcgaggttacgaaatttgcgtcggagatgatgtcgtcgtcgtcttcgtcggcggtggagatgttgaatctcaaagaagcttcgaattggtggtcagacgtaaacgaatctccgatttggcaggatcgtatcttccatgttctcgctgttctctacggaatcgtttccctcgttgctgtgattcaacttgtgagaatacaattgagagttcctgaatatggttggacgacgcaaaaggtctttcactttctcaatttcgttgttaatggagttcgtgctgtggtgtttgtcttcaggcgaaatgttcagtttatgcaaccagagattctgcaacatatcttgcttgatattccaagtcttgctttcttcaccacctatgctcttctggttcttttctgggctgaaatttattatcaggcgcgtgcagtatcgactgatggactcaggccaagcttcttcacaattaatgcagttgtatatgtagttcagattgctctatggttggttttgtggtggaagcctgttcgagttatggtaatcctatctaagatgttctttgcaggtgtttcattgttcgctgcccttggatttttactttatggtggaaggcttttcctaatgttgcaacggtttccagtagaatctaaagggcggcgcaaaaagctgcaagaggttggttacgtgacaaccatatgctttacgtgtttcctcatcagatgtatcatgatgtgctttgctgctttcgatgagggggcaaaccttgatgtgttagatcaccccatccttaacttcatatattacctgttggtagagatattaccctcctctctggtcctcttcatcttgagaaagctaccaccaaaacgaggcattacacaataccatcagattcgctgaaatgtaaaggcacgacaactaatgatcagatgaagaagacaagactatggttgtttatgcttttctgtaatcaatagagagaaaagcataagatggaaatgaaatagatctaaagctgataaggccttttggttgatgatgggaatggattctacttgatttttggtaaacggtaaactggggtttgttccctttatataaaggttatgttgtaaaaaatttattataaagtacatgtaagaattgtgtaaatttatgttgaatcatgtggtaaaaaaaaaaaaaagtttcttttt

SEQ ID NO: 105735 - protein, 303 aa, Arabidopsis thaliana; identical to SEQ ID NO: 28982
  peptide (1)..(303): Ceres Seq. ID no. 13617891
  misc_feature (1)..(303): Homolog of NCBI NO: 18395323 NR Description: TOM3 protein [Arabidopsis thaliana] TOM3 [Arabidopsis thaliana] >gi|20197487|gb|AAC97216.2| expressed [Arabidopsis thaliana] >gi|26449544|dbj|BAC41898.1| unknown
  misc_feature (16)..(303): Homolog of NCBI NO: 21537264 NR Description: unknown [Arabidopsis thaliana]
  misc_feature (14)..(303): Homolog of NCBI NO: 7262697 NR Description: Contains similarity to an unknown protein from
  misc_feature (14)..(303): Homolog of NCBI NO: 18394129 NR Description: THH1 protein [Arabidopsis thaliana] THH1 protein [Arabidopsis thaliana] >gi|15706301|dbj|BAB68339.1|
  misc_feature (20)..(303): Homolog of NCBI NO: 21537116 NR Description: unknown [Arabidopsis thaliana]
  misc_feature (14)..(303): Homolog of NCBI NO: 27754346 NR Description: unknown protein [Arabidopsis thaliana]
  misc_feature (18)..(302): Homolog of NCBI NO: 37536460 NR Description: putative transmembrane protein [Oryza sativa
  misc_feature (16)..(302): Homolog of NCBI NO: 34902220 NR Description: Putative transmembrane protein [Oryza sativa
  misc_feature (33)..(303): Homolog of NCBI NO: 18415765 NR Description: TOM1 protein [Arabidopsis thaliana] putative transmembrane protein [Arabidopsis thaliana] putative transmembrane protein [Arabidopsis thaliana]
  misc_feature (35)..(302): Homolog of NCBI NO: 34394174 NR Description: putative transmembrane protein(TOM3) [Oryza

SEQ ID NO: 105736 - protein, 289 aa, Arabidopsis thaliana; identical to SEQ ID NO: 28983
  peptide (1)..(289): Ceres Seq. ID no. 13617892
  misc_feature (1)..(289): Homolog of NCBI NO: 18395323 NR Description: TOM3 protein [Arabidopsis thaliana] TOM3 [Arabidopsis thaliana] >gi|20197487|gb|AAC97216.2| expressed [Arabidopsis thaliana] >gi|26449544|dbj|BAC41898.1| unknown
  misc_feature (2)..(289): Homolog of NCBI NO: 21537264 NR Description: unknown [Arabidopsis thaliana]
  misc_feature (1)..(289): Homolog of NCBI NO: 7262697 NR Description: Contains similarity to an unknown protein from
  misc_feature (1)..(289): Homolog of NCBI NO: 18394129 NR Description: THH1 protein [Arabidopsis thaliana] THH1 protein [Arabidopsis thaliana] >gi|15706301|dbj|BAB68339.1|
  misc_feature (6)..(289): Homolog of NCBI NO: 21537116 NR Description: unknown [Arabidopsis thaliana]
  misc_feature (1)..(289): Homolog of NCBI NO: 27754346 NR Description: unknown protein [Arabidopsis thaliana]
  misc_feature (4)..(288): Homolog of NCBI NO: 37536460 NR Description: putative transmembrane protein [Oryza sativa
  misc_feature (2)..(288): Homolog of NCBI NO: 34902220 NR Description: Putative transmembrane protein [Oryza sativa
  misc_feature (19)..(289): Homolog of NCBI NO: 18415765 NR Description: TOM1 protein [Arabidopsis thaliana] putative transmembrane protein [Arabidopsis thaliana] putative transmembrane protein [Arabidopsis thaliana]
  misc_feature (21)..(288): Homolog of NCBI NO: 34394174 NR Description: putative transmembrane protein(TOM3) [Oryza

SEQ ID NO: 105737 - protein, 288 aa, Arabidopsis thaliana; identical to SEQ ID NO: 28984
  peptide (1)..(288): Ceres Seq. ID no. 13617893
  misc_feature (1)..(288): Homolog of NCBI NO: 18395323 NR Description: TOM3 protein [Arabidopsis thaliana] TOM3 [Arabidopsis thaliana] >gi|20197487|gb|AAC97216.2| expressed [Arabidopsis thaliana] >gi|26449544|dbj|BAC41898.1| unknown
  misc_feature (1)..(288): Homolog of NCBI NO: 21537264 NR Description: unknown [Arabidopsis thaliana]
  misc_feature (1)..(288): Homolog of NCBI NO: 7262697 NR Description: Contains similarity to an unknown protein from
  misc_feature (1)..(288): Homolog of NCBI NO: 18394129 NR Description: THH1 protein [Arabidopsis thaliana] THH1 protein [Arabidopsis thaliana] >gi|15706301|dbj|BAB68339.1|
  misc_feature (5)..(288): Homolog of NCBI NO: 21537116 NR Description: unknown [Arabidopsis thaliana]
  misc_feature (1)..(288): Homolog of NCBI NO: 27754346 NR Description: unknown protein [Arabidopsis thaliana]
  misc_feature (3)..(287): Homolog of NCBI NO: 37536460 NR Description: putative transmembrane protein [Oryza sativa
  misc_feature (1)..(287): Homolog of NCBI NO: 34902220 NR Description: Putative transmembrane protein [Oryza sativa
  misc_feature (18)..(288): Homolog of NCBI NO: 18415765 NR Description: TOM1 protein [Arabidopsis thaliana] putative transmembrane protein [Arabidopsis thaliana] putative transmembrane protein [Arabidopsis thaliana]
  misc_feature (20)..(287): Homolog of NCBI NO: 34394174 NR Description: putative transmembrane protein(TOM3) [Oryza

SEQ ID NO: 105738 - DNA, 2197 bp, Arabidopsis thaliana
  misc_feature (1)..(2197): Ceres Seq. ID no. 13617897
  misc_feature: MA Experiment ID: 20000314 Result: Up-regulated in Transcription
  misc_feature: MA Experiment 20000314 PARAMETER Experiment Name: At_14day_Shoots-Roots_Sub_P Parameter: Age (day) Value: 14
  misc_feature: MA Experiment 20000314 PARAMETER Experiment Name: At_14day_Shoots-Roots_Sub_P Parameter: Organism Value: A. thaliana
  misc_feature: MA Experiment 20000314 PARAMETER Experiment Name: At_14day_Shoots-Roots_Sub_P Parameter: Plant Line Value: WS
  misc_feature: MA Experiment 20000314 PARAMETER Experiment Name: At_14day_Shoots-Roots_Sub_P Parameter: Tissue Value: Roots vs. Whole Plant
  misc_feature: MA Experiment ID: 20000355 Result: Up-regulated in Transcription
  misc_feature: MA Experiment 20000355 PARAMETER Experiment Name: At_Siliques_Sub_P Parameter: Age (day) Value: 21
  misc_feature: MA Experiment 20000355 PARAMETER Experiment Name: At_Siliques_Sub_P Parameter: Organism Value: A. thaliana
  misc_feature: MA Experiment 20000355 PARAMETER Experiment Name: At_Siliques_Sub_P Parameter: Plant Line Value: WS
  misc_feature: MA Experiment 20000355 PARAMETER Experiment Name: At_Siliques_Sub_P Parameter: Tissue Value: Less Than 5mm Siliques vs. Whole Plant
  misc_feature: MA Experiment ID: 20000440 Result: Up-regulated in Transcription
  misc_feature: MA Experiment 20000440 PARAMETER Experiment Name: At_Closed-Flower__Sub_P Parameter: Tissue Value: Closed Flower vs. Whole Plant
  misc_feature: MA Experiment ID: 20001806 Result: Up-regulated in Transcription
  misc_feature: MA Experiment 20001806 PARAMETER Experiment Name: At_50mM_NH4NO3_L-to-H_Sub_P Parameter: Timepoint (hr) Value: 4
  misc_feature: MA Experiment 20001806 PARAMETER Experiment Name: At_50mM_NH4NO3_L-to-H_Sub_P Parameter: Tissue Value: Leaf
  misc_feature: MA Experiment 20001806 PARAMETER Experiment Name: At_50mM_NH4NO3_L-to-H_Sub_P Parameter: Treatment Value: 50mM NH4NO3 vs 100mM Mannitol
atgattccactctcgtttgcagcattaggagacatagttgataagaagcttgatgaggattatgtaaaggaagaagttgaaatgatgatacaagtatctctgctatccacacaagcagcaccgggagaacgaccaacgatgtcggaagttgaaatttttagaaactcctgcttgtgctacataaactggttttgcaacatcatctccataatatattctaacagtttgcttttgaggattgattcaggatcatcatctatatctgttgtcttcttagtttttactctgtctcggatggagcaacgacggatgttaacggcggctagaccacgtttgtcctcgacgatccgtacgattacgtctcacgtggcgttctcagcaagccgtctcttgaaaccttatgttgcatatcggcttggattggaggacgcgaatcagaggaaaacagagaacgaatccaccggtggagataaagaaatcgccaattcgctcctccactgtcttaaatttcactatcttcttcttcattttccttccttctcacttcaaatccataatcgctctacttctctctctctctctagattcgaaaaaatggcgaaactggtgatgttgttggttctctgtatcttaccggcgatagccatggcggcaaggaggggaaatattggaaagaatacaatggtggttcaaggtagcacctactgtgacatttgcaaattcggcttcgagactcctgaatcctcctacttcatccccggtgcaacggtgaagctatcatgcaaagacaggaagacaatggaagaggtttacacagacaaagctgtatcagacaaagaaggaaagtataagttcattgtccacgacgatcacagagaccagatgtgcgatgttttgcttgtgaaaagctcggataaaacctgctctaaaatctccgttggacgtgagaagtctcgtgtgatcttgaaccattacagtggcattgcctcgcagatcagacatgctaacaacatgggatttgagaaagaagtgagaatggctacttctacgactatgtctcatcaagcgattgggtctgttgtctctcaaagaccattcaaagcttctcagtttctaaaggagcctttgaataatgtaccaatgaaattcagacaaaaaagattcaagattgaagcaactgcttctcagatatctgtcgttgacaacactttcttgtctccgtctccttccaagaacaaaccacatgaatctaagaagaaatcaaatgaagcagctttgatattgattaggcatggagaatcgttatggaatgagaagaatttgttcacgggttgtgttgatgtgccattgactcagaaaggtgttggagaagctattgaagctgggaagaagattagtaacattcctgtagatttgattttcacttcttctttaatccgtgctcagatgactgcaatgcttgccatgactcagcatcgtcgcaagaaggttccaatcatcttgcacaacgagagtgtaaaggcgaaaacttggagtcatgttttcagcgaagaaactagaaaacaatctatcccggttatagcggcttggcaactgaatgagagaatgtatggagagttgcagggtttgaacaagaaagaaacagcggaaagatacgggacacaacaagttcacgaatggcgcaggagttacgaaattcctcctccgaaaggcgagagcttggagatgtgtgctgagagagcagtggcttattttgaagacaatatcaaaccagagcttgcatctggaaacaatgtaatgattgctgctcacgggaactcattgagatctatcattatgtatcttgacgatttaacttctcaggaggttacaactctagacctgtccacaggtgtaccattgctctacatcttcaaagaaggcaagttcatgaaacgaggaagccccgtcggttctactgaagctggtgtctatgcttatacaaagagattggcacaatacagagagaagcttgatgcggcggcgaccatttaactaatgtcttccagaaataaaccagaaaaatcatttgtttttgtgtttctctggcttagctcttatgtagtgacaaaacaatcaagaacagtttaaatatgtagtagatacacaaatcacattcatttcatgttatttcaaatatatatgaaaaagccaatcc

SEQ ID NO: 105739 - protein, 677 aa, Arabidopsis thaliana
  peptide (1)..(677): Ceres Seq. ID no. 13617898
  misc_feature (424)..(646): Pfam Name: Phosphoglycerate mutase family Pfam Description: Phosphoglycerate mutase family
  misc_feature (346)..(672): Homolog of NCBI NO: 18395083 NR Description: expressed protein [Arabidopsis thaliana]
  misc_feature (346)..(672): Homolog of NCBI NO: 21618275 NR Description: unknown [Arabidopsis thaliana]
  misc_feature (346)..(672): Homolog of NCBI NO: 21539557 NR Description: unknown protein [Arabidopsis thaliana]
  misc_feature (483)..(677): Homolog of NCBI NO: 15218201 NR Description: phosphoglycerate mutase -related [Arabidopsis >gi|26451923|dbj|BAC43054.1| unknown protein [Arabidopsis
  misc_feature (199)..(344): Homolog of NCBI NO: 15218200 NR Description: allergen -related [Arabidopsis thaliana] allergen, putative [Arabidopsis thaliana]
  misc_feature (199)..(344): Homolog of NCBI NO: 24417468 NR Description: unknown [Arabidopsis thaliana]
  misc_feature (424)..(645): Homolog of NCBI NO: 15618772 NR Description: Phosphoglycerate Mutase [Chlamydophila pneumoniae >gi|16752176|ref|NP_445543.1| phosphoglycerate mutase
  misc_feature (424)..(645): Homolog of NCBI NO: 15836396 NR Description: phosphoglycerate mutase [Chlamydophila pneumoniae
  misc_feature (424)..(651): Homolog of NCBI NO: 29840659 NR Description: phosphoglycerate mutase [Chlamydophila caviae >gi|29835009|gb|AAP05643.1| phosphoglycerate mutase
  misc_feature (426)..(636): Homolog of NCBI NO: 28493622 NR Description: phosphoglycerate mutase [Tropheryma whipplei str. >gi|28572819|ref|NP_789599.1| phosphoglycerate mutase [Tropheryma TW08/27] >gi|28410952|emb|CAD67337.1| phosphoglycerate
MIPLSFAALGDIVDKKLDEDYVKEEVEMMIQVSLLSTQAAPGERPTMSEVEIFRNSCLCYINWFCNIISIIYSNSLLLRIDSGSSSISVVFLVFTLSRMEQRRMLTAARPRLSSTIRTITSHVAFSASRLLKPYVAYRLGLEDANQRKTENESTGGDKEIANSLLHCLKFHYLLLHFPSFSLQIHNRSTSLSLSRFEKMAKLVMLLVLCILPAIAMAARRGNIGKNTMVVQGSTYCDICKFGFETPESSYFIPGATVKLSCKDRKTMEEVYTDKAVSDKEGKYKFIVHDDHRDQMCDVLLVKSSDKTCSKISVGREKSRVILNHYSGIASQIRHANNMGFEKEVRMATSTTMSHQAIGSVVSQRPFKASQFLKEPLNNVPMKFRQKRFKIEATASQISVVDNTFLSPSPSKNKPHESKKKSNEAALILIRHGESLWNEKNLFTGCVDVPLTQKGVGEAIEAGKKISNIPVDLIFTSSLIRAQMTAMLAMTQHRRKKVPIILHNESVKAKTWSHVFSEETRKQSIPVIAAWQLNERMYGELQGLNKKETAERYGTQQVHEWRRSYEIPPPKGESLEMCAERAVAYFEDNIKPELASGNNVMIAAHGNSLRSIIMYLDDLTSQEVTTLDLSTGVPLLYIFKEGKFMKRGSPVGSTEAGVYAYTKRLAQYREKLDAAATI

SEQ ID NO: 105740 - protein, 650 aa, Arabidopsis thaliana
  peptide (1)..(650): Ceres Seq. ID no. 13617899
  misc_feature (397)..(619): Pfam Name: Phosphoglycerate mutase family Pfam Description: Phosphoglycerate mutase family
  misc_feature (319)..(645): Homolog of NCBI NO: 18395083 NR Description: expressed protein [Arabidopsis thaliana]
  misc_feature (319)..(645): Homolog of NCBI NO: 21618275 NR Description: unknown [Arabidopsis thaliana]
  misc_feature (319)..(645): Homolog of NCBI NO: 21539557 NR Description: unknown protein [Arabidopsis thaliana]
  misc_feature (456)..(650): Homolog of NCBI NO: 15218201 NR Description: phosphoglycerate mutase -related [Arabidopsis >gi|26451923|dbj|BAC43054.1| unknown protein [Arabidopsis
  misc_feature (172)..(317): Homolog of NCBI NO: 15218200 NR Description: allergen -related [Arabidopsis thaliana] allergen, putative [Arabidopsis thaliana]
  misc_feature (172)..(317): Homolog of NCBI NO: 24417468 NR Description: unknown [Arabidopsis thaliana]
  misc_feature (397)..(618): Homolog of NCBI NO: 15618772 NR Description: Phosphoglycerate Mutase [Chlamydophila pneumoniae >gi|16752176|ref|NP_445543.1| phosphoglycerate mutase
  misc_feature (397)..(618): Homolog of NCBI NO: 15836396 NR Description: phosphoglycerate mutase [Chlamydophila pneumoniae
  misc_feature (397)..(624): Homolog of NCBI NO: 29840659 NR Description: phosphoglycerate mutase [Chlamydophila caviae >gi|29835009|gb|AAP05643.1| phosphoglycerate mutase
  misc_feature (399)..(609): Homolog of NCBI NO: 28493622 NR Description: phosphoglycerate mutase [Tropheryma whipplei str. >gi|28572819|ref|NP_789599.1| phosphoglycerate mutase [Tropheryma TW08/27] >gi|28410952|emb|CAD67337.1| phosphoglycerate
MMIQVSLLSTQAAPGERPTMSEVEIFRNSCLCYINWFCNIISIIYSNSLLLRIDSGSSSISVVFLVFTLSRMEQRRMLTAARPRLSSTIRTITSHVAFSASRLLKPYVAYRLGLEDANQRKTENESTGGDKEIANSLLHCLKFHYLLLHFPSFSLQIHNRSTSLSLSRFEKMAKLVMLLVLCILPAIAMAARRGNIGKNTMVVQGSTYCDICKFGFETPESSYFIPGATVKLSCKDRKTMEEVYTDKAVSDKEGKYKFIVHDDHRDQMCDVLLVKSSDKTCSKISVGREKSRVILNHYSGIASQIRHANNMGFEKEVRMATSTTMSHQAIGSVVSQRPFKASQFLKEPLNNVPMKFRQKRFKIEATASQISVVDNTFLSPSPSKNKPHESKKKSNEAALILIRHGESLWNEKNLFTGCVDVPLTQKGVGEAIEAGKKISNIPVDLIFTSSLIRAQMTAMLAMTQHRRKKVPIILHNESVKAKTWSHVFSEETRKQSIPVIAAWQLNERMYGELQGLNKKETAERYGTQQVHEWRRSYEIPPPKGESLEMCAERAVAYFEDNIKPELASGNNVMIAAHGNSLRSIIMYLDDLTSQEVTTLDLSTGVPLLYIFKEGKFMKRGSPVGSTEAGVYAYTKRLAQYREKLDAAATI

SEQ ID NO: 105741 - protein, 649 aa, Arabidopsis thaliana
  peptide (1)..(649): Ceres Seq. ID no. 13617900
  misc_feature (396)..(618): Pfam Name: Phosphoglycerate mutase family Pfam Description: Phosphoglycerate mutase family
  misc_feature (318)..(644): Homolog of NCBI NO: 18395083 NR Description: expressed protein [Arabidopsis thaliana]
  misc_feature (318)..(644): Homolog of NCBI NO: 21618275 NR Description: unknown [Arabidopsis thaliana]
  misc_feature (318)..(644): Homolog of NCBI NO: 21539557 NR Description: unknown protein [Arabidopsis thaliana]
  misc_feature (455)..(649): Homolog of NCBI NO: 15218201 NR Description: phosphoglycerate mutase -related [Arabidopsis >gi|26451923|dbj|BAC43054.1| unknown protein [Arabidopsis
  misc_feature (171)..(316): Homolog of NCBI NO: 15218200 NR Description: allergen -related [Arabidopsis thaliana] allergen, putative [Arabidopsis thaliana]
  misc_feature (171)..(316): Homolog of NCBI NO: 24417468 NR Description: unknown [Arabidopsis thaliana]
  misc_feature (396)..(617): Homolog of NCBI NO: 15618772 NR Description: Phosphoglycerate Mutase [Chlamydophila pneumoniae >gi|16752176|ref|NP_445543.1| phosphoglycerate mutase
  misc_feature (396)..(617): Homolog of NCBI NO: 15836396 NR Description: phosphoglycerate mutase [Chlamydophila pneumoniae
  misc_feature (396)..(623): Homolog of NCBI NO: 29840659 NR Description: phosphoglycerate mutase [Chlamydophila caviae >gi|29835009|gb|AAP05643.1| phosphoglycerate mutase
  misc_feature (398)..(608): Homolog of NCBI NO: 28493622 NR Description: phosphoglycerate mutase [Tropheryma whipplei str. >gi|28572819|ref|NP_789599.1| phosphoglycerate mutase [Tropheryma TW08/27] >gi|28410952|emb|CAD67337.1| phosphoglycerate
MIQVSLLSTQAAPGERPTMSEVEIFRNSCLCYINWFCNIISIIYSNSLLLRIDSGSSSISVVFLVFTLSRMEQRRMLTAARPRLSSTIRTITSHVAFSASRLLKPYVAYRLGLEDANQRKTENESTGGDKEIANSLLHCLKFHYLLLHFPSFSLQIHNRSTSLSLSRFEKMAKLVMLLVLCILPAIAMAARRGNIGKNTMVVQGSTYCDICKFGFETPESSYFIPGATVKLSCKDRKTMEEVYTDKAVSDKEGKYKFIVHDDHRDQMCDVLLVKSSDKTCSKISVGREKSRVILNHYSGIASQIRHANNMGFEKEVRMATSTTMSHQAIGSVVSQRPFKASQFLKEPLNNVPMKFRQKRFKIEATASQISVVDNTFLSPSPSKNKPHESKKKSNEAALILIRHGESLWNEKNLFTGCVDVPLTQKGVGEAIEAGKKISNIPVDLIFTSSLIRAQMTAMLAMTQHRRKKVPIILHNESVKAKTWSHVFSEETRKQSIPVIAAWQLNERMYGELQGLNKKETAERYGTQQVHEWRRSYEIPPPKGESLEMCAERAVAYFEDNIKPELASGNNVMIAAHGNSLRSIIMYLDDLTSQEVTTLDLSTGVPLLYIFKEGKFMKRGSPVGSTEAGVYAYTKRLAQYREKLDAAATI

SEQ ID NO: 105742 - DNA, 1503 bp, Arabidopsis thaliana
  misc_feature (1)..(1503): Ceres Seq. ID no. 13617901
  misc_feature: MA Experiment ID: 108434 Result: Down-regulated in Transcription
  misc_feature: MA Experiment 108434 PARAMETER Experiment Name: At_Root_Tips_cDNA_P Parameter: Tissue Value: Root Tips
  misc_feature: MA Experiment ID: 20000185 Result: Down-regulated in Transcription
  misc_feature: MA Experiment 20000185 PARAMETER Experiment Name: At_Roots__P Parameter: Age (day) Value: 7 vs. 21
  misc_feature: MA Experiment 20000185 PARAMETER Experiment Name: At_Roots__P Parameter: Organism Value: A. thaliana
  misc_feature: MA Experiment 20000185 PARAMETER Experiment Name: At_Roots__P Parameter: Tissue Value: Roots vs. Whole Plant
agatttttgttttgtttttaatcgggaaagatgaaggcggagacgatgacgctgcttcttgtgaatctagccggaataatggaaagagccgatgaatctctgcttccaggtgtatacaaagaggtcggtttagctcttcataccgatccaaccggactcgggtcattaacgttgctacgatccatggttcaagccgcttgctatcccttagctgcttacatggccattagacataaccgagctcacgttatagctctgggtgcatttctctggtccgctgctactttccttgtcgctttctcttccactttcttccaggtagcagtgtctagagctctgaatggaattggtcttgctcttgtggctccagctattcagtctctcgttgctgactcaactgatgatgctaaccgtggtactgcttttggatggttacaattaacagcaaatattggttcgattttaggcgggctttgctctgttttaatagctccattaacctttatgggcatacctggttggagagttgctttccatatcgtaggtgtgatcagtgttattgttggtgtgctagttagagttttcgccaatgatccacattttgtgaaggatggtgttgatgtttcgaatcaaccaggttcgaggaaacctttttgtacagaggtgaaggatttggtccgggaagctgatactgtcataaagattcggtcttttcagatcattgtagctcagggagtgacaggatcgtttccttggtctgctctttcttttgcacctatgtggttggaactcattgggttctcacacgggaaaactgcattcttgatgggtcttttcgtggctgcatcttctcttggtggcttgtttggaggcaaaatgggagattttctgtctactcgtcttcccaattccggaagaatcattctcgcgcagattagttcagcctcagcgatcccgctcgctgcaattctcttgttggtcttaccagatgatccatctacagctgcaatccatggtctgatcttagtcctattggggctatttgtttcttggaatgctcctgctaccaacaacccaatcttcgcagagatcgttccagagaaatcaagaacaagcgtctacgcactggacaaatcgtttgagtctatcttgtcatcgtttgcacctcctatagttggaatcctggcacaacatgtttatggatacaagccaatccctgaagggtcatcgaggtcaacagagatagccacagatagagagaatgcagcatctctggcaaaagctctttatacatctataggactcccaatggcggcttgctgcttcatatactcctttctttaccgttcctatcctctagacagagatcgtgctcggatggaagcttttatagattctgagatgcgtgaacttcttccagaaagttccaatcgagacattgagttttcacaagaagaagacccctttgcaaaccatgttaaccccaatttacaagctagataa

SEQ ID NO: 105743 - protein, 490 aa, Arabidopsis thaliana
  peptide (1)..(490): Ceres Seq. ID no. 13617902
  misc_feature (7)..(409): Pfam Name: Sugar (and other) transporter Pfam Description: Sugar (and other) transporter
  misc_feature (1)..(490): Homolog of NCBI NO: 15218229 NR Description: transporter - related [Arabidopsis thaliana]
  misc_feature (1)..(476): Homolog of NCBI NO: 15238089 NR Description: transporter - related [Arabidopsis thaliana] unknown protein [Arabidopsis thaliana]
  misc_feature (96)..(476): Homolog of NCBI NO: 11358310 NR Description: hypothetical protein T31P16.180 - Arabidopsis >gi|7960738|emb|CAB92060.1| putative protein [Arabidopsis
  misc_feature (1)..(145): Homolog of NCBI NO: 11358310 NR Description: hypothetical protein T31P16.180 - Arabidopsis >gi|7960738|emb|CAB92060.1| putative protein [Arabidopsis
  misc_feature (1)..(458): Homolog of NCBI NO: 15234530 NR Description: transporter - related [Arabidopsis thaliana]
  misc_feature (16)..(458): Homolog of NCBI NO: 15224194 NR Description: transporter - related [Arabidopsis thaliana]
  misc_feature (158)..(458): Homolog of NCBI NO: 34393426 NR Description: membrane transporter PFB0275w-like protein [Oryza
  misc_feature (7)..(459): Homolog of NCBI NO: 23480447 NR Description: major facilitator superfamily protein [Plasmodium
  misc_feature (220)..(459): Homolog of NCBI NO: 23593282 NR Description: hypothetical protein, conserved [Plasmodium
  misc_feature (7)..(193): Homolog of NCBI NO: 23593282 NR Description: hypothetical protein, conserved [Plasmodium
MKAETMTLLLVNLAGIMERADESLLPGVYKEVGLALHTDPTGLGSLTLLRSMVQAACYPLAAYMAIRHNRAHVIALGAFLWSAATFLVAFSSTFFQVAVSRALNGIGLALVAPAIQSLVADSTDDANRGTAFGWLQLTANIGSILGGLCSVLIAPLTFMGIPGWRVAFHIVGVISVIVGVLVRVFANDPHFVKDGVDVSNQPGSRKPFCTEVKDLVREADTVIKIRSFQIIVAQGVTGSFPWSALSFAPMWLELIGFSHGKTAFLMGLFVAASSLGGLFGGKMGDFLSTRLPNSGRIILAQISSASAIPLAAILLLVLPDDPSTAAIHGLILVLLGLFVSWNAPATNNPIFAEIVPEKSRTSVYALDKSFESILSSFAPPIVGILAQHVYGYKPIPEGSSRSTEIATDRENAASLAKALYTSIGLPMAACCFIYSFLYRSYPLDRDRARMEAFIDSEMRELLPESSNRDIEFSQEEDPFANHVNPNLQAR

SEQ ID NO: 105744 - protein, 485 aa, Arabidopsis thaliana
  peptide (1)..(485): Ceres Seq. ID no. 13617903
  misc_feature (2)..(404): Pfam Name: Sugar (and other) transporter Pfam Description: Sugar (and other) transporter
  misc_feature (1)..(485): Homolog of NCBI NO: 15218229 NR Description: transporter - related [Arabidopsis thaliana]
  misc_feature (1)..(471): Homolog of NCBI NO: 15238089 NR Description: transporter - related [Arabidopsis thaliana] unknown protein [Arabidopsis thaliana]
  misc_feature (91)..(471): Homolog of NCBI NO: 11358310 NR Description: hypothetical protein T31P16.180 - Arabidopsis >gi|7960738|emb|CAB92060.1| putative protein [Arabidopsis
  misc_feature (1)..(140): Homolog of NCBI NO: 11358310 NR Description: hypothetical protein T31P16.180 - Arabidopsis >gi|7960738|emb|CAB92060.1| putative protein [Arabidopsis
  misc_feature (1)..(453): Homolog of NCBI NO: 15234530 NR Description: transporter - related [Arabidopsis thaliana]
  misc_feature (11)..(453): Homolog of NCBI NO: 15224194 NR Description: transporter - related [Arabidopsis thaliana]
  misc_feature (153)..(453): Homolog of NCBI NO: 34393426 NR Description: membrane transporter PFB0275w-like protein [Oryza
  misc_feature (2)..(454): Homolog of NCBI NO: 23480447 NR Description: major facilitator superfamily protein [Plasmodium
  misc_feature (215)..(454): Homolog of NCBI NO: 23593282 NR Description: hypothetical protein, conserved [Plasmodium
  misc_feature (2)..(188): Homolog of NCBI NO: 23593282 NR Description: hypothetical protein, conserved [Plasmodium
MTLLLVNLAGIMERADESLLPGVYKEVGLALHTDPTGLGSLTLLRSMVQAACYPLAAYMAIRHNRAHVIALGAFLWSAATFLVAFSSTFFQVAVSRALNGIGLALVAPAIQSLVADSTDDANRGTAFGWLQLTANIGSILGGLCSVLIAPLTFMGIPGWRVAFHIVGVISVIVGVLVRVFANDPHFVKDGVDVSNQPGSRKPFCTEVKDLVREADTVIKIRSFQIIVAQGVTGSFPWSALSFAPMWLELIGFSHGKTAFLMGLFVAASSLGGLFGGKMGDFLSTRLPNSGRIILAQISSASAIPLAAILLLVLPDDPSTAAIHGLILVLLGLFVSWNAPATNNPIFAEIVPEKSRTSVYALDKSFESILSSFAPPIVGILAQHVYGYKPIPEGSSRSTEIATDRENAASLAKALYTSIGLPMAACCFIYSFLYRSYPLDRDRARMEAFIDSEMRELLPESSNRDIEFSQEEDPFANHVNPNLQAR

SEQ ID NO: 105745 - protein, 474 aa, Arabidopsis thaliana
  peptide (1)..(474): Ceres Seq. ID no. 13617904
  misc_feature (1)..(393): Pfam Name: Sugar (and other) transporter Pfam Description: Sugar (and other) transporter
  misc_feature (1)..(474): Homolog of NCBI NO: 15218229 NR Description: transporter - related [Arabidopsis thaliana]
  misc_feature (1)..(460): Homolog of NCBI NO: 15238089 NR Description: transporter - related [Arabidopsis thaliana] unknown protein [Arabidopsis thaliana]
  misc_feature (80)..(460): Homolog of NCBI NO: 11358310 NR Description: hypothetical protein T31P16.180 - Arabidopsis >gi|7960738|emb|CAB92060.1| putative protein [Arabidopsis
  misc_feature (1)..(129): Homolog of NCBI NO: 11358310 NR Description: hypothetical protein T31P16.180 - Arabidopsis >gi|7960738|emb|CAB92060.1| putative protein [Arabidopsis
  misc_feature (1)..(442): Homolog of NCBI NO: 15234530 NR Description: transporter - related [Arabidopsis thaliana]
  misc_feature (1)..(442): Homolog of NCBI NO: 15224194 NR Description: transporter - related [Arabidopsis thaliana]
  misc_feature (142)..(442): Homolog of NCBI NO: 34393426 NR Description: membrane transporter PFB0275w-like protein [Oryza
  misc_feature (1)..(443): Homolog of NCBI NO: 23480447 NR Description: major facilitator superfamily protein [Plasmodium
  misc_feature (204)..(443): Homolog of NCBI NO: 23593282 NR Description: hypothetical protein, conserved [Plasmodium
  misc_feature (1)..(177): Homolog of NCBI NO: 23593282 NR Description: hypothetical protein, conserved [Plasmodium
MERADESLLPGVYKEVGLALHTDPTGLGSLTLLRSMVQAACYPLAAYMAIRHNRAHVIALGAFLWSAATFLVAFSSTFFQVAVSRALNGIGLALVAPAIQSLVADSTDDANRGTAFGWLQLTANIGSILGGLCSVLIAPLTFMGIPGWRVAFHIVGVISVIVGVLVRVFANDPHFVKDGVDVSNQPGSRKPFCTEVKDLVREADTVIKIRSFQIIVAQGVTGSFPWSALSFAPMWLELIGFSHGKTAFLMGLFVAASSLGGLFGGKMGDFLSTRLPNSGRIILAQISSASAIPLAAILLLVLPDDPSTAAIHGLILVLLGLFVSWNAPATNNPIFAEIVPEKSRTSVYALDKSFESILSSFAPPIVGILAQHVYGYKPIPEGSSRSTEIATDRENAASLAKALYTSIGLPMAACCFIYSFLYRSYPLDRDRARMEAFIDSEMRELLPESSNRDIEFSQEEDPFANHVNPNLQAR

SEQ ID NO: 105746 - DNA, 1255 bp, Arabidopsis thaliana
  misc_feature (1)..(1255): Ceres Seq. ID no. 13617905
  misc_feature: MA Experiment ID: 108435 Result: Down-regulated in Transcription
  misc_feature: MA Experiment 108435 PARAMETER Experiment Name: At_stm_Mutants_cDNA_P Parameter: Plant Line Value: wt Landsburg vs stm
  misc_feature: MA Experiment 108435 PARAMETER Experiment Name: At_stm_Mutants_cDNA_P Parameter: Tissue Value: Shoot Apical Meristem Region
  misc_feature: MA Experiment ID: 108462 Result: Up-regulated in Transcription
  misc_feature: MA Experiment 108462 PARAMETER Experiment Name: At_Germinating_Seeds_cDNA_P Parameter: Age (day) Value: 2 vs. 0
  misc_feature: MA Experiment 108462 PARAMETER Experiment Name: At_Germinating_Seeds_cDNA_P Parameter: Tissue Value: Germinating Seeds
  misc_feature: MA Experiment ID: 108463 Result: Up-regulated in Transcription
  misc_feature: MA Experiment 108463 PARAMETER Experiment Name: At_Germinating_Seeds_cDNA_P Parameter: Age (day) Value: 3 vs. 0
  misc_feature: MA Experiment 108463 PARAMETER Experiment Name: At_Germinating_Seeds_cDNA_P Parameter: Tissue Value: Germinating Seeds
  misc_feature: MA Experiment ID: 108464 Result: Up-regulated in Transcription
  misc_feature: MA Experiment 108464 PARAMETER Experiment Name: At_Germinating_Seeds_cDNA_P Parameter: Age (day) Value: 4 vs. 0
  misc_feature: MA Experiment 108464 PARAMETER Experiment Name: At_Germinating_Seeds_cDNA_P Parameter: Tissue Value: Germinating Seeds
  misc_feature: MA Experiment ID: 108501 Result: Down-regulated in Transcription
  misc_feature: MA Experiment 108501 PARAMETER Experiment Name: At_ap2_floral_buds_cDNA_P Parameter: Plant Line Value: ap2 (Ler.)
  misc_feature: MA Experiment 108501 PARAMETER Experiment Name: At_ap2_floral_buds_cDNA_P Parameter: Tissue Value: Closed Flower
  misc_feature: MA Experiment ID: 108573 Result: Up-regulated in Transcription
  misc_feature: MA Experiment 108573 PARAMETER Experiment Name: At_Drought_cDNA_P Parameter: Timepoint (hr) Value: 6
  misc_feature: MA Experiment 108573 PARAMETER Experiment Name: At_Drought_cDNA_P Parameter: Tissue Value: Aerial
  misc_feature: MA Experiment 108573 PARAMETER Experiment Name: At_Drought_cDNA_P Parameter: Treatment Value: Drought vs. No Drought
  misc_feature: MA Experiment ID: 108595 Result: Down-regulated in Transcription
  misc_feature: MA Experiment 108595 PARAMETER Experiment Name: At_Ler-pi_Ovule_cDNA_P Parameter: Plant Line Value: null
  misc_feature: MA Experiment ID: 20000089 Result: Down-regulated in Transcription
  misc_feature: MA Experiment ID: 20000265 Result: Up-regulated in Transcription
  misc_feature: MA Experiment 20000265 PARAMETER Experiment Name: At_Open_Flower_P Parameter: Age (day) Value: 21
  misc_feature: MA Experiment 20000265 PARAMETER Experiment Name: At_Open_Flower_P Parameter: Plant Line Value: WS
  misc_feature: MA Experiment 20000265 PARAMETER Experiment Name: At_Open_Flower_P Parameter: Tissue Value: Closed Flower vs. Whole Plant
  misc_feature: MA Experiment ID: 20000438 Result: Up-regulated in Transcription
  misc_feature: MA Experiment 20000438 PARAMETER Experiment Name: At_Shoots__P Parameter: Age (day) Value: 14
  misc_feature: MA Experiment 20000438 PARAMETER Experiment Name: At_Shoots__P Parameter: Tissue Value: Shoots vs. Whole Plant
  misc_feature: MA Experiment ID: 20000527 Result: Up-regulated in Transcription
  misc_feature: MA Experiment 20000527 PARAMETER Experiment Name: At_10percent_PEG_P Parameter: Age (day) Value: 20
  misc_feature: MA Experiment 20000527 PARAMETER Experiment Name: At_10percent_PEG_P Parameter: Organism Value: A. thaliana
  misc_feature: MA Experiment 20000527 PARAMETER Experiment Name: At_10percent_PEG_P Parameter: Plant Line Value: WS
  misc_feature: MA Experiment 20000527 PARAMETER Experiment Name: At_10percent_PEG_P Parameter: Timepoint (day) Value: 20
  misc_feature: MA Experiment 20000527 PARAMETER Experiment Name: At_10percent_PEG_P Parameter: Tissue Value: Whole Plant
  misc_feature: MA Experiment 20000527 PARAMETER Experiment Name: At_10percent_PEG_P Parameter: Treatment Value: 10percent PEG vs. No Treatment
  misc_feature: MA Experiment ID: 20001557 Result: Down-regulated in Transcription
  misc_feature: MA Experiment 20001557 PARAMETER Experiment Name: At_Drought_Soil_Dry_P Parameter: Age (day) Value: 27
  misc_feature: MA Experiment 20001557 PARAMETER Experiment Name: At_Drought_Soil_Dry_P Parameter: Organism Value: A. thaliana
  misc_feature: MA Experiment 20001557 PARAMETER Experiment Name: At_Drought_Soil_Dry_P Parameter: Plant Line Value: WS
  misc_feature: MA Experiment 20001557 PARAMETER Experiment Name: At_Drought_Soil_Dry_P Parameter: Post Timepoint (hr) Value: 3
  misc_feature: MA Experiment 20001557 PARAMETER Experiment Name: At_Drought_Soil_Dry_P Parameter: Post-Treatment Value: Re-Water vs. No Drought
  misc_feature: MA Experiment 20001557 PARAMETER Experiment Name: At_Drought_Soil_Dry_P Parameter: Timepoint (day) Value: 13
  misc_feature: MA Experiment 20001557 PARAMETER Experiment Name: At_Drought_Soil_Dry_P Parameter: Treatment Value: Drought vs. No Drought
  misc_feature: MA Experiment ID: 20001558 Result: Down-regulated in Transcription
  misc_feature: MA Experiment 20001558 PARAMETER Experiment Name: At_Drought_Soil_Dry_P Parameter: Age (day) Value: 27
  misc_feature: MA Experiment 20001558 PARAMETER Experiment Name: At_Drought_Soil_Dry_P Parameter: Organism Value: A. thaliana
  misc_feature: MA Experiment 20001558 PARAMETER Experiment Name: At_Drought_Soil_Dry_P Parameter: Plant Line Value: WS
  misc_feature: MA Experiment 20001558 PARAMETER Experiment Name: At_Drought_Soil_Dry_P Parameter: Post Timepoint (hr) Value: 6
  misc_feature: MA Experiment 20001558 PARAMETER Experiment Name: At_Drought_Soil_Dry_P Parameter: Post-Treatment Value: Re-Water vs. No Drought
  misc_feature: MA Experiment 20001558 PARAMETER Experiment Name: At_Drought_Soil_Dry_P Parameter: Timepoint (day) Value: 13
  misc_feature: MA Experiment 20001558 PARAMETER Experiment Name: At_Drought_Soil_Dry_P Parameter: Treatment Value: Drought vs. No Drought
  misc_feature: MA Experiment ID: 20001560 Result: Down-regulated in Transcription
  misc_feature: MA Experiment 20001560 PARAMETER Experiment Name: At_Drought_Soil_Dry_P Parameter: Age (day) Value: 28
  misc_feature: MA Experiment 20001560 PARAMETER Experiment Name: At_Drought_Soil_Dry_P Parameter: Organism Value: A. thaliana
  misc_feature: MA Experiment 20001560 PARAMETER Experiment Name: At_Drought_Soil_Dry_P Parameter: Plant Line Value: WS
  misc_feature: MA Experiment 20001560 PARAMETER Experiment Name: At_Drought_Soil_Dry_P Parameter: Post Timepoint (hr) Value: None
  misc_feature: MA Experiment 20001560 PARAMETER Experiment Name: At_Drought_Soil_Dry_P Parameter: Post-Treatment Value: None
  misc_feature: MA Experiment 20001560 PARAMETER Experiment Name: At_Drought_Soil_Dry_P Parameter: Timepoint (day) Value: 14
  misc_feature: MA Experiment 20001560 PARAMETER Experiment Name: At_Drought_Soil_Dry_P Parameter: Treatment Value: Drought vs. No Drought
gatttctttctttgcctttaataaagcttcgtgctcaataggctgccacggaggcgagcctgaaaaatgccgatgacggttgtttccggtcgattctcaacggcgttgctccctacttgcttttccttgtcgcggttgcattccgtcaagtacgccgctcaaagacgggttgttttcgtttccagatcagctcacgcctcttcagcctccgtctccgttgagacaaattcgaattcgaatgtggattttgttatcgagaagaaggataagaacagaggagagaagaagattctagcttgtcccatctgttataactccttagcatggattagtcaacctaatggattaatagaatctgctgcctctggtattcaagtacaatgcaatacatgtaaaaggagttactcgggtaatgagacgcatcttgatttggctgttgctagtggaagcaagagatacagtgaaccgatgcctctttccactgagttatttaggactccactggtctcgtttctctatgagaggggttggcgtcagaatttcatatggggaggttttccaggaccagagaaagagtttgaaatggctaaggcctatctgaagcctgttttgggaggcaatatcattgatgctagttgtggaagtgggatgttctcgaggttattcactagaagtgatctattttctctggttattgctctagattactcagagaatatgctgcgacaatgctatgaactcttaaataaagaagaaaactttcccaacaaagagaaacttgttctagtccgagctgacattgctagactccctttcctttcgggttcagttgacgctgtccatgctggtgctgctctgcattgctggccttcaccatcctcagccgttgctgagataagccgtgttcttagacctggaggagtatttgtggccaccacatttatctatgacggtccattcagttttatccccttcttgaagaatcttcgtcaggaaataatgagatattcaggttctcacattttcctaaatgaacgtgagcttgaagatatctgcaaagcctgtggtctcgttaacttcactcgtgttagaaacgggccatttataatgctatctgcaacaaaacccagctaagctcaccctctttaaagtatatatacttttctgtaaaaaattggtataaagttataaacattataacaacttgagttccatacagtatacctaatttgtaaagctttttgcaaatgttcct

SEQ ID NO: 105747 - protein, 355 aa, Arabidopsis thaliana; identical to SEQ ID NO: 21490
  peptide (1)..(355): Ceres Seq. ID no. 13617906
  misc_feature (1)..(355): Homolog of NCBI NO: 18411840 NR Description: expressed protein [Arabidopsis thaliana] unknown [Arabidopsis thaliana] >gi|28393453|gb|AAO42148.1| protein [Arabidopsis thaliana] >gi|28827348|gb|AAO50518.1|
  misc_feature (1)..(208): Homolog of NCBI NO: 25406543 NR Description: hypothetical protein T11I11.8 [imported] -
  misc_feature (237)..(355): Homolog of NCBI NO: 25406543 NR Description: hypothetical protein T11I11.8 [imported] -
  misc_feature (46)..(354): Homolog of NCBI NO: 30688506 NR Description: expressed protein [Arabidopsis thaliana]
  misc_feature (46)..(275): Homolog of NCBI NO: 7487623 NR Description: hypothetical protein At2g41040 [imported] - thaliana >gi|3402713|gb|AAD12007.1| hypothetical protein
  misc_feature (183)..(295): Homolog of NCBI NO: 20093135 NR Description: menaquinone biosynthesis methyltransferase
  misc_feature (178)..(346): Homolog of NCBI NO: 15896660 NR Description: S-adenosylmethionine-dependent methyltransferase
  misc_feature (168)..(285): Homolog of NCBI NO: 15643087 NR Description: ubiquinone/menaquinone biosynthesis-related [Thermotoga maritima] >gi|7462981|pir||E72392
  misc_feature (183)..(292): Homolog of NCBI NO: 23048342 NR Description: hypothetical protein [Methanosarcina barkeri]
  misc_feature (177)..(301): Homolog of NCBI NO: 15897405 NR Description: Conserved hypothetical protein [Sulfolobus

SEQ ID NO: 105748 - protein, 353 aa, Arabidopsis thaliana; identical to SEQ ID NO: 21491
  peptide (1)..(353): Ceres Seq. ID no. 13617907
  misc_feature (1)..(353): Homolog of NCBI NO: 18411840 NR Description: expressed protein [Arabidopsis thaliana] unknown [Arabidopsis thaliana] >gi|28393453|gb|AAO42148.1| protein [Arabidopsis thaliana] >gi|28827348|gb|AAO50518.1|
  misc_feature (1)..(206): Homolog of NCBI NO: 25406543 NR Description: hypothetical protein T11I11.8 [imported] -
  misc_feature (235)..(353): Homolog of NCBI NO: 25406543 NR Description: hypothetical protein T11I11.8 [imported] -
  misc_feature (44)..(352): Homolog of NCBI NO: 30688506 NR Description: expressed protein [Arabidopsis thaliana]
  misc_feature (44)..(273): Homolog of NCBI NO: 7487623 NR Description: hypothetical protein At2g41040 [imported] - thaliana >gi|3402713|gb|AAD12007.1| hypothetical protein
  misc_feature (181)..(293): Homolog of NCBI NO: 20093135 NR Description: menaquinone biosynthesis methyltransferase
  misc_feature (176)..(344): Homolog of NCBI NO: 15896660 NR Description: S-adenosylmethionine-dependent methyltransferase
  misc_feature (166)..(283): Homolog of NCBI NO: 15643087 NR Description: ubiquinone/menaquinone biosynthesis-related [Thermotoga maritima] >gi|7462981|pir||E72392
  misc_feature (181)..(290): Homolog of NCBI NO: 23048342 NR Description: hypothetical protein [Methanosarcina barkeri]
  misc_feature (175)..(299): Homolog of NCBI NO: 15897405 NR Description: Conserved hypothetical protein [Sulfolobus

SEQ ID NO: 105749 - protein, 221 aa, Arabidopsis thaliana; identical to SEQ ID NO: 21492
  peptide (1)..(221): Ceres Seq. ID no. 13617908
  misc_feature (1)..(221): Homolog of NCBI NO: 18411840 NR Description: expressed protein [Arabidopsis thaliana] unknown [Arabidopsis thaliana] >gi|28393453|gb|AAO42148.1| protein [Arabidopsis thaliana] >gi|28827348|gb|AAO50518.1|
  misc_feature (1)..(74): Homolog of NCBI NO: 25406543 NR Description: hypothetical protein T11I11.8 [imported] -
  misc_feature (103)..(221): Homolog of NCBI NO: 25406543 NR Description: hypothetical protein T11I11.8 [imported] -
  misc_feature (1)..(220): Homolog of NCBI NO: 30688506 NR Description: expressed protein [Arabidopsis thaliana]
  misc_feature (1)..(141): Homolog of NCBI NO: 7487623 NR Description: hypothetical protein At2g41040 [imported] - thaliana >gi|3402713|gb|AAD12007.1| hypothetical protein
  misc_feature (49)..(161): Homolog of NCBI NO: 20093135 NR Description: menaquinone biosynthesis methyltransferase
  misc_feature (44)..(212): Homolog of NCBI NO: 15896660 NR Description: S-adenosylmethionine-dependent methyltransferase
  misc_feature (34)..(151): Homolog of NCBI NO: 15643087 NR Description: ubiquinone/menaquinone biosynthesis-related [Thermotoga maritima] >gi|7462981|pir||E72392
  misc_feature (49)..(158): Homolog of NCBI NO: 23048342 NR Description: hypothetical protein [Methanosarcina barkeri]
  misc_feature (43)..(167): Homolog of NCBI NO: 15897405 NR Description: Conserved hypothetical protein [Sulfolobus

SEQ ID NO: 105750 - DNA, 915 bp, Arabidopsis thaliana
  misc_feature (1)..(915): Ceres Seq. ID no. 13617909
  misc_feature: MA Experiment ID: 20000173 Result: Down-regulated in Transcription
  misc_feature: MA Experiment 20000173 PARAMETER Experiment Name: At_42deg_Heat_P Parameter: Age (day) Value: 14
  misc_feature: MA Experiment 20000173 PARAMETER Experiment Name: At_42deg_Heat_P Parameter: Organism Value: A. thaliana
  misc_feature: MA Experiment 20000173 PARAMETER Experiment Name: At_42deg_Heat_P Parameter: Plant Line Value: WS
  misc_feature: MA Experiment 20000173 PARAMETER Experiment Name: At_42deg_Heat_P Parameter: Temperature (deg C) Value: 42 vs. 22
  misc_feature: MA Experiment 20000173 PARAMETER Experiment Name: At_42deg_Heat_P Parameter: Timepoint (hr) Value: 6
  misc_feature: MA Experiment 20000173 PARAMETER Experiment Name: At_42deg_Heat_P Parameter: Tissue Value: Aerial
  misc_feature: MA Experiment ID: 20000185 Result: Down-regulated in Transcription
  misc_feature: MA Experiment 20000185 PARAMETER Experiment Name: At_Roots__P Parameter: Age (day) Value: 7 vs. 21
  misc_feature: MA Experiment 20000185 PARAMETER Experiment Name: At_Roots__P Parameter: Organism Value: A. thaliana
  misc_feature: MA Experiment 20000185 PARAMETER Experiment Name: At_Roots__P Parameter: Tissue Value: Roots vs. Whole Plant
  misc_feature: MA Experiment ID: 20000234 Result: Up-regulated in Transcription
  misc_feature: MA Experiment 20000234 PARAMETER Experiment Name: At_Siliques_P Parameter: Age (day) Value: 21
  misc_feature: MA Experiment 20000234 PARAMETER Experiment Name: At_Siliques_P Parameter: Organism Value: A. thaliana
  misc_feature: MA Experiment 20000234 PARAMETER Experiment Name: At_Siliques_P Parameter: Plant Line Value: WS
  misc_feature: MA Experiment 20000234 PARAMETER Experiment Name: At_Siliques_P Parameter: Tissue Value: Less Than 5mm Siliques vs. Whole Plant
  misc_feature: MA Experiment ID: 20000264 Result: Up-regulated in Transcription
  misc_feature: MA Experiment 20000264 PARAMETER Experiment Name: At_Open_Flower_P Parameter: Age (day) Value: 21
  misc_feature: MA Experiment 20000264 PARAMETER Experiment Name: At_Open_Flower_P Parameter: Plant Line Value: WS
  misc_feature: MA Experiment 20000264 PARAMETER Experiment Name: At_Open_Flower_P Parameter: Tissue Value: Open Flower vs. Whole Plant
  misc_feature: MA Experiment ID: 20000265 Result: Up-regulated in Transcription
  misc_feature: MA Experiment 20000265 PARAMETER Experiment Name: At_Open_Flower_P Parameter: Age (day) Value: 21
  misc_feature: MA Experiment 20000265 PARAMETER Experiment Name: At_Open_Flower_P Parameter: Plant Line Value: WS
  misc_feature: MA Experiment 20000265 PARAMETER Experiment Name: At_Open_Flower_P Parameter: Tissue Value: Closed Flower vs. Whole Plant
  misc_feature: MA Experiment ID: 20000286 Result: Up-regulated in Transcription
  misc_feature: MA Experiment 20000286 PARAMETER Experiment Name: At_Open_Flower_P Parameter: Age (day) Value: 21
  misc_feature: MA Experiment 20000286 PARAMETER Experiment Name: At_Open_Flower_P Parameter: Plant Line Value: WS
  misc_feature: MA Experiment 20000286 PARAMETER Experiment Name: At_Open_Flower_P Parameter: Tissue Value: Half Open vs. Whole Plant
  misc_feature: MA Experiment ID: 20000438 Result: Up-regulated in Transcription
  misc_feature: MA Experiment 20000438 PARAMETER Experiment Name: At_Shoots__P Parameter: Age (day) Value: 14
  misc_feature: MA Experiment 20000438 PARAMETER Experiment Name: At_Shoots__P Parameter: Tissue Value: Shoots vs. Whole Plant
  misc_feature: MA Experiment ID: 20000439 Result: Down-regulated in Transcription
  misc_feature: MA Experiment 20000439 PARAMETER Experiment Name: At_Roots__P Parameter: Age (day) Value: 14 vs. 21
  misc_feature: MA Experiment 20000439 PARAMETER Experiment Name: At_Roots__P Parameter: Organism Value: A. thaliana
  misc_feature: MA Experiment 20000439 PARAMETER Experiment Name: At_Roots__P Parameter: Tissue Value: Roots vs. Whole Plant
  misc_feature: MA Experiment ID: 20000496 Result: Up-regulated in Transcription
  misc_feature: MA Experiment 20000496 PARAMETER Experiment Name: At_Guard_Cells_P Parameter: Harvest Date Value: 7/19/2002
  misc_feature: MA Experiment 20000496 PARAMETER Experiment Name: At_Guard_Cells_P Parameter: Organism Value: Canola
  misc_feature: MA Experiment 20000496 PARAMETER Experiment Name: At_Guard_Cells_P Parameter: Tissue Value: Guard Cells vs. Leaves
  misc_feature: MA Experiment ID: 20000794 Result: Up-regulated in Transcription
  misc_feature: MA Experiment 20000794 PARAMETER Experiment Name: At_Petals_P Parameter: Age (day) Value: 23-25 days
  misc_feature: MA Experiment 20000794 PARAMETER Experiment Name: At_Petals_P Parameter: Plant Line Value: WS
  misc_feature: MA Experiment 20000794 PARAMETER Experiment Name: At_Petals_P Parameter: Tissue Value: Petals vs. Whole plant
  misc_feature: MA Experiment ID: 20001247 Result: Down-regulated in Transcription
  misc_feature: MA Experiment 20001247 PARAMETER Experiment Name: At_Far-red-induction_P Parameter: Age (day) Value: 7
  misc_feature: MA Experiment 20001247 PARAMETER Experiment Name: At_Far-red-induction_P Parameter: Light Value: Far-red vs. White
  misc_feature: MA Experiment 20001247 PARAMETER Experiment Name: At_Far-red-induction_P Parameter: Organism Value: A. thaliana
  misc_feature: MA Experiment 20001247 PARAMETER Experiment Name: At_Far-red-induction_P Parameter: Plant Line Value: Columbia
  misc_feature: MA Experiment 20001247 PARAMETER Experiment Name: At_Far-red-induction_P Parameter: Timepoint (hr) Value: 1
  misc_feature: MA Experiment 20001247 PARAMETER Experiment Name: At_Far-red-induction_P Parameter: Tissue Value: Whole Plant
  misc_feature: MA Experiment ID: 20001451 Result: Down-regulated in Transcription
  misc_feature: MA Experiment 20001451 PARAMETER Experiment Name: At_Far-red-induction_P Parameter: Age (day) Value: 7
  misc_feature: MA Experiment 20001451 PARAMETER Experiment Name: At_Far-red-induction_P Parameter: Light Value: Far-red vs. White
  misc_feature: MA Experiment 20001451 PARAMETER Experiment Name: At_Far-red-induction_P Parameter: Organism Value: A. thaliana
  misc_feature: MA Experiment 20001451 PARAMETER Experiment Name: At_Far-red-induction_P Parameter: Plant Line Value: Columbia
  misc_feature: MA Experiment 20001451 PARAMETER Experiment Name: At_Far-red-induction_P Parameter: Timepoint (hr) Value: 24
  misc_feature: MA Experiment 20001451 PARAMETER Experiment Name: At_Far-red-induction_P Parameter: Tissue Value: Whole Plant
  misc_feature: MA Experiment ID: 20001557 Result: Up-regulated in Transcription
  misc_feature: MA Experiment 20001557 PARAMETER Experiment Name: At_Drought_Soil_Dry_P Parameter: Age (day) Value: 27
  misc_feature: MA Experiment 20001557 PARAMETER Experiment Name: At_Drought_Soil_Dry_P Parameter: Organism Value: A. thaliana
  misc_feature: MA Experiment 20001557 PARAMETER Experiment Name: At_Drought_Soil_Dry_P Parameter: Plant Line Value: WS
  misc_feature: MA Experiment 20001557 PARAMETER Experiment Name: At_Drought_Soil_Dry_P Parameter: Post Timepoint (hr) Value: 3
  misc_feature: MA Experiment 20001557 PARAMETER Experiment Name: At_Drought_Soil_Dry_P Parameter: Post-Treatment Value: Re-Water vs. No Drought
  misc_feature: MA Experiment 20001557 PARAMETER Experiment Name: At_Drought_Soil_Dry_P Parameter: Timepoint (day) Value: 13
  misc_feature: MA Experiment 20001557 PARAMETER Experiment Name: At_Drought_Soil_Dry_P Parameter: Treatment Value: Drought vs. No Drought
  misc_feature: MA Experiment ID: 20001906 Result: Down-regulated in Transcription
  misc_feature: MA Experiment 20001906 PARAMETER Experiment Name: At_Drought_Reproduction_P Parameter: Age (day) Value: 35
  misc_feature: MA Experiment 20001906 PARAMETER Experiment Name: At_Drought_Reproduction_P Parameter: Organism Value: A. thaliana
  misc_feature: MA Experiment 20001906 PARAMETER Experiment Name: At_Drought_Reproduction_P Parameter: Plant Line Value: WS
  misc_feature: MA Experiment 20001906 PARAMETER Experiment Name: At_Drought_Reproduction_P Parameter: Timepoint (day) Value: 5
  misc_feature: MA Experiment 20001906 PARAMETER Experiment Name: At_Drought_Reproduction_P Parameter: Tissue Value: Siliques
  misc_feature: MA Experiment 20001906 PARAMETER Experiment Name: At_Drought_Reproduction_P Parameter: Treatment Value: Drought vs. No Drought
  misc_feature: MA Experiment ID: 20001911 Result: Down-regulated in Transcription
  misc_feature: MA Experiment 20001911 PARAMETER Experiment Name: At_Drought_Reproduction_P Parameter: Age (day) Value: 40
  misc_feature: MA Experiment 20001911 PARAMETER Experiment Name: At_Drought_Reproduction_P Parameter: Organism Value: A. thaliana
  misc_feature: MA Experiment 20001911 PARAMETER Experiment Name: At_Drought_Reproduction_P Parameter: Plant Line Value: WS
  misc_feature: MA Experiment 20001911 PARAMETER Experiment Name: At_Drought_Reproduction_P Parameter: Timepoint (day) Value: 10
  misc_feature: MA Experiment 20001911 PARAMETER Experiment Name: At_Drought_Reproduction_P Parameter: Tissue Value: Flowers
  misc_feature: MA Experiment 20001911 PARAMETER Experiment Name: At_Drought_Reproduction_P Parameter: Treatment Value: Drought vs. No Drought
aagtctatctgctcatttcctcacacgatcaaaaagatagttcaaatttttctttaaagcttaagaaaccactcagtggaaaccaagactaattaaggctaatggtttctcgacaagaaggaaccctctactctagaaagagggatttcacagtctgtggagaagagtttcacaattcattcaagaagagcaaacaagaagatcaatcacagagcactctgttcaatgaacgaccaaaatcggagagtatgagatcaattacctttgattttgaacttcatctccacactcctctaccatcagattggcaaactaagggatattcaagaacatctgatgagcatagggcatatcccaaagatccagtgatttttggacaacctaagatgagcctagaccttgagctgaacctttcaccttcaggttcaccttcacgaaccacaacgaagaaatatgaatcctcctcaattcacaatgaaacagtatcatcatcaaagattaaagttttgacgaacacaagtaagaagagcataattgggacaggactaagtcgatcaccatcctggctagcgtttgaaggtggtgatgataacgatgttgatcacaaggggcaagagatggtaacaacagtttgcatgaaatgccacatgctggttatgttgtgtacatcaactcctgtttgtcccaactgcaagttcatgcacccacacgatcacagctctacaaaactgtttaaaccatcaaatttgcttaggcttctatgctaggctctttcaaggttactgaatctataaaatttgtacggcagataataagccaagagactagatatggacaaagttatgtatatactaaaagtaccagaaagtttgtattaattctctgcttctatgaacgatcatgctttagatctct

SEQ ID NO: 105751 - protein, 221 aa, Arabidopsis thaliana
  peptide (1)..(221): Ceres Seq. ID no. 13617910
  misc_feature (1)..(221): Homolog of NCBI NO: 30699311 NR Description: expressed protein [Arabidopsis thaliana] unknown protein [Arabidopsis thaliana]
  misc_feature (81)..(221): Homolog of NCBI NO: 25372722 NR Description: unknown protein T11I11.11 [imported] -
  misc_feature (1)..(72): Homolog of NCBI NO: 25372722 NR Description: unknown protein T11I11.11 [imported] -
  misc_feature (91)..(221): Homolog of NCBI NO: 30687784 NR Description: expressed protein [Arabidopsis thaliana]
  misc_feature (96)..(213): Homolog of NCBI NO: 15236641 NR Description: hypothetical protein [Arabidopsis thaliana]
MVSRQEGTLYSRKRDFTVCGEEFHNSFKKSKQEDQSQSTLFNERPKSESMRSITFDFELHLHTPLPSDWQTKGYSRTSDEHRAYPKDPVIFGQPKMSLDLELNLSPSGSPSRTTTKKYESSSIHNETVSSSKIKVLTNTSKKSIIGTGLSRSPSWLAFEGGDDNDVDHKGQEMVTTVCMKCHMLVMLCTSTPVCPNCKFMHPHDHSSTKLFKPSNLLRLLC

SEQ ID NO: 105752 - protein, 172 aa, Arabidopsis thaliana
  peptide (1)..(172): Ceres Seq. ID no. 13617911
  misc_feature (1)..(172): Homolog of NCBI NO: 30699311 NR Description: expressed protein [Arabidopsis thaliana] unknown protein [Arabidopsis thaliana]
  misc_feature (32)..(172): Homolog of NCBI NO: 25372722 NR Description: unknown protein T11I11.11 [imported] -
  misc_feature (1)..(23): Homolog of NCBI NO: 25372722 NR Description: unknown protein T11I11.11 [imported] -
  misc_feature (42)..(172): Homolog of NCBI NO: 30687784 NR Description: expressed protein [Arabidopsis thaliana]
  misc_feature (47)..(164): Homolog of NCBI NO: 15236641 NR Description: hypothetical protein [Arabidopsis thaliana]
MRSITFDFELHLHTPLPSDWQTKGYSRTSDEHRAYPKDPVIFGQPKMSLDLELNLSPSGSPSRTTTKKYESSSIHNETVSSSKIKVLTNTSKKSIIGTGLSRSPSWLAFEGGDDNDVDHKGQEMVTTVCMKCHMLVMLCTSTPVCPNCKFMHPHDHSSTKLFKPSNLLRLLC

SEQ ID NO: 105753 - protein, 126 aa, Arabidopsis thaliana; identical to SEQ ID NO: 70719
  peptide (1)..(126): Ceres Seq. ID no. 13617912
  misc_feature (1)..(126): Homolog of NCBI NO: 30699311 NR Description: expressed protein [Arabidopsis thaliana] unknown protein [Arabidopsis thaliana]
  misc_feature (1)..(126): Homolog of NCBI NO: 25372722 NR Description: unknown protein T11I11.11 [imported] -
  misc_feature (1)..(126): Homolog of NCBI NO: 30687784 NR Description: expressed protein [Arabidopsis thaliana]
  misc_feature (1)..(118): Homolog of NCBI NO: 15236641 NR Description: hypothetical protein [Arabidopsis thaliana]

SEQ ID NO: 105754 - DNA, 1480 bp, Arabidopsis thaliana
  misc_feature (1)..(1480): Ceres Seq. ID no. 13617913
  misc_feature: MA Experiment ID: 108462 Result: Down-regulated in Transcription
  misc_feature: MA Experiment 108462 PARAMETER Experiment Name: At_Germinating_Seeds_cDNA_P Parameter: Age (day) Value: 2 vs. 0
  misc_feature: MA Experiment 108462 PARAMETER Experiment Name: At_Germinating_Seeds_cDNA_P Parameter: Tissue Value: Germinating Seeds
  misc_feature: MA Experiment ID: 108463 Result: Down-regulated in Transcription
  misc_feature: MA Experiment 108463 PARAMETER Experiment Name: At_Germinating_Seeds_cDNA_P Parameter: Age (day) Value: 3 vs. 0
  misc_feature: MA Experiment 108463 PARAMETER Experiment Name: At_Germinating_Seeds_cDNA_P Parameter: Tissue Value: Germinating Seeds
  misc_feature: MA Experiment ID: 108464 Result: Down-regulated in Transcription
  misc_feature: MA Experiment 108464 PARAMETER Experiment Name: At_Germinating_Seeds_cDNA_P Parameter: Age (day) Value: 4 vs. 0
  misc_feature: MA Experiment 108464 PARAMETER Experiment Name: At_Germinating_Seeds_cDNA_P Parameter: Tissue Value: Germinating Seeds
  misc_feature: MA Experiment ID: 20000069 Result: Down-regulated in Transcription
  misc_feature: MA Experiment 20000069 PARAMETER Experiment Name: At_100uM_ABA_Mutants_cDNA_P Parameter: Plant Line Value: CS23
  misc_feature: MA Experiment 20000069 PARAMETER Experiment Name: At_100uM_ABA_Mutants_cDNA_P Parameter: Timepoint (hr) Value: 6
  misc_feature: MA Experiment 20000069 PARAMETER Experiment Name: At_100uM_ABA_Mutants_cDNA_P Parameter: Tissue Value: Aerial
  misc_feature: MA Experiment 20000069 PARAMETER Experiment Name: At_100uM_ABA_Mutants_cDNA_P Parameter: Treatment Value: 100uM ABA vs. No Treatment
  misc_feature: MA Experiment ID: 20000070 Result: Down-regulated in Transcription
  misc_feature: MA Experiment 20000070 PARAMETER Experiment Name: At_100uM_ABA_Mutants_cDNA_P Parameter: Plant Line Value: CS24
  misc_feature: MA Experiment 20000070 PARAMETER Experiment Name: At_100uM_ABA_Mutants_cDNA_P Parameter: Timepoint (hr) Value: 6
  misc_feature: MA Experiment 20000070 PARAMETER Experiment Name: At_100uM_ABA_Mutants_cDNA_P Parameter: Tissue Value: Aerial
  misc_feature: MA Experiment 20000070 PARAMETER Experiment Name: At_100uM_ABA_Mutants_cDNA_P Parameter: Treatment Value: 100uM ABA vs. No Treatment
  misc_feature: MA Experiment ID: 20000071 Result: Down-regulated in Transcription
  misc_feature: MA Experiment 20000071 PARAMETER Experiment Name: At_100uM_ABA_Mutants_cDNA_P Parameter: Plant Line Value: CS8104
  misc_feature: MA Experiment 20000071 PARAMETER Experiment Name: At_100uM_ABA_Mutants_cDNA_P Parameter: Timepoint (hr) Value: 6
  misc_feature: MA Experiment 20000071 PARAMETER Experiment Name: At_100uM_ABA_Mutants_cDNA_P Parameter: Tissue Value: Aerial
  misc_feature: MA Experiment 20000071 PARAMETER Experiment Name: At_100uM_ABA_Mutants_cDNA_P Parameter: Treatment Value: 100uM ABA vs. No Treatment
  misc_feature: MA Experiment ID: 20000087 Result: Down-regulated in Transcription
  misc_feature: MA Experiment 20000087 PARAMETER Experiment Name: At_100uM_ABA_Mutants_cDNA_P Parameter: Plant Line Value: WS
  misc_feature: MA Experiment 20000087 PARAMETER Experiment Name: At_100uM_ABA_Mutants_cDNA_P Parameter: Timepoint (hr) Value: 6
  misc_feature: MA Experiment 20000087 PARAMETER Experiment Name: At_100uM_ABA_Mutants_cDNA_P Parameter: Tissue Value: Aerial
  misc_feature: MA Experiment 20000087 PARAMETER Experiment Name: At_100uM_ABA_Mutants_cDNA_P Parameter: Treatment Value: 100uM ABA vs. No Treatment
  misc_feature: MA Experiment ID: 20000089 Result: Down-regulated in Transcription
  misc_feature: MA Experiment ID: 20000090 Result: Down-regulated in Transcription
  misc_feature: MA Experiment ID: 20000093 Result: Up-regulated in Transcription
  misc_feature: MA Experiment 20000093 PARAMETER Experiment Name: At_42deg_Heat_cDNA_P Parameter: Temperature (deg C) Value: 42 vs. 22
  misc_feature: MA Experiment 20000093 PARAMETER Experiment Name: At_42deg_Heat_cDNA_P Parameter: Timepoint (hr) Value: 0.5
  misc_feature: MA Experiment 20000093 PARAMETER Experiment Name: At_42deg_Heat_cDNA_P Parameter: Tissue Value: Aerial
  misc_feature: MA Experiment ID: 20000113 Result: Up-regulated in Transcription
  misc_feature: MA Experiment 20000113 PARAMETER Experiment Name: At_42deg_Heat_cDNA_P Parameter: Temperature (deg C) Value: 42 vs. 22
  misc_feature: MA Experiment 20000113 PARAMETER Experiment Name: At_42deg_Heat_cDNA_P Parameter: Timepoint (hr) Value: 8
  misc_feature: MA Experiment 20000113 PARAMETER Experiment Name: At_42deg_Heat_cDNA_P Parameter: Tissue Value: Aerial
  misc_feature: MA Experiment ID: 20000117 Result: Down-regulated in Transcription
  misc_feature: MA Experiment 20000117 PARAMETER Experiment Name: At_100uM_ABA_Mutants_cDNA_P Parameter: Plant Line Value: Columbia
  misc_feature: MA Experiment 20000117 PARAMETER Experiment Name: At_100uM_ABA_Mutants_cDNA_P Parameter: Timepoint (hr) Value: 6
  misc_feature: MA Experiment 20000117 PARAMETER Experiment Name: At_100uM_ABA_Mutants_cDNA_P Parameter: Tissue Value: Aerial
  misc_feature: MA Experiment 20000117 PARAMETER Experiment Name: At_100uM_ABA_Mutants_cDNA_P Parameter: Treatment Value: 100uM ABA vs. No Treatment
  misc_feature: MA Experiment ID: 20000184 Result: Down-regulated in Transcription
  misc_feature: MA Experiment 20000184 PARAMETER Experiment Name: At_Shoots__P Parameter: Age (day) Value: 7
  misc_feature: MA Experiment 20000184 PARAMETER Experiment Name: At_Shoots__P Parameter: Tissue Value: Shoots vs. Whole Plant
  misc_feature: MA Experiment ID: 20000213 Result: Down-regulated in Transcription
  misc_feature: MA Experiment 20000213 PARAMETER Experiment Name: At_4deg_Cold_P Parameter: Timepoint (hr) Value: 2
  misc_feature: MA Experiment ID: 20000227 Result: Down-regulated in Transcription
  misc_feature: MA Experiment 20000227 PARAMETER Experiment Name: At_Root-Tips-vs-Tops_P Parameter: Tissue Value: Root Tips vs. Root Tops
  misc_feature: MA Experiment ID: 20000234 Result: Down-regulated in Transcription
  misc_feature: MA Experiment 20000234 PARAMETER Experiment Name: At_Siliques_P Parameter: Age (day) Value: 21
  misc_feature: MA Experiment 20000234 PARAMETER Experiment Name: At_Siliques_P Parameter: Organism Value: A. thaliana
  misc_feature: MA Experiment 20000234 PARAMETER Experiment Name: At_Siliques_P Parameter: Plant Line Value: WS
  misc_feature: MA Experiment 20000234 PARAMETER Experiment Name: At_Siliques_P Parameter: Tissue Value: Less Than 5mm Siliques vs. Whole Plant
  misc_feature: MA Experiment ID: 20000235 Result: Down-regulated in Transcription
  misc_feature: MA Experiment 20000235 PARAMETER Experiment Name: At_Siliques_P Parameter: Age (day) Value: 21
  misc_feature: MA Experiment 20000235 PARAMETER Experiment Name: At_Siliques_P Parameter: Organism Value: A. thaliana
  misc_feature: MA Experiment 20000235 PARAMETER Experiment Name: At_Siliques_P Parameter: Plant Line Value: WS
  misc_feature: MA Experiment 20000235 PARAMETER Experiment Name: At_Siliques_P Parameter: Tissue Value: 5-10mm Siliques vs. Whole Plant
  misc_feature: MA Experiment ID: 20000265 Result: Down-regulated in Transcription
  misc_feature: MA Experiment 20000265 PARAMETER Experiment Name: At_Open_Flower_P Parameter: Age (day) Value: 21
  misc_feature: MA Experiment 20000265 PARAMETER Experiment Name: At_Open_Flower_P Parameter: Plant Line Value: WS
  misc_feature: MA Experiment 20000265 PARAMETER Experiment Name: At_Open_Flower_P Parameter: Tissue Value: Closed Flower vs. Whole Plant
  misc_feature: MA Experiment ID: 20000269 Result: Down-regulated in Transcription
  misc_feature: MA Experiment 20000269 PARAMETER Experiment Name: At_1mM_KNO3_L-vs-H_Roots_P Parameter: Age (day) Value: 7,10,12
  misc_feature: MA Experiment 20000269 PARAMETER Experiment Name: At_1mM_KNO3_L-vs-H_Roots_P Parameter: Organism Value: A. thaliana
  misc_feature: MA Experiment 20000269 PARAMETER Experiment Name: At_1mM_KNO3_L-vs-H_Roots_P Parameter: Plant Line Value: WS
  misc_feature: MA Experiment 20000269 PARAMETER Experiment Name: At_1mM_KNO3_L-vs-H_Roots_P Parameter: Timepoint (day) Value: 7,10,12
  misc_feature: MA Experiment 20000269 PARAMETER Experiment Name: At_1mM_KNO3_L-vs-H_Roots_P Parameter: Tissue Value: Roots
  misc_feature: MA Experiment 20000269 PARAMETER Experiment Name: At_1mM_KNO3_L-vs-H_Roots_P Parameter: Treatment Value: 1mM KNO3 vs. 50mM KNO3
  misc_feature: MA Experiment ID: 20000286 Result: Down-regulated in Transcription
  misc_feature: MA Experiment 20000286 PARAMETER Experiment Name: At_Open_Flower_P Parameter: Age (day) Value: 21
  misc_feature: MA Experiment 20000286 PARAMETER Experiment Name: At_Open_Flower_P Parameter: Plant Line Value: WS
  misc_feature: MA Experiment 20000286 PARAMETER Experiment Name: At_Open_Flower_P Parameter: Tissue Value: Half Open vs. Whole Plant
  misc_feature: MA Experiment ID: 20000437 Result: Down-regulated in Transcription
  misc_feature: MA Experiment 20000437 PARAMETER Experiment Name: At_Drought_P Parameter: Age (day) Value: 8
  misc_feature: MA Experiment 20000437 PARAMETER Experiment Name: At_Drought_P Parameter: Organism Value: A. thaliana
  misc_feature: MA Experiment 20000437 PARAMETER Experiment Name: At_Drought_P Parameter: Plant Line Value: WS
  misc_feature: MA Experiment 20000437 PARAMETER Experiment Name: At_Drought_P Parameter: Timepoint (hr) Value: 24
  misc_feature: MA Experiment 20000437 PARAMETER Experiment Name: At_Drought_P Parameter: Tissue Value: Whole Plant
  misc_feature: MA Experiment 20000437 PARAMETER Experiment Name: At_Drought_P Parameter: Treatment Value: Drought vs. No Drought
  misc_feature: MA Experiment ID: 20000439 Result: Up-regulated in Transcription
  misc_feature: MA Experiment 20000439 PARAMETER Experiment Name: At_Roots__P Parameter: Age (day) Value: 14 vs. 21
  misc_feature: MA Experiment 20000439 PARAMETER Experiment Name: At_Roots__P Parameter: Organism Value: A. thaliana
  misc_feature: MA Experiment 20000439 PARAMETER Experiment Name: At_Roots__P Parameter: Tissue Value: Roots vs. Whole Plant
  misc_feature: MA Experiment ID: 20000441 Result: Up-regulated in Transcription
  misc_feature: MA Experiment 20000441 PARAMETER Experiment Name: At_1uM_BR-BRZ__P Parameter: Tissue Value: Shoot Apices
  misc_feature: MA Experiment 20000441 PARAMETER Experiment Name: At_1uM_BR-BRZ__P Parameter: Treatment Value: 1uM BR vs. No Treatment
  misc_feature: MA Experiment ID: 20000443 Result: Up-regulated in Transcription
  misc_feature: MA Experiment 20000443 PARAMETER Experiment Name: At_1uM_BR-BRZ__P Parameter: Tissue Value: Shoot Apices
  misc_feature: MA Experiment 20000443 PARAMETER Experiment Name: At_1uM_BR-BRZ__P Parameter: Treatment Value: 1uM BRZ vs. No Treatment
  misc_feature: MA Experiment ID: 20000451 Result: Down-regulated in Transcription
  misc_feature: MA Experiment 20000451 PARAMETER Experiment Name: At_CS6879_Shoots-Roots_P Parameter: Age (day) Value: 14
  misc_feature: MA Experiment 20000451 PARAMETER Experiment Name: At_CS6879_Shoots-Roots_P Parameter: Organism Value: A. thaliana
  misc_feature: MA Experiment 20000451 PARAMETER Experiment Name: At_CS6879_Shoots-Roots_P Parameter: Plant Line Value: CS6879 vs. WS
  misc_feature: MA Experiment 20000451 PARAMETER Experiment Name: At_CS6879_Shoots-Roots_P Parameter: Tissue Value: Roots
  misc_feature: MA Experiment ID: 20000794 Result: Up-regulated in Transcription
  misc_feature: MA Experiment 20000794 PARAMETER Experiment Name: At_Petals_P Parameter: Age (day) Value: 23-25 days
  misc_feature: MA Experiment 20000794 PARAMETER Experiment Name: At_Petals_P Parameter: Plant Line Value: WS
  misc_feature: MA Experiment 20000794 PARAMETER Experiment Name: At_Petals_P Parameter: Tissue Value: Petals vs. Whole plant
  misc_feature: MA Experiment ID: 20001248 Result: Down-regulated in Transcription
  misc_feature: MA Experiment 20001248 PARAMETER Experiment Name: At_Far-red-induction_P Parameter: Age (day) Value: 7
  misc_feature: MA Experiment 20001248 PARAMETER Experiment Name: At_Far-red-induction_P Parameter: Light Value: Far-red vs. White
  misc_feature: MA Experiment 20001248 PARAMETER Experiment Name: At_Far-red-induction_P Parameter: Organism Value: A. thaliana
  misc_feature: MA Experiment 20001248 PARAMETER Experiment Name: At_Far-red-induction_P Parameter: Plant Line Value: Columbia
  misc_feature: MA Experiment 20001248 PARAMETER Experiment Name: At_Far-red-induction_P Parameter: Timepoint (hr) Value: 4
  misc_feature: MA Experiment 20001248 PARAMETER Experiment Name: At_Far-red-induction_P Parameter: Tissue Value: Whole Plant
  misc_feature: MA Experiment ID: 20001451 Result: Up-regulated in Transcription
  misc_feature: MA Experiment 20001451 PARAMETER Experiment Name: At_Far-red-induction_P Parameter: Age (day) Value: 7
  misc_feature: MA Experiment 20001451 PARAMETER Experiment Name: At_Far-red-induction_P Parameter: Light Value: Far-red vs. White
  misc_feature: MA Experiment 20001451 PARAMETER Experiment Name: At_Far-red-induction_P Parameter: Organism Value: A. thaliana
  misc_feature: MA Experiment 20001451 PARAMETER Experiment Name: At_Far-red-induction_P Parameter: Plant Line Value: Columbia
  misc_feature: MA Experiment 20001451 PARAMETER Experiment Name: At_Far-red-induction_P Parameter: Timepoint (hr) Value: 24
  misc_feature: MA Experiment 20001451 PARAMETER Experiment Name: At_Far-red-induction_P Parameter: Tissue Value: Whole Plant
  misc_feature: MA Experiment ID: 20001458 Result: Down-regulated in Transcription
  misc_feature: MA Experiment 20001458 PARAMETER Experiment Name: At_50mM_NH4NO3_L-to-H_P Parameter: Age (day) Value: Undefined
  misc_feature: MA Experiment 20001458 PARAMETER Experiment Name: At_50mM_NH4NO3_L-to-H_P Parameter: Organism Value: Undefined
  misc_feature: MA Experiment 20001458 PARAMETER Experiment Name: At_50mM_NH4NO3_L-to-H_P Parameter: Plant Line Value: Undefined
  misc_feature: MA Experiment 20001458 PARAMETER Experiment Name: At_50mM_NH4NO3_L-to-H_P Parameter: Timepoint (hr) Value: 2
  misc_feature: MA Experiment 20001458 PARAMETER Experiment Name: At_50mM_NH4NO3_L-to-H_P Parameter: Tissue Value: Siliques
  misc_feature: MA Experiment 20001458 PARAMETER Experiment Name: At_50mM_NH4NO3_L-to-H_P Parameter: Treatment Value: 50mM NH4NO3 vs. 100mM Manitol
  misc_feature: MA Experiment ID: 20001555 Result: Down-regulated in Transcription
  misc_feature: MA Experiment 20001555 PARAMETER Experiment Name: At_Drought_Soil_Dry_P Parameter: Age (day) Value: 24
  misc_feature: MA Experiment 20001555 PARAMETER Experiment Name: At_Drought_Soil_Dry_P Parameter: Organism Value: A. thaliana
  misc_feature: MA Experiment 20001555 PARAMETER Experiment Name: At_Drought_Soil_Dry_P Parameter: Plant Line Value: WS
  misc_feature: MA Experiment 20001555 PARAMETER Experiment Name: At_Drought_Soil_Dry_P Parameter: Post Timepoint (hr) Value: None
  misc_feature: MA Experiment 20001555 PARAMETER Experiment Name: At_Drought_Soil_Dry_P Parameter: Post-Treatment Value: None
  misc_feature: MA Experiment 20001555 PARAMETER Experiment Name: At_Drought_Soil_Dry_P Parameter: Timepoint (day) Value: 10
  misc_feature: MA Experiment 20001555 PARAMETER Experiment Name: At_Drought_Soil_Dry_P Parameter: Treatment Value: Drought vs. No Drought
  misc_feature: MA Experiment ID: 20001556 Result: Down-regulated in Transcription
  misc_feature: MA Experiment 20001556 PARAMETER Experiment Name: At_Drought_Soil_Dry_P Parameter: Age (day) Value: 26
  misc_feature: MA Experiment 20001556 PARAMETER Experiment Name: At_Drought_Soil_Dry_P Parameter: Organism Value: A. thaliana
  misc_feature: MA Experiment 20001556 PARAMETER Experiment Name: At_Drought_Soil_Dry_P Parameter: Plant Line Value: WS
  misc_feature: MA Experiment 20001556 PARAMETER Experiment Name: At_Drought_Soil_Dry_P Parameter: Post Timepoint (hr) Value: None
  misc_feature: MA Experiment 20001556 PARAMETER Experiment Name: At_Drought_Soil_Dry_P Parameter: Post-Treatment Value: None
  misc_feature: MA Experiment 20001556 PARAMETER Experiment Name: At_Drought_Soil_Dry_P Parameter: Timepoint (day) Value: 12
  misc_feature: MA Experiment 20001556 PARAMETER Experiment Name: At_Drought_Soil_Dry_P Parameter: Treatment Value: Drought vs. No Drought
  misc_feature: MA Experiment ID: 20001557 Result: Down-regulated in Transcription
  misc_feature: MA Experiment 20001557 PARAMETER Experiment Name: At_Drought_Soil_Dry_P Parameter: Age (day) Value: 27
  misc_feature: MA Experiment 20001557 PARAMETER Experiment Name: At_Drought_Soil_Dry_P Parameter: Organism Value: A. thaliana
  misc_feature: MA Experiment 20001557 PARAMETER Experiment Name: At_Drought_Soil_Dry_P Parameter: Plant Line Value: WS
  misc_feature: MA Experiment 20001557 PARAMETER Experiment Name: At_Drought_Soil_Dry_P Parameter: Post Timepoint (hr) Value: 3
  misc_feature: MA Experiment 20001557 PARAMETER Experiment Name: At_Drought_Soil_Dry_P Parameter: Post-Treatment Value: Re-Water vs. No Drought
  misc_feature: MA Experiment 20001557 PARAMETER Experiment Name: At_Drought_Soil_Dry_P Parameter: Timepoint (day) Value: 13
  misc_feature: MA Experiment 20001557 PARAMETER Experiment Name: At_Drought_Soil_Dry_P Parameter: Treatment Value: Drought vs. No Drought
  misc_feature: MA Experiment ID: 20001560 Result: Down-regulated in Transcription
  misc_feature: MA Experiment 20001560 PARAMETER Experiment Name: At_Drought_Soil_Dry_P Parameter: Age (day) Value: 28
  misc_feature: MA Experiment 20001560 PARAMETER Experiment Name: At_Drought_Soil_Dry_P Parameter: Organism Value: A. thaliana
  misc_feature: MA Experiment 20001560 PARAMETER Experiment Name: At_Drought_Soil_Dry_P Parameter: Plant Line Value: WS
  misc_feature: MA Experiment 20001560 PARAMETER Experiment Name: At_Drought_Soil_Dry_P Parameter: Post Timepoint (hr) Value: None
  misc_feature: MA Experiment 20001560 PARAMETER Experiment Name: At_Drought_Soil_Dry_P Parameter: Post-Treatment Value: None
  misc_feature: MA Experiment 20001560 PARAMETER Experiment Name: At_Drought_Soil_Dry_P Parameter: Timepoint (day) Value: 14
  misc_feature: MA Experiment 20001560 PARAMETER Experiment Name: At_Drought_Soil_Dry_P Parameter: Treatment Value: Drought vs. No Drought
  misc_feature: MA Experiment ID: 20001911 Result: Up-regulated in Transcription
  misc_feature: MA Experiment 20001911 PARAMETER Experiment Name: At_Drought_Reproduction_P Parameter: Age (day) Value: 40
  misc_feature: MA Experiment 20001911 PARAMETER Experiment Name: At_Drought_Reproduction_P Parameter: Organism Value: A. thaliana
  misc_feature: MA Experiment 20001911 PARAMETER Experiment Name: At_Drought_Reproduction_P Parameter: Plant Line Value: WS
  misc_feature: MA Experiment 20001911 PARAMETER Experiment Name: At_Drought_Reproduction_P Parameter: Timepoint (day) Value: 10
  misc_feature: MA Experiment 20001911 PARAMETER Experiment Name: At_Drought_Reproduction_P Parameter: Tissue Value: Flowers
  misc_feature: MA Experiment 20001911 PARAMETER Experiment Name: At_Drought_Reproduction_P Parameter: Treatment Value: Drought vs. No Drought
atctcttcaaataattttattggttcttctgtcttatgaacaagaacagaggagctctgtcttgtttcctcttatttacgtactaccaatcctcatacacacacatgtgtctttggtttcatctccgaaaagtgataatctgttttatttgatttgacttttgagagaacagagcatatataaagaaacagagcagctctgttttttttttttgtgttgcagtttgtagaatcatggagaggtacgaaatagtgaaggatattgggtctggtaacttcggagtagcaaagcttgttcgtgacaaattttccaaagagcttttcgctgttaagttcatcgagcgaggccaaaagattgatgaacatgtacaaagagaaatcatgaaccataggtcgctgatccatcccaatataataagattcaaggaggttttattgacggcaacacatttggcgttagtaatggaatacgccgccggaggagaactgttcggaagaatctgcagcgccggaagattcagtgaagacgaggcaaggtttttctttcagcagcttatatcaggagttaattactgtcacagtcttcaaatatgccatagagatttaaagctagagaacacgttacttgatggaagcgaagcgccacgtgtaaagatttgcgactttggatattcaaaatcaggagttcttcattcgcaaccaaagacaacagtaggaacacctgcttacattgcacctgaagtgctctccacgaaagagtatgacggcaaaatcgctgatgtttggtcttgtggagtcactttgtatgttatgcttgttggtgcttatccttttgaagatccttctgatcctaaagattttcggaagacgatcggtcggattctcaaagctcagtatgctattcctgattatgttcgagtttcggatgaatgcagacatcttctctctcggatattcgttgccaaccctgaaaagagaataacaatagaggagataaagaatcattcttggtttctcaagaacttgccggtagagatgtatgaaggatcattgatgatgaatggtccatcgactcagacagtagaagagatagtgtggatcattgaagaagctcggaaacctatcaccgtagctactggactcgcaggtgctggtggctctggtggaagcagtaatggtgccattggaagtagcagtatggatctcgatgacttggacacagatttcgacgacatcgataccgctgatctcctttcccctttgtgaacaattgtatcaaaaaccaaagatttcatgtttctgaagcctgctgatactactacacattgatgatacacagacgtgaatataattgttcactaaaatgtataattagagtgtgaaaacatttgtctttgattacaaaaatgttctgttagacatttttatacatatgcatggaagatgtatatataaacagaaacataatatctagtcacgtt

SEQ ID NO: 105755 - protein, 343 aa, Arabidopsis thaliana; identical to SEQ ID NO: 38544
  peptide (1)..(343): Ceres Seq. ID no. 13617914
  misc_feature (4)..(260): Pfam Name: Protein kinase domain Pfam Description: Protein kinase domain
  misc_feature (1)..(343): Homolog of NCBI NO: 15218270 NR Description: serine/threonine protein kinase, putative thaliana] >gi|8052538|gb|AAF71802.1|AC013430_11 F3F9.17 thaliana] >gi|15724160|gb|AAL06472.1|AF411782_1 At1g78290/F3F9_17
  misc_feature (1)..(343): Homolog of NCBI NO: 21618139 NR Description: serine-threonine protein kinase, putative
  misc_feature (1)..(338): Homolog of NCBI NO: 29164823 NR Description: abcisic acid-inducible protein kinanase [Oryza
  misc_feature (1)..(338): Homolog of NCBI NO: 34906840 NR Description: putative protein kinase HvPKABA1(Abcisic
  misc_feature (11)..(343): Homolog of NCBI NO: 11138330 NR Description: putative serine/threonine kinase GDBrPK [Vitis
  misc_feature (1)..(343): Homolog of NCBI NO: 14588571 NR Description: protein kinase HvPKABA1 [Hordeum vulgare subsp. >gi|14588573|dbj|BAB61736.1| protein kinase HvPKABA1 [Hordeum
  misc_feature (1)..(339): Homolog of NCBI NO: 2055374 NR Description: serine-threonine protein kinase [Triticum
  misc_feature (1)..(343): Homolog of NCBI NO: 481002 NR Description: protein kinase MCPK9 (EC 2.7.1.-) - common ice >gi|407057|emb|CAA81443.1| protein kinase [Mesembryanthemum
  misc_feature (11)..(343): Homolog of NCBI NO: 416564 NR Description: Abcisic acid-inducible protein kinase
  misc_feature (2)..(307): Homolog of NCBI NO: 3811293 NR Description: putative serine/threonine protein kinase

SEQ ID NO: 105756 - protein, 294 aa, Arabidopsis thaliana; identical to SEQ ID NO: 38545
  peptide (1)..(294): Ceres Seq. ID no. 13617915
  misc_feature (1)..(211): Pfam Name: Protein kinase domain Pfam Description: Protein kinase domain
  misc_feature (1)..(294): Homolog of NCBI NO: 15218270 NR Description: serine/threonine protein kinase, putative thaliana] >gi|8052538|gb|AAF71802.1|AC013430_11 F3F9.17 thaliana] >gi|15724160|gb|AAL06472.1|AF411782_1 At1g78290/F3F9_17
  misc_feature (1)..(294): Homolog of NCBI NO: 21618139 NR Description: serine-threonine protein kinase, putative
  misc_feature (1)..(289): Homolog of NCBI NO: 29164823 NR Description: abcisic acid-inducible protein kinanase [Oryza
  misc_feature (1)..(289): Homolog of NCBI NO: 34906840 NR Description: putative protein kinase HvPKABA1(Abcisic
  misc_feature (1)..(294): Homolog of NCBI NO: 11138330 NR Description: putative serine/threonine kinase GDBrPK [Vitis
  misc_feature (1)..(294): Homolog of NCBI NO: 14588571 NR Description: protein kinase HvPKABA1 [Hordeum vulgare subsp. >gi|14588573|dbj|BAB61736.1| protein kinase HvPKABA1 [Hordeum
  misc_feature (1)..(290): Homolog of NCBI NO: 2055374 NR Description: serine-threonine protein kinase [Triticum
  misc_feature (1)..(294): Homolog of NCBI NO: 481002 NR Description: protein kinase MCPK9 (EC 2.7.1.-) - common ice >gi|407057|emb|CAA81443.1| protein kinase [Mesembryanthemum
  misc_feature (1)..(294): Homolog of NCBI NO: 416564 NR Description: Abcisic acid-inducible protein kinase
  misc_feature (1)..(258): Homolog of NCBI NO: 3811293 NR Description: putative serine/threonine protein kinase

SEQ ID NO: 105757 - protein, 267 aa, Arabidopsis thaliana; identical to SEQ ID NO: 38546
  peptide (1)..(267): Ceres Seq. ID no. 13617916
  misc_feature (1)..(184): Pfam Name: Protein kinase domain Pfam Description: Protein kinase domain
  misc_feature (1)..(267): Homolog of NCBI NO: 15218270 NR Description: serine/threonine protein kinase, putative thaliana] >gi|8052538|gb|AAF71802.1|AC013430_11 F3F9.17 thaliana] >gi|15724160|gb|AAL06472.1|AF411782_1 At1g78290/F3F9_17
  misc_feature (1)..(267): Homolog of NCBI NO: 21618139 NR Description: serine-threonine protein kinase, putative
  misc_feature (1)..(262): Homolog of NCBI NO: 29164823 NR Description: abcisic acid-inducible protein kinanase [Oryza
  misc_feature (1)..(262): Homolog of NCBI NO: 34906840 NR Description: putative protein kinase HvPKABA1(Abcisic
  misc_feature (1)..(267): Homolog of NCBI NO: 11138330 NR Description: putative serine/threonine kinase GDBrPK [Vitis
  misc_feature (1)..(267): Homolog of NCBI NO: 14588571 NR Description: protein kinase HvPKABA1 [Hordeum vulgare subsp. >gi|14588573|dbj|BAB61736.1| protein kinase HvPKABA1 [Hordeum
  misc_feature (1)..(263): Homolog of NCBI NO: 2055374 NR Description: serine-threonine protein kinase [Triticum
  misc_feature (1)..(267): Homolog of NCBI NO: 481002 NR Description: protein kinase MCPK9 (EC 2.7.1.-) - common ice >gi|407057|emb|CAA81443.1| protein kinase [Mesembryanthemum
  misc_feature (1)..(267): Homolog of NCBI NO: 416564 NR Description: Abcisic acid-inducible protein kinase
  misc_feature (1)..(231): Homolog of NCBI NO: 3811293 NR Description: putative serine/threonine protein kinase

SEQ ID NO: 105758 - DNA, 820 bp, Arabidopsis thaliana
  misc_feature (1)..(820): Ceres Seq. ID no. 13617920
  misc_feature: MA Experiment ID: 108462 Result: Up-regulated in Transcription
  misc_feature: MA Experiment 108462 PARAMETER Experiment Name: At_Germinating_Seeds_cDNA_P Parameter: Age (day) Value: 2 vs. 0
  misc_feature: MA Experiment 108462 PARAMETER Experiment Name: At_Germinating_Seeds_cDNA_P Parameter: Tissue Value: Germinating Seeds
  misc_feature: MA Experiment ID: 108463 Result: Up-regulated in Transcription
  misc_feature: MA Experiment 108463 PARAMETER Experiment Name: At_Germinating_Seeds_cDNA_P Parameter: Age (day) Value: 3 vs. 0
  misc_feature: MA Experiment 108463 PARAMETER Experiment Name: At_Germinating_Seeds_cDNA_P Parameter: Tissue Value: Germinating Seeds
  misc_feature: MA Experiment ID: 108469 Result: Up-regulated in Transcription
  misc_feature: MA Experiment ID: 108576 Result: Up-regulated in Transcription
  misc_feature: MA Experiment 108576 PARAMETER Experiment Name: At_42deg_Heat_cDNA_P Parameter: Temperature (deg C) Value: 42 vs. 22
  misc_feature: MA Experiment 108576 PARAMETER Experiment Name: At_42deg_Heat_cDNA_P Parameter: Timepoint (hr) Value: 1
  misc_feature: MA Experiment 108576 PARAMETER Experiment Name: At_42deg_Heat_cDNA_P Parameter: Tissue Value: Aerial
  misc_feature: MA Experiment ID: 108668 Result: Up-regulated in Transcription
  misc_feature: MA Experiment 108668 PARAMETER Experiment Name: At_2mM_SA_cDNA_P Parameter: Plant Line Value: WS
  misc_feature: MA Experiment 108668 PARAMETER Experiment Name: At_2mM_SA_cDNA_P Parameter: Timepoint (hr) Value: 6
  misc_feature: MA Experiment 108668 PARAMETER Experiment Name: At_2mM_SA_cDNA_P Parameter: Treatment Value: 2mM SA vs. No Treatment
  misc_feature: MA Experiment ID: 20000072 Result: Up-regulated in Transcription
  misc_feature: MA Experiment 20000072 PARAMETER Experiment Name: At_100uM_ABA_Mutants_cDNA_P Parameter: Plant Line Value: CS8105
  misc_feature: MA Experiment 20000072 PARAMETER Experiment Name: At_100uM_ABA_Mutants_cDNA_P Parameter: Timepoint (hr) Value: 6
  misc_feature: MA Experiment 20000072 PARAMETER Experiment Name: At_100uM_ABA_Mutants_cDNA_P Parameter: Tissue Value: Aerial
  misc_feature: MA Experiment 20000072 PARAMETER Experiment Name: At_100uM_ABA_Mutants_cDNA_P Parameter: Treatment Value: 100uM ABA vs. No Treatment
  misc_feature: MA Experiment ID: 20000093 Result: Up-regulated in Transcription
  misc_feature: MA Experiment 20000093 PARAMETER Experiment Name: At_42deg_Heat_cDNA_P Parameter: Temperature (deg C) Value: 42 vs. 22
  misc_feature: MA Experiment 20000093 PARAMETER Experiment Name: At_42deg_Heat_cDNA_P Parameter: Timepoint (hr) Value: 0.5
  misc_feature: MA Experiment 20000093 PARAMETER Experiment Name: At_42deg_Heat_cDNA_P Parameter: Tissue Value: Aerial
  misc_feature: MA Experiment ID: 20000111 Result: Up-regulated in Transcription
  misc_feature: MA Experiment 20000111 PARAMETER Experiment Name: At_42deg_Heat_cDNA_P Parameter: Temperature (deg C) Value: 42 vs. 22
  misc_feature: MA Experiment 20000111 PARAMETER Experiment Name: At_42deg_Heat_cDNA_P Parameter: Timepoint (hr) Value: 6
  misc_feature: MA Experiment 20000111 PARAMETER Experiment Name: At_42deg_Heat_cDNA_P Parameter: Tissue Value: Aerial
  misc_feature: MA Experiment ID: 20000113 Result: Up-regulated in Transcription
  misc_feature: MA Experiment 20000113 PARAMETER Experiment Name: At_42deg_Heat_cDNA_P Parameter: Temperature (deg C) Value: 42 vs. 22
  misc_feature: MA Experiment 20000113 PARAMETER Experiment Name: At_42deg_Heat_cDNA_P Parameter: Timepoint (hr) Value: 8
  misc_feature: MA Experiment 20000113 PARAMETER Experiment Name: At_42deg_Heat_cDNA_P Parameter: Tissue Value: Aerial
  misc_feature: MA Experiment ID: 20001248 Result: Down-regulated in Transcription
  misc_feature: MA Experiment 20001248 PARAMETER Experiment Name: At_Far-red-induction_P Parameter: Age (day) Value: 7
  misc_feature: MA Experiment 20001248 PARAMETER Experiment Name: At_Far-red-induction_P Parameter: Light Value: Far-red vs. White
  misc_feature: MA Experiment 20001248 PARAMETER Experiment Name: At_Far-red-induction_P Parameter: Organism Value: A. thaliana
  misc_feature: MA Experiment 20001248 PARAMETER Experiment Name: At_Far-red-induction_P Parameter: Plant Line Value: Columbia
  misc_feature: MA Experiment 20001248 PARAMETER Experiment Name: At_Far-red-induction_P Parameter: Timepoint (hr) Value: 4
  misc_feature: MA Experiment 20001248 PARAMETER Experiment Name: At_Far-red-induction_P Parameter: Tissue Value: Whole Plant
acaccgacagctaaaaatggaggaagagattatcctattggattattgggcgagtatgtacgggatgaggacaaggattgctttggaggagaaaaaagtgaaatatgagtatagagaagaagatctgagtaacaaaagccctttacttcttcagatgaaccctattcacaagaagattccggttttaattcatgaaggtaaaccgatctgcgaatcgataatccaagttcagtatatcgacgagctttggcctgacacaaacccgattcttccttcagatccttaccagagagctcaagctagattttgggcagattacatcgacaagaagacatacgtgccatgcaaggcattatggtcagaatcaggggagaaacaagaggcagcgaagatagagtttatagaagtactcaagacacttgattcagagcttggagacaaatattattttggaggaaacgaatttggactcgttgacattgcctttatcggattctatagttggtttcgtacgtacgaggaggtagcgaatctcagcatcgtgttagagtttcctaagctaatggcgtgggcacagaggtgtttgaagagagagagtgtggctaaggccttgcctgactctgataaggttcttaagtcagtctctgatcatcggaagattattttaggaatcgattaagttcacttacccctgttctgtttttcatgttttttctcattttaaaatgtggcgtgtatttcaagtttgtcaataagtatggtatagaccaaggtatgtttgtggtgggatttgagtgaagctatgatctatttttatttg

SEQ ID NO: 105759 - protein, 225 aa, Arabidopsis thaliana; identical to SEQ ID NO: 30613
  peptide (1)..(225): Ceres Seq. ID no. 13617921
  misc_feature (6)..(225): Homolog of NCBI NO: 15218301 NR Description: glutathione transferase, putative [Arabidopsis
  misc_feature (6)..(225): Homolog of NCBI NO: 15220041 NR Description: glutathione transferase, putative [Arabidopsis
  misc_feature (6)..(225): Homolog of NCBI NO: 15220040 NR Description: glutathione transferase, putative [Arabidopsis
  misc_feature (6)..(219): Homolog of NCBI NO: 18411929 NR Description: glutathione transferase, putative [Arabidopsis
  misc_feature (6)..(219): Homolog of NCBI NO: 21592644 NR Description: glutathione transferase, putative [Arabidopsis

SEQ ID NO: 105760 - protein, 220 aa, Arabidopsis thaliana; identical to SEQ ID NO: 30614
  peptide (1)..(220): Ceres Seq. ID no. 13617922
  misc_feature (1)..(220): Homolog of NCBI NO: 15218301 NR Description: glutathione transferase, putative [Arabidopsis
  misc_feature (1)..(220): Homolog of NCBI NO: 15220041 NR Description: glutathione transferase, putative [Arabidopsis
  misc_feature (1)..(220): Homolog of NCBI NO: 15220040 NR Description: glutathione transferase, putative [Arabidopsis
  misc_feature (1)..(214): Homolog of NCBI NO: 18411929 NR Description: glutathione transferase, putative [Arabidopsis
  misc_feature (1)..(214): Homolog of NCBI NO: 21592644 NR Description: glutathione transferase, putative [Arabidopsis

SEQ ID NO: 105761 - protein, 207 aa, Arabidopsis thaliana; identical to SEQ ID NO: 30615
  peptide (1)..(207): Ceres Seq. ID no. 13617923
  misc_feature (1)..(207): Homolog of NCBI NO: 15218301 NR Description: glutathione transferase, putative [Arabidopsis
  misc_feature (1)..(207): Homolog of NCBI NO: 15220041 NR Description: glutathione transferase, putative [Arabidopsis
  misc_feature (1)..(207): Homolog of NCBI NO: 15220040 NR Description: glutathione transferase, putative [Arabidopsis
  misc_feature (1)..(201): Homolog of NCBI NO: 18411929 NR Description: glutathione transferase, putative [Arabidopsis
  misc_feature (1)..(201): Homolog of NCBI NO: 21592644 NR Description: glutathione transferase, putative [Arabidopsis

SEQ ID NO: 105762 - DNA, 1295 bp, Arabidopsis thaliana
  misc_feature (1)..(1295): Ceres Seq. ID no. 13617926
  misc_feature: MA Experiment ID: 20000069 Result: Down-regulated in Transcription
  misc_feature: MA Experiment 20000069 PARAMETER Experiment Name: At_100uM_ABA_Mutants_cDNA_P Parameter: Plant Line Value: CS23
  misc_feature: MA Experiment 20000069 PARAMETER Experiment Name: At_100uM_ABA_Mutants_cDNA_P Parameter: Timepoint (hr) Value: 6
  misc_feature: MA Experiment 20000069 PARAMETER Experiment Name: At_100uM_ABA_Mutants_cDNA_P Parameter: Tissue Value: Aerial
  misc_feature: MA Experiment 20000069 PARAMETER Experiment Name: At_100uM_ABA_Mutants_cDNA_P Parameter: Treatment Value: 100uM ABA vs. No Treatment
  misc_feature: MA Experiment ID: 20000072 Result: Down-regulated in Transcription
  misc_feature: MA Experiment 20000072 PARAMETER Experiment Name: At_100uM_ABA_Mutants_cDNA_P Parameter: Plant Line Value: CS8105
  misc_feature: MA Experiment 20000072 PARAMETER Experiment Name: At_100uM_ABA_Mutants_cDNA_P Parameter: Timepoint (hr) Value: 6
  misc_feature: MA Experiment 20000072 PARAMETER Experiment Name: At_100uM_ABA_Mutants_cDNA_P Parameter: Tissue Value: Aerial
  misc_feature: MA Experiment 20000072 PARAMETER Experiment Name: At_100uM_ABA_Mutants_cDNA_P Parameter: Treatment Value: 100uM ABA vs. No Treatment
  misc_feature: MA Experiment ID: 20000111 Result: Up-regulated in Transcription
  misc_feature: MA Experiment 20000111 PARAMETER Experiment Name: At_42deg_Heat_cDNA_P Parameter: Temperature (deg C) Value: 42 vs. 22
  misc_feature: MA Experiment 20000111 PARAMETER Experiment Name: At_42deg_Heat_cDNA_P Parameter: Timepoint (hr) Value: 6
  misc_feature: MA Experiment 20000111 PARAMETER Experiment Name: At_42deg_Heat_cDNA_P Parameter: Tissue Value: Aerial
  misc_feature: MA Experiment ID: 20000113 Result: Up-regulated in Transcription
  misc_feature: MA Experiment 20000113 PARAMETER Experiment Name: At_42deg_Heat_cDNA_P Parameter: Temperature (deg C) Value: 42 vs. 22
  misc_feature: MA Experiment 20000113 PARAMETER Experiment Name: At_42deg_Heat_cDNA_P Parameter: Timepoint (hr) Value: 8
  misc_feature: MA Experiment 20000113 PARAMETER Experiment Name: At_42deg_Heat_cDNA_P Parameter: Tissue Value: Aerial
  misc_feature: MA Experiment ID: 20000171 Result: Up-regulated in Transcription
  misc_feature: MA Experiment 20000171 PARAMETER Experiment Name: At_42deg_Heat_P Parameter: Age (day) Value: 14
  misc_feature: MA Experiment 20000171 PARAMETER Experiment Name: At_42deg_Heat_P Parameter: Organism Value: A. thaliana
  misc_feature: MA Experiment 20000171 PARAMETER Experiment Name: At_42deg_Heat_P Parameter: Plant Line Value: WS
  misc_feature: MA Experiment 20000171 PARAMETER Experiment Name: At_42deg_Heat_P Parameter: Temperature (deg C) Value: 42 vs. 22
  misc_feature: MA Experiment 20000171 PARAMETER Experiment Name: At_42deg_Heat_P Parameter: Timepoint (hr) Value: 1
  misc_feature: MA Experiment 20000171 PARAMETER Experiment Name: At_42deg_Heat_P Parameter: Tissue Value: Aerial
  misc_feature: MA Experiment ID: 20000173 Result: Up-regulated in Transcription
  misc_feature: MA Experiment 20000173 PARAMETER Experiment Name: At_42deg_Heat_P Parameter: Age (day) Value: 14
  misc_feature: MA Experiment 20000173 PARAMETER Experiment Name: At_42deg_Heat_P Parameter: Organism Value: A. thaliana
  misc_feature: MA Experiment 20000173 PARAMETER Experiment Name: At_42deg_Heat_P Parameter: Plant Line Value: WS
  misc_feature: MA Experiment 20000173 PARAMETER Experiment Name: At_42deg_Heat_P Parameter: Temperature (deg C) Value: 42 vs. 22
  misc_feature: MA Experiment 20000173 PARAMETER Experiment Name: At_42deg_Heat_P Parameter: Timepoint (hr) Value: 6
  misc_feature: MA Experiment 20000173 PARAMETER Experiment Name: At_42deg_Heat_P Parameter: Tissue Value: Aerial
  misc_feature: MA Experiment ID: 20000437 Result: Up-regulated in Transcription
  misc_feature: MA Experiment 20000437 PARAMETER Experiment Name: At_Drought_P Parameter: Age (day) Value: 8
  misc_feature: MA Experiment 20000437 PARAMETER Experiment Name: At_Drought_P Parameter: Organism Value: A. thaliana
  misc_feature: MA Experiment 20000437 PARAMETER Experiment Name: At_Drought_P Parameter: Plant Line Value: WS
  misc_feature: MA Experiment 20000437 PARAMETER Experiment Name: At_Drought_P Parameter: Timepoint (hr) Value: 24
  misc_feature: MA Experiment 20000437 PARAMETER Experiment Name: At_Drought_P Parameter: Tissue Value: Whole Plant
  misc_feature: MA Experiment 20000437 PARAMETER Experiment Name: At_Drought_P Parameter: Treatment Value: Drought vs. No Drought
  misc_feature: MA Experiment ID: 20001554 Result: Up-regulated in Transcription
  misc_feature: MA Experiment 20001554 PARAMETER Experiment Name: At_Drought_Soil_Dry_P Parameter: Age (day) Value: 21
  misc_feature: MA Experiment 20001554 PARAMETER Experiment Name: At_Drought_Soil_Dry_P Parameter: Organism Value: A. thaliana
  misc_feature: MA Experiment 20001554 PARAMETER Experiment Name: At_Drought_Soil_Dry_P Parameter: Plant Line Value: WS
  misc_feature: MA Experiment 20001554 PARAMETER Experiment Name: At_Drought_Soil_Dry_P Parameter: Post Timepoint (hr) Value: None
  misc_feature: MA Experiment 20001554 PARAMETER Experiment Name: At_Drought_Soil_Dry_P Parameter: Post-Treatment Value: None
  misc_feature: MA Experiment 20001554 PARAMETER Experiment Name: At_Drought_Soil_Dry_P Parameter: Timepoint (day) Value: 7
  misc_feature: MA Experiment 20001554 PARAMETER Experiment Name: At_Drought_Soil_Dry_P Parameter: Treatment Value: Drought vs. No Drought
  misc_feature: MA Experiment ID: 20001555 Result: Up-regulated in Transcription
  misc_feature: MA Experiment 20001555 PARAMETER Experiment Name: At_Drought_Soil_Dry_P Parameter: Age (day) Value: 24
  misc_feature: MA Experiment 20001555 PARAMETER Experiment Name: At_Drought_Soil_Dry_P Parameter: Organism Value: A. thaliana
  misc_feature: MA Experiment 20001555 PARAMETER Experiment Name: At_Drought_Soil_Dry_P Parameter: Plant Line Value: WS
  misc_feature: MA Experiment 20001555 PARAMETER Experiment Name: At_Drought_Soil_Dry_P Parameter: Post Timepoint (hr) Value: None
  misc_feature: MA Experiment 20001555 PARAMETER Experiment Name: At_Drought_Soil_Dry_P Parameter: Post-Treatment Value: None
  misc_feature: MA Experiment 20001555 PARAMETER Experiment Name: At_Drought_Soil_Dry_P Parameter: Timepoint (day) Value: 10
  misc_feature: MA Experiment 20001555 PARAMETER Experiment Name: At_Drought_Soil_Dry_P Parameter: Treatment Value: Drought vs. No Drought
atgtctcagccttcaaagctatcaaaatcaaaaaaattctatcaaacaaggaaatatatcaatggcggtattgtctaaaccggtagcaataccaaaatccgggttctctctaatcccggttatagatatgtctgacccagaatccaaacatgccctcgtgaaagcatgcgaagacttcggcttcttcaaggtgatcaaccatggcgtttccgcagagctagtctctgttttagaacacgagaccgtcgatttcttctcgttgcccaagtcagagaaaacccaagtcgcaggttatcccttcggatacgggaacagtaagattggtcggaatggtgacgtgggttgggttgagtacttgttgatgaacgctaatcatgattccggttcgggtccactatttccaagtcttctcaaaagcccgggaactttcagaaacgcattggaagagtacacaacatcagtgagaaaaatgacattcgatgttttggagaagatcacagatgggctagggatcaaaccgaggaacacacttagcaagcttgtgtctgaccaaaacacggactcgatattgagacttaatcactatccaccatgtcctcttagcaataagaaaaccaatggtggtaagaatgtgattggttttggtgaacacacagatcctcaaatcatctctgtcttaagatctaacaacacttctggtctccaaattaatctaaatgatggctcatggatctctgtccctcccgatcacacttccttcttcttcaacgttggtgactctctccaggtgatgacaaatgggaggttcaagagcgtgaggcatagggttttagctaactgtaaaaaatctagggtttctatgatttacttcgctggaccttcattgactcagagaatcgctccgttgacatgtttgatagacaatgaggacgagaggttgtacgaggagtttacttggtctgaatacaaaaactctacctacaactctagattgtctgataataggcttcaacaattcgaaaggaagactataaaaaatctcctaaattgattgatatatctatttaatctataagtgtgtgctacatacagacaatgcatctgtatattttgaagttaatgttatttgttaatccaataactgtaaaaacatgcaagagtgtgtttgtttgtttcgtaatatcaacatcgctcccatcttttatggataatatcaagttgtttaaacacactgttttgatgtaagctacattttactttatgtgtacatcttattgtgttatataaattatttc

SEQ ID NO: 105763 - protein, 349 aa, Arabidopsis thaliana; identical to SEQ ID NO: 43183
  peptide (1)..(349): Ceres Seq. ID no. 13617927
  misc_feature (186)..(293): Pfam Name: 2OG-Fe(II) oxygenase superfamily Pfam Description: 2OG-Fe(II) oxygenase superfamily
  misc_feature (21)..(349): Homolog of NCBI NO: 15218350 NR Description: gibberellin 2-oxidase (GA2-oxidase) (ga2ox1)
  misc_feature (21)..(349): Homolog of NCBI NO: 21553670 NR Description: gibberellin 2- oxidase [Arabidopsis thaliana]

SEQ ID NO: 105764 - protein, 329 aa, Arabidopsis thaliana; identical to SEQ ID NO: 43184
  peptide (1)..(329): Ceres Seq. ID no. 13617928
  misc_feature (166)..(273): Pfam Name: 2OG-Fe(II) oxygenase superfamily Pfam Description: 2OG-Fe(II) oxygenase superfamily
  misc_feature (1)..(329): Homolog of NCBI NO: 15218350 NR Description: gibberellin 2-oxidase (GA2-oxidase) (ga2ox1)
  misc_feature (1)..(329): Homolog of NCBI NO: 21553670 NR Description: gibberellin 2- oxidase [Arabidopsis thaliana]

SEQ ID NO: 105765 - protein, 307 aa, Arabidopsis thaliana; identical to SEQ ID NO: 43185
  peptide (1)..(307): Ceres Seq. ID no. 13617929
  misc_feature (144)..(251): Pfam Name: 2OG-Fe(II) oxygenase superfamily Pfam Description: 2OG-Fe(II) oxygenase superfamily
  misc_feature (1)..(307): Homolog of NCBI NO: 15218350 NR Description: gibberellin 2-oxidase (GA2-oxidase) (ga2ox1)
  misc_feature (1)..(307): Homolog of NCBI NO: 21553670 NR Description: gibberellin 2- oxidase [Arabidopsis thaliana]

SEQ ID NO: 105766 - DNA, 857 bp, Arabidopsis thaliana
  misc_feature (1)..(857): Ceres Seq. ID no. 13617930
  misc_feature: MA Experiment ID: 108435 Result: Up-regulated in Transcription
  misc_feature: MA Experiment 108435 PARAMETER Experiment Name: At_stm_Mutants_cDNA_P Parameter: Plant Line Value: wt Landsburg vs stm
  misc_feature: MA Experiment 108435 PARAMETER Experiment Name: At_stm_Mutants_cDNA_P Parameter: Tissue Value: Shoot Apical Meristem Region
  misc_feature: MA Experiment ID: 108462 Result: Up-regulated in Transcription
  misc_feature: MA Experiment 108462 PARAMETER Experiment Name: At_Germinating_Seeds_cDNA_P Parameter: Age (day) Value: 2 vs. 0
  misc_feature: MA Experiment 108462 PARAMETER Experiment Name: At_Germinating_Seeds_cDNA_P Parameter: Tissue Value: Germinating Seeds
  misc_feature: MA Experiment ID: 108463 Result: Up-regulated in Transcription
  misc_feature: MA Experiment 108463 PARAMETER Experiment Name: At_Germinating_Seeds_cDNA_P Parameter: Age (day) Value: 3 vs. 0
  misc_feature: MA Experiment 108463 PARAMETER Experiment Name: At_Germinating_Seeds_cDNA_P Parameter: Tissue Value: Germinating Seeds
  misc_feature: MA Experiment ID: 108464 Result: Up-regulated in Transcription
  misc_feature: MA Experiment 108464 PARAMETER Experiment Name: At_Germinating_Seeds_cDNA_P Parameter: Age (day) Value: 4 vs. 0
  misc_feature: MA Experiment 108464 PARAMETER Experiment Name: At_Germinating_Seeds_cDNA_P Parameter: Tissue Value: Germinating Seeds
  misc_feature: MA Experiment ID: 108561 Result: Down-regulated in Transcription
  misc_feature: MA Experiment 108561 PARAMETER Experiment Name: At_100uM_ABA_cDNA_P Parameter: Timepoint (hr) Value: 6
  misc_feature: MA Experiment 108561 PARAMETER Experiment Name: At_100uM_ABA_cDNA_P Parameter: Tissue Value: Aerial
  misc_feature: MA Experiment 108561 PARAMETER Experiment Name: At_100uM_ABA_cDNA_P Parameter: Treatment Value: 100uM ABA vs. No Treatment
  misc_feature: MA Experiment ID: 108573 Result: Down-regulated in Transcription
  misc_feature: MA Experiment 108573 PARAMETER Experiment Name: At_Drought_cDNA_P Parameter: Timepoint (hr) Value: 6
  misc_feature: MA Experiment 108573 PARAMETER Experiment Name: At_Drought_cDNA_P Parameter: Tissue Value: Aerial
  misc_feature: MA Experiment 108573 PARAMETER Experiment Name: At_Drought_cDNA_P Parameter: Treatment Value: Drought vs. No Drought
  misc_feature: MA Experiment ID: 108577 Result: Down-regulated in Transcription
  misc_feature: MA Experiment 108577 PARAMETER Experiment Name: At_42deg_Heat_cDNA_P Parameter: Temperature (deg C) Value: 42 vs. 22
  misc_feature: MA Experiment 108577 PARAMETER Experiment Name: At_42deg_Heat_cDNA_P Parameter: Timepoint (hr) Value: 6
  misc_feature: MA Experiment 108577 PARAMETER Experiment Name: At_42deg_Heat_cDNA_P Parameter: Tissue Value: Aerial
  misc_feature: MA Experiment ID: 108595 Result: Up-regulated in Transcription
  misc_feature: MA Experiment 108595 PARAMETER Experiment Name: At_Ler-pi_Ovule_cDNA_P Parameter: Plant Line Value: null
  misc_feature: MA Experiment ID: 108607 Result: Down-regulated in Transcription
  misc_feature: MA Experiment 108607 PARAMETER Experiment Name: At_100uM_ABA_cDNA_P Parameter: Timepoint (hr) Value: 4
  misc_feature: MA Experiment 108607 PARAMETER Experiment Name: At_100uM_ABA_cDNA_P Parameter: Tissue Value: Aerial
  misc_feature: MA Experiment 108607 PARAMETER Experiment Name: At_100uM_ABA_cDNA_P Parameter: Treatment Value: 100uM ABA vs. No Treatment
  misc_feature: MA Experiment ID: 20000070 Result: Down-regulated in Transcription
  misc_feature: MA Experiment 20000070 PARAMETER Experiment Name: At_100uM_ABA_Mutants_cDNA_P Parameter: Plant Line Value: CS24
  misc_feature: MA Experiment 20000070 PARAMETER Experiment Name: At_100uM_ABA_Mutants_cDNA_P Parameter: Timepoint (hr) Value: 6
  misc_feature: MA Experiment 20000070 PARAMETER Experiment Name: At_100uM_ABA_Mutants_cDNA_P Parameter: Tissue Value: Aerial
  misc_feature: MA Experiment 20000070 PARAMETER Experiment Name: At_100uM_ABA_Mutants_cDNA_P Parameter: Treatment Value: 100uM ABA vs. No Treatment
  misc_feature: MA Experiment ID: 20000071 Result: Down-regulated in Transcription
  misc_feature: MA Experiment 20000071 PARAMETER Experiment Name: At_100uM_ABA_Mutants_cDNA_P Parameter: Plant Line Value: CS8104
  misc_feature: MA Experiment 20000071 PARAMETER Experiment Name: At_100uM_ABA_Mutants_cDNA_P Parameter: Timepoint (hr) Value: 6
  misc_feature: MA Experiment 20000071 PARAMETER Experiment Name: At_100uM_ABA_Mutants_cDNA_P Parameter: Tissue Value: Aerial
  misc_feature: MA Experiment 20000071 PARAMETER Experiment Name: At_100uM_ABA_Mutants_cDNA_P Parameter: Treatment Value: 100uM ABA vs. No Treatment
  misc_feature: MA Experiment ID: 20000088 Result: Down-regulated in Transcription
  misc_feature: MA Experiment 20000088 PARAMETER Experiment Name: At_100uM_ABA_Mutants_cDNA_P Parameter: Plant Line Value: Landsberg
  misc_feature: MA Experiment 20000088 PARAMETER Experiment Name: At_100uM_ABA_Mutants_cDNA_P Parameter: Timepoint (hr) Value: 6
  misc_feature: MA Experiment 20000088 PARAMETER Experiment Name: At_100uM_ABA_Mutants_cDNA_P Parameter: Tissue Value: Aerial
  misc_feature: MA Experiment 20000088 PARAMETER Experiment Name: At_100uM_ABA_Mutants_cDNA_P Parameter: Treatment Value: 100uM ABA vs. No Treatment
  misc_feature: MA Experiment ID: 20000113 Result: Up-regulated in Transcription
  misc_feature: MA Experiment 20000113 PARAMETER Experiment Name: At_42deg_Heat_cDNA_P Parameter: Temperature (deg C) Value: 42 vs. 22
  misc_feature: MA Experiment 20000113 PARAMETER Experiment Name: At_42deg_Heat_cDNA_P Parameter: Timepoint (hr) Value: 8
  misc_feature: MA Experiment 20000113 PARAMETER Experiment Name: At_42deg_Heat_cDNA_P Parameter: Tissue Value: Aerial
  misc_feature: MA Experiment ID: 20000182 Result: Down-regulated in Transcription
  misc_feature: MA Experiment 20000182 PARAMETER Experiment Name: At_2mM_SA_P Parameter: Age (day) Value: 14
  misc_feature: MA Experiment 20000182 PARAMETER Experiment Name: At_2mM_SA_P Parameter: Organism Value: A. thaliana
  misc_feature: MA Experiment 20000182 PARAMETER Experiment Name: At_2mM_SA_P Parameter: Plant Line Value: WS
  misc_feature: MA Experiment 20000182 PARAMETER Experiment Name: At_2mM_SA_P Parameter: Timepoint (hr) Value: 6
  misc_feature: MA Experiment 20000182 PARAMETER Experiment Name: At_2mM_SA_P Parameter: Tissue Value: Aerial
  misc_feature: MA Experiment 20000182 PARAMETER Experiment Name: At_2mM_SA_P Parameter: Treatment Value: 2mM SA vs. No Treatment
  misc_feature: MA Experiment ID: 20000184 Result: Down-regulated in Transcription
  misc_feature: MA Experiment 20000184 PARAMETER Experiment Name: At_Shoots__P Parameter: Age (day) Value: 7
  misc_feature: MA Experiment 20000184 PARAMETER Experiment Name: At_Shoots__P Parameter: Tissue Value: Shoots vs. Whole Plant
  misc_feature: MA Experiment ID: 20000185 Result: Down-regulated in Transcription
  misc_feature: MA Experiment 20000185 PARAMETER Experiment Name: At_Roots__P Parameter: Age (day) Value: 7 vs. 21
  misc_feature: MA Experiment 20000185 PARAMETER Experiment Name: At_Roots__P Parameter: Organism Value: A. thaliana
  misc_feature: MA Experiment 20000185 PARAMETER Experiment Name: At_Roots__P Parameter: Tissue Value: Roots vs. Whole Plant
  misc_feature: MA Experiment ID: 20000234 Result: Up-regulated in Transcription
  misc_feature: MA Experiment 20000234 PARAMETER Experiment Name: At_Siliques_P Parameter: Age (day) Value: 21
  misc_feature: MA Experiment 20000234 PARAMETER Experiment Name: At_Siliques_P Parameter: Organism Value: A. thaliana
  misc_feature: MA Experiment 20000234 PARAMETER Experiment Name: At_Siliques_P Parameter: Plant Line Value: WS
  misc_feature: MA Experiment 20000234 PARAMETER Experiment Name: At_Siliques_P Parameter: Tissue Value: Less Than 5mm Siliques vs. Whole Plant
  misc_feature: MA Experiment ID: 20000264 Result: Down-regulated in Transcription
  misc_feature: MA Experiment 20000264 PARAMETER Experiment Name: At_Open_Flower_P Parameter: Age (day) Value: 21
  misc_feature: MA Experiment 20000264 PARAMETER Experiment Name: At_Open_Flower_P Parameter: Plant Line Value: WS
  misc_feature: MA Experiment 20000264 PARAMETER Experiment Name: At_Open_Flower_P Parameter: Tissue Value: Open Flower vs. Whole Plant
  misc_feature: MA Experiment ID: 20000436 Result: Down-regulated in Transcription
  misc_feature: MA Experiment 20000436 PARAMETER Experiment Name: At_Drought_P Parameter: Age (day) Value: 7
  misc_feature: MA Experiment 20000436 PARAMETER Experiment Name: At_Drought_P Parameter: Organism Value: A. thaliana
  misc_feature: MA Experiment 20000436 PARAMETER Experiment Name: At_Drought_P Parameter: Plant Line Value: WS
  misc_feature: MA Experiment 20000436 PARAMETER Experiment Name: At_Drought_P Parameter: Timepoint (hr) Value: 12
  misc_feature: MA Experiment 20000436 PARAMETER Experiment Name: At_Drought_P Parameter: Tissue Value: Whole Plant
  misc_feature: MA Experiment 20000436 PARAMETER Experiment Name: At_Drought_P Parameter: Treatment Value: Drought vs. No Drought
  misc_feature: MA Experiment ID: 20000438 Result: Down-regulated in Transcription
  misc_feature: MA Experiment 20000438 PARAMETER Experiment Name: At_Shoots__P Parameter: Age (day) Value: 14
  misc_feature: MA Experiment 20000438 PARAMETER Experiment Name: At_Shoots__P Parameter: Tissue Value: Shoots vs. Whole Plant
  misc_feature: MA Experiment ID: 20000439 Result: Down-regulated in Transcription
  misc_feature: MA Experiment 20000439 PARAMETER Experiment Name: At_Roots__P Parameter: Age (day) Value: 14 vs. 21
  misc_feature: MA Experiment 20000439 PARAMETER Experiment Name: At_Roots__P Parameter: Organism Value: A. thaliana
  misc_feature: MA Experiment 20000439 PARAMETER Experiment Name: At_Roots__P Parameter: Tissue Value: Roots vs. Whole Plant
  misc_feature: MA Experiment ID: 20000453 Result: Down-regulated in Transcription
  misc_feature: MA Experiment 20000453 PARAMETER Experiment Name: At_100uM_ABA_P Parameter: Age (day) Value: 15
  misc_feature: MA Experiment 20000453 PARAMETER Experiment Name: At_100uM_ABA_P Parameter: Organism Value: A. thaliana
  misc_feature: MA Experiment 20000453 PARAMETER Experiment Name: At_100uM_ABA_P Parameter: Plant Line Value: WS
  misc_feature: MA Experiment 20000453 PARAMETER Experiment Name: At_100uM_ABA_P Parameter: Timepoint (hr) Value: 24
  misc_feature: MA Experiment 20000453 PARAMETER Experiment Name: At_100uM_ABA_P Parameter: Tissue Value: Aerial
  misc_feature: MA Experiment 20000453 PARAMETER Experiment Name: At_100uM_ABA_P Parameter: Treatment Value: 100uM ABA vs. No Treatment
  misc_feature: MA Experiment ID: 20000460 Result: Down-regulated in Transcription
  misc_feature: MA Experiment 20000460 PARAMETER Experiment Name: At_10percent_PEG_P Parameter: Age (day) Value: 12
  misc_feature: MA Experiment 20000460 PARAMETER Experiment Name: At_10percent_PEG_P Parameter: Organism Value: A. thaliana
  misc_feature: MA Experiment 20000460 PARAMETER Experiment Name: At_10percent_PEG_P Parameter: Plant Line Value: WS
  misc_feature: MA Experiment 20000460 PARAMETER Experiment Name: At_10percent_PEG_P Parameter: Timepoint (day) Value: 12
  misc_feature: MA Experiment 20000460 PARAMETER Experiment Name: At_10percent_PEG_P Parameter: Tissue Value: Whole Plant
  misc_feature: MA Experiment 20000460 PARAMETER Experiment Name: At_10percent_PEG_P Parameter: Treatment Value: 10percent PEG vs. No Treatment
  misc_feature: MA Experiment ID: 20000794 Result: Down-regulated in Transcription
  misc_feature: MA Experiment 20000794 PARAMETER Experiment Name: At_Petals_P Parameter: Age (day) Value: 23-25 days
  misc_feature: MA Experiment 20000794 PARAMETER Experiment Name: At_Petals_P Parameter: Plant Line Value: WS
  misc_feature: MA Experiment 20000794 PARAMETER Experiment Name: At_Petals_P Parameter: Tissue Value: Petals vs. Whole plant
  misc_feature: MA Experiment ID: 20001247 Result: Up-regulated in Transcription
  misc_feature: MA Experiment 20001247 PARAMETER Experiment Name: At_Far-red-induction_P Parameter: Age (day) Value: 7
  misc_feature: MA Experiment 20001247 PARAMETER Experiment Name: At_Far-red-induction_P Parameter: Light Value: Far-red vs. White
  misc_feature: MA Experiment 20001247 PARAMETER Experiment Name: At_Far-red-induction_P Parameter: Organism Value: A. thaliana
  misc_feature: MA Experiment 20001247 PARAMETER Experiment Name: At_Far-red-induction_P Parameter: Plant Line Value: Columbia
  misc_feature: MA Experiment 20001247 PARAMETER Experiment Name: At_Far-red-induction_P Parameter: Timepoint (hr) Value: 1
  misc_feature: MA Experiment 20001247 PARAMETER Experiment Name: At_Far-red-induction_P Parameter: Tissue Value: Whole Plant
  misc_feature: MA Experiment ID: 20001451 Result: Up-regulated in Transcription
  misc_feature: MA Experiment 20001451 PARAMETER Experiment Name: At_Far-red-induction_P Parameter: Age (day) Value: 7
  misc_feature: MA Experiment 20001451 PARAMETER Experiment Name: At_Far-red-induction_P Parameter: Light Value: Far-red vs. White
  misc_feature: MA Experiment 20001451 PARAMETER Experiment Name: At_Far-red-induction_P Parameter: Organism Value: A. thaliana
  misc_feature: MA Experiment 20001451 PARAMETER Experiment Name: At_Far-red-induction_P Parameter: Plant Line Value: Columbia
  misc_feature: MA Experiment 20001451 PARAMETER Experiment Name: At_Far-red-induction_P Parameter: Timepoint (hr) Value: 24
  misc_feature: MA Experiment 20001451 PARAMETER Experiment Name: At_Far-red-induction_P Parameter: Tissue Value: Whole Plant
  misc_feature: MA Experiment ID: 20001556 Result: Down-regulated in Transcription
  misc_feature: MA Experiment 20001556 PARAMETER Experiment Name: At_Drought_Soil_Dry_P Parameter: Age (day) Value: 26
  misc_feature: MA Experiment 20001556 PARAMETER Experiment Name: At_Drought_Soil_Dry_P Parameter: Organism Value: A. thaliana
  misc_feature: MA Experiment 20001556 PARAMETER Experiment Name: At_Drought_Soil_Dry_P Parameter: Plant Line Value: WS
  misc_feature: MA Experiment 20001556 PARAMETER Experiment Name: At_Drought_Soil_Dry_P Parameter: Post Timepoint (hr) Value: None
  misc_feature: MA Experiment 20001556 PARAMETER Experiment Name: At_Drought_Soil_Dry_P Parameter: Post-Treatment Value: None
  misc_feature: MA Experiment 20001556 PARAMETER Experiment Name: At_Drought_Soil_Dry_P Parameter: Timepoint (day) Value: 12
  misc_feature: MA Experiment 20001556 PARAMETER Experiment Name: At_Drought_Soil_Dry_P Parameter: Treatment Value: Drought vs. No Drought
  misc_feature: MA Experiment ID: 20001557 Result: Down-regulated in Transcription
  misc_feature: MA Experiment 20001557 PARAMETER Experiment Name: At_Drought_Soil_Dry_P Parameter: Age (day) Value: 27
  misc_feature: MA Experiment 20001557 PARAMETER Experiment Name: At_Drought_Soil_Dry_P Parameter: Organism Value: A. thaliana
  misc_feature: MA Experiment 20001557 PARAMETER Experiment Name: At_Drought_Soil_Dry_P Parameter: Plant Line Value: WS
  misc_feature: MA Experiment 20001557 PARAMETER Experiment Name: At_Drought_Soil_Dry_P Parameter: Post Timepoint (hr) Value: 3
  misc_feature: MA Experiment 20001557 PARAMETER Experiment Name: At_Drought_Soil_Dry_P Parameter: Post-Treatment Value: Re-Water vs. No Drought
  misc_feature: MA Experiment 20001557 PARAMETER Experiment Name: At_Drought_Soil_Dry_P Parameter: Timepoint (day) Value: 13
  misc_feature: MA Experiment 20001557 PARAMETER Experiment Name: At_Drought_Soil_Dry_P Parameter: Treatment Value: Drought vs. No Drought
  misc_feature: MA Experiment ID: 20001558 Result: Down-regulated in Transcription
  misc_feature: MA Experiment 20001558 PARAMETER Experiment Name: At_Drought_Soil_Dry_P Parameter: Age (day) Value: 27
  misc_feature: MA Experiment 20001558 PARAMETER Experiment Name: At_Drought_Soil_Dry_P Parameter: Organism Value: A. thaliana
  misc_feature: MA Experiment 20001558 PARAMETER Experiment Name: At_Drought_Soil_Dry_P Parameter: Plant Line Value: WS
  misc_feature: MA Experiment 20001558 PARAMETER Experiment Name: At_Drought_Soil_Dry_P Parameter: Post Timepoint (hr) Value: 6
  misc_feature: MA Experiment 20001558 PARAMETER Experiment Name: At_Drought_Soil_Dry_P Parameter: Post-Treatment Value: Re-Water vs. No Drought
  misc_feature: MA Experiment 20001558 PARAMETER Experiment Name: At_Drought_Soil_Dry_P Parameter: Timepoint (day) Value: 13
  misc_feature: MA Experiment 20001558 PARAMETER Experiment Name: At_Drought_Soil_Dry_P Parameter: Treatment Value: Drought vs. No Drought
  misc_feature: MA Experiment ID: 20001560 Result: Down-regulated in Transcription
  misc_feature: MA Experiment 20001560 PARAMETER Experiment Name: At_Drought_Soil_Dry_P Parameter: Age (day) Value: 28
  misc_feature: MA Experiment 20001560 PARAMETER Experiment Name: At_Drought_Soil_Dry_P Parameter: Organism Value: A. thaliana
  misc_feature: MA Experiment 20001560 PARAMETER Experiment Name: At_Drought_Soil_Dry_P Parameter: Plant Line Value: WS
  misc_feature: MA Experiment 20001560 PARAMETER Experiment Name: At_Drought_Soil_Dry_P Parameter: Post Timepoint (hr) Value: None
  misc_feature: MA Experiment 20001560 PARAMETER Experiment Name: At_Drought_Soil_Dry_P Parameter: Post-Treatment Value: None
  misc_feature: MA Experiment 20001560 PARAMETER Experiment Name: At_Drought_Soil_Dry_P Parameter: Timepoint (day) Value: 14
  misc_feature: MA Experiment 20001560 PARAMETER Experiment Name: At_Drought_Soil_Dry_P Parameter: Treatment Value: Drought vs. No Drought
  misc_feature: MA Experiment ID: 20001757 Result: Up-regulated in Transcription
  misc_feature: MA Experiment 20001757 PARAMETER Experiment Name: At_50mM_NH4NO3_L-to-H_P Parameter: Timepoint (hr) Value: 6
  misc_feature: MA Experiment 20001757 PARAMETER Experiment Name: At_50mM_NH4NO3_L-to-H_P Parameter: Tissue Value: Leaf
  misc_feature: MA Experiment 20001757 PARAMETER Experiment Name: At_50mM_NH4NO3_L-to-H_P Parameter: Treatment Value: 50mM NH4NO3 vs 100mM Mannitol
  misc_feature: MA Experiment ID: 20001904 Result: Down-regulated in Transcription
  misc_feature: MA Experiment 20001904 PARAMETER Experiment Name: At_Drought_Reproduction_P Parameter: Age (day) Value: 37
  misc_feature: MA Experiment 20001904 PARAMETER Experiment Name: At_Drought_Reproduction_P Parameter: Organism Value: A. thaliana
  misc_feature: MA Experiment 20001904 PARAMETER Experiment Name: At_Drought_Reproduction_P Parameter: Plant Line Value: WS
  misc_feature: MA Experiment 20001904 PARAMETER Experiment Name: At_Drought_Reproduction_P Parameter: Timepoint (day) Value: 7
  misc_feature: MA Experiment 20001904 PARAMETER Experiment Name: At_Drought_Reproduction_P Parameter: Tissue Value: Rosettes
  misc_feature: MA Experiment 20001904 PARAMETER Experiment Name: At_Drought_Reproduction_P Parameter: Treatment Value: Drought vs. No Drought
  misc_feature: MA Experiment ID: 20001906 Result: Down-regulated in Transcription
  misc_feature: MA Experiment 20001906 PARAMETER Experiment Name: At_Drought_Reproduction_P Parameter: Age (day) Value: 35
  misc_feature: MA Experiment 20001906 PARAMETER Experiment Name: At_Drought_Reproduction_P Parameter: Organism Value: A. thaliana
  misc_feature: MA Experiment 20001906 PARAMETER Experiment Name: At_Drought_Reproduction_P Parameter: Plant Line Value: WS
  misc_feature: MA Experiment 20001906 PARAMETER Experiment Name: At_Drought_Reproduction_P Parameter: Timepoint (day) Value: 5
  misc_feature: MA Experiment 20001906 PARAMETER Experiment Name: At_Drought_Reproduction_P Parameter: Tissue Value: Siliques
  misc_feature: MA Experiment 20001906 PARAMETER Experiment Name: At_Drought_Reproduction_P Parameter: Treatment Value: Drought vs. No Drought
cgcaacggaaaacaaatccgccaatggaagcggctctgagcatcttcaagctctcgttccttctcacccttctctccggcggttcagaccttatcgactcgttgccgccgaattgtaaccgagccgagtgtccgagttatgaggttgtccacgccgggaatggctacgagattcatcgctacaacaccaccgtttggatttctaccgaaccaattcaagatatctctctcaacgaagcttctggcaacggttggaaccaattgtctgattacatgaacgggaacaacgattatcaccagaggatagagatagcacttccttatatcacccaagtctctcagaacttgagcaccttcatagtctctttcttcgttcccaaggcattccaacctgatccacctccgggaaacaacctccacgtacagagatgggactcgaggtacgtggcggtgaagcaaattagtggatatgttgcggatcataaaattggaaaacaagtggctgagctgaaggcgagcctacaaggtaccgtatgggccaaggcaattgagaaaagcagagaaaccggcggtgtcggatcggcttgggcttacacggtggcgcaatttagctggccgttccagtggagtcagcgggtcaatgagatttggtttccgtttgaaatggaagatgaagaaactgttagtatcgttactcagtgaacaaaaaaatgaacacttttttatctttttatggtgtagtgacaaagcaaagccattgagataagcctatctcctaaaagttgttaaataactgtccattgtcttactctggtcagcacattccctaaagaaaagaaaatcaaaagagtacttttt

SEQ ID NO: 105767 - protein, 232 aa, Arabidopsis thaliana
  peptide (1)..(232): Ceres Seq. ID no. 13617931
  misc_feature (40)..(220): Pfam Name: SOUL heme-binding protein Pfam Description: SOUL heme-binding protein
  misc_feature (8)..(232): Homolog of NCBI NO: 18411970 NR Description: expressed protein [Arabidopsis thaliana]
  misc_feature (8)..(232): Homolog of NCBI NO: 21593898 NR Description: SOUL-like protein [Arabidopsis thaliana]
  misc_feature (8)..(222): Homolog of NCBI NO: 15220033 NR Description: SOUL-related protein [Arabidopsis thaliana]
  misc_feature (20)..(223): Homolog of NCBI NO: 34903864 NR Description: unnamed protein product [Oryza sativa (japonica group)] >gi|8096573|dbj|BAA96146.1| unnamed protein product
  misc_feature (8)..(221): Homolog of NCBI NO: 15218357 NR Description: expressed protein [Arabidopsis thaliana]
  misc_feature (34)..(217): Homolog of NCBI NO: 34904402 NR Description: unnamed protein product [Oryza sativa (japonica group)] >gi|7339697|dbj|BAA92902.1| unnamed protein product
  misc_feature (101)..(221): Homolog of NCBI NO: 16323115 NR Description: At1g78460/F3F9_3 [Arabidopsis thaliana]
QRKTNPPMEAALSIFKLSFLLTLLSGGSDLIDSLPPNCNRAECPSYEVVHAGNGYEIHRYNTTVWISTEPIQDISLNEASGNGWNQLSDYMNGNNDYHQRIEIALPYITQVSQNLSTFIVSFFVPKAFQPDPPPGNNLHVQRWDSRYVAVKQISGYVADHKIGKQVAELKASLQGTVWAKAIEKSRETGGVGSAWAYTVAQFSWPFQWSQRVNEIWFPFEMEDEETVSIVTQ

SEQ ID NO: 105768 - protein, 225 aa, Arabidopsis thaliana
  peptide (1)..(225): Ceres Seq. ID no. 13617932
  misc_feature (33)..(213): Pfam Name: SOUL heme-binding protein Pfam Description: SOUL heme-binding protein
  misc_feature (1)..(225): Homolog of NCBI NO: 18411970 NR Description: expressed protein [Arabidopsis thaliana]
  misc_feature (1)..(225): Homolog of NCBI NO: 21593898 NR Description: SOUL-like protein [Arabidopsis thaliana]
  misc_feature (1)..(215): Homolog of NCBI NO: 15220033 NR Description: SOUL-related protein [Arabidopsis thaliana]
  misc_feature (13)..(216): Homolog of NCBI NO: 34903864 NR Description: unnamed protein product [Oryza sativa (japonica group)] >gi|8096573|dbj|BAA96146.1| unnamed protein product
  misc_feature (1)..(214): Homolog of NCBI NO: 15218357 NR Description: expressed protein [Arabidopsis thaliana]
  misc_feature (27)..(210): Homolog of NCBI NO: 34904402 NR Description: unnamed protein product [Oryza sativa (japonica group)] >gi|7339697|dbj|BAA92902.1| unnamed protein product
  misc_feature (94)..(214): Homolog of NCBI NO: 16323115 NR Description: At1g78460/F3F9_3 [Arabidopsis thaliana]
MEAALSIFKLSFLLTLLSGGSDLIDSLPPNCNRAECPSYEVVHAGNGYEIHRYNTTVWISTEPIQDISLNEASGNGWNQLSDYMNGNNDYHQRIEIALPYITQVSQNLSTFIVSFFVPKAFQPDPPPGNNLHVQRWDSRYVAVKQISGYVADHKIGKQVAELKASLQGTVWAKAIEKSRETGGVGSAWAYTVAQFSWPFQWSQRVNEIWFPFEMEDEETVSIVTQ

SEQ ID NO: 105769 - protein, 142 aa, Arabidopsis thaliana
  peptide (1)..(142): Ceres Seq. ID no. 13617933
  misc_feature (1)..(130): Pfam Name: SOUL heme-binding protein Pfam Description: SOUL heme-binding protein
  misc_feature (1)..(142): Homolog of NCBI NO: 18411970 NR Description: expressed protein [Arabidopsis thaliana]
  misc_feature (1)..(142): Homolog of NCBI NO: 21593898 NR Description: SOUL-like protein [Arabidopsis thaliana]
  misc_feature (1)..(132): Homolog of NCBI NO: 15220033 NR Description: SOUL-related protein [Arabidopsis thaliana]
  misc_feature (1)..(133): Homolog of NCBI NO: 34903864 NR Description: unnamed protein product [Oryza sativa (japonica group)] >gi|8096573|dbj|BAA96146.1| unnamed protein product
  misc_feature (1)..(131): Homolog of NCBI NO: 15218357 NR Description: expressed protein [Arabidopsis thaliana]
  misc_feature (1)..(127): Homolog of NCBI NO: 34904402 NR Description: unnamed protein product [Oryza sativa (japonica group)] >gi|7339697|dbj|BAA92902.1| unnamed protein product
  misc_feature (11)..(131): Homolog of NCBI NO: 16323115 NR Description: At1g78460/F3F9_3 [Arabidopsis thaliana]
MNGNNDYHQRIEIALPYITQVSQNLSTFIVSFFVPKAFQPDPPPGNNLHVQRWDSRYVAVKQISGYVADHKIGKQVAELKASLQGTVWAKAIEKSRETGGVGSAWAYTVAQFSWPFQWSQRVNEIWFPFEMEDEETVSIVTQ

SEQ ID NO: 105770 - DNA, 1676 bp, Arabidopsis thaliana
  misc_feature (1)..(1676): Ceres Seq. ID no. 13617934
  misc_feature: MA Experiment ID: 20000069 Result: Up-regulated in Transcription
  misc_feature: MA Experiment 20000069 PARAMETER Experiment Name: At_100uM_ABA_Mutants_cDNA_P Parameter: Plant Line Value: CS23
  misc_feature: MA Experiment 20000069 PARAMETER Experiment Name: At_100uM_ABA_Mutants_cDNA_P Parameter: Timepoint (hr) Value: 6
  misc_feature: MA Experiment 20000069 PARAMETER Experiment Name: At_100uM_ABA_Mutants_cDNA_P Parameter: Tissue Value: Aerial
  misc_feature: MA Experiment 20000069 PARAMETER Experiment Name: At_100uM_ABA_Mutants_cDNA_P Parameter: Treatment Value: 100uM ABA vs. No Treatment
  misc_feature: MA Experiment ID: 20000070 Result: Up-regulated in Transcription
  misc_feature: MA Experiment 20000070 PARAMETER Experiment Name: At_100uM_ABA_Mutants_cDNA_P Parameter: Plant Line Value: CS24
  misc_feature: MA Experiment 20000070 PARAMETER Experiment Name: At_100uM_ABA_Mutants_cDNA_P Parameter: Timepoint (hr) Value: 6
  misc_feature: MA Experiment 20000070 PARAMETER Experiment Name: At_100uM_ABA_Mutants_cDNA_P Parameter: Tissue Value: Aerial
  misc_feature: MA Experiment 20000070 PARAMETER Experiment Name: At_100uM_ABA_Mutants_cDNA_P Parameter: Treatment Value: 100uM ABA vs. No Treatment
  misc_feature: MA Experiment ID: 20000086 Result: Up-regulated in Transcription
  misc_feature: MA Experiment 20000086 PARAMETER Experiment Name: At_100uM_ABA_Mutants_cDNA_P Parameter: Plant Line Value: CS22
  misc_feature: MA Experiment 20000086 PARAMETER Experiment Name: At_100uM_ABA_Mutants_cDNA_P Parameter: Timepoint (hr) Value: 6
  misc_feature: MA Experiment 20000086 PARAMETER Experiment Name: At_100uM_ABA_Mutants_cDNA_P Parameter: Tissue Value: Aerial
  misc_feature: MA Experiment 20000086 PARAMETER Experiment Name: At_100uM_ABA_Mutants_cDNA_P Parameter: Treatment Value: 100uM ABA vs. No Treatment
  misc_feature: MA Experiment ID: 20000087 Result: Up-regulated in Transcription
  misc_feature: MA Experiment 20000087 PARAMETER Experiment Name: At_100uM_ABA_Mutants_cDNA_P Parameter: Plant Line Value: WS
  misc_feature: MA Experiment 20000087 PARAMETER Experiment Name: At_100uM_ABA_Mutants_cDNA_P Parameter: Timepoint (hr) Value: 6
  misc_feature: MA Experiment 20000087 PARAMETER Experiment Name: At_100uM_ABA_Mutants_cDNA_P Parameter: Tissue Value: Aerial
  misc_feature: MA Experiment 20000087 PARAMETER Experiment Name: At_100uM_ABA_Mutants_cDNA_P Parameter: Treatment Value: 100uM ABA vs. No Treatment
  misc_feature: MA Experiment ID: 20000088 Result: Up-regulated in Transcription
  misc_feature: MA Experiment 20000088 PARAMETER Experiment Name: At_100uM_ABA_Mutants_cDNA_P Parameter: Plant Line Value: Landsberg
  misc_feature: MA Experiment 20000088 PARAMETER Experiment Name: At_100uM_ABA_Mutants_cDNA_P Parameter: Timepoint (hr) Value: 6
  misc_feature: MA Experiment 20000088 PARAMETER Experiment Name: At_100uM_ABA_Mutants_cDNA_P Parameter: Tissue Value: Aerial
  misc_feature: MA Experiment 20000088 PARAMETER Experiment Name: At_100uM_ABA_Mutants_cDNA_P Parameter: Treatment Value: 100uM ABA vs. No Treatment
  misc_feature: MA Experiment ID: 20000090 Result: Up-regulated in Transcription
  misc_feature: MA Experiment ID: 20000184 Result: Down-regulated in Transcription
  misc_feature: MA Experiment 20000184 PARAMETER Experiment Name: At_Shoots__P Parameter: Age (day) Value: 7
  misc_feature: MA Experiment 20000184 PARAMETER Experiment Name: At_Shoots__P Parameter: Tissue Value: Shoots vs. Whole Plant
  misc_feature: MA Experiment ID: 20000185 Result: Down-regulated in Transcription
  misc_feature: MA Experiment 20000185 PARAMETER Experiment Name: At_Roots__P Parameter: Age (day) Value: 7 vs. 21
  misc_feature: MA Experiment 20000185 PARAMETER Experiment Name: At_Roots__P Parameter: Organism Value: A. thaliana
  misc_feature: MA Experiment 20000185 PARAMETER Experiment Name: At_Roots__P Parameter: Tissue Value: Roots vs. Whole Plant
  misc_feature: MA Experiment ID: 20000234 Result: Up-regulated in Transcription
  misc_feature: MA Experiment 20000234 PARAMETER Experiment Name: At_Siliques_P Parameter: Age (day) Value: 21
  misc_feature: MA Experiment 20000234 PARAMETER Experiment Name: At_Siliques_P Parameter: Organism Value: A. thaliana
  misc_feature: MA Experiment 20000234 PARAMETER Experiment Name: At_Siliques_P Parameter: Plant Line Value: WS
  misc_feature: MA Experiment 20000234 PARAMETER Experiment Name: At_Siliques_P Parameter: Tissue Value: Less Than 5mm Siliques vs. Whole Plant
  misc_feature: MA Experiment ID: 20000264 Result: Up-regulated in Transcription
  misc_feature: MA Experiment 20000264 PARAMETER Experiment Name: At_Open_Flower_P Parameter: Age (day) Value: 21
  misc_feature: MA Experiment 20000264 PARAMETER Experiment Name: At_Open_Flower_P Parameter: Plant Line Value: WS
  misc_feature: MA Experiment 20000264 PARAMETER Experiment Name: At_Open_Flower_P Parameter: Tissue Value: Open Flower vs. Whole Plant
  misc_feature: MA Experiment ID: 20000439 Result: Down-regulated in Transcription
  misc_feature: MA Experiment 20000439 PARAMETER Experiment Name: At_Roots__P Parameter: Age (day) Value: 14 vs. 21
  misc_feature: MA Experiment 20000439 PARAMETER Experiment Name: At_Roots__P Parameter: Organism Value: A. thaliana
  misc_feature: MA Experiment 20000439 PARAMETER Experiment Name: At_Roots__P Parameter: Tissue Value: Roots vs. Whole Plant
  misc_feature: MA Experiment ID: 20000794 Result: Down-regulated in Transcription
  misc_feature: MA Experiment 20000794 PARAMETER Experiment Name: At_Petals_P Parameter: Age (day) Value: 23-25 days
  misc_feature: MA Experiment 20000794 PARAMETER Experiment Name: At_Petals_P Parameter: Plant Line Value: WS
  misc_feature: MA Experiment 20000794 PARAMETER Experiment Name: At_Petals_P Parameter: Tissue Value: Petals vs. Whole plant
  misc_feature: MA Experiment ID: 20001906 Result: Down-regulated in Transcription
  misc_feature: MA Experiment 20001906 PARAMETER Experiment Name: At_Drought_Reproduction_P Parameter: Age (day) Value: 35
  misc_feature: MA Experiment 20001906 PARAMETER Experiment Name: At_Drought_Reproduction_P Parameter: Organism Value: A. thaliana
  misc_feature: MA Experiment 20001906 PARAMETER Experiment Name: At_Drought_Reproduction_P Parameter: Plant Line Value: WS
  misc_feature: MA Experiment 20001906 PARAMETER Experiment Name: At_Drought_Reproduction_P Parameter: Timepoint (day) Value: 5
  misc_feature: MA Experiment 20001906 PARAMETER Experiment Name: At_Drought_Reproduction_P Parameter: Tissue Value: Siliques
  misc_feature: MA Experiment 20001906 PARAMETER Experiment Name: At_Drought_Reproduction_P Parameter: Treatment Value: Drought vs. No Drought
  misc_feature: MA Experiment ID: 20001908 Result: Down-regulated in Transcription
  misc_feature: MA Experiment 20001908 PARAMETER Experiment Name: At_Drought_Reproduction_P Parameter: Age (day) Value: 40
  misc_feature: MA Experiment 20001908 PARAMETER Experiment Name: At_Drought_Reproduction_P Parameter: Organism Value: A. thaliana
  misc_feature: MA Experiment 20001908 PARAMETER Experiment Name: At_Drought_Reproduction_P Parameter: Plant Line Value: WS
  misc_feature: MA Experiment 20001908 PARAMETER Experiment Name: At_Drought_Reproduction_P Parameter: Timepoint (day) Value: 10
  misc_feature: MA Experiment 20001908 PARAMETER Experiment Name: At_Drought_Reproduction_P Parameter: Tissue Value: Siliques
  misc_feature: MA Experiment 20001908 PARAMETER Experiment Name: At_Drought_Reproduction_P Parameter: Treatment Value: Drought vs. No Drought
atattaatttcttcaattaaccttgataagagttaaaaaagtaaaaaacatcgagaagagttgtagctgtggtcaacacttgagaggcagcacgatgagctccatatggaacgttgcaatgttgatggtagctttggtggttgtgaggatcagccactggctttaccgatggtcaaaccctaagtgccctggcaagttaccacctggatcgatgggttttccaatcattggagagactctcgatttctttaagccttgtggagtcgaaggtatcccaacctttgttaagaagaggatgataaggtatgggccgttgtttcgaacaaacatttttggttccaaaaccgtggtttcgacagatccggatgtgatccaccagattttccggcaagagaacacgtcttttgagctaggctatccagacatatttgtgaaagtatttggaaaagataatttgttcttgaaggaagtgttcatccacaagtacctccaaaaaatcactatgcaaattcttggctccgagggtttgaagcaaacaatgttaggaaacatggacaaagcaacccgcgaccatattaggtccattgctagccaggggagcttcaatgttcgtaaagaagttgaaaacttggtagtagcgtacatgacaccaaagctgataagtaaccttaaaccagagacgcaatcaaagcttatagataatctcaacgccttcaatcttgattggtttaagtccttcttaagactctctacttggaaagctgtcaccaaagccctcaagtcacgcgaagaagctatccaggtgatgaaagacgttctcatgatgagaaaagagacgcgagagaagcaagaagacttccttaacacgcttctagaagaactggagaaagacggtagctttttcgaccaaggatcggctataaatctcatcttccttctggcgtttgccttgagagaaggtacctctagttgtactgctttggccgtgaagttcatatccaaagacccgaaagtgcttgcagagctcaagcgtgagcataaggcaattgtagacaacagaaaagataaggaagctggagttagctgggaagaatatagacacaacatgactttcaccaacatggttagcaatgaggtgcttcgcctagcaaacacgacccctttgttgtttcgaaaggcggtgcaagatgttgagatcaaaggatatacaattccggctggttggattgtggcggttgcaccttcagcggttcattttgatcctgcaatctatgagaacccatttgagtttaatccatggagatgggaggggaaagaaatgatttggggatctaaaacgttcatggcgtttggatatggagttagactttgtgtaggtgcagagttttcacggcttcaaatggcaatcttcctccatcatcttgtggcatattacgatttctcaatggtccaagactccgagatcattcgttcaccattccatcaatacaccaaggatctgcttataaacatctctcagtctcctaccaagtgaaccatgcatgcagtttccaaatcttaataatcagatcattatatgcaataatctcatttcctgcttccgcaaaatctctggagtctttttatatgtaatatgcgatctctataatttttaaaaagtatctatcttgtcaaat

SEQ ID NO: 105771 - protein, 479 aa, Arabidopsis thaliana; identical to SEQ ID NO: 24496
  peptide (1)..(479): Ceres Seq. ID no. 13617935
  misc_feature (1)..(479): Homolog of NCBI NO: 15218388 NR Description: cytochrome P450, putative; protein id: supported by cDNA: gi_17473540 [Arabidopsis thaliana]
  misc_feature (1)..(370): Homolog of NCBI NO: 25282639 NR Description: hypothetical protein T30F21.17 [imported] - thaliana >gi|4836883|gb|AAD30586.1|AC007260_17 Similar to
  misc_feature (402)..(479): Homolog of NCBI NO: 25282639 NR Description: hypothetical protein T30F21.17 [imported] - thaliana >gi|4836883|gb|AAD30586.1|AC007260_17 Similar to
  misc_feature (1)..(476): Homolog of NCBI NO: 30695347 NR Description: cytochrome p450 family [Arabidopsis thaliana]
  misc_feature (1)..(476): Homolog of NCBI NO: 22530982 NR Description: cytochrome P450-like protein [Arabidopsis
  misc_feature (1)..(476): Homolog of NCBI NO: 30695352 NR Description: cytochrome p450 family [Arabidopsis thaliana]
  misc_feature (1)..(345): Homolog of NCBI NO: 15230572 NR Description: cytochrome P450 family [Arabidopsis thaliana]
  misc_feature (370)..(479): Homolog of NCBI NO: 15230572 NR Description: cytochrome P450 family [Arabidopsis thaliana]
  misc_feature (1)..(477): Homolog of NCBI NO: 15222806 NR Description: cytochrome P450, putative [Arabidopsis thaliana]
  misc_feature (4)..(465): Homolog of NCBI NO: 30682922 NR Description: cytochrome P450, putative [Arabidopsis thaliana]

SEQ ID NO: 105772 - protein, 471 aa, Arabidopsis thaliana; identical to SEQ ID NO: 24497
  peptide (1)..(471): Ceres Seq. ID no. 13617936
  misc_feature (1)..(471): Homolog of NCBI NO: 15218388 NR Description: cytochrome P450, putative; protein id: supported by cDNA: gi_17473540 [Arabidopsis thaliana]
  misc_feature (1)..(362): Homolog of NCBI NO: 25282639 NR Description: hypothetical protein T30F21.17 [imported] - thaliana >gi|4836883|gb|AAD30586.1|AC007260_17 Similar to
  misc_feature (394)..(471): Homolog of NCBI NO: 25282639 NR Description: hypothetical protein T30F21.17 [imported] - thaliana >gi|4836883|gb|AAD30586.1|AC007260_17 Similar to
  misc_feature (1)..(468): Homolog of NCBI NO: 30695347 NR Description: cytochrome p450 family [Arabidopsis thaliana]
  misc_feature (1)..(468): Homolog of NCBI NO: 22530982 NR Description: cytochrome P450-like protein [Arabidopsis
  misc_feature (1)..(468): Homolog of NCBI NO: 30695352 NR Description: cytochrome p450 family [Arabidopsis thaliana]
  misc_feature (1)..(337): Homolog of NCBI NO: 15230572 NR Description: cytochrome P450 family [Arabidopsis thaliana]
  misc_feature (362)..(471): Homolog of NCBI NO: 15230572 NR Description: cytochrome P450 family [Arabidopsis thaliana]
  misc_feature (1)..(469): Homolog of NCBI NO: 15222806 NR Description: cytochrome P450, putative [Arabidopsis thaliana]
  misc_feature (1)..(457): Homolog of NCBI NO: 30682922 NR Description: cytochrome P450, putative [Arabidopsis thaliana]

SEQ ID NO: 105773 - protein, 469 aa, Arabidopsis thaliana; identical to SEQ ID NO: 24498
  peptide (1)..(469): Ceres Seq. ID no. 13617937
  misc_feature (1)..(469): Homolog of NCBI NO: 15218388 NR Description: cytochrome P450, putative; protein id: supported by cDNA: gi_17473540 [Arabidopsis thaliana]
  misc_feature (1)..(360): Homolog of NCBI NO: 25282639 NR Description: hypothetical protein T30F21.17 [imported] - thaliana >gi|4836883|gb|AAD30586.1|AC007260_17 Similar to
  misc_feature (392)..(469): Homolog of NCBI NO: 25282639 NR Description: hypothetical protein T30F21.17 [imported] - thaliana >gi|4836883|gb|AAD30586.1|AC007260_17 Similar to
  misc_feature (1)..(466): Homolog of NCBI NO: 30695347 NR Description: cytochrome p450 family [Arabidopsis thaliana]
  misc_feature (1)..(466): Homolog of NCBI NO: 22530982 NR Description: cytochrome P450-like protein [Arabidopsis
  misc_feature (1)..(466): Homolog of NCBI NO: 30695352 NR Description: cytochrome p450 family [Arabidopsis thaliana]
  misc_feature (1)..(335): Homolog of NCBI NO: 15230572 NR Description: cytochrome P450 family [Arabidopsis thaliana]
  misc_feature (360)..(469): Homolog of NCBI NO: 15230572 NR Description: cytochrome P450 family [Arabidopsis thaliana]
  misc_feature (1)..(467): Homolog of NCBI NO: 15222806 NR Description: cytochrome P450, putative [Arabidopsis thaliana]
  misc_feature (1)..(455): Homolog of NCBI NO: 30682922 NR Description: cytochrome P450, putative [Arabidopsis thaliana]

SEQ ID NO: 105774 - DNA, 943 bp, Arabidopsis thaliana
  misc_feature (1)..(943): Ceres Seq. ID no. 13617946
  misc_feature: MA Experiment ID: 108434 Result: Up-regulated in Transcription
  misc_feature: MA Experiment 108434 PARAMETER Experiment Name: At_Root_Tips_cDNA_P Parameter: Tissue Value: Root Tips
  misc_feature: MA Experiment ID: 108435 Result: Down-regulated in Transcription
  misc_feature: MA Experiment 108435 PARAMETER Experiment Name: At_stm_Mutants_cDNA_P Parameter: Plant Line Value: wt Landsburg vs stm
  misc_feature: MA Experiment 108435 PARAMETER Experiment Name: At_stm_Mutants_cDNA_P Parameter: Tissue Value: Shoot Apical Meristem Region
  misc_feature: MA Experiment ID: 108488 Result: Up-regulated in Transcription
  misc_feature: MA Experiment ID: 108595 Result: Down-regulated in Transcription
  misc_feature: MA Experiment 108595 PARAMETER Experiment Name: At_Ler-pi_Ovule_cDNA_P Parameter: Plant Line Value: null
  misc_feature: MA Experiment ID: 20000071 Result: Down-regulated in Transcription
  misc_feature: MA Experiment 20000071 PARAMETER Experiment Name: At_100uM_ABA_Mutants_cDNA_P Parameter: Plant Line Value: CS8104
  misc_feature: MA Experiment 20000071 PARAMETER Experiment Name: At_100uM_ABA_Mutants_cDNA_P Parameter: Timepoint (hr) Value: 6
  misc_feature: MA Experiment 20000071 PARAMETER Experiment Name: At_100uM_ABA_Mutants_cDNA_P Parameter: Tissue Value: Aerial
  misc_feature: MA Experiment 20000071 PARAMETER Experiment Name: At_100uM_ABA_Mutants_cDNA_P Parameter: Treatment Value: 100uM ABA vs. No Treatment
  misc_feature: MA Experiment ID: 20000185 Result: Down-regulated in Transcription
  misc_feature: MA Experiment 20000185 PARAMETER Experiment Name: At_Roots__P Parameter: Age (day) Value: 7 vs. 21
  misc_feature: MA Experiment 20000185 PARAMETER Experiment Name: At_Roots__P Parameter: Organism Value: A. thaliana
  misc_feature: MA Experiment 20000185 PARAMETER Experiment Name: At_Roots__P Parameter: Tissue Value: Roots vs. Whole Plant
  misc_feature: MA Experiment ID: 20000437 Result: Down-regulated in Transcription
  misc_feature: MA Experiment 20000437 PARAMETER Experiment Name: At_Drought_P Parameter: Age (day) Value: 8
  misc_feature: MA Experiment 20000437 PARAMETER Experiment Name: At_Drought_P Parameter: Organism Value: A. thaliana
  misc_feature: MA Experiment 20000437 PARAMETER Experiment Name: At_Drought_P Parameter: Plant Line Value: WS
  misc_feature: MA Experiment 20000437 PARAMETER Experiment Name: At_Drought_P Parameter: Timepoint (hr) Value: 24
  misc_feature: MA Experiment 20000437 PARAMETER Experiment Name: At_Drought_P Parameter: Tissue Value: Whole Plant
  misc_feature: MA Experiment 20000437 PARAMETER Experiment Name: At_Drought_P Parameter: Treatment Value: Drought vs. No Drought
  misc_feature: MA Experiment ID: 20000439 Result: Down-regulated in Transcription
  misc_feature: MA Experiment 20000439 PARAMETER Experiment Name: At_Roots__P Parameter: Age (day) Value: 14 vs. 21
  misc_feature: MA Experiment 20000439 PARAMETER Experiment Name: At_Roots__P Parameter: Organism Value: A. thaliana
  misc_feature: MA Experiment 20000439 PARAMETER Experiment Name: At_Roots__P Parameter: Tissue Value: Roots vs. Whole Plant
  misc_feature: MA Experiment ID: 20000794 Result: Down-regulated in Transcription
  misc_feature: MA Experiment 20000794 PARAMETER Experiment Name: At_Petals_P Parameter: Age (day) Value: 23-25 days
  misc_feature: MA Experiment 20000794 PARAMETER Experiment Name: At_Petals_P Parameter: Plant Line Value: WS
  misc_feature: MA Experiment 20000794 PARAMETER Experiment Name: At_Petals_P Parameter: Tissue Value: Petals vs. Whole plant
  misc_feature: MA Experiment ID: 20001757 Result: Up-regulated in Transcription
  misc_feature: MA Experiment 20001757 PARAMETER Experiment Name: At_50mM_NH4NO3_L-to-H_P Parameter: Timepoint (hr) Value: 6
  misc_feature: MA Experiment 20001757 PARAMETER Experiment Name: At_50mM_NH4NO3_L-to-H_P Parameter: Tissue Value: Leaf
  misc_feature: MA Experiment 20001757 PARAMETER Experiment Name: At_50mM_NH4NO3_L-to-H_P Parameter: Treatment Value: 50mM NH4NO3 vs 100mM Mannitol
  misc_feature: MA Experiment ID: 20001906 Result: Down-regulated in Transcription
  misc_feature: MA Experiment 20001906 PARAMETER Experiment Name: At_Drought_Reproduction_P Parameter: Age (day) Value: 35
  misc_feature: MA Experiment 20001906 PARAMETER Experiment Name: At_Drought_Reproduction_P Parameter: Organism Value: A. thaliana
  misc_feature: MA Experiment 20001906 PARAMETER Experiment Name: At_Drought_Reproduction_P Parameter: Plant Line Value: WS
  misc_feature: MA Experiment 20001906 PARAMETER Experiment Name: At_Drought_Reproduction_P Parameter: Timepoint (day) Value: 5
  misc_feature: MA Experiment 20001906 PARAMETER Experiment Name: At_Drought_Reproduction_P Parameter: Tissue Value: Siliques
  misc_feature: MA Experiment 20001906 PARAMETER Experiment Name: At_Drought_Reproduction_P Parameter: Treatment Value: Drought vs. No Drought
  misc_feature: MA Experiment ID: 20001911 Result: Down-regulated in Transcription
  misc_feature: MA Experiment 20001911 PARAMETER Experiment Name: At_Drought_Reproduction_P Parameter: Age (day) Value: 40
  misc_feature: MA Experiment 20001911 PARAMETER Experiment Name: At_Drought_Reproduction_P Parameter: Organism Value: A. thaliana
  misc_feature: MA Experiment 20001911 PARAMETER Experiment Name: At_Drought_Reproduction_P Parameter: Plant Line Value: WS
  misc_feature: MA Experiment 20001911 PARAMETER Experiment Name: At_Drought_Reproduction_P Parameter: Timepoint (day) Value: 10
  misc_feature: MA Experiment 20001911 PARAMETER Experiment Name: At_Drought_Reproduction_P Parameter: Tissue Value: Flowers
  misc_feature: MA Experiment 20001911 PARAMETER Experiment Name: At_Drought_Reproduction_P Parameter: Treatment Value: Drought vs. No Drought
ggaaagagcagaagaaatttgcagaagagagaaaaacaaaaatggcggttctttgctcgtcttcgacggtgatactctcttcttcttccgtgaaatcctccggaagtgagagaaagtctccgtttttagggttctctttaacggctatctcgaagccgtcggtacgagtcggcatttatgcgaattcgaaaagaggattgcaagtgaagtgtgaagctgagccgacgacgacgacttctcttgttccggcgaatcaacgatggatgttcgacgaagaagaagctaatggccctgacatctggaacacgacatggtatccaaaagcttcagaccatgtgaacacggacaagccctggtttgtggttgatgcaactgacaaaattcttggtagattggcatcgacaattgctaatcacatccgtgggaagaatcttgcctcttacactcctagtgtcgacatgggagcttttgtgattgtggtgaatgctgagaaagttgctgtatctggaaagaagcgtaaccaaaagctgtacaggaggcattcaggacgacctggtggtatgacagtagagacatttgatcaattgcagcagagaattcctgaaagaatcgttgagcatgctgttcgtggaatgcttccaaagggacggcttgggagagctctgttcaatcacctgaaggtgtacaaaggccctgaccatcctcacgaggcccagaaaccgcttgatctgcctatcagggacaagagaatacagctgcaaaaatagaagctccaccactgttccattatcgccaagcgcagagagttttttcttctcaggtttctgtagtttcttcatcccaaaaccagaggaggctttacagattcttgttttcgcttctatcaactctgttatgctacaaaactttctaatttgaaatatttctcgttatttttttttgc

SEQ ID NO: 105775 - protein, 254 aa, Arabidopsis thaliana
  peptide (1)..(254): Ceres Seq. ID no. 13617947
  misc_feature (118)..(245): Pfam Name: Ribosomal protein L13 Pfam Description: Ribosomal protein L13
  misc_feature (14)..(254): Homolog of NCBI NO: 15218435 NR Description: ribosomal protein L13p family [Arabidopsis
  misc_feature (14)..(254): Homolog of NCBI NO: 132659 NR Description: 50S RIBOSOMAL PROTEIN L13, CHLOROPLAST PRECURSOR
  misc_feature (65)..(251): Homolog of NCBI NO: 34909522 NR Description: putative ribosomal protein L13 [Oryza sativa
  misc_feature (115)..(245): Homolog of NCBI NO: 17231680 NR Description: 50S ribosomal protein L13 [Nostoc sp. PCC 7120]
  misc_feature (118)..(245): Homolog of NCBI NO: 22297652 NR Description: 50S ribosomal protein L13 [Thermosynechococcus BP- 1] >gi|22293829|dbj|BAC07661.1| 50S ribosomal protein L13
  misc_feature (115)..(245): Homolog of NCBI NO: 33864025 NR Description: 50S ribosomal protein L13 [Prochlorococcus str. MIT 9313] >gi|33635609|emb|CAE21933.1| 50S ribosomal protein
  misc_feature (113)..(245): Homolog of NCBI NO: 16329914 NR Description: 50S ribosomal protein L13 [Synechocystis sp. PCC
  misc_feature (101)..(245): Homolog of NCBI NO: 33241135 NR Description: Ribosomal protein L13 [Prochlorococcus marinus marinus str. CCMP1375] >gi|33238665|gb|AAQ00730.1| Ribosomal
  misc_feature (115)..(235): Homolog of NCBI NO: 23124102 NR Description: hypothetical protein [Nostoc punctiforme]
  misc_feature (116)..(246): Homolog of NCBI NO: 23042794 NR Description: hypothetical protein [Trichodesmium erythraeum
KEQKKFAEERKTKMAVLCSSSTVILSSSSVKSSGSERKSPFLGFSLTAISKPSVRVGIYANSKRGLQVKCEAEPTTTTSLVPANQRWMFDEEEANGPDIWNTTWYPKASDHVNTDKPWFVVDATDKILGRLASTIANHIRGKNLASYTPSVDMGAFVIVVNAEKVAVSGKKRNQKLYRRHSGRPGGMTVETFDQLQQRIPERIVEHAVRGMLPKGRLGRALFNHLKVYKGPDHPHEAQKPLDLPIRDKRIQLQK

SEQ ID NO: 105776 - protein, 241 aa, Arabidopsis thaliana; identical to SEQ ID NO: 22013
  peptide (1)..(241): Ceres Seq. ID no. 13617948
  misc_feature (105)..(232): Pfam Name: Ribosomal protein L13 Pfam Description: Ribosomal protein L13
  misc_feature (1)..(241): Homolog of NCBI NO: 15218435 NR Description: ribosomal protein L13p family [Arabidopsis
  misc_feature (1)..(241): Homolog of NCBI NO: 132659 NR Description: 50S RIBOSOMAL PROTEIN L13, CHLOROPLAST PRECURSOR
  misc_feature (52)..(238): Homolog of NCBI NO: 34909522 NR Description: putative ribosomal protein L13 [Oryza sativa
  misc_feature (102)..(232): Homolog of NCBI NO: 17231680 NR Description: 50S ribosomal protein L13 [Nostoc sp. PCC 7120]
  misc_feature (105)..(232): Homolog of NCBI NO: 22297652 NR Description: 50S ribosomal protein L13 [Thermosynechococcus BP- 1] >gi|22293829|dbj|BAC07661.1| 50S ribosomal protein L13
  misc_feature (102)..(232): Homolog of NCBI NO: 33864025 NR Description: 50S ribosomal protein L13 [Prochlorococcus str. MIT 9313] >gi|33635609|emb|CAE21933.1| 50S ribosomal protein
  misc_feature (100)..(232): Homolog of NCBI NO: 16329914 NR Description: 50S ribosomal protein L13 [Synechocystis sp. PCC
  misc_feature (88)..(232): Homolog of NCBI NO: 33241135 NR Description: Ribosomal protein L13 [Prochlorococcus marinus marinus str. CCMP1375] >gi|33238665|gb|AAQ00730.1| Ribosomal
  misc_feature (102)..(222): Homolog of NCBI NO: 23124102 NR Description: hypothetical protein [Nostoc punctiforme]
  misc_feature (103)..(233): Homolog of NCBI NO: 23042794 NR Description: hypothetical protein [Trichodesmium erythraeum

SEQ ID NO: 105777 - protein, 167 aa, Arabidopsis thaliana; identical to SEQ ID NO: 22014
  peptide (1)..(167): Ceres Seq. ID no. 13617949
  misc_feature (31)..(158): Pfam Name: Ribosomal protein L13 Pfam Description: Ribosomal protein L13
  misc_feature (1)..(167): Homolog of NCBI NO: 15218435 NR Description: ribosomal protein L13p family [Arabidopsis
  misc_feature (1)..(167): Homolog of NCBI NO: 132659 NR Description: 50S RIBOSOMAL PROTEIN L13, CHLOROPLAST PRECURSOR
  misc_feature (1)..(164): Homolog of NCBI NO: 34909522 NR Description: putative ribosomal protein L13 [Oryza sativa
  misc_feature (28)..(158): Homolog of NCBI NO: 17231680 NR Description: 50S ribosomal protein L13 [Nostoc sp. PCC 7120]
  misc_feature (31)..(158): Homolog of NCBI NO: 22297652 NR Description: 50S ribosomal protein L13 [Thermosynechococcus BP- 1] >gi|22293829|dbj|BAC07661.1| 50S ribosomal protein L13
  misc_feature (28)..(158): Homolog of NCBI NO: 33864025 NR Description: 50S ribosomal protein L13 [Prochlorococcus str. MIT 9313] >gi|33635609|emb|CAE21933.1| 50S ribosomal protein
  misc_feature (26)..(158): Homolog of NCBI NO: 16329914 NR Description: 50S ribosomal protein L13 [Synechocystis sp. PCC
  misc_feature (14)..(158): Homolog of NCBI NO: 33241135 NR Description: Ribosomal protein L13 [Prochlorococcus marinus marinus str. CCMP1375] >gi|33238665|gb|AAQ00730.1| Ribosomal
  misc_feature (28)..(148): Homolog of NCBI NO: 23124102 NR Description: hypothetical protein [Nostoc punctiforme]
  misc_feature (29)..(159): Homolog of NCBI NO: 23042794 NR Description: hypothetical protein [Trichodesmium erythraeum

SEQ ID NO: 105778 - DNA, 832 bp, Arabidopsis thaliana
  misc_feature (1)..(832): Ceres Seq. ID no. 13617970
  misc_feature: MA Experiment ID: 108434 Result: Down-regulated in Transcription
  misc_feature: MA Experiment 108434 PARAMETER Experiment Name: At_Root_Tips_cDNA_P Parameter: Tissue Value: Root Tips
  misc_feature: MA Experiment ID: 108462 Result: Down-regulated in Transcription
  misc_feature: MA Experiment 108462 PARAMETER Experiment Name: At_Germinating_Seeds_cDNA_P Parameter: Age (day) Value: 2 vs. 0
  misc_feature: MA Experiment 108462 PARAMETER Experiment Name: At_Germinating_Seeds_cDNA_P Parameter: Tissue Value: Germinating Seeds
  misc_feature: MA Experiment ID: 108463 Result: Down-regulated in Transcription
  misc_feature: MA Experiment 108463 PARAMETER Experiment Name: At_Germinating_Seeds_cDNA_P Parameter: Age (day) Value: 3 vs. 0
  misc_feature: MA Experiment 108463 PARAMETER Experiment Name: At_Germinating_Seeds_cDNA_P Parameter: Tissue Value: Germinating Seeds
  misc_feature: MA Experiment ID: 108501 Result: Up-regulated in Transcription
  misc_feature: MA Experiment 108501 PARAMETER Experiment Name: At_ap2_floral_buds_cDNA_P Parameter: Plant Line Value: ap2 (Ler.)
  misc_feature: MA Experiment 108501 PARAMETER Experiment Name: At_ap2_floral_buds_cDNA_P Parameter: Tissue Value: Closed Flower
  misc_feature: MA Experiment ID: 20000179 Result: Up-regulated in Transcription
  misc_feature: MA Experiment 20000179 PARAMETER Experiment Name: At_Germinating_Seeds_P Parameter: Age (hr) Value: 6 vs. 0
  misc_feature: MA Experiment 20000179 PARAMETER Experiment Name: At_Germinating_Seeds_P Parameter: Tissue Value: Germinating Seeds
  misc_feature: MA Experiment ID: 20000184 Result: Down-regulated in Transcription
  misc_feature: MA Experiment 20000184 PARAMETER Experiment Name: At_Shoots__P Parameter: Age (day) Value: 7
  misc_feature: MA Experiment 20000184 PARAMETER Experiment Name: At_Shoots__P Parameter: Tissue Value: Shoots vs. Whole Plant
  misc_feature: MA Experiment ID: 20000227 Result: Down-regulated in Transcription
  misc_feature: MA Experiment 20000227 PARAMETER Experiment Name: At_Root-Tips-vs-Tops_P Parameter: Tissue Value: Root Tips vs. Root Tops
  misc_feature: MA Experiment ID: 20000234 Result: Up-regulated in Transcription
  misc_feature: MA Experiment 20000234 PARAMETER Experiment Name: At_Siliques_P Parameter: Age (day) Value: 21
  misc_feature: MA Experiment 20000234 PARAMETER Experiment Name: At_Siliques_P Parameter: Organism Value: A. thaliana
  misc_feature: MA Experiment 20000234 PARAMETER Experiment Name: At_Siliques_P Parameter: Plant Line Value: WS
  misc_feature: MA Experiment 20000234 PARAMETER Experiment Name: At_Siliques_P Parameter: Tissue Value: Less Than 5mm Siliques vs. Whole Plant
  misc_feature: MA Experiment ID: 20000235 Result: Up-regulated in Transcription
  misc_feature: MA Experiment 20000235 PARAMETER Experiment Name: At_Siliques_P Parameter: Age (day) Value: 21
  misc_feature: MA Experiment 20000235 PARAMETER Experiment Name: At_Siliques_P Parameter: Organism Value: A. thaliana
  misc_feature: MA Experiment 20000235 PARAMETER Experiment Name: At_Siliques_P Parameter: Plant Line Value: WS
  misc_feature: MA Experiment 20000235 PARAMETER Experiment Name: At_Siliques_P Parameter: Tissue Value: 5-10mm Siliques vs. Whole Plant
  misc_feature: MA Experiment ID: 20000264 Result: Up-regulated in Transcription
  misc_feature: MA Experiment 20000264 PARAMETER Experiment Name: At_Open_Flower_P Parameter: Age (day) Value: 21
  misc_feature: MA Experiment 20000264 PARAMETER Experiment Name: At_Open_Flower_P Parameter: Plant Line Value: WS
  misc_feature: MA Experiment 20000264 PARAMETER Experiment Name: At_Open_Flower_P Parameter: Tissue Value: Open Flower vs. Whole Plant
  misc_feature: MA Experiment ID: 20000286 Result: Up-regulated in Transcription
  misc_feature: MA Experiment 20000286 PARAMETER Experiment Name: At_Open_Flower_P Parameter: Age (day) Value: 21
  misc_feature: MA Experiment 20000286 PARAMETER Experiment Name: At_Open_Flower_P Parameter: Plant Line Value: WS
  misc_feature: MA Experiment 20000286 PARAMETER Experiment Name: At_Open_Flower_P Parameter: Tissue Value: Half Open vs. Whole Plant
  misc_feature: MA Experiment ID: 20000438 Result: Down-regulated in Transcription
  misc_feature: MA Experiment 20000438 PARAMETER Experiment Name: At_Shoots__P Parameter: Age (day) Value: 14
  misc_feature: MA Experiment 20000438 PARAMETER Experiment Name: At_Shoots__P Parameter: Tissue Value: Shoots vs. Whole Plant
  misc_feature: MA Experiment ID: 20000495 Result: Up-regulated in Transcription
  misc_feature: MA Experiment 20000495 PARAMETER Experiment Name: At_Guard_Cells_P Parameter: Harvest Date Value: 8/2/2002
  misc_feature: MA Experiment 20000495 PARAMETER Experiment Name: At_Guard_Cells_P Parameter: Organism Value: A. thaliana
  misc_feature: MA Experiment 20000495 PARAMETER Experiment Name: At_Guard_Cells_P Parameter: Tissue Value: Guard Cells vs. Leaves
  misc_feature: MA Experiment ID: 20000794 Result: Up-regulated in Transcription
  misc_feature: MA Experiment 20000794 PARAMETER Experiment Name: At_Petals_P Parameter: Age (day) Value: 23-25 days
  misc_feature: MA Experiment 20000794 PARAMETER Experiment Name: At_Petals_P Parameter: Plant Line Value: WS
  misc_feature: MA Experiment 20000794 PARAMETER Experiment Name: At_Petals_P Parameter: Tissue Value: Petals vs. Whole plant
  misc_feature: MA Experiment ID: 20001555 Result: Up-regulated in Transcription
  misc_feature: MA Experiment 20001555 PARAMETER Experiment Name: At_Drought_Soil_Dry_P Parameter: Age (day) Value: 24
  misc_feature: MA Experiment 20001555 PARAMETER Experiment Name: At_Drought_Soil_Dry_P Parameter: Organism Value: A. thaliana
  misc_feature: MA Experiment 20001555 PARAMETER Experiment Name: At_Drought_Soil_Dry_P Parameter: Plant Line Value: WS
  misc_feature: MA Experiment 20001555 PARAMETER Experiment Name: At_Drought_Soil_Dry_P Parameter: Post Timepoint (hr) Value: None
  misc_feature: MA Experiment 20001555 PARAMETER Experiment Name: At_Drought_Soil_Dry_P Parameter: Post-Treatment Value: None
  misc_feature: MA Experiment 20001555 PARAMETER Experiment Name: At_Drought_Soil_Dry_P Parameter: Timepoint (day) Value: 10
  misc_feature: MA Experiment 20001555 PARAMETER Experiment Name: At_Drought_Soil_Dry_P Parameter: Treatment Value: Drought vs. No Drought
attaaaaagctaatatggctactagggaagagagagataagtatagatcagtccttgaagatgcaggacaggttcaatggaggtatgataaccctccagacttcaatagtgtgaaccagctctttgaagaaggccagactaaggtgtggccagaaggttcgttagaagagacagtgcaaaacgcgatcaagtcatgggagatggagttctcacataagatccgtttacaggacttcaagactataaaccctgagaagtttaagctctttgtcaatgggagagaaggtttatcagctgaagagacgcttaggcttgggagttacaatgctttgctcaagaactctttgcctgaagagtttcagtactataagcccgaggaagagagctttgagtcatcacatgacgcctttagatctgctttaccacgcgggtttgcgtgggaaatactctctgtgtactcggggcctcctgttatagccttcaaatttagacactggggatactttgaaggaactttcaaaggtcatgctcctactggggaaatggttcaattcctgggtctaggagttctaaaggttgacgaatcacttagagcagaggagattgagatttactatgatccaggagagctgttcgggggactactcaagggacctcctatatcagagaccaaaaccacagacagtggagacaacactgcagagaaacaaagctgcccattcacacactaagataataagaaaagtagaagtgtatttgaccctttaaagaatatattgtaacagtctcttggttattgatgcatggaataaattataagttatgttaggcg

SEQ ID NO: 105779 - protein, 238 aa, Arabidopsis thaliana; identical to SEQ ID NO: 25832
  peptide (1)..(238): Ceres Seq. ID no. 13617971
  misc_feature (1)..(238): Homolog of NCBI NO: 18412106 NR Description: expressed protein [Arabidopsis thaliana]
  misc_feature (15)..(238): Homolog of NCBI NO: 25372796 NR Description: hypothetical protein F9K20.18 [imported] - thaliana >gi|3834316|gb|AAC83032.1| Similar to gb|X16648 related protein from Hordeum vulgare. EST gb|Z18206 comes from
  misc_feature (63)..(238): Homolog of NCBI NO: 30699354 NR Description: expressed protein [Arabidopsis thaliana]
  misc_feature (8)..(231): Homolog of NCBI NO: 34910864 NR Description: putative pathogenesis related protein [Oryza
  misc_feature (8)..(214): Homolog of NCBI NO: 34910862 NR Description: putative pathogenesis related protein [Oryza
  misc_feature (7)..(225): Homolog of NCBI NO: 34904656 NR Description: putative pathogenesis related protein [Oryza
  misc_feature (8)..(219): Homolog of NCBI NO: 34904652 NR Description: putative pathogenesis related protein [Oryza
  misc_feature (1)..(217): Homolog of NCBI NO: 1346809 NR Description: Pathogen-related protein >gi|7489402|pir||T06168
  misc_feature (5)..(238): Homolog of NCBI NO: 23129762 NR Description: hypothetical protein [Nostoc punctiforme]
  misc_feature (13)..(213): Homolog of NCBI NO: 17227713 NR Description: similar to pathogenesis related protein [Nostoc

SEQ ID NO: 105780 - protein, 176 aa, Arabidopsis thaliana; identical to SEQ ID NO: 25833
  peptide (1)..(176): Ceres Seq. ID no. 13617972
  misc_feature (1)..(176): Homolog of NCBI NO: 18412106 NR Description: expressed protein [Arabidopsis thaliana]
  misc_feature (1)..(176): Homolog of NCBI NO: 25372796 NR Description: hypothetical protein F9K20.18 [imported] - thaliana >gi|3834316|gb|AAC83032.1| Similar to gb|X16648 related protein from Hordeum vulgare. EST gb|Z18206 comes from
  misc_feature (1)..(176): Homolog of NCBI NO: 30699354 NR Description: expressed protein [Arabidopsis thaliana]
  misc_feature (1)..(169): Homolog of NCBI NO: 34910864 NR Description: putative pathogenesis related protein [Oryza
  misc_feature (1)..(152): Homolog of NCBI NO: 34910862 NR Description: putative pathogenesis related protein [Oryza
  misc_feature (1)..(163): Homolog of NCBI NO: 34904656 NR Description: putative pathogenesis related protein [Oryza
  misc_feature (1)..(157): Homolog of NCBI NO: 34904652 NR Description: putative pathogenesis related protein [Oryza
  misc_feature (1)..(155): Homolog of NCBI NO: 1346809 NR Description: Pathogen-related protein >gi|7489402|pir||T06168
  misc_feature (1)..(176): Homolog of NCBI NO: 23129762 NR Description: hypothetical protein [Nostoc punctiforme]
  misc_feature (1)..(151): Homolog of NCBI NO: 17227713 NR Description: similar to pathogenesis related protein [Nostoc

SEQ ID NO: 105781 - DNA, 976 bp, Arabidopsis thaliana
  misc_feature (1)..(976): Ceres Seq. ID no. 13617991
  misc_feature: MA Experiment ID: 108434 Result: Up-regulated in Transcription
  misc_feature: MA Experiment 108434 PARAMETER Experiment Name: At_Root_Tips_cDNA_P Parameter: Tissue Value: Root Tips
  misc_feature: MA Experiment ID: 108461 Result: Down-regulated in Transcription
  misc_feature: MA Experiment 108461 PARAMETER Experiment Name: At_Germinating_Seeds_cDNA_P Parameter: Age (day) Value: 1 vs. 0
  misc_feature: MA Experiment 108461 PARAMETER Experiment Name: At_Germinating_Seeds_cDNA_P Parameter: Tissue Value: Germinating Seeds
  misc_feature: MA Experiment ID: 108462 Result: Down-regulated in Transcription
  misc_feature: MA Experiment 108462 PARAMETER Experiment Name: At_Germinating_Seeds_cDNA_P Parameter: Age (day) Value: 2 vs. 0
  misc_feature: MA Experiment 108462 PARAMETER Experiment Name: At_Germinating_Seeds_cDNA_P Parameter: Tissue Value: Germinating Seeds
  misc_feature: MA Experiment ID: 108463 Result: Down-regulated in Transcription
  misc_feature: MA Experiment 108463 PARAMETER Experiment Name: At_Germinating_Seeds_cDNA_P Parameter: Age (day) Value: 3 vs. 0
  misc_feature: MA Experiment 108463 PARAMETER Experiment Name: At_Germinating_Seeds_cDNA_P Parameter: Tissue Value: Germinating Seeds
  misc_feature: MA Experiment ID: 108464 Result: Down-regulated in Transcription
  misc_feature: MA Experiment 108464 PARAMETER Experiment Name: At_Germinating_Seeds_cDNA_P Parameter: Age (day) Value: 4 vs. 0
  misc_feature: MA Experiment 108464 PARAMETER Experiment Name: At_Germinating_Seeds_cDNA_P Parameter: Tissue Value: Germinating Seeds
  misc_feature: MA Experiment ID: 108595 Result: Down-regulated in Transcription
  misc_feature: MA Experiment 108595 PARAMETER Experiment Name: At_Ler-pi_Ovule_cDNA_P Parameter: Plant Line Value: null
  misc_feature: MA Experiment ID: 20000265 Result: Up-regulated in Transcription
  misc_feature: MA Experiment 20000265 PARAMETER Experiment Name: At_Open_Flower_P Parameter: Age (day) Value: 21
  misc_feature: MA Experiment 20000265 PARAMETER Experiment Name: At_Open_Flower_P Parameter: Plant Line Value: WS
  misc_feature: MA Experiment 20000265 PARAMETER Experiment Name: At_Open_Flower_P Parameter: Tissue Value: Closed Flower vs. Whole Plant
gggtctcttctctctctcttctcttgcgaccattccgttcgatccatatatcaaagcttgatttagttggttttcaatgggggacagtcagtactcgttttctctcaccaccttcagcccatcagggaagctggttcagatagaacatgccctaacagctgttggatcaggccaaacatcacttggaattaaagcttcaaatggagttgtcattgcaactgaaaagaaacttccttctatattggttgatgaagcgtctgttcaaaagattcaacatttgactcccaacattggaactgtttacagtggtatgggtcctgatttccgagttcttgtgcgaaagagtaggaagcaggctgagcaatatctccgtctgtacaaggaacccatccccgttactcaacttgtaagggaaactgccacggtgatgcaagagttcactcaatcgggtggtgttaggccgtttggagtttctctactggtggctgggtatgatgacaagggtccacaactgtatcaagtggatccatctggctcttatttctcatggaaagcttctgcaatgggaaagaatgtttcgaatgcaaagacgtttcttgagaagaggtacacagaagatatggaacttgatgatgccattcacacggcaatattgacattgaaggaaggtttcgagggagaaatctcaagcaaaaacatcgagattggcaaaatcggtactgacaaagttttcagggtgctaacaccagcagaaatcgatgattacttggctgaagtcgagtaaaactttcacttaaccgtgcaaccaacctgatttgaatctcagtatactctcagagttgatggttcttgcttttgtaaaacttttggaatttgttaaggagactcgtgacccaataatttagaatatgttttttcactcatttaaacgtctgttgtgaaaattcagtttcatataaccaagtttcatgcacac

SEQ ID NO: 105782 - protein, 157 aa, Arabidopsis thaliana; identical to SEQ ID NO: 49829
  peptide (1)..(157): Ceres Seq. ID no. 13617992
  misc_feature (1)..(157): Homolog of NCBI NO: 15219317 NR Description: 20S proteasome alpha subunit B, putative thaliana] >gi|20453128|gb|AAM19806.1| At1g79210/YUP8H12R_1 thaliana] >gi|21689609|gb|AAM67426.1| At1g79210/YUP8H12R_1
  misc_feature (1)..(157): Homolog of NCBI NO: 15219257 NR Description: 20S proteasome alpha subunit B (PAB1) thaliana] >gi|6093778|sp|O23708|PSA2_ARATH Proteasome subunit type 2 (20S proteasome alpha subunit B) >gi|25290062|pir||T51968
  misc_feature (1)..(157): Homolog of NCBI NO: 12229921 NR Description: Proteasome subunit alpha type 2 (20S proteasome
  misc_feature (1)..(149): Homolog of NCBI NO: 7435868 NR Description: proteasome chain - rice
  misc_feature (1)..(157): Homolog of NCBI NO: 7435867 NR Description: hypothetical protein YUP8H12R.19 - Arabidopsis
  misc_feature (1)..(156): Homolog of NCBI NO: 6093780 NR Description: Proteasome subunit alpha type 2
  misc_feature (1)..(156): Homolog of NCBI NO: 130852 NR Description: Proteasome subunit alpha type 2 (Proteasome C3) (Macropain subunit C3) (Multicatalytic endopeptidase complex
  misc_feature (1)..(156): Homolog of NCBI NO: 31241267 NR Description: ENSANGP00000011336 [Anopheles gambiae]
  misc_feature (1)..(156): Homolog of NCBI NO: 19168518 NR Description: PROSAg25 protein [Anopheles gambiae]
  misc_feature (1)..(156): Homolog of NCBI NO: 4506181 NR Description: proteasome alpha 2 subunit; proteasome subunit proteasome component C3; macropain subunit C3; multicatalytic complex subunit C3 [Homo sapiens] >gi|130850|sp|P25787|PSA2_HUMAN

SEQ ID NO: 105783 - protein, 118 aa, Arabidopsis thaliana; identical to SEQ ID NO: 49830
  peptide (1)..(118): Ceres Seq. ID no. 13617993
  misc_feature (1)..(118): Homolog of NCBI NO: 15219317 NR Description: 20S proteasome alpha subunit B, putative thaliana] >gi|20453128|gb|AAM19806.1| At1g79210/YUP8H12R_1 thaliana] >gi|21689609|gb|AAM67426.1| At1g79210/YUP8H12R_1
  misc_feature (1)..(118): Homolog of NCBI NO: 15219257 NR Description: 20S proteasome alpha subunit B (PAB1) thaliana] >gi|6093778|sp|O23708|PSA2_ARATH Proteasome subunit type 2 (20S proteasome alpha subunit B) >gi|25290062|pir||T51968
  misc_feature (1)..(118): Homolog of NCBI NO: 12229921 NR Description: Proteasome subunit alpha type 2 (20S proteasome
  misc_feature (1)..(110): Homolog of NCBI NO: 7435868 NR Description: proteasome chain - rice
  misc_feature (1)..(118): Homolog of NCBI NO: 7435867 NR Description: hypothetical protein YUP8H12R.19 - Arabidopsis
  misc_feature (1)..(117): Homolog of NCBI NO: 6093780 NR Description: Proteasome subunit alpha type 2
  misc_feature (1)..(117): Homolog of NCBI NO: 130852 NR Description: Proteasome subunit alpha type 2 (Proteasome C3) (Macropain subunit C3) (Multicatalytic endopeptidase complex
  misc_feature (1)..(117): Homolog of NCBI NO: 31241267 NR Description: ENSANGP00000011336 [Anopheles gambiae]
  misc_feature (1)..(117): Homolog of NCBI NO: 19168518 NR Description: PROSAg25 protein [Anopheles gambiae]
  misc_feature (1)..(117): Homolog of NCBI NO: 4506181 NR Description: proteasome alpha 2 subunit; proteasome subunit proteasome component C3; macropain subunit C3; multicatalytic complex subunit C3 [Homo sapiens] >gi|130850|sp|P25787|PSA2_HUMAN

SEQ ID NO: 105784 - protein, 235 aa, Arabidopsis thaliana; identical to SEQ ID NO: 49828
  peptide (1)..(235): Ceres Seq. ID no. 13617994
  misc_feature (1)..(235): Homolog of NCBI NO: 15219317 NR Description: 20S proteasome alpha subunit B, putative thaliana] >gi|20453128|gb|AAM19806.1| At1g79210/YUP8H12R_1 thaliana] >gi|21689609|gb|AAM67426.1| At1g79210/YUP8H12R_1
  misc_feature (1)..(235): Homolog of NCBI NO: 15219257 NR Description: 20S proteasome alpha subunit B (PAB1) thaliana] >gi|6093778|sp|O23708|PSA2_ARATH Proteasome subunit type 2 (20S proteasome alpha subunit B) >gi|25290062|pir||T51968
  misc_feature (1)..(235): Homolog of NCBI NO: 12229921 NR Description: Proteasome subunit alpha type 2 (20S proteasome
  misc_feature (1)..(227): Homolog of NCBI NO: 7435868 NR Description: proteasome chain - rice
  misc_feature (1)..(235): Homolog of NCBI NO: 7435867 NR Description: hypothetical protein YUP8H12R.19 - Arabidopsis
  misc_feature (1)..(234): Homolog of NCBI NO: 6093780 NR Description: Proteasome subunit alpha type 2
  misc_feature (1)..(234): Homolog of NCBI NO: 130852 NR Description: Proteasome subunit alpha type 2 (Proteasome C3) (Macropain subunit C3) (Multicatalytic endopeptidase complex
  misc_feature (1)..(234): Homolog of NCBI NO: 31241267 NR Description: ENSANGP00000011336 [Anopheles gambiae]
  misc_feature (1)..(234): Homolog of NCBI NO: 19168518 NR Description: PROSAg25 protein [Anopheles gambiae]
  misc_feature (1)..(234): Homolog of NCBI NO: 4506181 NR Description: proteasome alpha 2 subunit; proteasome subunit proteasome component C3; macropain subunit C3; multicatalytic complex subunit C3 [Homo sapiens] >gi|130850|sp|P25787|PSA2_HUMAN

SEQ ID NO: 105785 - DNA, 1523 bp, Arabidopsis thaliana
  misc_feature (1)..(1523): Ceres Seq. ID no. 13617999
  misc_feature: MA Experiment ID: 20000794 Result: Up-regulated in Transcription
  misc_feature: MA Experiment 20000794 PARAMETER Experiment Name: At_Petals_P Parameter: Age (day) Value: 23-25 days
  misc_feature: MA Experiment 20000794 PARAMETER Experiment Name: At_Petals_P Parameter: Plant Line Value: WS
  misc_feature: MA Experiment 20000794 PARAMETER Experiment Name: At_Petals_P Parameter: Tissue Value: Petals vs. Whole plant
tttgcaaagttgcaacctttttgggtttagtacttgaagagaatcaatctgacagcaaatagttttggcgtctttctaactcaacccatcatctctgttgcattttatcgagagaatatttgaggtggatatggcctcgacccttttctccagaactttcttggctgctagtcaccgactgattactccttctcttccgcaaaagatctttaatccagccacctttctcagtaggtcactccactctcagttaggctccgcttctacagcctataaatcaactacttgggctcgtcgagctatggcttctactggagttgagacaaaagccggttactccacatcatccgtatcaaccagtgaacctgttgtttctgttgattggcttcatgctaatcttagagagcctgatttgaagattttggatgcttcatggtatatgccggatgagcagagaaatccgatccaagaatatcaggttgctcatattccccgcgctctcttctttgatttggatggaatatcagatcgaaaaactagtttgccacatatgttgcccactgaggaagcttttgctgctggttgttctgctcttggaattgataacaaagatgaagtggttgtctatgatggaaaggggatctttagtgcagcccgtgtatggtggatgttccgagtttttggacatgaaaaagtttgggtgctcgatggaggtctaccaagatggcgtgcatcaggttatgatgttgaatctagtgcatcaggtgatgctattctgaaagccagtgccgcaagtgaggctatagagaaaatttatcaaggacaaaccgtcagtccgataacctttcagactaagttccagccacatctagtgtggacacttgatcaggtcaagaacaatatggaggatccgacttatcaacacatagacgctcgttccaaagccaggtttgatggtactgctccagaaccccgtaagggaataagaagcggtcatatacctggaagcaaatgtatcccttttcctcagatgtttgattcttgtaacacattgttaccagcagaggagctgaagaaacgatttgaccaagaagatatctcactggacaagcctattatggcctcgtgtgggactggtgtaacagcttgcatcttggcaatggggcttcaccggctggggaaaaccgacgtgccgatctatgatgggtcgtggactgaatgggcgacacaaccagacttgcccatagagagtgttgaatcttcttcatgaaagtctccaccgtaaaggctagcgacaagattacaagccacagacggaaataattatcatgtttaagttgagggatttgtttgaagttaatcataatcctggctttaaatttgcctcaaccctcaagccgaagaggactgtatctatagaacttggaacttttccttttcgtttctggattcatcttctcagataacaaaaggttgttttctgtgttttctttctaataaaatcaagaaccaggaaatttctc

SEQ ID NO: 105786 - protein, 379 aa, Arabidopsis thaliana; identical to SEQ ID NO: 21914
  peptide (1)..(379): Ceres Seq. ID no. 13618000
  misc_feature (82)..(202): Pfam Name: Rhodanese-like domain Pfam Description: Rhodanese-like domain
  misc_feature (1)..(379): Homolog of NCBI NO: 18412307 NR Description: mercaptopyruvate sulfurtransferase (Mst1/Rdh1) thaliana] >gi|7488372|pir||T01034 thiosulfate sulfurtransferase
  misc_feature (1)..(379): Homolog of NCBI NO: 25288794 NR Description: thiosulfate sulfurtransferase (EC 2.8.1.1) Mst1
  misc_feature (1)..(374): Homolog of NCBI NO: 4406372 NR Description: thiosulfate sulfurtransferase [Datisca glomerata]
  misc_feature (33)..(379): Homolog of NCBI NO: 30684873 NR Description: mercaptopyruvate sulfurtransferase (Mst2/Rdh2)
  misc_feature (32)..(379): Homolog of NCBI NO: 25456716 NR Description: thiosulfate sulfurtransferase (EC 2.8.1.1)
  misc_feature (58)..(379): Homolog of NCBI NO: 18394364 NR Description: mercaptopyruvate sulfurtransferase (Mst2/Rdh2) thaliana] >gi|25288790|pir||T52663 thiosulfate sulfurtransferase
  misc_feature (58)..(379): Homolog of NCBI NO: 25288797 NR Description: hypothetical protein F3O9.26 [imported] - thaliana >gi|4966366|gb|AAD34697.1|AC006341_25 Similar to thiosulfate sulfurtransferase (TST) from Datisca glomerata and
  misc_feature (74)..(369): Homolog of NCBI NO: 14571545 NR Description: thiosulfate transferase [Triticum aestivum]
  misc_feature (51)..(207): Homolog of NCBI NO: 22958331 NR Description: hypothetical protein [Rhodobacter sphaeroides]
  misc_feature (244)..(372): Homolog of NCBI NO: 22958331 NR Description: hypothetical protein [Rhodobacter sphaeroides]

SEQ ID NO: 105787 - protein, 322 aa, Arabidopsis thaliana; identical to SEQ ID NO: 21915
  peptide (1)..(322): Ceres Seq. ID no. 13618001
  misc_feature (25)..(145): Pfam Name: Rhodanese-like domain Pfam Description: Rhodanese-like domain
  misc_feature (1)..(322): Homolog of NCBI NO: 18412307 NR Description: mercaptopyruvate sulfurtransferase (Mst1/Rdh1) thaliana] >gi|7488372|pir||T01034 thiosulfate sulfurtransferase
  misc_feature (1)..(322): Homolog of NCBI NO: 25288794 NR Description: thiosulfate sulfurtransferase (EC 2.8.1.1) Mst1
  misc_feature (1)..(317): Homolog of NCBI NO: 4406372 NR Description: thiosulfate sulfurtransferase [Datisca glomerata]
  misc_feature (1)..(322): Homolog of NCBI NO: 30684873 NR Description: mercaptopyruvate sulfurtransferase (Mst2/Rdh2)
  misc_feature (1)..(322): Homolog of NCBI NO: 25456716 NR Description: thiosulfate sulfurtransferase (EC 2.8.1.1)
  misc_feature (1)..(322): Homolog of NCBI NO: 18394364 NR Description: mercaptopyruvate sulfurtransferase (Mst2/Rdh2) thaliana] >gi|25288790|pir||T52663 thiosulfate sulfurtransferase
  misc_feature (1)..(322): Homolog of NCBI NO: 25288797 NR Description: hypothetical protein F3O9.26 [imported] - thaliana >gi|4966366|gb|AAD34697.1|AC006341_25 Similar to thiosulfate sulfurtransferase (TST) from Datisca glomerata and
  misc_feature (17)..(312): Homolog of NCBI NO: 14571545 NR Description: thiosulfate transferase [Triticum aestivum]
  misc_feature (1)..(150): Homolog of NCBI NO: 22958331 NR Description: hypothetical protein [Rhodobacter sphaeroides]
  misc_feature (187)..(315): Homolog of NCBI NO: 22958331 NR Description: hypothetical protein [Rhodobacter sphaeroides]

SEQ ID NO: 105788 - protein, 276 aa, Arabidopsis thaliana; identical to SEQ ID NO: 21916
  peptide (1)..(276): Ceres Seq. ID no. 13618002
  misc_feature (1)..(99): Pfam Name: Rhodanese-like domain Pfam Description: Rhodanese-like domain
  misc_feature (1)..(276): Homolog of NCBI NO: 18412307 NR Description: mercaptopyruvate sulfurtransferase (Mst1/Rdh1) thaliana] >gi|7488372|pir||T01034 thiosulfate sulfurtransferase
  misc_feature (1)..(276): Homolog of NCBI NO: 25288794 NR Description: thiosulfate sulfurtransferase (EC 2.8.1.1) Mst1
  misc_feature (1)..(271): Homolog of NCBI NO: 4406372 NR Description: thiosulfate sulfurtransferase [Datisca glomerata]
  misc_feature (1)..(276): Homolog of NCBI NO: 30684873 NR Description: mercaptopyruvate sulfurtransferase (Mst2/Rdh2)
  misc_feature (1)..(276): Homolog of NCBI NO: 25456716 NR Description: thiosulfate sulfurtransferase (EC 2.8.1.1)
  misc_feature (1)..(276): Homolog of NCBI NO: 18394364 NR Description: mercaptopyruvate sulfurtransferase (Mst2/Rdh2) thaliana] >gi|25288790|pir||T52663 thiosulfate sulfurtransferase
  misc_feature (1)..(276): Homolog of NCBI NO: 25288797 NR Description: hypothetical protein F3O9.26 [imported] - thaliana >gi|4966366|gb|AAD34697.1|AC006341_25 Similar to thiosulfate sulfurtransferase (TST) from Datisca glomerata and
  misc_feature (1)..(266): Homolog of NCBI NO: 14571545 NR Description: thiosulfate transferase [Triticum aestivum]
  misc_feature (1)..(104): Homolog of NCBI NO: 22958331 NR Description: hypothetical protein [Rhodobacter sphaeroides]
  misc_feature (141)..(269): Homolog of NCBI NO: 22958331 NR Description: hypothetical protein [Rhodobacter sphaeroides]

SEQ ID NO: 105789 - DNA, 2513 bp, Arabidopsis thaliana
  misc_feature (1)..(2513): Ceres Seq. ID no. 13618003
  misc_feature: MA Experiment ID: 108434 Result: Down-regulated in Transcription
  misc_feature: MA Experiment 108434 PARAMETER Experiment Name: At_Root_Tips_cDNA_P Parameter: Tissue Value: Root Tips
  misc_feature: MA Experiment ID: 108462 Result: Up-regulated in Transcription
  misc_feature: MA Experiment 108462 PARAMETER Experiment Name: At_Germinating_Seeds_cDNA_P Parameter: Age (day) Value: 2 vs. 0
  misc_feature: MA Experiment 108462 PARAMETER Experiment Name: At_Germinating_Seeds_cDNA_P Parameter: Tissue Value: Germinating Seeds
  misc_feature: MA Experiment ID: 108463 Result: Up-regulated in Transcription
  misc_feature: MA Experiment 108463 PARAMETER Experiment Name: At_Germinating_Seeds_cDNA_P Parameter: Age (day) Value: 3 vs. 0
  misc_feature: MA Experiment 108463 PARAMETER Experiment Name: At_Germinating_Seeds_cDNA_P Parameter: Tissue Value: Germinating Seeds
  misc_feature: MA Experiment ID: 108464 Result: Up-regulated in Transcription
  misc_feature: MA Experiment 108464 PARAMETER Experiment Name: At_Germinating_Seeds_cDNA_P Parameter: Age (day) Value: 4 vs. 0
  misc_feature: MA Experiment 108464 PARAMETER Experiment Name: At_Germinating_Seeds_cDNA_P Parameter: Tissue Value: Germinating Seeds
  misc_feature: MA Experiment ID: 108473 Result: Up-regulated in Transcription
  misc_feature: MA Experiment 108473 PARAMETER Experiment Name: At_Drought_Flowers_cDNA_P Parameter: Timepoint (hr) Value: 7 d
  misc_feature: MA Experiment 108473 PARAMETER Experiment Name: At_Drought_Flowers_cDNA_P Parameter: Tissue Value: Flower
  misc_feature: MA Experiment 108473 PARAMETER Experiment Name: At_Drought_Flowers_cDNA_P Parameter: Treatment Value: Drought vs. No Drought
  misc_feature: MA Experiment ID: 108488 Result: Down-regulated in Transcription
  misc_feature: MA Experiment ID: 108561 Result: Up-regulated in Transcription
  misc_feature: MA Experiment 108561 PARAMETER Experiment Name: At_100uM_ABA_cDNA_P Parameter: Timepoint (hr) Value: 6
  misc_feature: MA Experiment 108561 PARAMETER Experiment Name: At_100uM_ABA_cDNA_P Parameter: Tissue Value: Aerial
  misc_feature: MA Experiment 108561 PARAMETER Experiment Name: At_100uM_ABA_cDNA_P Parameter: Treatment Value: 100uM ABA vs. No Treatment
  misc_feature: MA Experiment ID: 108572 Result: Up-regulated in Transcription
  misc_feature: MA Experiment 108572 PARAMETER Experiment Name: At_Drought_cDNA_P Parameter: Timepoint (hr) Value: 1
  misc_feature: MA Experiment 108572 PARAMETER Experiment Name: At_Drought_cDNA_P Parameter: Tissue Value: Aerial
  misc_feature: MA Experiment 108572 PARAMETER Experiment Name: At_Drought_cDNA_P Parameter: Treatment Value: Drought vs. No Drought
  misc_feature: MA Experiment ID: 108573 Result: Up-regulated in Transcription
  misc_feature: MA Experiment 108573 PARAMETER Experiment Name: At_Drought_cDNA_P Parameter: Timepoint (hr) Value: 6
  misc_feature: MA Experiment 108573 PARAMETER Experiment Name: At_Drought_cDNA_P Parameter: Tissue Value: Aerial
  misc_feature: MA Experiment 108573 PARAMETER Experiment Name: At_Drought_cDNA_P Parameter: Treatment Value: Drought vs. No Drought
  misc_feature: MA Experiment ID: 108579 Result: Up-regulated in Transcription
  misc_feature: MA Experiment 108579 PARAMETER Experiment Name: At_4deg_Cold_cDNA_P Parameter: Temperature (deg C) Value: 4 vs. 22
  misc_feature: MA Experiment 108579 PARAMETER Experiment Name: At_4deg_Cold_cDNA_P Parameter: Timepoint (hr) Value: 6
  misc_feature: MA Experiment 108579 PARAMETER Experiment Name: At_4deg_Cold_cDNA_P Parameter: Tissue Value: Aerial
  misc_feature: MA Experiment ID: 108594 Result: Down-regulated in Transcription
  misc_feature: MA Experiment 108594 PARAMETER Experiment Name: At_Ler-rhl_Root_cDNA_P Parameter: Plant Line Value: null
  misc_feature: MA Experiment ID: 108605 Result: Up-regulated in Transcription
  misc_feature: MA Experiment 108605 PARAMETER Experiment Name: At_100uM_ABA_cDNA_P Parameter: Timepoint (hr) Value: 6
  misc_feature: MA Experiment 108605 PARAMETER Experiment Name: At_100uM_ABA_cDNA_P Parameter: Tissue Value: Aerial
  misc_feature: MA Experiment 108605 PARAMETER Experiment Name: At_100uM_ABA_cDNA_P Parameter: Treatment Value: 100uM ABA vs. No Treatment
  misc_feature: MA Experiment ID: 108607 Result: Up-regulated in Transcription
  misc_feature: MA Experiment 108607 PARAMETER Experiment Name: At_100uM_ABA_cDNA_P Parameter: Timepoint (hr) Value: 4
  misc_feature: MA Experiment 108607 PARAMETER Experiment Name: At_100uM_ABA_cDNA_P Parameter: Tissue Value: Aerial
  misc_feature: MA Experiment 108607 PARAMETER Experiment Name: At_100uM_ABA_cDNA_P Parameter: Treatment Value: 100uM ABA vs. No Treatment
  misc_feature: MA Experiment ID: 108608 Result: Up-regulated in Transcription
  misc_feature: MA Experiment 108608 PARAMETER Experiment Name: At_100uM_ABA_cDNA_P Parameter: Timepoint (hr) Value: 1
  misc_feature: MA Experiment 108608 PARAMETER Experiment Name: At_100uM_ABA_cDNA_P Parameter: Tissue Value: Aerial
  misc_feature: MA Experiment 108608 PARAMETER Experiment Name: At_100uM_ABA_cDNA_P Parameter: Treatment Value: 100uM ABA vs. No Treatment
  misc_feature: MA Experiment ID: 108609 Result: Up-regulated in Transcription
  misc_feature: MA Experiment 108609 PARAMETER Experiment Name: At_100uM_ABA_cDNA_P Parameter: Timepoint (hr) Value: 24
  misc_feature: MA Experiment 108609 PARAMETER Experiment Name: At_100uM_ABA_cDNA_P Parameter: Tissue Value: Aerial
  misc_feature: MA Experiment 108609 PARAMETER Experiment Name: At_100uM_ABA_cDNA_P Parameter: Treatment Value: 100uM ABA vs. No Treatment
  misc_feature: MA Experiment ID: 108668 Result: Up-regulated in Transcription
  misc_feature: MA Experiment 108668 PARAMETER Experiment Name: At_2mM_SA_cDNA_P Parameter: Plant Line Value: WS
  misc_feature: MA Experiment 108668 PARAMETER Experiment Name: At_2mM_SA_cDNA_P Parameter: Timepoint (hr) Value: 6
  misc_feature: MA Experiment 108668 PARAMETER Experiment Name: At_2mM_SA_cDNA_P Parameter: Treatment Value: 2mM SA vs. No Treatment
  misc_feature: MA Experiment ID: 20000070 Result: Up-regulated in Transcription
  misc_feature: MA Experiment 20000070 PARAMETER Experiment Name: At_100uM_ABA_Mutants_cDNA_P Parameter: Plant Line Value: CS24
  misc_feature: MA Experiment 20000070 PARAMETER Experiment Name: At_100uM_ABA_Mutants_cDNA_P Parameter: Timepoint (hr) Value: 6
  misc_feature: MA Experiment 20000070 PARAMETER Experiment Name: At_100uM_ABA_Mutants_cDNA_P Parameter: Tissue Value: Aerial
  misc_feature: MA Experiment 20000070 PARAMETER Experiment Name: At_100uM_ABA_Mutants_cDNA_P Parameter: Treatment Value: 100uM ABA vs. No Treatment
  misc_feature: MA Experiment ID: 20000071 Result: Up-regulated in Transcription
  misc_feature: MA Experiment 20000071 PARAMETER Experiment Name: At_100uM_ABA_Mutants_cDNA_P Parameter: Plant Line Value: CS8104
  misc_feature: MA Experiment 20000071 PARAMETER Experiment Name: At_100uM_ABA_Mutants_cDNA_P Parameter: Timepoint (hr) Value: 6
  misc_feature: MA Experiment 20000071 PARAMETER Experiment Name: At_100uM_ABA_Mutants_cDNA_P Parameter: Tissue Value: Aerial
  misc_feature: MA Experiment 20000071 PARAMETER Experiment Name: At_100uM_ABA_Mutants_cDNA_P Parameter: Treatment Value: 100uM ABA vs. No Treatment
  misc_feature: MA Experiment ID: 20000090 Result: Down-regulated in Transcription
  misc_feature: MA Experiment ID: 20000113 Result: Up-regulated in Transcription
  misc_feature: MA Experiment 20000113 PARAMETER Experiment Name: At_42deg_Heat_cDNA_P Parameter: Temperature (deg C) Value: 42 vs. 22
  misc_feature: MA Experiment 20000113 PARAMETER Experiment Name: At_42deg_Heat_cDNA_P Parameter: Timepoint (hr) Value: 8
  misc_feature: MA Experiment 20000113 PARAMETER Experiment Name: At_42deg_Heat_cDNA_P Parameter: Tissue Value: Aerial
  misc_feature: MA Experiment ID: 20000117 Result: Up-regulated in Transcription
  misc_feature: MA Experiment 20000117 PARAMETER Experiment Name: At_100uM_ABA_Mutants_cDNA_P Parameter: Plant Line Value: Columbia
  misc_feature: MA Experiment 20000117 PARAMETER Experiment Name: At_100uM_ABA_Mutants_cDNA_P Parameter: Timepoint (hr) Value: 6
  misc_feature: MA Experiment 20000117 PARAMETER Experiment Name: At_100uM_ABA_Mutants_cDNA_P Parameter: Tissue Value: Aerial
  misc_feature: MA Experiment 20000117 PARAMETER Experiment Name: At_100uM_ABA_Mutants_cDNA_P Parameter: Treatment Value: 100uM ABA vs. No Treatment
  misc_feature: MA Experiment ID: 20000166 Result: Up-regulated in Transcription
  misc_feature: MA Experiment 20000166 PARAMETER Experiment Name: At_100uM_ABA_P Parameter: Age (day) Value: 14
  misc_feature: MA Experiment 20000166 PARAMETER Experiment Name: At_100uM_ABA_P Parameter: Organism Value: A. thaliana
  misc_feature: MA Experiment 20000166 PARAMETER Experiment Name: At_100uM_ABA_P Parameter: Plant Line Value: WS
  misc_feature: MA Experiment 20000166 PARAMETER Experiment Name: At_100uM_ABA_P Parameter: Timepoint (hr) Value: 1
  misc_feature: MA Experiment 20000166 PARAMETER Experiment Name: At_100uM_ABA_P Parameter: Tissue Value: Aerial
  misc_feature: MA Experiment 20000166 PARAMETER Experiment Name: At_100uM_ABA_P Parameter: Treatment Value: 100uM ABA vs. No Treatment
  misc_feature: MA Experiment ID: 20000173 Result: Up-regulated in Transcription
  misc_feature: MA Experiment 20000173 PARAMETER Experiment Name: At_42deg_Heat_P Parameter: Age (day) Value: 14
  misc_feature: MA Experiment 20000173 PARAMETER Experiment Name: At_42deg_Heat_P Parameter: Organism Value: A. thaliana
  misc_feature: MA Experiment 20000173 PARAMETER Experiment Name: At_42deg_Heat_P Parameter: Plant Line Value: WS
  misc_feature: MA Experiment 20000173 PARAMETER Experiment Name: At_42deg_Heat_P Parameter: Temperature (deg C) Value: 42 vs. 22
  misc_feature: MA Experiment 20000173 PARAMETER Experiment Name: At_42deg_Heat_P Parameter: Timepoint (hr) Value: 6
  misc_feature: MA Experiment 20000173 PARAMETER Experiment Name: At_42deg_Heat_P Parameter: Tissue Value: Aerial
  misc_feature: MA Experiment ID: 20000180 Result: Up-regulated in Transcription
  misc_feature: MA Experiment 20000180 PARAMETER Experiment Name: At_Germinating_Seeds_P Parameter: Age (hr) Value: 24 vs. 0
  misc_feature: MA Experiment 20000180 PARAMETER Experiment Name: At_Germinating_Seeds_P Parameter: Tissue Value: Germinating Seeds
  misc_feature: MA Experiment ID: 20000182 Result: Up-regulated in Transcription
  misc_feature: MA Experiment 20000182 PARAMETER Experiment Name: At_2mM_SA_P Parameter: Age (day) Value: 14
  misc_feature: MA Experiment 20000182 PARAMETER Experiment Name: At_2mM_SA_P Parameter: Organism Value: A. thaliana
  misc_feature: MA Experiment 20000182 PARAMETER Experiment Name: At_2mM_SA_P Parameter: Plant Line Value: WS
  misc_feature: MA Experiment 20000182 PARAMETER Experiment Name: At_2mM_SA_P Parameter: Timepoint (hr) Value: 6
  misc_feature: MA Experiment 20000182 PARAMETER Experiment Name: At_2mM_SA_P Parameter: Tissue Value: Aerial
  misc_feature: MA Experiment 20000182 PARAMETER Experiment Name: At_2mM_SA_P Parameter: Treatment Value: 2mM SA vs. No Treatment
  misc_feature: MA Experiment ID: 20000185 Result: Up-regulated in Transcription
  misc_feature: MA Experiment 20000185 PARAMETER Experiment Name: At_Roots__P Parameter: Age (day) Value: 7 vs. 21
  misc_feature: MA Experiment 20000185 PARAMETER Experiment Name: At_Roots__P Parameter: Organism Value: A. thaliana
  misc_feature: MA Experiment 20000185 PARAMETER Experiment Name: At_Roots__P Parameter: Tissue Value: Roots vs. Whole Plant
  misc_feature: MA Experiment ID: 20000224 Result: Up-regulated in Transcription
  misc_feature: MA Experiment ID: 20000234 Result: Down-regulated in Transcription
  misc_feature: MA Experiment 20000234 PARAMETER Experiment Name: At_Siliques_P Parameter: Age (day) Value: 21
  misc_feature: MA Experiment 20000234 PARAMETER Experiment Name: At_Siliques_P Parameter: Organism Value: A. thaliana
  misc_feature: MA Experiment 20000234 PARAMETER Experiment Name: At_Siliques_P Parameter: Plant Line Value: WS
  misc_feature: MA Experiment 20000234 PARAMETER Experiment Name: At_Siliques_P Parameter: Tissue Value: Less Than 5mm Siliques vs. Whole Plant
  misc_feature: MA Experiment ID: 20000235 Result: Down-regulated in Transcription
  misc_feature: MA Experiment 20000235 PARAMETER Experiment Name: At_Siliques_P Parameter: Age (day) Value: 21
  misc_feature: MA Experiment 20000235 PARAMETER Experiment Name: At_Siliques_P Parameter: Organism Value: A. thaliana
  misc_feature: MA Experiment 20000235 PARAMETER Experiment Name: At_Siliques_P Parameter: Plant Line Value: WS
  misc_feature: MA Experiment 20000235 PARAMETER Experiment Name: At_Siliques_P Parameter: Tissue Value: 5-10mm Siliques vs. Whole Plant
  misc_feature: MA Experiment ID: 20000267 Result: Up-regulated in Transcription
  misc_feature: MA Experiment 20000267 PARAMETER Experiment Name: At_Drought_P Parameter: Age (day) Value: 7
  misc_feature: MA Experiment 20000267 PARAMETER Experiment Name: At_Drought_P Parameter: Organism Value: A. thaliana
  misc_feature: MA Experiment 20000267 PARAMETER Experiment Name: At_Drought_P Parameter: Plant Line Value: WS
  misc_feature: MA Experiment 20000267 PARAMETER Experiment Name: At_Drought_P Parameter: Timepoint (hr) Value: 6
  misc_feature: MA Experiment 20000267 PARAMETER Experiment Name: At_Drought_P Parameter: Tissue Value: Whole Plant
  misc_feature: MA Experiment 20000267 PARAMETER Experiment Name: At_Drought_P Parameter: Treatment Value: Drought vs. No Drought
  misc_feature: MA Experiment ID: 20000268 Result: Up-regulated in Transcription
  misc_feature: MA Experiment 20000268 PARAMETER Experiment Name: At_100mM_NaCl__P Parameter: Age (day) Value: 14
  misc_feature: MA Experiment 20000268 PARAMETER Experiment Name: At_100mM_NaCl__P Parameter: Organism Value: A. thaliana
  misc_feature: MA Experiment 20000268 PARAMETER Experiment Name: At_100mM_NaCl__P Parameter: Plant Line Value: WS
  misc_feature: MA Experiment 20000268 PARAMETER Experiment Name: At_100mM_NaCl__P Parameter: Timepoint (hr) Value: 6
  misc_feature: MA Experiment 20000268 PARAMETER Experiment Name: At_100mM_NaCl__P Parameter: Tissue Value: Whole Plant
  misc_feature: MA Experiment 20000268 PARAMETER Experiment Name: At_100mM_NaCl__P Parameter: Treatment Value: 100mM NaCl vs. No Treatment
  misc_feature: MA Experiment ID: 20000436 Result: Up-regulated in Transcription
  misc_feature: MA Experiment 20000436 PARAMETER Experiment Name: At_Drought_P Parameter: Age (day) Value: 7
  misc_feature: MA Experiment 20000436 PARAMETER Experiment Name: At_Drought_P Parameter: Organism Value: A. thaliana
  misc_feature: MA Experiment 20000436 PARAMETER Experiment Name: At_Drought_P Parameter: Plant Line Value: WS
  misc_feature: MA Experiment 20000436 PARAMETER Experiment Name: At_Drought_P Parameter: Timepoint (hr) Value: 12
  misc_feature: MA Experiment 20000436 PARAMETER Experiment Name: At_Drought_P Parameter: Tissue Value: Whole Plant
  misc_feature: MA Experiment 20000436 PARAMETER Experiment Name: At_Drought_P Parameter: Treatment Value: Drought vs. No Drought
  misc_feature: MA Experiment ID: 20000437 Result: Up-regulated in Transcription
  misc_feature: MA Experiment 20000437 PARAMETER Experiment Name: At_Drought_P Parameter: Age (day) Value: 8
  misc_feature: MA Experiment 20000437 PARAMETER Experiment Name: At_Drought_P Parameter: Organism Value: A. thaliana
  misc_feature: MA Experiment 20000437 PARAMETER Experiment Name: At_Drought_P Parameter: Plant Line Value: WS
  misc_feature: MA Experiment 20000437 PARAMETER Experiment Name: At_Drought_P Parameter: Timepoint (hr) Value: 24
  misc_feature: MA Experiment 20000437 PARAMETER Experiment Name: At_Drought_P Parameter: Tissue Value: Whole Plant
  misc_feature: MA Experiment 20000437 PARAMETER Experiment Name: At_Drought_P Parameter: Treatment Value: Drought vs. No Drought
  misc_feature: MA Experiment ID: 20000438 Result: Up-regulated in Transcription
  misc_feature: MA Experiment 20000438 PARAMETER Experiment Name: At_Shoots__P Parameter: Age (day) Value: 14
  misc_feature: MA Experiment 20000438 PARAMETER Experiment Name: At_Shoots__P Parameter: Tissue Value: Shoots vs. Whole Plant
  misc_feature: MA Experiment ID: 20000439 Result: Up-regulated in Transcription
  misc_feature: MA Experiment 20000439 PARAMETER Experiment Name: At_Roots__P Parameter: Age (day) Value: 14 vs. 21
  misc_feature: MA Experiment 20000439 PARAMETER Experiment Name: At_Roots__P Parameter: Organism Value: A. thaliana
  misc_feature: MA Experiment 20000439 PARAMETER Experiment Name: At_Roots__P Parameter: Tissue Value: Roots vs. Whole Plant
  misc_feature: MA Experiment ID: 20000445 Result: Up-regulated in Transcription
  misc_feature: MA Experiment 20000445 PARAMETER Experiment Name: At_100uM_NAA__P Parameter: Age (day) Value: 14
  misc_feature: MA Experiment 20000445 PARAMETER Experiment Name: At_100uM_NAA__P Parameter: Organism Value: A. thaliana
  misc_feature: MA Experiment 20000445 PARAMETER Experiment Name: At_100uM_NAA__P Parameter: Plant Line Value: WS
  misc_feature: MA Experiment 20000445 PARAMETER Experiment Name: At_100uM_NAA__P Parameter: Timepoint (hr) Value: 6
  misc_feature: MA Experiment 20000445 PARAMETER Experiment Name: At_100uM_NAA__P Parameter: Tissue Value: Aerial
  misc_feature: MA Experiment 20000445 PARAMETER Experiment Name: At_100uM_NAA__P Parameter: Treatment Value: 100uM NAA vs. No Treatment
  misc_feature: MA Experiment ID: 20000453 Result: Up-regulated in Transcription
  misc_feature: MA Experiment 20000453 PARAMETER Experiment Name: At_100uM_ABA_P Parameter: Age (day) Value: 15
  misc_feature: MA Experiment 20000453 PARAMETER Experiment Name: At_100uM_ABA_P Parameter: Organism Value: A. thaliana
  misc_feature: MA Experiment 20000453 PARAMETER Experiment Name: At_100uM_ABA_P Parameter: Plant Line Value: WS
  misc_feature: MA Experiment 20000453 PARAMETER Experiment Name: At_100uM_ABA_P Parameter: Timepoint (hr) Value: 24
  misc_feature: MA Experiment 20000453 PARAMETER Experiment Name: At_100uM_ABA_P Parameter: Tissue Value: Aerial
  misc_feature: MA Experiment 20000453 PARAMETER Experiment Name: At_100uM_ABA_P Parameter: Treatment Value: 100uM ABA vs. No Treatment
  misc_feature: MA Experiment ID: 20000573 Result: Down-regulated in Transcription
  misc_feature: MA Experiment 20000573 PARAMETER Experiment Name: At_100uM_ABA_Mutants__P Parameter: Organism Value: A. thaliana
  misc_feature: MA Experiment 20000573 PARAMETER Experiment Name: At_100uM_ABA_Mutants__P Parameter: Plant Line Value: CS22 vs. Ler wt
  misc_feature: MA Experiment 20000573 PARAMETER Experiment Name: At_100uM_ABA_Mutants__P Parameter: Timepoint (hr) Value: N/A
  misc_feature: MA Experiment 20000573 PARAMETER Experiment Name: At_100uM_ABA_Mutants__P Parameter: Tissue Value: Whole Plant
  misc_feature: MA Experiment 20000573 PARAMETER Experiment Name: At_100uM_ABA_Mutants__P Parameter: Treatment Value: None
  misc_feature: MA Experiment ID: 20000709 Result: Up-regulated in Transcription
  misc_feature: MA Experiment 20000709 PARAMETER Experiment Name: At_15mM_NH4NO3_L-to-H_P Parameter: Age (hr) Value: 14
  misc_feature: MA Experiment 20000709 PARAMETER Experiment Name: At_15mM_NH4NO3_L-to-H_P Parameter: Organism Value: A. thaliana
  misc_feature: MA Experiment 20000709 PARAMETER Experiment Name: At_15mM_NH4NO3_L-to-H_P Parameter: Plant Line Value: WS
  misc_feature: MA Experiment 20000709 PARAMETER Experiment Name: At_15mM_NH4NO3_L-to-H_P Parameter: Timepoint (hr) Value: 4
  misc_feature: MA Experiment 20000709 PARAMETER Experiment Name: At_15mM_NH4NO3_L-to-H_P Parameter: Tissue Value: Aerial
  misc_feature: MA Experiment 20000709 PARAMETER Experiment Name: At_15mM_NH4NO3_L-to-H_P Parameter: Treatment Value: 15mM NH4NO3 vs. 30mM Mannitol
  misc_feature: MA Experiment ID: 20000794 Result: Up-regulated in Transcription
  misc_feature: MA Experiment 20000794 PARAMETER Experiment Name: At_Petals_P Parameter: Age (day) Value: 23-25 days
  misc_feature: MA Experiment 20000794 PARAMETER Experiment Name: At_Petals_P Parameter: Plant Line Value: WS
  misc_feature: MA Experiment 20000794 PARAMETER Experiment Name: At_Petals_P Parameter: Tissue Value: Petals vs. Whole plant
  misc_feature: MA Experiment ID: 20001247 Result: Up-regulated in Transcription
  misc_feature: MA Experiment 20001247 PARAMETER Experiment Name: At_Far-red-induction_P Parameter: Age (day) Value: 7
  misc_feature: MA Experiment 20001247 PARAMETER Experiment Name: At_Far-red-induction_P Parameter: Light Value: Far-red vs. White
  misc_feature: MA Experiment 20001247 PARAMETER Experiment Name: At_Far-red-induction_P Parameter: Organism Value: A. thaliana
  misc_feature: MA Experiment 20001247 PARAMETER Experiment Name: At_Far-red-induction_P Parameter: Plant Line Value: Columbia
  misc_feature: MA Experiment 20001247 PARAMETER Experiment Name: At_Far-red-induction_P Parameter: Timepoint (hr) Value: 1
  misc_feature: MA Experiment 20001247 PARAMETER Experiment Name: At_Far-red-induction_P Parameter: Tissue Value: Whole Plant
  misc_feature: MA Experiment ID: 20001248 Result: Down-regulated in Transcription
  misc_feature: MA Experiment 20001248 PARAMETER Experiment Name: At_Far-red-induction_P Parameter: Age (day) Value: 7
  misc_feature: MA Experiment 20001248 PARAMETER Experiment Name: At_Far-red-induction_P Parameter: Light Value: Far-red vs. White
  misc_feature: MA Experiment 20001248 PARAMETER Experiment Name: At_Far-red-induction_P Parameter: Organism Value: A. thaliana
  misc_feature: MA Experiment 20001248 PARAMETER Experiment Name: At_Far-red-induction_P Parameter: Plant Line Value: Columbia
  misc_feature: MA Experiment 20001248 PARAMETER Experiment Name: At_Far-red-induction_P Parameter: Timepoint (hr) Value: 4
  misc_feature: MA Experiment 20001248 PARAMETER Experiment Name: At_Far-red-induction_P Parameter: Tissue Value: Whole Plant
  misc_feature: MA Experiment ID: 20001451 Result: Up-regulated in Transcription
  misc_feature: MA Experiment 20001451 PARAMETER Experiment Name: At_Far-red-induction_P Parameter: Age (day) Value: 7
  misc_feature: MA Experiment 20001451 PARAMETER Experiment Name: At_Far-red-induction_P Parameter: Light Value: Far-red vs. White
  misc_feature: MA Experiment 20001451 PARAMETER Experiment Name: At_Far-red-induction_P Parameter: Organism Value: A. thaliana
  misc_feature: MA Experiment 20001451 PARAMETER Experiment Name: At_Far-red-induction_P Parameter: Plant Line Value: Columbia
  misc_feature: MA Experiment 20001451 PARAMETER Experiment Name: At_Far-red-induction_P Parameter: Timepoint (hr) Value: 24
  misc_feature: MA Experiment 20001451 PARAMETER Experiment Name: At_Far-red-induction_P Parameter: Tissue Value: Whole Plant
  misc_feature: MA Experiment ID: 20001554 Result: Up-regulated in Transcription
  misc_feature: MA Experiment 20001554 PARAMETER Experiment Name: At_Drought_Soil_Dry_P Parameter: Age (day) Value: 21
  misc_feature: MA Experiment 20001554 PARAMETER Experiment Name: At_Drought_Soil_Dry_P Parameter: Organism Value: A. thaliana
  misc_feature: MA Experiment 20001554 PARAMETER Experiment Name: At_Drought_Soil_Dry_P Parameter: Plant Line Value: WS
  misc_feature: MA Experiment 20001554 PARAMETER Experiment Name: At_Drought_Soil_Dry_P Parameter: Post Timepoint (hr) Value: None
  misc_feature: MA Experiment 20001554 PARAMETER Experiment Name: At_Drought_Soil_Dry_P Parameter: Post-Treatment Value: None
  misc_feature: MA Experiment 20001554 PARAMETER Experiment Name: At_Drought_Soil_Dry_P Parameter: Timepoint (day) Value: 7
  misc_feature: MA Experiment 20001554 PARAMETER Experiment Name: At_Drought_Soil_Dry_P Parameter: Treatment Value: Drought vs. No Drought
  misc_feature: MA Experiment ID: 20001555 Result: Up-regulated in Transcription
  misc_feature: MA Experiment 20001555 PARAMETER Experiment Name: At_Drought_Soil_Dry_P Parameter: Age (day) Value: 24
  misc_feature: MA Experiment 20001555 PARAMETER Experiment Name: At_Drought_Soil_Dry_P Parameter: Organism Value: A. thaliana
  misc_feature: MA Experiment 20001555 PARAMETER Experiment Name: At_Drought_Soil_Dry_P Parameter: Plant Line Value: WS
  misc_feature: MA Experiment 20001555 PARAMETER Experiment Name: At_Drought_Soil_Dry_P Parameter: Post Timepoint (hr) Value: None
  misc_feature: MA Experiment 20001555 PARAMETER Experiment Name: At_Drought_Soil_Dry_P Parameter: Post-Treatment Value: None
  misc_feature: MA Experiment 20001555 PARAMETER Experiment Name: At_Drought_Soil_Dry_P Parameter: Timepoint (day) Value: 10
  misc_feature: MA Experiment 20001555 PARAMETER Experiment Name: At_Drought_Soil_Dry_P Parameter: Treatment Value: Drought vs. No Drought
  misc_feature: MA Experiment ID: 20001757 Result: Down-regulated in Transcription
  misc_feature: MA Experiment 20001757 PARAMETER Experiment Name: At_50mM_NH4NO3_L-to-H_P Parameter: Timepoint (hr) Value: 6
  misc_feature: MA Experiment 20001757 PARAMETER Experiment Name: At_50mM_NH4NO3_L-to-H_P Parameter: Tissue Value: Leaf
  misc_feature: MA Experiment 20001757 PARAMETER Experiment Name: At_50mM_NH4NO3_L-to-H_P Parameter: Treatment Value: 50mM NH4NO3 vs 100mM Mannitol
  misc_feature: MA Experiment ID: 20001904 Result: Up-regulated in Transcription
  misc_feature: MA Experiment 20001904 PARAMETER Experiment Name: At_Drought_Reproduction_P Parameter: Age (day) Value: 37
  misc_feature: MA Experiment 20001904 PARAMETER Experiment Name: At_Drought_Reproduction_P Parameter: Organism Value: A. thaliana
  misc_feature: MA Experiment 20001904 PARAMETER Experiment Name: At_Drought_Reproduction_P Parameter: Plant Line Value: WS
  misc_feature: MA Experiment 20001904 PARAMETER Experiment Name: At_Drought_Reproduction_P Parameter: Timepoint (day) Value: 7
  misc_feature: MA Experiment 20001904 PARAMETER Experiment Name: At_Drought_Reproduction_P Parameter: Tissue Value: Rosettes
  misc_feature: MA Experiment 20001904 PARAMETER Experiment Name: At_Drought_Reproduction_P Parameter: Treatment Value: Drought vs. No Drought
  misc_feature: MA Experiment ID: 20001905 Result: Up-regulated in Transcription
  misc_feature: MA Experiment 20001905 PARAMETER Experiment Name: At_Drought_Reproduction_P Parameter: Age (day) Value: 40
  misc_feature: MA Experiment 20001905 PARAMETER Experiment Name: At_Drought_Reproduction_P Parameter: Organism Value: A. thaliana
  misc_feature: MA Experiment 20001905 PARAMETER Experiment Name: At_Drought_Reproduction_P Parameter: Plant Line Value: WS
  misc_feature: MA Experiment 20001905 PARAMETER Experiment Name: At_Drought_Reproduction_P Parameter: Timepoint (day) Value: 10
  misc_feature: MA Experiment 20001905 PARAMETER Experiment Name: At_Drought_Reproduction_P Parameter: Tissue Value: Rosettes
  misc_feature: MA Experiment 20001905 PARAMETER Experiment Name: At_Drought_Reproduction_P Parameter: Treatment Value: Drought vs. No Drought
  misc_feature: MA Experiment ID: 20001906 Result: Up-regulated in Transcription
  misc_feature: MA Experiment 20001906 PARAMETER Experiment Name: At_Drought_Reproduction_P Parameter: Age (day) Value: 35
  misc_feature: MA Experiment 20001906 PARAMETER Experiment Name: At_Drought_Reproduction_P Parameter: Organism Value: A. thaliana
  misc_feature: MA Experiment 20001906 PARAMETER Experiment Name: At_Drought_Reproduction_P Parameter: Plant Line Value: WS
  misc_feature: MA Experiment 20001906 PARAMETER Experiment Name: At_Drought_Reproduction_P Parameter: Timepoint (day) Value: 5
  misc_feature: MA Experiment 20001906 PARAMETER Experiment Name: At_Drought_Reproduction_P Parameter: Tissue Value: Siliques
  misc_feature: MA Experiment 20001906 PARAMETER Experiment Name: At_Drought_Reproduction_P Parameter: Treatment Value: Drought vs. No Drought
  misc_feature: MA Experiment ID: 20001911 Result: Up-regulated in Transcription
  misc_feature: MA Experiment 20001911 PARAMETER Experiment Name: At_Drought_Reproduction_P Parameter: Age (day) Value: 40
  misc_feature: MA Experiment 20001911 PARAMETER Experiment Name: At_Drought_Reproduction_P Parameter: Organism Value: A. thaliana
  misc_feature: MA Experiment 20001911 PARAMETER Experiment Name: At_Drought_Reproduction_P Parameter: Plant Line Value: WS
  misc_feature: MA Experiment 20001911 PARAMETER Experiment Name: At_Drought_Reproduction_P Parameter: Timepoint (day) Value: 10
  misc_feature: MA Experiment 20001911 PARAMETER Experiment Name: At_Drought_Reproduction_P Parameter: Tissue Value: Flowers
  misc_feature: MA Experiment 20001911 PARAMETER Experiment Name: At_Drought_Reproduction_P Parameter: Treatment Value: Drought vs. No Drought
gtttccatagaatatgtattcctatgatttttttttatagaattaattgtgttagttaatgccaaattaagattctcttttttaaaatcactttttgaagaagcacttacaagagagttgtgttaagaatagattccagatggaaaagttggcaagaaaagatgttttaagtttttgccttgtcgtctaatccaacggtcgatcttcgttcatatcaagaatccttatgacgtggaccattctcttccctccatctgtacctcttcccaacctctattttttaatttacatcgaaaataaataagaaggattgcaaaagaaaaaatagaaaaaaaactctctgttcttctttcttcttcttcttcgtcgtaagccattaccatttcttctccctctctctgtttttctttgttgcgtatctgtacttagttttcaaacataaaaataaaacatatctttagctgatgttgtcttcttcttgataaacagattttctacagctttttttctttctaatttaataattcttgagactttttaaaaccctctgcgaaacagatgattcgagttttggtttcttcatctgtgttttgattttttcgtcttttattcttagtcaaacacataaatttcttttactactcttcgtagatgacttctcatgttccaaaacatcctcgtaaatcctttgaagatatggtgaagaatcttaaagtggatcctcttgctaaggtcactgcctccaccacttccatggtttctgcaaaagagaataagaatcagtcagaggcagagccatcatattatgaaactcttgagacatatcaaggcctgccttgtccttatggtggctactatggatactactatccaggtcttgatggttcagttggagaagcaaaggataatggatactatggttatggaacagaagttcagtacccggtaatgcaaggggaaaatgggtctgtgatctacttgatgccagggtttcagtcttatgatgcaagccaaacttatatgcctataaacccggttggtgtatcgagtcaagcacttcattcgccgatgtatgctgctcagggttattatcagaaccaatttggttatgcagatgtttcatcgcccacatatttatgggaccctgttggagacaggtatgtgtatggtgttgcttcatataccccacccttgaaacagaacatatcttcttcaagtcataaccacaacaattattattcaaagagcaagaactccttcacgggtcacggcatgggagatcgtcctaaaacaccgcgaaaagcatcacagaacagctatgccccacccccactgcttaaccaagaaaaaggtcgcattgcttacccgatggacccagtaaagaaaaagtctggagctttaaatcgggatgaaacagagaaggcgaaagcgaggacaaaagaaaatggtacaagtatgaatgacttagcaaacggtcaagatcatattaccaatggagaatgtgagtcatgttcgttggatgctgaagggaatgaaagaagcaacggtgttggttctgtgatcagaagggatcaatataacctccctagctttcagaccaaatacgaggaagcaatcttttttgtgataaaatcgtatagcgaagacgacatacacaagagcatcaagtacaatgtctggtctagtactctcaatgggaacaagaagttagacagtgcatatcaagaatctcagaagaaggctgcagacaaaagtggaaagtgcccggttttcctgttcttctcggtgaatgcaagtggccaattctgcggtgtagctgagatgattggacgagttgattatgagaaaagcatggagttctggcaacaagataagtggactggctattttccggtgaagtggcacatcatcaaagatgttccaaatccgcaactacgacatatcatactagagaacaatgagaacaagcctgtaaccaatagcagagacacacaagaggtgaggttgcctcaagggaatgaagtgttgaacatctttaagaactacgcagctaagacatctattttagatgattttgatttttatgaaaacagagagaaggttatggtacagaagaagctaaggttccctccggtattaaagaagaaagaagaagacttggttgctgattttaaaacaatggagatgtctaatacagtcgaagagggaaacacagagttaaccgggacagtgagctaactagaagaacatgtagtgtttttggtttggttttttaaggatcaatataaaccgtccgattgtttcggattgctttgattttattacaagcgagatggcttcttcttctattgtttcgttgtatggtgtaatgttgggttttttcttcactttttttttttggttttgtgttgtgtttatgatatgttttgcaatttgtaatcattggcaaaaatgataggtttgattttatagtgatataagaaaaccgggatacaaaaagaaaagaggtttag

SEQ ID NO: 105790 - protein, 528 aa, Arabidopsis thaliana; identical to SEQ ID NO: 20813
  peptide (1)..(528): Ceres Seq. ID no. 13618004
  misc_feature (375)..(465): Pfam Name: YT521-B-like family Pfam Description: YT521-B-like family
  misc_feature (1)..(528): Homolog of NCBI NO: 18412316 NR Description: expressed protein [Arabidopsis thaliana] unknown protein [Arabidopsis thaliana]
  misc_feature (28)..(528): Homolog of NCBI NO: 7487895 NR Description: hypothetical protein YUP8H12R.13 - Arabidopsis >gi|3152559|gb|AAC17040.1| Similarity to A. thaliana gene product gb|AC000132. EST gb|Z25651 comes from this gene. [Arabidopsis
  misc_feature (230)..(489): Homolog of NCBI NO: 34911170 NR Description: B1144G04.32 [Oryza sativa (japonica
  misc_feature (90)..(493): Homolog of NCBI NO: 30684473 NR Description: expressed protein [Arabidopsis thaliana]
  misc_feature (139)..(516): Homolog of NCBI NO: 18405397 NR Description: expressed protein [Arabidopsis thaliana] At1g55500/T5A14_10 [Arabidopsis thaliana]
  misc_feature (139)..(502): Homolog of NCBI NO: 25372787 NR Description: Rubisco subunit binding-protein beta subunit - Arabidopsis thaliana >gi|4204265|gb|AAD10646.1| Hypothetical
  misc_feature (289)..(496): Homolog of NCBI NO: 15795138 NR Description: gb|AAF35955.1~gene_id:MGH6.21~strong similarity
  misc_feature (289)..(496): Homolog of NCBI NO: 30682438 NR Description: expressed protein [Arabidopsis thaliana]
  misc_feature (91)..(493): Homolog of NCBI NO: 11994550 NR Description: gene_id:MGD8.17~unknown protein [Arabidopsis
  misc_feature (292)..(517): Homolog of NCBI NO: 34395023 NR Description: high-glucose-regulated protein 8-like [Oryza

SEQ ID NO: 105791 - protein, 513 aa, Arabidopsis thaliana; identical to SEQ ID NO: 20814
  peptide (1)..(513): Ceres Seq. ID no. 13618005
  misc_feature (360)..(450): Pfam Name: YT521-B-like family Pfam Description: YT521-B-like family
  misc_feature (1)..(513): Homolog of NCBI NO: 18412316 NR Description: expressed protein [Arabidopsis thaliana] unknown protein [Arabidopsis thaliana]
  misc_feature (13)..(513): Homolog of NCBI NO: 7487895 NR Description: hypothetical protein YUP8H12R.13 - Arabidopsis >gi|3152559|gb|AAC17040.1| Similarity to A. thaliana gene product gb|AC000132. EST gb|Z25651 comes from this gene. [Arabidopsis
  misc_feature (215)..(474): Homolog of NCBI NO: 34911170 NR Description: B1144G04.32 [Oryza sativa (japonica
  misc_feature (75)..(478): Homolog of NCBI NO: 30684473 NR Description: expressed protein [Arabidopsis thaliana]
  misc_feature (124)..(501): Homolog of NCBI NO: 18405397 NR Description: expressed protein [Arabidopsis thaliana] At1g55500/T5A14_10 [Arabidopsis thaliana]
  misc_feature (124)..(487): Homolog of NCBI NO: 25372787 NR Description: Rubisco subunit binding-protein beta subunit - Arabidopsis thaliana >gi|4204265|gb|AAD10646.1| Hypothetical
  misc_feature (274)..(481): Homolog of NCBI NO: 15795138 NR Description: gb|AAF35955.1~gene_id:MGH6.21~strong similarity
  misc_feature (274)..(481): Homolog of NCBI NO: 30682438 NR Description: expressed protein [Arabidopsis thaliana]
  misc_feature (76)..(478): Homolog of NCBI NO: 11994550 NR Description: gene_id:MGD8.17~unknown protein [Arabidopsis
  misc_feature (277)..(502): Homolog of NCBI NO: 34395023 NR Description: high-glucose-regulated protein 8-like [Oryza

SEQ ID NO: 105792 - protein, 494 aa, Arabidopsis thaliana; identical to SEQ ID NO: 20815
  peptide (1)..(494): Ceres Seq. ID no. 13618006
  misc_feature (341)..(431): Pfam Name: YT521-B-like family Pfam Description: YT521-B-like family
  misc_feature (1)..(494): Homolog of NCBI NO: 18412316 NR Description: expressed protein [Arabidopsis thaliana] unknown protein [Arabidopsis thaliana]
  misc_feature (1)..(494): Homolog of NCBI NO: 7487895 NR Description: hypothetical protein YUP8H12R.13 - Arabidopsis >gi|3152559|gb|AAC17040.1| Similarity to A. thaliana gene product gb|AC000132. EST gb|Z25651 comes from this gene. [Arabidopsis
  misc_feature (196)..(455): Homolog of NCBI NO: 34911170 NR Description: B1144G04.32 [Oryza sativa (japonica
  misc_feature (56)..(459): Homolog of NCBI NO: 30684473 NR Description: expressed protein [Arabidopsis thaliana]
  misc_feature (105)..(482): Homolog of NCBI NO: 18405397 NR Description: expressed protein [Arabidopsis thaliana] At1g55500/T5A14_10 [Arabidopsis thaliana]
  misc_feature (105)..(468): Homolog of NCBI NO: 25372787 NR Description: Rubisco subunit binding-protein beta subunit - Arabidopsis thaliana >gi|4204265|gb|AAD10646.1| Hypothetical
  misc_feature (255)..(462): Homolog of NCBI NO: 15795138 NR Description: gb|AAF35955.1~gene_id:MGH6.21~strong similarity
  misc_feature (255)..(462): Homolog of NCBI NO: 30682438 NR Description: expressed protein [Arabidopsis thaliana]
  misc_feature (57)..(459): Homolog of NCBI NO: 11994550 NR Description: gene_id:MGD8.17~unknown protein [Arabidopsis
  misc_feature (258)..(483): Homolog of NCBI NO: 34395023 NR Description: high-glucose-regulated protein 8-like [Oryza

SEQ ID NO: 105793 - DNA, 833 bp, Arabidopsis thaliana
  misc_feature (1)..(833): Ceres Seq. ID no. 13618007
  misc_feature: MA Experiment ID: 108473 Result: Down-regulated in Transcription
  misc_feature: MA Experiment 108473 PARAMETER Experiment Name: At_Drought_Flowers_cDNA_P Parameter: Timepoint (hr) Value: 7 d
  misc_feature: MA Experiment 108473 PARAMETER Experiment Name: At_Drought_Flowers_cDNA_P Parameter: Tissue Value: Flower
  misc_feature: MA Experiment 108473 PARAMETER Experiment Name: At_Drought_Flowers_cDNA_P Parameter: Treatment Value: Drought vs. No Drought
  misc_feature: MA Experiment ID: 108474 Result: Up-regulated in Transcription
  misc_feature: MA Experiment 108474 PARAMETER Experiment Name: At_Drought_Flowers_cDNA_P Parameter: Timepoint (hr) Value: null
  misc_feature: MA Experiment 108474 PARAMETER Experiment Name: At_Drought_Flowers_cDNA_P Parameter: Treatment Value: Drought vs. No Drought
  misc_feature: MA Experiment ID: 108501 Result: Down-regulated in Transcription
  misc_feature: MA Experiment 108501 PARAMETER Experiment Name: At_ap2_floral_buds_cDNA_P Parameter: Plant Line Value: ap2 (Ler.)
  misc_feature: MA Experiment 108501 PARAMETER Experiment Name: At_ap2_floral_buds_cDNA_P Parameter: Tissue Value: Closed Flower
  misc_feature: MA Experiment ID: 108573 Result: Down-regulated in Transcription
  misc_feature: MA Experiment 108573 PARAMETER Experiment Name: At_Drought_cDNA_P Parameter: Timepoint (hr) Value: 6
  misc_feature: MA Experiment 108573 PARAMETER Experiment Name: At_Drought_cDNA_P Parameter: Tissue Value: Aerial
  misc_feature: MA Experiment 108573 PARAMETER Experiment Name: At_Drought_cDNA_P Parameter: Treatment Value: Drought vs. No Drought
  misc_feature: MA Experiment ID: 108595 Result: Up-regulated in Transcription
  misc_feature: MA Experiment 108595 PARAMETER Experiment Name: At_Ler-pi_Ovule_cDNA_P Parameter: Plant Line Value: null
  misc_feature: MA Experiment ID: 20000087 Result: Up-regulated in Transcription
  misc_feature: MA Experiment 20000087 PARAMETER Experiment Name: At_100uM_ABA_Mutants_cDNA_P Parameter: Plant Line Value: WS
  misc_feature: MA Experiment 20000087 PARAMETER Experiment Name: At_100uM_ABA_Mutants_cDNA_P Parameter: Timepoint (hr) Value: 6
  misc_feature: MA Experiment 20000087 PARAMETER Experiment Name: At_100uM_ABA_Mutants_cDNA_P Parameter: Tissue Value: Aerial
  misc_feature: MA Experiment 20000087 PARAMETER Experiment Name: At_100uM_ABA_Mutants_cDNA_P Parameter: Treatment Value: 100uM ABA vs. No Treatment
  misc_feature: MA Experiment ID: 20000117 Result: Up-regulated in Transcription
  misc_feature: MA Experiment 20000117 PARAMETER Experiment Name: At_100uM_ABA_Mutants_cDNA_P Parameter: Plant Line Value: Columbia
  misc_feature: MA Experiment 20000117 PARAMETER Experiment Name: At_100uM_ABA_Mutants_cDNA_P Parameter: Timepoint (hr) Value: 6
  misc_feature: MA Experiment 20000117 PARAMETER Experiment Name: At_100uM_ABA_Mutants_cDNA_P Parameter: Tissue Value: Aerial
  misc_feature: MA Experiment 20000117 PARAMETER Experiment Name: At_100uM_ABA_Mutants_cDNA_P Parameter: Treatment Value: 100uM ABA vs. No Treatment
  misc_feature: MA Experiment ID: 20000314 Result: Down-regulated in Transcription
  misc_feature: MA Experiment 20000314 PARAMETER Experiment Name: At_14day_Shoots-Roots_Sub_P Parameter: Age (day) Value: 14
  misc_feature: MA Experiment 20000314 PARAMETER Experiment Name: At_14day_Shoots-Roots_Sub_P Parameter: Organism Value: A. thaliana
  misc_feature: MA Experiment 20000314 PARAMETER Experiment Name: At_14day_Shoots-Roots_Sub_P Parameter: Plant Line Value: WS
  misc_feature: MA Experiment 20000314 PARAMETER Experiment Name: At_14day_Shoots-Roots_Sub_P Parameter: Tissue Value: Roots vs. Whole Plant
  misc_feature: MA Experiment ID: 20000315 Result: Down-regulated in Transcription
  misc_feature: MA Experiment 20000315 PARAMETER Experiment Name: At_14day_Shoots-Roots_Sub_P Parameter: Age (day) Value: 14
  misc_feature: MA Experiment 20000315 PARAMETER Experiment Name: At_14day_Shoots-Roots_Sub_P Parameter: Organism Value: A. thaliana
  misc_feature: MA Experiment 20000315 PARAMETER Experiment Name: At_14day_Shoots-Roots_Sub_P Parameter: Plant Line Value: WS
  misc_feature: MA Experiment 20000315 PARAMETER Experiment Name: At_14day_Shoots-Roots_Sub_P Parameter: Tissue Value: Shoots vs. Whole Plant
  misc_feature: MA Experiment ID: 20000328 Result: Down-regulated in Transcription
  misc_feature: MA Experiment 20000328 PARAMETER Experiment Name: At_42deg_Heat_Sub_P Parameter: Age (day) Value: 14
  misc_feature: MA Experiment 20000328 PARAMETER Experiment Name: At_42deg_Heat_Sub_P Parameter: Organism Value: A. thaliana
  misc_feature: MA Experiment 20000328 PARAMETER Experiment Name: At_42deg_Heat_Sub_P Parameter: Plant Line Value: WS
  misc_feature: MA Experiment 20000328 PARAMETER Experiment Name: At_42deg_Heat_Sub_P Parameter: Temperature (deg C) Value: 42 vs. 22
  misc_feature: MA Experiment 20000328 PARAMETER Experiment Name: At_42deg_Heat_Sub_P Parameter: Timepoint (hr) Value: 6
  misc_feature: MA Experiment 20000328 PARAMETER Experiment Name: At_42deg_Heat_Sub_P Parameter: Tissue Value: Aerial
  misc_feature: MA Experiment ID: 20000440 Result: Up-regulated in Transcription
  misc_feature: MA Experiment 20000440 PARAMETER Experiment Name: At_Closed-Flower__Sub_P Parameter: Tissue Value: Closed Flower vs. Whole Plant
aacactcaaaagagattctcacgatcgagcaagagagagatggatggtcgattacctgacaaaggcattctcaagagcgaggctctaaaacagtacatcatggaaacaacagcgtatccaagagaacacgaattgcttaaagaacttcgagaagctacaatccagagatatggaaatttaagcgagatgggagttccggttgatgaaagtctatttttatcgatgcttgtaaagatcatcaacgcgaaaaacactatcgagatcggtgtgttcaccggttactcacttttcaccgtagctcttgctttgcctgaagatggccgtattactgcgatagacattgatcaagcaggttacaatttgggactagagtttatgaagaaagcaggtgttgatcacaagatcaatttcattcaatctgatgctgttagaggcttagaccaattattgaacggggagaaacaagagtatgattttgcatttgtggatgctgacaagacgaactacgtttacttccttgagaagctccttaagttagtgaaggttggaggaatcattgccttcgacaacactttatggtttggtactctaattcagaaggaaaacgaagttccaggccatatgagagcttatagagaggcacttttagagttcaataagatattggctcgggatcctcgagtcgaaatcgctcaaatatccatcggagatggtctcacgctatgtagacgtcttatatgataaacctatagtaaataatgttatatgcttcaataataactttggcctttgtttgtaatgttatatgctactataatgactcttcatcttcc

SEQ ID NO: 105794 - protein, 246 aa, Arabidopsis thaliana
  peptide (1)..(246): Ceres Seq. ID no. 13618008
  misc_feature (34)..(245): Pfam Name: O-methyltransferase Pfam Description: O-methyltransferase
  misc_feature (14)..(246): Homolog of NCBI NO: 18408913 NR Description: caffeoyl-CoA 3-O-methyltransferase, putative
  misc_feature (14)..(246): Homolog of NCBI NO: 30580370 NR Description: Putative caffeoyl-CoA O-methyltransferase
  misc_feature (14)..(246): Homolog of NCBI NO: 30580369 NR Description: Putative caffeoyl-CoA O-methyltransferase
  misc_feature (34)..(246): Homolog of NCBI NO: 18408911 NR Description: caffeoyl-CoA 3-O-methyltransferase, putative
  misc_feature (34)..(246): Homolog of NCBI NO: 682728 NR Description: S-adenosyl-L-methionine:trans-caffeoyl-Coenzyme A
  misc_feature (18)..(245): Homolog of NCBI NO: 3023432 NR Description: Caffeoyl-CoA O-methyltransferase
  misc_feature (17)..(245): Homolog of NCBI NO: 37720881 NR Description: O-methyltransferase [Mesembryanthemum
  misc_feature (61)..(246): Homolog of NCBI NO: 15221807 NR Description: caffeoyl-CoA 3-O-methyltransferase, putative
  misc_feature (1)..(245): Homolog of NCBI NO: 30580341 NR Description: Caffeoyl-CoA O-methyltransferase
  misc_feature (21)..(245): Homolog of NCBI NO: 30580334 NR Description: Caffeoyl-CoA O-methyltransferase 2
NTQKRFSRSSKREMDGRLPDKGILKSEALKQYIMETTAYPREHELLKELREATIQRYGNLSEMGVPVDESLFLSMLVKIINAKNTIEIGVFTGYSLFTVALALPEDGRITAIDIDQAGYNLGLEFMKKAGVDHKINFIQSDAVRGLDQLLNGEKQEYDFAFVDADKTNYVYFLEKLLKLVKVGGIIAFDNTLWFGTLIQKENEVPGHMRAYREALLEFNKILARDPRVEIAQISIGDGLTLCRRLI

SEQ ID NO: 105795 - protein, 233 aa, Arabidopsis thaliana; identical to SEQ ID NO: 27022
  peptide (1)..(233): Ceres Seq. ID no. 13618009
  misc_feature (21)..(232): Pfam Name: O-methyltransferase Pfam Description: O-methyltransferase
  misc_feature (1)..(233): Homolog of NCBI NO: 18408913 NR Description: caffeoyl-CoA 3-O-methyltransferase, putative
  misc_feature (1)..(233): Homolog of NCBI NO: 30580370 NR Description: Putative caffeoyl-CoA O-methyltransferase
  misc_feature (1)..(233): Homolog of NCBI NO: 30580369 NR Description: Putative caffeoyl-CoA O-methyltransferase
  misc_feature (21)..(233): Homolog of NCBI NO: 18408911 NR Description: caffeoyl-CoA 3-O-methyltransferase, putative
  misc_feature (21)..(233): Homolog of NCBI NO: 682728 NR Description: S-adenosyl-L-methionine:trans-caffeoyl-Coenzyme A
  misc_feature (5)..(232): Homolog of NCBI NO: 3023432 NR Description: Caffeoyl-CoA O-methyltransferase
  misc_feature (4)..(232): Homolog of NCBI NO: 37720881 NR Description: O-methyltransferase [Mesembryanthemum
  misc_feature (48)..(233): Homolog of NCBI NO: 15221807 NR Description: caffeoyl-CoA 3-O-methyltransferase, putative
  misc_feature (1)..(232): Homolog of NCBI NO: 30580341 NR Description: Caffeoyl-CoA O-methyltransferase
  misc_feature (8)..(232): Homolog of NCBI NO: 30580334 NR Description: Caffeoyl-CoA O-methyltransferase 2

SEQ ID NO: 105796 - protein, 213 aa, Arabidopsis thaliana; identical to SEQ ID NO: 27023
  peptide (1)..(213): Ceres Seq. ID no. 13618010
  misc_feature (1)..(212): Pfam Name: O-methyltransferase Pfam Description: O-methyltransferase
  misc_feature (1)..(213): Homolog of NCBI NO: 18408913 NR Description: caffeoyl-CoA 3-O-methyltransferase, putative
  misc_feature (1)..(213): Homolog of NCBI NO: 30580370 NR Description: Putative caffeoyl-CoA O-methyltransferase
  misc_feature (1)..(213): Homolog of NCBI NO: 30580369 NR Description: Putative caffeoyl-CoA O-methyltransferase
  misc_feature (1)..(213): Homolog of NCBI NO: 18408911 NR Description: caffeoyl-CoA 3-O-methyltransferase, putative
  misc_feature (1)..(213): Homolog of NCBI NO: 682728 NR Description: S-adenosyl-L-methionine:trans-caffeoyl-Coenzyme A
  misc_feature (1)..(212): Homolog of NCBI NO: 3023432 NR Description: Caffeoyl-CoA O-methyltransferase
  misc_feature (1)..(212): Homolog of NCBI NO: 37720881 NR Description: O-methyltransferase [Mesembryanthemum
  misc_feature (28)..(213): Homolog of NCBI NO: 15221807 NR Description: caffeoyl-CoA 3-O-methyltransferase, putative
  misc_feature (1)..(212): Homolog of NCBI NO: 30580341 NR Description: Caffeoyl-CoA O-methyltransferase
  misc_feature (1)..(212): Homolog of NCBI NO: 30580334 NR Description: Caffeoyl-CoA O-methyltransferase 2

SEQ ID NO: 105797 - DNA, 1308 bp, Arabidopsis thaliana
  misc_feature (1)..(1308): Ceres Seq. ID no. 13618015
  misc_feature: MA Experiment ID: 108577 Result: Down-regulated in Transcription
  misc_feature: MA Experiment 108577 PARAMETER Experiment Name: At_42deg_Heat_cDNA_P Parameter: Temperature (deg C) Value: 42 vs. 22
  misc_feature: MA Experiment 108577 PARAMETER Experiment Name: At_42deg_Heat_cDNA_P Parameter: Timepoint (hr) Value: 6
  misc_feature: MA Experiment 108577 PARAMETER Experiment Name: At_42deg_Heat_cDNA_P Parameter: Tissue Value: Aerial
  misc_feature: MA Experiment ID: 20000224 Result: Down-regulated in Transcription
acttttgagtggtactgataggtacaagaaacacaacaaaccctagatttatcttcatctctctcaattctgtatcaagcaaagacggattcaacgatgtcttcacctgaatcaccttccggttccgactcatccacaccacttctccgttcacggcaatcatcaccacgtcgtcaacctgtaatcgcggttctattaaatcgagcttcaggacgacgaggagcttcgatggtggttagagaaacagctgcacaagagcttgaagagcgacgagctgattggggttactcgaaacctgttgttgctttggatatgctttggaacactgcttttgttcttgttgcgattgttatgcttttggtttttaaagaagagaagccaaatgttcctattaggatttggatctgtggttatgcgattcagtgtcttgttcatgttgtccttgtttggcttgagtttagaaagaggaatgctagaagcagacctggagatttagaagctgctcaagctacgaatcaggatagtgaagatgaagacaacgatgagaggtttctgagcactaagacttgtgaatcaatgaacactataatatcatttgtctggtggattgttggattctactggcttgtttctggtggtgatatccttctgcaaaacgcgacgcatttgtattggttaacctttgttttccttgcatttgatgtgttctttgccatcttttgcgttgtgctggcatgtcttattggaatcgccctctgttgttgcctaccttgtattattgctcttctttacgccgtcgcggggcaggagggtgcatcagaagcagatctcagcatccttcccaagtacaggtttcacacgatgaacaatgatgaaaagcaaagtgacggtggtgggaaaatgatacctgtggatgcagcgagtgagaatttaggaaacgagcgtgtgcttcttcccgaggatgctgactgttgtatatgtttgagttcatatgaagatggagcagagctggtctcacttccttgcaaccaccactttcattctacgtgcattgtgaaatggctgaaaatgaatgcgacatgtccactatgcaagttcaatatcctcaaaggtaatgaacaagaatgaagtaatgtagaggaaacttttcttctttttatgttgtgtttctttttgttgtatatagagtagagaaaaaagaaaatgattgtgttgtttgtaagtcataagacagtttgtttctttgttgaaatttgttgtcaattctcttttttttttatcaaataataatagatatattcatcatgt

SEQ ID NO: 105798 - protein, 343 aa, Arabidopsis thaliana
  peptide (1)..(343): Ceres Seq. ID no. 13618016
  misc_feature (292)..(332): Pfam Name: Zinc finger, C3HC4 type (RING finger) Pfam Description: Zinc finger, C3HC4 type (RING finger)
  misc_feature (1)..(343): Homolog of NCBI NO: 15220639 NR Description: zinc finger (C3HC4-type RING finger) protein [Arabidopsis thaliana] >gi|25404696|pir||H96703 probable RING
  misc_feature (1)..(343): Homolog of NCBI NO: 21536719 NR Description: putative RING zinc finger protein [Arabidopsis
  misc_feature (3)..(343): Homolog of NCBI NO: 30677954 NR Description: RING zinc finger protein family [Arabidopsis
  misc_feature (8)..(343): Homolog of NCBI NO: 18413629 NR Description: zinc finger (C3HC4-type RING finger) protein [Arabidopsis thaliana] >gi|16323218|gb|AAL15343.1|
  misc_feature (8)..(290): Homolog of NCBI NO: 7487667 NR Description: hypothetical protein T5C23.110 - Arabidopsis >gi|4539459|emb|CAB39939.1| putative protein [Arabidopsis >gi|7267868|emb|CAB78211.1| putative protein [Arabidopsis
  misc_feature (291)..(343): Homolog of NCBI NO: 7487667 NR Description: hypothetical protein T5C23.110 - Arabidopsis >gi|4539459|emb|CAB39939.1| putative protein [Arabidopsis >gi|7267868|emb|CAB78211.1| putative protein [Arabidopsis
  misc_feature (1)..(340): Homolog of NCBI NO: 33146524 NR Description: putative RES protein [Oryza sativa (japonica
  misc_feature (41)..(343): Homolog of NCBI NO: 38344371 NR Description: OSJNBb0032E06.5 [Oryza sativa (japonica
  misc_feature (156)..(340): Homolog of NCBI NO: 9502381 NR Description: T12C24.29 [Arabidopsis thaliana] unknown protein [Arabidopsis thaliana]
  misc_feature (23)..(127): Homolog of NCBI NO: 9502381 NR Description: T12C24.29 [Arabidopsis thaliana] unknown protein [Arabidopsis thaliana]
MSSPESPSGSDSSTPLLRSRQSSPRRQPVIAVLLNRASGRRGASMVVRETAAQELEERRADWGYSKPVVALDMLWNTAFVLVAIVMLLVFKEEKPNVPIRIWICGYAIQCLVHVVLVWLEFRKRNARSRPGDLEAAQATNQDSEDEDNDERFLSTKTCESMNTIISFVWWIVGFYWLVSGGDILLQNATHLYWLTFVFLAFDVFFAIFCVVLACLIGIALCCCLPCIIALLYAVAGQEGASEADLSILPKYRFHTMNNDEKQSDGGGKMIPVDAASENLGNERVLLPEDADCCICLSSYEDGAELVSLPCNHHFHSTCIVKWLKMNATCPLCKFNILKGNEQE

SEQ ID NO: 105799 - protein, 299 aa, Arabidopsis thaliana; identical to SEQ ID NO: 39734
  peptide (1)..(299): Ceres Seq. ID no. 13618017
  misc_feature (248)..(288): Pfam Name: Zinc finger, C3HC4 type (RING finger) Pfam Description: Zinc finger, C3HC4 type (RING finger)
  misc_feature (1)..(299): Homolog of NCBI NO: 15220639 NR Description: zinc finger (C3HC4-type RING finger) protein [Arabidopsis thaliana] >gi|25404696|pir||H96703 probable RING
  misc_feature (1)..(299): Homolog of NCBI NO: 21536719 NR Description: putative RING zinc finger protein [Arabidopsis
  misc_feature (1)..(299): Homolog of NCBI NO: 30677954 NR Description: RING zinc finger protein family [Arabidopsis
  misc_feature (1)..(299): Homolog of NCBI NO: 18413629 NR Description: zinc finger (C3HC4-type RING finger) protein [Arabidopsis thaliana] >gi|16323218|gb|AAL15343.1|
  misc_feature (1)..(246): Homolog of NCBI NO: 7487667 NR Description: hypothetical protein T5C23.110 - Arabidopsis >gi|4539459|emb|CAB39939.1| putative protein [Arabidopsis >gi|7267868|emb|CAB78211.1| putative protein [Arabidopsis
  misc_feature (247)..(299): Homolog of NCBI NO: 7487667 NR Description: hypothetical protein T5C23.110 - Arabidopsis >gi|4539459|emb|CAB39939.1| putative protein [Arabidopsis >gi|7267868|emb|CAB78211.1| putative protein [Arabidopsis
  misc_feature (1)..(296): Homolog of NCBI NO: 33146524 NR Description: putative RES protein [Oryza sativa (japonica
  misc_feature (1)..(299): Homolog of NCBI NO: 38344371 NR Description: OSJNBb0032E06.5 [Oryza sativa (japonica
  misc_feature (112)..(296): Homolog of NCBI NO: 9502381 NR Description: T12C24.29 [Arabidopsis thaliana] unknown protein [Arabidopsis thaliana]
  misc_feature (1)..(83): Homolog of NCBI NO: 9502381 NR Description: T12C24.29 [Arabidopsis thaliana] unknown protein [Arabidopsis thaliana]

SEQ ID NO: 105800 - protein, 271 aa, Arabidopsis thaliana; identical to SEQ ID NO: 39735
  peptide (1)..(271): Ceres Seq. ID no. 13618018
  misc_feature (220)..(260): Pfam Name: Zinc finger, C3HC4 type (RING finger) Pfam Description: Zinc finger, C3HC4 type (RING finger)
  misc_feature (1)..(271): Homolog of NCBI NO: 15220639 NR Description: zinc finger (C3HC4-type RING finger) protein [Arabidopsis thaliana] >gi|25404696|pir||H96703 probable RING
  misc_feature (1)..(271): Homolog of NCBI NO: 21536719 NR Description: putative RING zinc finger protein [Arabidopsis
  misc_feature (1)..(271): Homolog of NCBI NO: 30677954 NR Description: RING zinc finger protein family [Arabidopsis
  misc_feature (1)..(271): Homolog of NCBI NO: 18413629 NR Description: zinc finger (C3HC4-type RING finger) protein [Arabidopsis thaliana] >gi|16323218|gb|AAL15343.1|
  misc_feature (1)..(218): Homolog of NCBI NO: 7487667 NR Description: hypothetical protein T5C23.110 - Arabidopsis >gi|4539459|emb|CAB39939.1| putative protein [Arabidopsis >gi|7267868|emb|CAB78211.1| putative protein [Arabidopsis
  misc_feature (219)..(271): Homolog of NCBI NO: 7487667 NR Description: hypothetical protein T5C23.110 - Arabidopsis >gi|4539459|emb|CAB39939.1| putative protein [Arabidopsis >gi|7267868|emb|CAB78211.1| putative protein [Arabidopsis
  misc_feature (1)..(268): Homolog of NCBI NO: 33146524 NR Description: putative RES protein [Oryza sativa (japonica
  misc_feature (1)..(271): Homolog of NCBI NO: 38344371 NR Description: OSJNBb0032E06.5 [Oryza sativa (japonica
  misc_feature (84)..(268): Homolog of NCBI NO: 9502381 NR Description: T12C24.29 [Arabidopsis thaliana] unknown protein [Arabidopsis thaliana]
  misc_feature (1)..(55): Homolog of NCBI NO: 9502381 NR Description: T12C24.29 [Arabidopsis thaliana] unknown protein [Arabidopsis thaliana]

SEQ ID NO: 105801 - DNA, 913 bp, Arabidopsis thaliana
  misc_feature (1)..(913): Ceres Seq. ID no. 13618023
  misc_feature: MA Experiment ID: 108433 Result: Down-regulated in Transcription
  misc_feature: MA Experiment 108433 PARAMETER Experiment Name: At_rhl_Mutant2_cDNA_P Parameter: Age (day) Value: 7
  misc_feature: MA Experiment 108433 PARAMETER Experiment Name: At_rhl_Mutant2_cDNA_P Parameter: Organism Value: A. thaliana
  misc_feature: MA Experiment 108433 PARAMETER Experiment Name: At_rhl_Mutant2_cDNA_P Parameter: Plant Line Value: rhl Mutant vs. wt landsburg
  misc_feature: MA Experiment 108433 PARAMETER Experiment Name: At_rhl_Mutant2_cDNA_P Parameter: Tissue Value: Roots
  misc_feature: MA Experiment ID: 108434 Result: Up-regulated in Transcription
  misc_feature: MA Experiment 108434 PARAMETER Experiment Name: At_Root_Tips_cDNA_P Parameter: Tissue Value: Root Tips
  misc_feature: MA Experiment ID: 108573 Result: Up-regulated in Transcription
  misc_feature: MA Experiment 108573 PARAMETER Experiment Name: At_Drought_cDNA_P Parameter: Timepoint (hr) Value: 6
  misc_feature: MA Experiment 108573 PARAMETER Experiment Name: At_Drought_cDNA_P Parameter: Tissue Value: Aerial
  misc_feature: MA Experiment 108573 PARAMETER Experiment Name: At_Drought_cDNA_P Parameter: Treatment Value: Drought vs. No Drought
  misc_feature: MA Experiment ID: 20000087 Result: Up-regulated in Transcription
  misc_feature: MA Experiment 20000087 PARAMETER Experiment Name: At_100uM_ABA_Mutants_cDNA_P Parameter: Plant Line Value: WS
  misc_feature: MA Experiment 20000087 PARAMETER Experiment Name: At_100uM_ABA_Mutants_cDNA_P Parameter: Timepoint (hr) Value: 6
  misc_feature: MA Experiment 20000087 PARAMETER Experiment Name: At_100uM_ABA_Mutants_cDNA_P Parameter: Tissue Value: Aerial
  misc_feature: MA Experiment 20000087 PARAMETER Experiment Name: At_100uM_ABA_Mutants_cDNA_P Parameter: Treatment Value: 100uM ABA vs. No Treatment
  misc_feature: MA Experiment ID: 20000111 Result: Up-regulated in Transcription
  misc_feature: MA Experiment 20000111 PARAMETER Experiment Name: At_42deg_Heat_cDNA_P Parameter: Temperature (deg C) Value: 42 vs. 22
  misc_feature: MA Experiment 20000111 PARAMETER Experiment Name: At_42deg_Heat_cDNA_P Parameter: Timepoint (hr) Value: 6
  misc_feature: MA Experiment 20000111 PARAMETER Experiment Name: At_42deg_Heat_cDNA_P Parameter: Tissue Value: Aerial
  misc_feature: MA Experiment ID: 20000112 Result: Up-regulated in Transcription
  misc_feature: MA Experiment 20000112 PARAMETER Experiment Name: At_42deg_Heat_cDNA_P Parameter: Temperature (deg C) Value: 42 vs. 22
  misc_feature: MA Experiment 20000112 PARAMETER Experiment Name: At_42deg_Heat_cDNA_P Parameter: Timepoint (hr) Value: 2
  misc_feature: MA Experiment 20000112 PARAMETER Experiment Name: At_42deg_Heat_cDNA_P Parameter: Tissue Value: Aerial
  misc_feature: MA Experiment ID: 20000113 Result: Up-regulated in Transcription
  misc_feature: MA Experiment 20000113 PARAMETER Experiment Name: At_42deg_Heat_cDNA_P Parameter: Temperature (deg C) Value: 42 vs. 22
  misc_feature: MA Experiment 20000113 PARAMETER Experiment Name: At_42deg_Heat_cDNA_P Parameter: Timepoint (hr) Value: 8
  misc_feature: MA Experiment 20000113 PARAMETER Experiment Name: At_42deg_Heat_cDNA_P Parameter: Tissue Value: Aerial
  misc_feature: MA Experiment ID: 20000173 Result: Up-regulated in Transcription
  misc_feature: MA Experiment 20000173 PARAMETER Experiment Name: At_42deg_Heat_P Parameter: Age (day) Value: 14
  misc_feature: MA Experiment 20000173 PARAMETER Experiment Name: At_42deg_Heat_P Parameter: Organism Value: A. thaliana
  misc_feature: MA Experiment 20000173 PARAMETER Experiment Name: At_42deg_Heat_P Parameter: Plant Line Value: WS
  misc_feature: MA Experiment 20000173 PARAMETER Experiment Name: At_42deg_Heat_P Parameter: Temperature (deg C) Value: 42 vs. 22
  misc_feature: MA Experiment 20000173 PARAMETER Experiment Name: At_42deg_Heat_P Parameter: Timepoint (hr) Value: 6
  misc_feature: MA Experiment 20000173 PARAMETER Experiment Name: At_42deg_Heat_P Parameter: Tissue Value: Aerial
  misc_feature: MA Experiment ID: 20000224 Result: Down-regulated in Transcription
  misc_feature: MA Experiment ID: 20000227 Result: Down-regulated in Transcription
  misc_feature: MA Experiment 20000227 PARAMETER Experiment Name: At_Root-Tips-vs-Tops_P Parameter: Tissue Value: Root Tips vs. Root Tops
  misc_feature: MA Experiment ID: 20000437 Result: Up-regulated in Transcription
  misc_feature: MA Experiment 20000437 PARAMETER Experiment Name: At_Drought_P Parameter: Age (day) Value: 8
  misc_feature: MA Experiment 20000437 PARAMETER Experiment Name: At_Drought_P Parameter: Organism Value: A. thaliana
  misc_feature: MA Experiment 20000437 PARAMETER Experiment Name: At_Drought_P Parameter: Plant Line Value: WS
  misc_feature: MA Experiment 20000437 PARAMETER Experiment Name: At_Drought_P Parameter: Timepoint (hr) Value: 24
  misc_feature: MA Experiment 20000437 PARAMETER Experiment Name: At_Drought_P Parameter: Tissue Value: Whole Plant
  misc_feature: MA Experiment 20000437 PARAMETER Experiment Name: At_Drought_P Parameter: Treatment Value: Drought vs. No Drought
  misc_feature: MA Experiment ID: 20001451 Result: Up-regulated in Transcription
  misc_feature: MA Experiment 20001451 PARAMETER Experiment Name: At_Far-red-induction_P Parameter: Age (day) Value: 7
  misc_feature: MA Experiment 20001451 PARAMETER Experiment Name: At_Far-red-induction_P Parameter: Light Value: Far-red vs. White
  misc_feature: MA Experiment 20001451 PARAMETER Experiment Name: At_Far-red-induction_P Parameter: Organism Value: A. thaliana
  misc_feature: MA Experiment 20001451 PARAMETER Experiment Name: At_Far-red-induction_P Parameter: Plant Line Value: Columbia
  misc_feature: MA Experiment 20001451 PARAMETER Experiment Name: At_Far-red-induction_P Parameter: Timepoint (hr) Value: 24
  misc_feature: MA Experiment 20001451 PARAMETER Experiment Name: At_Far-red-induction_P Parameter: Tissue Value: Whole Plant
ataaattgaacaagggacctctccaatggccccttctctcgtccttcttcttctgtctaacaatacactaccacacactttcacgctctcttctctcacacctttcttcttcctcacccaaaattcttctctctatgttcttcttcatcttctagctctctcatctcttcttctcgccatagcttcaccttccttctcaagctgtacagttaaagcttaagattaattttcgttaattttaaattcgaagaaaagatgaatcactttgcggttcaaccaaacgcgttcgctgccggcggagatttgagaagcagctccgtttcagttgttgaaagagatcaaaccaccgtcgtttgtccaaaaccacgtcgtattggtctccgtaacaaccatcaccatccttctcgatctctccgttgttacttcagtcatcaattggagctttgtgaatccaaagcagagactgatatcttagatatcatactcaccaaggatggttatggtgcagaacaagttaataagcaggtaatagactcgccgtccccgtttttatgtgggtcgccgccgagcagagtcgctaacccattaacacaggatgctcgatttcgagatgagattgtatcggtttcttcagtgattccgcctcagttgggtttacctccttcttcatctccttcttcttcctctgggaggaaaggaggatgtgttgttagaggcaattttggtaacagcccaaaggttagagttgaagggtttgattgtcttgacagggatagcagaaactgcagcatccctgccttggcttagaaacgaaacccgaaacgaacccttttaggattttcatacatactcttttgagttaactcacaaaaaaaaaaaaacaattagtgcgtcgtaaatataagtgttaagg

SEQ ID NO: 105802 - protein, 183 aa, Arabidopsis thaliana; identical to SEQ ID NO: 23781
  peptide (1)..(183): Ceres Seq. ID no. 13618024
  misc_feature (1)..(183): Homolog of NCBI NO: 18409044 NR Description: expressed protein [Arabidopsis thaliana]
  misc_feature (1)..(183): Homolog of NCBI NO: 15222278 NR Description: expressed protein [Arabidopsis thaliana] expressed protein [Arabidopsis thaliana]
  misc_feature (1)..(183): Homolog of NCBI NO: 30685676 NR Description: expressed protein [Arabidopsis thaliana]
  misc_feature (1)..(183): Homolog of NCBI NO: 11762168 NR Description: AT5g16110 [Arabidopsis thaliana]
  misc_feature (1)..(183): Homolog of NCBI NO: 18396232 NR Description: expressed protein [Arabidopsis thaliana]

SEQ ID NO: 105803 - DNA, 1336 bp, Arabidopsis thaliana
  misc_feature (1)..(1336): Ceres Seq. ID no. 13618044
  misc_feature: MA Experiment ID: 108434 Result: Down-regulated in Transcription
  misc_feature: MA Experiment 108434 PARAMETER Experiment Name: At_Root_Tips_cDNA_P Parameter: Tissue Value: Root Tips
  misc_feature: MA Experiment ID: 108435 Result: Down-regulated in Transcription
  misc_feature: MA Experiment 108435 PARAMETER Experiment Name: At_stm_Mutants_cDNA_P Parameter: Plant Line Value: wt Landsburg vs stm
  misc_feature: MA Experiment 108435 PARAMETER Experiment Name: At_stm_Mutants_cDNA_P Parameter: Tissue Value: Shoot Apical Meristem Region
  misc_feature: MA Experiment ID: 108461 Result: Up-regulated in Transcription
  misc_feature: MA Experiment 108461 PARAMETER Experiment Name: At_Germinating_Seeds_cDNA_P Parameter: Age (day) Value: 1 vs. 0
  misc_feature: MA Experiment 108461 PARAMETER Experiment Name: At_Germinating_Seeds_cDNA_P Parameter: Tissue Value: Germinating Seeds
  misc_feature: MA Experiment ID: 108462 Result: Up-regulated in Transcription
  misc_feature: MA Experiment 108462 PARAMETER Experiment Name: At_Germinating_Seeds_cDNA_P Parameter: Age (day) Value: 2 vs. 0
  misc_feature: MA Experiment 108462 PARAMETER Experiment Name: At_Germinating_Seeds_cDNA_P Parameter: Tissue Value: Germinating Seeds
  misc_feature: MA Experiment ID: 108463 Result: Up-regulated in Transcription
  misc_feature: MA Experiment 108463 PARAMETER Experiment Name: At_Germinating_Seeds_cDNA_P Parameter: Age (day) Value: 3 vs. 0
  misc_feature: MA Experiment 108463 PARAMETER Experiment Name: At_Germinating_Seeds_cDNA_P Parameter: Tissue Value: Germinating Seeds
  misc_feature: MA Experiment ID: 108464 Result: Up-regulated in Transcription
  misc_feature: MA Experiment 108464 PARAMETER Experiment Name: At_Germinating_Seeds_cDNA_P Parameter: Age (day) Value: 4 vs. 0
  misc_feature: MA Experiment 108464 PARAMETER Experiment Name: At_Germinating_Seeds_cDNA_P Parameter: Tissue Value: Germinating Seeds
  misc_feature: MA Experiment ID: 108488 Result: Down-regulated in Transcription
  misc_feature: MA Experiment ID: 108501 Result: Down-regulated in Transcription
  misc_feature: MA Experiment 108501 PARAMETER Experiment Name: At_ap2_floral_buds_cDNA_P Parameter: Plant Line Value: ap2 (Ler.)
  misc_feature: MA Experiment 108501 PARAMETER Experiment Name: At_ap2_floral_buds_cDNA_P Parameter: Tissue Value: Closed Flower
  misc_feature: MA Experiment ID: 108572 Result: Down-regulated in Transcription
  misc_feature: MA Experiment 108572 PARAMETER Experiment Name: At_Drought_cDNA_P Parameter: Timepoint (hr) Value: 1
  misc_feature: MA Experiment 108572 PARAMETER Experiment Name: At_Drought_cDNA_P Parameter: Tissue Value: Aerial
  misc_feature: MA Experiment 108572 PARAMETER Experiment Name: At_Drought_cDNA_P Parameter: Treatment Value: Drought vs. No Drought
  misc_feature: MA Experiment ID: 108594 Result: Up-regulated in Transcription
  misc_feature: MA Experiment 108594 PARAMETER Experiment Name: At_Ler-rhl_Root_cDNA_P Parameter: Plant Line Value: null
  misc_feature: MA Experiment ID: 108595 Result: Down-regulated in Transcription
  misc_feature: MA Experiment 108595 PARAMETER Experiment Name: At_Ler-pi_Ovule_cDNA_P Parameter: Plant Line Value: null
  misc_feature: MA Experiment ID: 108607 Result: Down-regulated in Transcription
  misc_feature: MA Experiment 108607 PARAMETER Experiment Name: At_100uM_ABA_cDNA_P Parameter: Timepoint (hr) Value: 4
  misc_feature: MA Experiment 108607 PARAMETER Experiment Name: At_100uM_ABA_cDNA_P Parameter: Tissue Value: Aerial
  misc_feature: MA Experiment 108607 PARAMETER Experiment Name: At_100uM_ABA_cDNA_P Parameter: Treatment Value: 100uM ABA vs. No Treatment
  misc_feature: MA Experiment ID: 108608 Result: Down-regulated in Transcription
  misc_feature: MA Experiment 108608 PARAMETER Experiment Name: At_100uM_ABA_cDNA_P Parameter: Timepoint (hr) Value: 1
  misc_feature: MA Experiment 108608 PARAMETER Experiment Name: At_100uM_ABA_cDNA_P Parameter: Tissue Value: Aerial
  misc_feature: MA Experiment 108608 PARAMETER Experiment Name: At_100uM_ABA_cDNA_P Parameter: Treatment Value: 100uM ABA vs. No Treatment
  misc_feature: MA Experiment ID: 108609 Result: Down-regulated in Transcription
  misc_feature: MA Experiment 108609 PARAMETER Experiment Name: At_100uM_ABA_cDNA_P Parameter: Timepoint (hr) Value: 24
  misc_feature: MA Experiment 108609 PARAMETER Experiment Name: At_100uM_ABA_cDNA_P Parameter: Tissue Value: Aerial
  misc_feature: MA Experiment 108609 PARAMETER Experiment Name: At_100uM_ABA_cDNA_P Parameter: Treatment Value: 100uM ABA vs. No Treatment
  misc_feature: MA Experiment ID: 20000071 Result: Down-regulated in Transcription
  misc_feature: MA Experiment 20000071 PARAMETER Experiment Name: At_100uM_ABA_Mutants_cDNA_P Parameter: Plant Line Value: CS8104
  misc_feature: MA Experiment 20000071 PARAMETER Experiment Name: At_100uM_ABA_Mutants_cDNA_P Parameter: Timepoint (hr) Value: 6
  misc_feature: MA Experiment 20000071 PARAMETER Experiment Name: At_100uM_ABA_Mutants_cDNA_P Parameter: Tissue Value: Aerial
  misc_feature: MA Experiment 20000071 PARAMETER Experiment Name: At_100uM_ABA_Mutants_cDNA_P Parameter: Treatment Value: 100uM ABA vs. No Treatment
  misc_feature: MA Experiment ID: 20000089 Result: Down-regulated in Transcription
  misc_feature: MA Experiment ID: 20000090 Result: Down-regulated in Transcription
  misc_feature: MA Experiment ID: 20000117 Result: Down-regulated in Transcription
  misc_feature: MA Experiment 20000117 PARAMETER Experiment Name: At_100uM_ABA_Mutants_cDNA_P Parameter: Plant Line Value: Columbia
  misc_feature: MA Experiment 20000117 PARAMETER Experiment Name: At_100uM_ABA_Mutants_cDNA_P Parameter: Timepoint (hr) Value: 6
  misc_feature: MA Experiment 20000117 PARAMETER Experiment Name: At_100uM_ABA_Mutants_cDNA_P Parameter: Tissue Value: Aerial
  misc_feature: MA Experiment 20000117 PARAMETER Experiment Name: At_100uM_ABA_Mutants_cDNA_P Parameter: Treatment Value: 100uM ABA vs. No Treatment
  misc_feature: MA Experiment ID: 20000166 Result: Down-regulated in Transcription
  misc_feature: MA Experiment 20000166 PARAMETER Experiment Name: At_100uM_ABA_P Parameter: Age (day) Value: 14
  misc_feature: MA Experiment 20000166 PARAMETER Experiment Name: At_100uM_ABA_P Parameter: Organism Value: A. thaliana
  misc_feature: MA Experiment 20000166 PARAMETER Experiment Name: At_100uM_ABA_P Parameter: Plant Line Value: WS
  misc_feature: MA Experiment 20000166 PARAMETER Experiment Name: At_100uM_ABA_P Parameter: Timepoint (hr) Value: 1
  misc_feature: MA Experiment 20000166 PARAMETER Experiment Name: At_100uM_ABA_P Parameter: Tissue Value: Aerial
  misc_feature: MA Experiment 20000166 PARAMETER Experiment Name: At_100uM_ABA_P Parameter: Treatment Value: 100uM ABA vs. No Treatment
  misc_feature: MA Experiment ID: 20000180 Result: Up-regulated in Transcription
  misc_feature: MA Experiment 20000180 PARAMETER Experiment Name: At_Germinating_Seeds_P Parameter: Age (hr) Value: 24 vs. 0
  misc_feature: MA Experiment 20000180 PARAMETER Experiment Name: At_Germinating_Seeds_P Parameter: Tissue Value: Germinating Seeds
  misc_feature: MA Experiment ID: 20000184 Result: Up-regulated in Transcription
  misc_feature: MA Experiment 20000184 PARAMETER Experiment Name: At_Shoots__P Parameter: Age (day) Value: 7
  misc_feature: MA Experiment 20000184 PARAMETER Experiment Name: At_Shoots__P Parameter: Tissue Value: Shoots vs. Whole Plant
  misc_feature: MA Experiment ID: 20000214 Result: Down-regulated in Transcription
  misc_feature: MA Experiment 20000214 PARAMETER Experiment Name: At_4deg_Cold_P Parameter: Timepoint (hr) Value: 6
  misc_feature: MA Experiment ID: 20000234 Result: Down-regulated in Transcription
  misc_feature: MA Experiment 20000234 PARAMETER Experiment Name: At_Siliques_P Parameter: Age (day) Value: 21
  misc_feature: MA Experiment 20000234 PARAMETER Experiment Name: At_Siliques_P Parameter: Organism Value: A. thaliana
  misc_feature: MA Experiment 20000234 PARAMETER Experiment Name: At_Siliques_P Parameter: Plant Line Value: WS
  misc_feature: MA Experiment 20000234 PARAMETER Experiment Name: At_Siliques_P Parameter: Tissue Value: Less Than 5mm Siliques vs. Whole Plant
  misc_feature: MA Experiment ID: 20000235 Result: Down-regulated in Transcription
  misc_feature: MA Experiment 20000235 PARAMETER Experiment Name: At_Siliques_P Parameter: Age (day) Value: 21
  misc_feature: MA Experiment 20000235 PARAMETER Experiment Name: At_Siliques_P Parameter: Organism Value: A. thaliana
  misc_feature: MA Experiment 20000235 PARAMETER Experiment Name: At_Siliques_P Parameter: Plant Line Value: WS
  misc_feature: MA Experiment 20000235 PARAMETER Experiment Name: At_Siliques_P Parameter: Tissue Value: 5-10mm Siliques vs. Whole Plant
  misc_feature: MA Experiment ID: 20000264 Result: Down-regulated in Transcription
  misc_feature: MA Experiment 20000264 PARAMETER Experiment Name: At_Open_Flower_P Parameter: Age (day) Value: 21
  misc_feature: MA Experiment 20000264 PARAMETER Experiment Name: At_Open_Flower_P Parameter: Plant Line Value: WS
  misc_feature: MA Experiment 20000264 PARAMETER Experiment Name: At_Open_Flower_P Parameter: Tissue Value: Open Flower vs. Whole Plant
  misc_feature: MA Experiment ID: 20000265 Result: Down-regulated in Transcription
  misc_feature: MA Experiment 20000265 PARAMETER Experiment Name: At_Open_Flower_P Parameter: Age (day) Value: 21
  misc_feature: MA Experiment 20000265 PARAMETER Experiment Name: At_Open_Flower_P Parameter: Plant Line Value: WS
  misc_feature: MA Experiment 20000265 PARAMETER Experiment Name: At_Open_Flower_P Parameter: Tissue Value: Closed Flower vs. Whole Plant
  misc_feature: MA Experiment ID: 20000267 Result: Down-regulated in Transcription
  misc_feature: MA Experiment 20000267 PARAMETER Experiment Name: At_Drought_P Parameter: Age (day) Value: 7
  misc_feature: MA Experiment 20000267 PARAMETER Experiment Name: At_Drought_P Parameter: Organism Value: A. thaliana
  misc_feature: MA Experiment 20000267 PARAMETER Experiment Name: At_Drought_P Parameter: Plant Line Value: WS
  misc_feature: MA Experiment 20000267 PARAMETER Experiment Name: At_Drought_P Parameter: Timepoint (hr) Value: 6
  misc_feature: MA Experiment 20000267 PARAMETER Experiment Name: At_Drought_P Parameter: Tissue Value: Whole Plant
  misc_feature: MA Experiment 20000267 PARAMETER Experiment Name: At_Drought_P Parameter: Treatment Value: Drought vs. No Drought
  misc_feature: MA Experiment ID: 20000268 Result: Down-regulated in Transcription
  misc_feature: MA Experiment 20000268 PARAMETER Experiment Name: At_100mM_NaCl__P Parameter: Age (day) Value: 14
  misc_feature: MA Experiment 20000268 PARAMETER Experiment Name: At_100mM_NaCl__P Parameter: Organism Value: A. thaliana
  misc_feature: MA Experiment 20000268 PARAMETER Experiment Name: At_100mM_NaCl__P Parameter: Plant Line Value: WS
  misc_feature: MA Experiment 20000268 PARAMETER Experiment Name: At_100mM_NaCl__P Parameter: Timepoint (hr) Value: 6
  misc_feature: MA Experiment 20000268 PARAMETER Experiment Name: At_100mM_NaCl__P Parameter: Tissue Value: Whole Plant
  misc_feature: MA Experiment 20000268 PARAMETER Experiment Name: At_100mM_NaCl__P Parameter: Treatment Value: 100mM NaCl vs. No Treatment
  misc_feature: MA Experiment ID: 20000286 Result: Down-regulated in Transcription
  misc_feature: MA Experiment 20000286 PARAMETER Experiment Name: At_Open_Flower_P Parameter: Age (day) Value: 21
  misc_feature: MA Experiment 20000286 PARAMETER Experiment Name: At_Open_Flower_P Parameter: Plant Line Value: WS
  misc_feature: MA Experiment 20000286 PARAMETER Experiment Name: At_Open_Flower_P Parameter: Tissue Value: Half Open vs. Whole Plant
  misc_feature: MA Experiment ID: 20000308 Result: Down-regulated in Transcription
  misc_feature: MA Experiment 20000308 PARAMETER Experiment Name: At_100mM_NaCl__P Parameter: Age (day) Value: 17
  misc_feature: MA Experiment 20000308 PARAMETER Experiment Name: At_100mM_NaCl__P Parameter: Organism Value: A. thaliana
  misc_feature: MA Experiment 20000308 PARAMETER Experiment Name: At_100mM_NaCl__P Parameter: Plant Line Value: WS
  misc_feature: MA Experiment 20000308 PARAMETER Experiment Name: At_100mM_NaCl__P Parameter: Timepoint (hr) Value: 72
  misc_feature: MA Experiment 20000308 PARAMETER Experiment Name: At_100mM_NaCl__P Parameter: Tissue Value: Whole Plant
  misc_feature: MA Experiment 20000308 PARAMETER Experiment Name: At_100mM_NaCl__P Parameter: Treatment Value: 100mM NaCl vs. No Treatment
  misc_feature: MA Experiment ID: 20000436 Result: Down-regulated in Transcription
  misc_feature: MA Experiment 20000436 PARAMETER Experiment Name: At_Drought_P Parameter: Age (day) Value: 7
  misc_feature: MA Experiment 20000436 PARAMETER Experiment Name: At_Drought_P Parameter: Organism Value: A. thaliana
  misc_feature: MA Experiment 20000436 PARAMETER Experiment Name: At_Drought_P Parameter: Plant Line Value: WS
  misc_feature: MA Experiment 20000436 PARAMETER Experiment Name: At_Drought_P Parameter: Timepoint (hr) Value: 12
  misc_feature: MA Experiment 20000436 PARAMETER Experiment Name: At_Drought_P Parameter: Tissue Value: Whole Plant
  misc_feature: MA Experiment 20000436 PARAMETER Experiment Name: At_Drought_P Parameter: Treatment Value: Drought vs. No Drought
  misc_feature: MA Experiment ID: 20000437 Result: Down-regulated in Transcription
  misc_feature: MA Experiment 20000437 PARAMETER Experiment Name: At_Drought_P Parameter: Age (day) Value: 8
  misc_feature: MA Experiment 20000437 PARAMETER Experiment Name: At_Drought_P Parameter: Organism Value: A. thaliana
  misc_feature: MA Experiment 20000437 PARAMETER Experiment Name: At_Drought_P Parameter: Plant Line Value: WS
  misc_feature: MA Experiment 20000437 PARAMETER Experiment Name: At_Drought_P Parameter: Timepoint (hr) Value: 24
  misc_feature: MA Experiment 20000437 PARAMETER Experiment Name: At_Drought_P Parameter: Tissue Value: Whole Plant
  misc_feature: MA Experiment 20000437 PARAMETER Experiment Name: At_Drought_P Parameter: Treatment Value: Drought vs. No Drought
  misc_feature: MA Experiment ID: 20000438 Result: Up-regulated in Transcription
  misc_feature: MA Experiment 20000438 PARAMETER Experiment Name: At_Shoots__P Parameter: Age (day) Value: 14
  misc_feature: MA Experiment 20000438 PARAMETER Experiment Name: At_Shoots__P Parameter: Tissue Value: Shoots vs. Whole Plant
  misc_feature: MA Experiment ID: 20000441 Result: Up-regulated in Transcription
  misc_feature: MA Experiment 20000441 PARAMETER Experiment Name: At_1uM_BR-BRZ__P Parameter: Tissue Value: Shoot Apices
  misc_feature: MA Experiment 20000441 PARAMETER Experiment Name: At_1uM_BR-BRZ__P Parameter: Treatment Value: 1uM BR vs. No Treatment
  misc_feature: MA Experiment ID: 20000443 Result: Up-regulated in Transcription
  misc_feature: MA Experiment 20000443 PARAMETER Experiment Name: At_1uM_BR-BRZ__P Parameter: Tissue Value: Shoot Apices
  misc_feature: MA Experiment 20000443 PARAMETER Experiment Name: At_1uM_BR-BRZ__P Parameter: Treatment Value: 1uM BRZ vs. No Treatment
  misc_feature: MA Experiment ID: 20000453 Result: Down-regulated in Transcription
  misc_feature: MA Experiment 20000453 PARAMETER Experiment Name: At_100uM_ABA_P Parameter: Age (day) Value: 15
  misc_feature: MA Experiment 20000453 PARAMETER Experiment Name: At_100uM_ABA_P Parameter: Organism Value: A. thaliana
  misc_feature: MA Experiment 20000453 PARAMETER Experiment Name: At_100uM_ABA_P Parameter: Plant Line Value: WS
  misc_feature: MA Experiment 20000453 PARAMETER Experiment Name: At_100uM_ABA_P Parameter: Timepoint (hr) Value: 24
  misc_feature: MA Experiment 20000453 PARAMETER Experiment Name: At_100uM_ABA_P Parameter: Tissue Value: Aerial
  misc_feature: MA Experiment 20000453 PARAMETER Experiment Name: At_100uM_ABA_P Parameter: Treatment Value: 100uM ABA vs. No Treatment
  misc_feature: MA Experiment ID: 20000455 Result: Down-regulated in Transcription
  misc_feature: MA Experiment 20000455 PARAMETER Experiment Name: At_100uM_ABA_P Parameter: Age (day) Value: 16
  misc_feature: MA Experiment 20000455 PARAMETER Experiment Name: At_100uM_ABA_P Parameter: Organism Value: A. thaliana
  misc_feature: MA Experiment 20000455 PARAMETER Experiment Name: At_100uM_ABA_P Parameter: Plant Line Value: WS
  misc_feature: MA Experiment 20000455 PARAMETER Experiment Name: At_100uM_ABA_P Parameter: Timepoint (hr) Value: 48
  misc_feature: MA Experiment 20000455 PARAMETER Experiment Name: At_100uM_ABA_P Parameter: Tissue Value: Aerial
  misc_feature: MA Experiment 20000455 PARAMETER Experiment Name: At_100uM_ABA_P Parameter: Treatment Value: 100uM ABA vs. No Treatment
  misc_feature: MA Experiment ID: 20000573 Result: Down-regulated in Transcription
  misc_feature: MA Experiment 20000573 PARAMETER Experiment Name: At_100uM_ABA_Mutants__P Parameter: Organism Value: A. thaliana
  misc_feature: MA Experiment 20000573 PARAMETER Experiment Name: At_100uM_ABA_Mutants__P Parameter: Plant Line Value: CS22 vs. Ler wt
  misc_feature: MA Experiment 20000573 PARAMETER Experiment Name: At_100uM_ABA_Mutants__P Parameter: Timepoint (hr) Value: N/A
  misc_feature: MA Experiment 20000573 PARAMETER Experiment Name: At_100uM_ABA_Mutants__P Parameter: Tissue Value: Whole Plant
  misc_feature: MA Experiment 20000573 PARAMETER Experiment Name: At_100uM_ABA_Mutants__P Parameter: Treatment Value: None
  misc_feature: MA Experiment ID: 20000574 Result: Down-regulated in Transcription
  misc_feature: MA Experiment 20000574 PARAMETER Experiment Name: At_100uM_ABA_Mutants__P Parameter: Organism Value: A. thaliana
  misc_feature: MA Experiment 20000574 PARAMETER Experiment Name: At_100uM_ABA_Mutants__P Parameter: Plant Line Value: CS23 vs. Ler wt
  misc_feature: MA Experiment 20000574 PARAMETER Experiment Name: At_100uM_ABA_Mutants__P Parameter: Timepoint (hr) Value: N/A
  misc_feature: MA Experiment 20000574 PARAMETER Experiment Name: At_100uM_ABA_Mutants__P Parameter: Tissue Value: Whole Plant
  misc_feature: MA Experiment 20000574 PARAMETER Experiment Name: At_100uM_ABA_Mutants__P Parameter: Treatment Value: None
  misc_feature: MA Experiment ID: 20000794 Result: Down-regulated in Transcription
  misc_feature: MA Experiment 20000794 PARAMETER Experiment Name: At_Petals_P Parameter: Age (day) Value: 23-25 days
  misc_feature: MA Experiment 20000794 PARAMETER Experiment Name: At_Petals_P Parameter: Plant Line Value: WS
  misc_feature: MA Experiment 20000794 PARAMETER Experiment Name: At_Petals_P Parameter: Tissue Value: Petals vs. Whole plant
  misc_feature: MA Experiment ID: 20001247 Result: Up-regulated in Transcription
  misc_feature: MA Experiment 20001247 PARAMETER Experiment Name: At_Far-red-induction_P Parameter: Age (day) Value: 7
  misc_feature: MA Experiment 20001247 PARAMETER Experiment Name: At_Far-red-induction_P Parameter: Light Value: Far-red vs. White
  misc_feature: MA Experiment 20001247 PARAMETER Experiment Name: At_Far-red-induction_P Parameter: Organism Value: A. thaliana
  misc_feature: MA Experiment 20001247 PARAMETER Experiment Name: At_Far-red-induction_P Parameter: Plant Line Value: Columbia
  misc_feature: MA Experiment 20001247 PARAMETER Experiment Name: At_Far-red-induction_P Parameter: Timepoint (hr) Value: 1
  misc_feature: MA Experiment 20001247 PARAMETER Experiment Name: At_Far-red-induction_P Parameter: Tissue Value: Whole Plant
  misc_feature: MA Experiment ID: 20001248 Result: Up-regulated in Transcription
  misc_feature: MA Experiment 20001248 PARAMETER Experiment Name: At_Far-red-induction_P Parameter: Age (day) Value: 7
  misc_feature: MA Experiment 20001248 PARAMETER Experiment Name: At_Far-red-induction_P Parameter: Light Value: Far-red vs. White
  misc_feature: MA Experiment 20001248 PARAMETER Experiment Name: At_Far-red-induction_P Parameter: Organism Value: A. thaliana
  misc_feature: MA Experiment 20001248 PARAMETER Experiment Name: At_Far-red-induction_P Parameter: Plant Line Value: Columbia
  misc_feature: MA Experiment 20001248 PARAMETER Experiment Name: At_Far-red-induction_P Parameter: Timepoint (hr) Value: 4
  misc_feature: MA Experiment 20001248 PARAMETER Experiment Name: At_Far-red-induction_P Parameter: Tissue Value: Whole Plant
  misc_feature: MA Experiment ID: 20001450 Result: Up-regulated in Transcription
  misc_feature: MA Experiment 20001450 PARAMETER Experiment Name: At_Far-red-induction_P Parameter: Age (day) Value: 7
  misc_feature: MA Experiment 20001450 PARAMETER Experiment Name: At_Far-red-induction_P Parameter: Light Value: Far-red vs. White
  misc_feature: MA Experiment 20001450 PARAMETER Experiment Name: At_Far-red-induction_P Parameter: Organism Value: A. thaliana
  misc_feature: MA Experiment 20001450 PARAMETER Experiment Name: At_Far-red-induction_P Parameter: Plant Line Value: Columbia
  misc_feature: MA Experiment 20001450 PARAMETER Experiment Name: At_Far-red-induction_P Parameter: Timepoint (hr) Value: 8
  misc_feature: MA Experiment 20001450 PARAMETER Experiment Name: At_Far-red-induction_P Parameter: Tissue Value: Whole Plant
  misc_feature: MA Experiment ID: 20001451 Result: Up-regulated in Transcription
  misc_feature: MA Experiment 20001451 PARAMETER Experiment Name: At_Far-red-induction_P Parameter: Age (day) Value: 7
  misc_feature: MA Experiment 20001451 PARAMETER Experiment Name: At_Far-red-induction_P Parameter: Light Value: Far-red vs. White
  misc_feature: MA Experiment 20001451 PARAMETER Experiment Name: At_Far-red-induction_P Parameter: Organism Value: A. thaliana
  misc_feature: MA Experiment 20001451 PARAMETER Experiment Name: At_Far-red-induction_P Parameter: Plant Line Value: Columbia
  misc_feature: MA Experiment 20001451 PARAMETER Experiment Name: At_Far-red-induction_P Parameter: Timepoint (hr) Value: 24
  misc_feature: MA Experiment 20001451 PARAMETER Experiment Name: At_Far-red-induction_P Parameter: Tissue Value: Whole Plant
  misc_feature: MA Experiment ID: 20001504 Result: Down-regulated in Transcription
  misc_feature: MA Experiment 20001504 PARAMETER Experiment Name: At_Far-red-enriched_P Parameter: Age (day) Value: 10
  misc_feature: MA Experiment 20001504 PARAMETER Experiment Name: At_Far-red-enriched_P Parameter: Light Value: Far-red enriched vs. White
  misc_feature: MA Experiment 20001504 PARAMETER Experiment Name: At_Far-red-enriched_P Parameter: Organism Value: A. thaliana
  misc_feature: MA Experiment 20001504 PARAMETER Experiment Name: At_Far-red-enriched_P Parameter: Plant Line Value: Columbia
  misc_feature: MA Experiment 20001504 PARAMETER Experiment Name: At_Far-red-enriched_P Parameter: Timepoint (day) Value: 6
  misc_feature: MA Experiment 20001504 PARAMETER Experiment Name: At_Far-red-enriched_P Parameter: Tissue Value: Whole Plant
  misc_feature: MA Experiment ID: 20001554 Result: Down-regulated in Transcription
  misc_feature: MA Experiment 20001554 PARAMETER Experiment Name: At_Drought_Soil_Dry_P Parameter: Age (day) Value: 21
  misc_feature: MA Experiment 20001554 PARAMETER Experiment Name: At_Drought_Soil_Dry_P Parameter: Organism Value: A. thaliana
  misc_feature: MA Experiment 20001554 PARAMETER Experiment Name: At_Drought_Soil_Dry_P Parameter: Plant Line Value: WS
  misc_feature: MA Experiment 20001554 PARAMETER Experiment Name: At_Drought_Soil_Dry_P Parameter: Post Timepoint (hr) Value: None
  misc_feature: MA Experiment 20001554 PARAMETER Experiment Name: At_Drought_Soil_Dry_P Parameter: Post-Treatment Value: None
  misc_feature: MA Experiment 20001554 PARAMETER Experiment Name: At_Drought_Soil_Dry_P Parameter: Timepoint (day) Value: 7
  misc_feature: MA Experiment 20001554 PARAMETER Experiment Name: At_Drought_Soil_Dry_P Parameter: Treatment Value: Drought vs. No Drought
  misc_feature: MA Experiment ID: 20001556 Result: Down-regulated in Transcription
  misc_feature: MA Experiment 20001556 PARAMETER Experiment Name: At_Drought_Soil_Dry_P Parameter: Age (day) Value: 26
  misc_feature: MA Experiment 20001556 PARAMETER Experiment Name: At_Drought_Soil_Dry_P Parameter: Organism Value: A. thaliana
  misc_feature: MA Experiment 20001556 PARAMETER Experiment Name: At_Drought_Soil_Dry_P Parameter: Plant Line Value: WS
  misc_feature: MA Experiment 20001556 PARAMETER Experiment Name: At_Drought_Soil_Dry_P Parameter: Post Timepoint (hr) Value: None
  misc_feature: MA Experiment 20001556 PARAMETER Experiment Name: At_Drought_Soil_Dry_P Parameter: Post-Treatment Value: None
  misc_feature: MA Experiment 20001556 PARAMETER Experiment Name: At_Drought_Soil_Dry_P Parameter: Timepoint (day) Value: 12
  misc_feature: MA Experiment 20001556 PARAMETER Experiment Name: At_Drought_Soil_Dry_P Parameter: Treatment Value: Drought vs. No Drought
  misc_feature: MA Experiment ID: 20001560 Result: Down-regulated in Transcription
  misc_feature: MA Experiment 20001560 PARAMETER Experiment Name: At_Drought_Soil_Dry_P Parameter: Age (day) Value: 28
  misc_feature: MA Experiment 20001560 PARAMETER Experiment Name: At_Drought_Soil_Dry_P Parameter: Organism Value: A. thaliana
  misc_feature: MA Experiment 20001560 PARAMETER Experiment Name: At_Drought_Soil_Dry_P Parameter: Plant Line Value: WS
  misc_feature: MA Experiment 20001560 PARAMETER Experiment Name: At_Drought_Soil_Dry_P Parameter: Post Timepoint (hr) Value: None
  misc_feature: MA Experiment 20001560 PARAMETER Experiment Name: At_Drought_Soil_Dry_P Parameter: Post-Treatment Value: None
  misc_feature: MA Experiment 20001560 PARAMETER Experiment Name: At_Drought_Soil_Dry_P Parameter: Timepoint (day) Value: 14
  misc_feature: MA Experiment 20001560 PARAMETER Experiment Name: At_Drought_Soil_Dry_P Parameter: Treatment Value: Drought vs. No Drought
  misc_feature: MA Experiment ID: 20001760 Result: Down-regulated in Transcription
  misc_feature: MA Experiment 20001760 PARAMETER Experiment Name: At_50mM_NH4NO3_L-to-H_P Parameter: Timepoint (hr) Value: 2
  misc_feature: MA Experiment 20001760 PARAMETER Experiment Name: At_50mM_NH4NO3_L-to-H_P Parameter: Tissue Value: Siliques
  misc_feature: MA Experiment 20001760 PARAMETER Experiment Name: At_50mM_NH4NO3_L-to-H_P Parameter: Treatment Value: 50mM NH4NO3 vs 100mM Mannitol
  misc_feature: MA Experiment ID: 20001774 Result: Down-regulated in Transcription
  misc_feature: MA Experiment 20001774 PARAMETER Experiment Name: At_Far-red-enriched-adult_P Parameter: Age (day) Value: 31
  misc_feature: MA Experiment 20001774 PARAMETER Experiment Name: At_Far-red-enriched-adult_P Parameter: Light Value: Far-red enriched vs. White
  misc_feature: MA Experiment 20001774 PARAMETER Experiment Name: At_Far-red-enriched-adult_P Parameter: Organism Value: A. thaliana
  misc_feature: MA Experiment 20001774 PARAMETER Experiment Name: At_Far-red-enriched-adult_P Parameter: Plant Line Value: Columbia
  misc_feature: MA Experiment 20001774 PARAMETER Experiment Name: At_Far-red-enriched-adult_P Parameter: Timepoint (hr) Value: 72
  misc_feature: MA Experiment 20001774 PARAMETER Experiment Name: At_Far-red-enriched-adult_P Parameter: Tissue Value: Aerial
  misc_feature: MA Experiment ID: 20001904 Result: Down-regulated in Transcription
  misc_feature: MA Experiment 20001904 PARAMETER Experiment Name: At_Drought_Reproduction_P Parameter: Age (day) Value: 37
  misc_feature: MA Experiment 20001904 PARAMETER Experiment Name: At_Drought_Reproduction_P Parameter: Organism Value: A. thaliana
  misc_feature: MA Experiment 20001904 PARAMETER Experiment Name: At_Drought_Reproduction_P Parameter: Plant Line Value: WS
  misc_feature: MA Experiment 20001904 PARAMETER Experiment Name: At_Drought_Reproduction_P Parameter: Timepoint (day) Value: 7
  misc_feature: MA Experiment 20001904 PARAMETER Experiment Name: At_Drought_Reproduction_P Parameter: Tissue Value: Rosettes
  misc_feature: MA Experiment 20001904 PARAMETER Experiment Name: At_Drought_Reproduction_P Parameter: Treatment Value: Drought vs. No Drought
  misc_feature: MA Experiment ID: 20001905 Result: Down-regulated in Transcription
  misc_feature: MA Experiment 20001905 PARAMETER Experiment Name: At_Drought_Reproduction_P Parameter: Age (day) Value: 40
  misc_feature: MA Experiment 20001905 PARAMETER Experiment Name: At_Drought_Reproduction_P Parameter: Organism Value: A. thaliana
  misc_feature: MA Experiment 20001905 PARAMETER Experiment Name: At_Drought_Reproduction_P Parameter: Plant Line Value: WS
  misc_feature: MA Experiment 20001905 PARAMETER Experiment Name: At_Drought_Reproduction_P Parameter: Timepoint (day) Value: 10
  misc_feature: MA Experiment 20001905 PARAMETER Experiment Name: At_Drought_Reproduction_P Parameter: Tissue Value: Rosettes
  misc_feature: MA Experiment 20001905 PARAMETER Experiment Name: At_Drought_Reproduction_P Parameter: Treatment Value: Drought vs. No Drought
gtaacaacgtcacctaaatctctctcacccaatttgtgtttcttctttctgctaaaaggttataatttttgtttcttggtttggtgagaatcttcaagaaactgaaacaaagaaaatggattctagttgcatagacgagataagttcctccacttcagaatctttctccgccaccaccgccaagaagctctctcctcctcccgcggcggcgttacgcctctaccggatgggaagcggcgggagcagcgtcgtgttggatcccgagaacggcctagagacggagtcacgaaagctaccatcttcaaaatacaaaggtgttgttcctcagcctaacggaagatggggagctcagatctacgagaagcaccaacgagtatggctcgggactttcaacgagcaagaagaagctgctcgttcctacgacatcgcagcttgtagattccgtggccgcgacgccgtcgtcaacttcaagaacgttctggaagacggcgatttagcttttcttgaagctcactcaaaggccgagatcgtcgacatgttgagaaaacacacttacgccgacgagcttgaacagaacaataaacggcagttgtttctctccgtcgacgctaacggaaaacgtaacggatcgagtactactcaaaacgacaaagttttaaagacgcgtgaagttcttttcgagaaggctgttacacctagcgacgttgggaagctaaaccgtctcgtgatacctaaacaacacgccgagaaacactttccgttaccgtcaccgtcaccggcagtgactaaaggagttttgatcaacttcgaagacgttaacggtaaagtgtggaggttccgttactcatactggaacagtagtcaaagttacgtgttgaccaagggatggagtcgattcgtcaaggagaagaatcttcgagccggtgatgttgttactttcgagagatcgaccggactagagcggcagttatatattgattggaaagttcggtctggtccgagagaaaacccggttcaggtggtggttcggcttttcggagttgatatctttaatgtgaccaccgtgaagccaaacgacgtcgtggccgtttgcggtggaaagagatctcgagatgttgatgatatgtttgcgttacggtgttccaagaagcaggcgataatcaatgctttgtgacatatttccttttccgattttatgctttcgttttttaattttttttttttgtcaagttgtgtaggttgtgattcatgctaggttgtatttaggaaaagagataagaccaaaaaataaattggaacaatggttttgtggaaaagtggtaaatagacctacctc

SEQ ID NO: 105804 - protein, 352 aa, Arabidopsis thaliana; identical to SEQ ID NO: 30911
  peptide (1)..(352): Ceres Seq. ID no. 13618045
  misc_feature (187)..(295): Pfam Name: B3 DNA binding domain Pfam Description: B3 DNA binding domain
  misc_feature (1)..(352): Homolog of NCBI NO: 18409138 NR Description: AP2 domain protein RAP2.8 (RAV2) [Arabidopsis
  misc_feature (1)..(352): Homolog of NCBI NO: 21554039 NR Description: putative RAV2-like DNA-binding protein
  misc_feature (19)..(352): Homolog of NCBI NO: 2281641 NR Description: AP2 domain containing protein RAP2.8 [Arabidopsis
  misc_feature (1)..(352): Homolog of NCBI NO: 15222622 NR Description: AP2 domain transcription factor, putative
  misc_feature (1)..(351): Homolog of NCBI NO: 15222217 NR Description: AP2 domain transcription factor, putative  (RAV1)
  misc_feature (1)..(349): Homolog of NCBI NO: 15230871 NR Description: AP2 domain transcription factor, putative
  misc_feature (1)..(349): Homolog of NCBI NO: 21593532 NR Description: AP2 domain transcription factor [Arabidopsis
  misc_feature (61)..(311): Homolog of NCBI NO: 34895676 NR Description: putative DNA binding protein RAV2 [Oryza sativa
  misc_feature (10)..(311): Homolog of NCBI NO: 34895690 NR Description: putative DNA binding protein RAV2 [Oryza sativa
  misc_feature (39)..(293): Homolog of NCBI NO: 34911404 NR Description: DNA-binding protein RAV2-like [Oryza sativa

SEQ ID NO: 105805 - protein, 315 aa, Arabidopsis thaliana; identical to SEQ ID NO: 30912
  peptide (1)..(315): Ceres Seq. ID no. 13618046
  misc_feature (150)..(258): Pfam Name: B3 DNA binding domain Pfam Description: B3 DNA binding domain
  misc_feature (1)..(315): Homolog of NCBI NO: 18409138 NR Description: AP2 domain protein RAP2.8 (RAV2) [Arabidopsis
  misc_feature (1)..(315): Homolog of NCBI NO: 21554039 NR Description: putative RAV2-like DNA-binding protein
  misc_feature (1)..(315): Homolog of NCBI NO: 2281641 NR Description: AP2 domain containing protein RAP2.8 [Arabidopsis
  misc_feature (1)..(315): Homolog of NCBI NO: 15222622 NR Description: AP2 domain transcription factor, putative
  misc_feature (1)..(314): Homolog of NCBI NO: 15222217 NR Description: AP2 domain transcription factor, putative  (RAV1)
  misc_feature (1)..(312): Homolog of NCBI NO: 15230871 NR Description: AP2 domain transcription factor, putative
  misc_feature (1)..(312): Homolog of NCBI NO: 21593532 NR Description: AP2 domain transcription factor [Arabidopsis
  misc_feature (24)..(274): Homolog of NCBI NO: 34895676 NR Description: putative DNA binding protein RAV2 [Oryza sativa
  misc_feature (1)..(274): Homolog of NCBI NO: 34895690 NR Description: putative DNA binding protein RAV2 [Oryza sativa
  misc_feature (2)..(256): Homolog of NCBI NO: 34911404 NR Description: DNA-binding protein RAV2-like [Oryza sativa

SEQ ID NO: 105806 - protein, 212 aa, Arabidopsis thaliana; identical to SEQ ID NO: 30913
  peptide (1)..(212): Ceres Seq. ID no. 13618047
  misc_feature (47)..(155): Pfam Name: B3 DNA binding domain Pfam Description: B3 DNA binding domain
  misc_feature (1)..(212): Homolog of NCBI NO: 18409138 NR Description: AP2 domain protein RAP2.8 (RAV2) [Arabidopsis
  misc_feature (1)..(212): Homolog of NCBI NO: 21554039 NR Description: putative RAV2-like DNA-binding protein
  misc_feature (1)..(212): Homolog of NCBI NO: 2281641 NR Description: AP2 domain containing protein RAP2.8 [Arabidopsis
  misc_feature (1)..(212): Homolog of NCBI NO: 15222622 NR Description: AP2 domain transcription factor, putative
  misc_feature (1)..(211): Homolog of NCBI NO: 15222217 NR Description: AP2 domain transcription factor, putative  (RAV1)
  misc_feature (1)..(209): Homolog of NCBI NO: 15230871 NR Description: AP2 domain transcription factor, putative
  misc_feature (1)..(209): Homolog of NCBI NO: 21593532 NR Description: AP2 domain transcription factor [Arabidopsis
  misc_feature (1)..(171): Homolog of NCBI NO: 34895676 NR Description: putative DNA binding protein RAV2 [Oryza sativa
  misc_feature (1)..(171): Homolog of NCBI NO: 34895690 NR Description: putative DNA binding protein RAV2 [Oryza sativa
  misc_feature (1)..(153): Homolog of NCBI NO: 34911404 NR Description: DNA-binding protein RAV2-like [Oryza sativa

SEQ ID NO: 105807 - DNA, 934 bp, Arabidopsis thaliana
  misc_feature (1)..(934): Ceres Seq. ID no. 13618061
  misc_feature: MA Experiment ID: 20000235 Result: Down-regulated in Transcription
  misc_feature: MA Experiment 20000235 PARAMETER Experiment Name: At_Siliques_P Parameter: Age (day) Value: 21
  misc_feature: MA Experiment 20000235 PARAMETER Experiment Name: At_Siliques_P Parameter: Organism Value: A. thaliana
  misc_feature: MA Experiment 20000235 PARAMETER Experiment Name: At_Siliques_P Parameter: Plant Line Value: WS
  misc_feature: MA Experiment 20000235 PARAMETER Experiment Name: At_Siliques_P Parameter: Tissue Value: 5-10mm Siliques vs. Whole Plant
  misc_feature: MA Experiment ID: 20000264 Result: Up-regulated in Transcription
  misc_feature: MA Experiment 20000264 PARAMETER Experiment Name: At_Open_Flower_P Parameter: Age (day) Value: 21
  misc_feature: MA Experiment 20000264 PARAMETER Experiment Name: At_Open_Flower_P Parameter: Plant Line Value: WS
  misc_feature: MA Experiment 20000264 PARAMETER Experiment Name: At_Open_Flower_P Parameter: Tissue Value: Open Flower vs. Whole Plant
  misc_feature: MA Experiment ID: 20000265 Result: Up-regulated in Transcription
  misc_feature: MA Experiment 20000265 PARAMETER Experiment Name: At_Open_Flower_P Parameter: Age (day) Value: 21
  misc_feature: MA Experiment 20000265 PARAMETER Experiment Name: At_Open_Flower_P Parameter: Plant Line Value: WS
  misc_feature: MA Experiment 20000265 PARAMETER Experiment Name: At_Open_Flower_P Parameter: Tissue Value: Closed Flower vs. Whole Plant
  misc_feature: MA Experiment ID: 20000286 Result: Up-regulated in Transcription
  misc_feature: MA Experiment 20000286 PARAMETER Experiment Name: At_Open_Flower_P Parameter: Age (day) Value: 21
  misc_feature: MA Experiment 20000286 PARAMETER Experiment Name: At_Open_Flower_P Parameter: Plant Line Value: WS
  misc_feature: MA Experiment 20000286 PARAMETER Experiment Name: At_Open_Flower_P Parameter: Tissue Value: Half Open vs. Whole Plant
  misc_feature: MA Experiment ID: 20000438 Result: Down-regulated in Transcription
  misc_feature: MA Experiment 20000438 PARAMETER Experiment Name: At_Shoots__P Parameter: Age (day) Value: 14
  misc_feature: MA Experiment 20000438 PARAMETER Experiment Name: At_Shoots__P Parameter: Tissue Value: Shoots vs. Whole Plant
  misc_feature: MA Experiment ID: 20000794 Result: Up-regulated in Transcription
  misc_feature: MA Experiment 20000794 PARAMETER Experiment Name: At_Petals_P Parameter: Age (day) Value: 23-25 days
  misc_feature: MA Experiment 20000794 PARAMETER Experiment Name: At_Petals_P Parameter: Plant Line Value: WS
  misc_feature: MA Experiment 20000794 PARAMETER Experiment Name: At_Petals_P Parameter: Tissue Value: Petals vs. Whole plant
  misc_feature: MA Experiment ID: 20001911 Result: Down-regulated in Transcription
  misc_feature: MA Experiment 20001911 PARAMETER Experiment Name: At_Drought_Reproduction_P Parameter: Age (day) Value: 40
  misc_feature: MA Experiment 20001911 PARAMETER Experiment Name: At_Drought_Reproduction_P Parameter: Organism Value: A. thaliana
  misc_feature: MA Experiment 20001911 PARAMETER Experiment Name: At_Drought_Reproduction_P Parameter: Plant Line Value: WS
  misc_feature: MA Experiment 20001911 PARAMETER Experiment Name: At_Drought_Reproduction_P Parameter: Timepoint (day) Value: 10
  misc_feature: MA Experiment 20001911 PARAMETER Experiment Name: At_Drought_Reproduction_P Parameter: Tissue Value: Flowers
  misc_feature: MA Experiment 20001911 PARAMETER Experiment Name: At_Drought_Reproduction_P Parameter: Treatment Value: Drought vs. No Drought
ataaatacaagcctcctaactcataaaataagcataaccctaactctacaaagttcttctgattctttctctctctctctttctttcaagagcggttttcaatccattcgctaaagaccatgaacctagaagagaaaccaaccatgacggcttcaagggcttcccctcaagccgaacatctctactacgtccggtgtagcatctgcaacaccatcctcgcggttgggataccattgaagagaatgcttgacacggtaacggtgaaatgcggccattgtggtaacctctcgtttctcaccacaactcctcctcttcaaggccatgttagcctcacccttcagatgcagagctttggtggaagtgactataagaagggaagctcttcttcttcctcttcctccacctccagcgaccagcccccatctccctcacctccctttgtcgtcaaacctcctgagaagaagcagaggctcccatctgcatacaaccgcttcatgagggatgagatccaacgcatcaaaagtgccaatccggaaataccacaccgtgaagctttcagtgctgctgccaaaaattgggctaagtacatacccaactctcctacttccattacttccggaggccacaacatgatccatggcttgggattcggtgagaagaagtgaacaaaactcaggggaaaagaagcctaaaaataacaaacgcatgcacgtgtgcgagtggctgcgtcgtttttctcatcttgtgttgttcttctgtgtaattttcttatgtatgtcatgttgcagaaaatgatgttgccttagtttttatgactttatatttctgtctgtctttagatttgaaagtaacgtcacttgctatgtccctttggacgtttatgtctggtctttatttgtcttaatcctatcaaaattttatatgcgtattcctt

SEQ ID NO: 105808 - protein, 181 aa, Arabidopsis thaliana; identical to SEQ ID NO: 28231
  peptide (1)..(181): Ceres Seq. ID no. 13618062
  misc_feature (12)..(164): Pfam Name: YABBY protein Pfam Description: YABBY protein
  misc_feature (1)..(181): Homolog of NCBI NO: 15222228 NR Description: transcription factor CRC [Arabidopsis thaliana]
  misc_feature (9)..(181): Homolog of NCBI NO: 21617944 NR Description: transcription factor CRC [Arabidopsis thaliana]
  misc_feature (1)..(170): Homolog of NCBI NO: 37542843 NR Description: crabs claw [Nicotiana langsdorffii x Nicotiana
  misc_feature (15)..(170): Homolog of NCBI NO: 40362873 NR Description: drooping leaf [Oryza sativa (japonica
  misc_feature (15)..(166): Homolog of NCBI NO: 33333529 NR Description: CRC-related protein [Triticum aestivum]
  misc_feature (65)..(156): Homolog of NCBI NO: 32330677 NR Description: yabby15 protein [Zea mays]
  misc_feature (15)..(56): Homolog of NCBI NO: 32330677 NR Description: yabby15 protein [Zea mays]
  misc_feature (1)..(75): Homolog of NCBI NO: 6730647 NR Description: F4N2.14 [Arabidopsis thaliana]
  misc_feature (1)..(102): Homolog of NCBI NO: 38605890 NR Description: OSJNBb0020O11.2 [Oryza sativa (japonica
  misc_feature (87)..(156): Homolog of NCBI NO: 38605890 NR Description: OSJNBb0020O11.2 [Oryza sativa (japonica

SEQ ID NO: 105809 - protein, 173 aa, Arabidopsis thaliana; identical to SEQ ID NO: 28232
  peptide (1)..(173): Ceres Seq. ID no. 13618063
  misc_feature (4)..(156): Pfam Name: YABBY protein Pfam Description: YABBY protein
  misc_feature (1)..(173): Homolog of NCBI NO: 15222228 NR Description: transcription factor CRC [Arabidopsis thaliana]
  misc_feature (1)..(173): Homolog of NCBI NO: 21617944 NR Description: transcription factor CRC [Arabidopsis thaliana]
  misc_feature (1)..(162): Homolog of NCBI NO: 37542843 NR Description: crabs claw [Nicotiana langsdorffii x Nicotiana
  misc_feature (7)..(162): Homolog of NCBI NO: 40362873 NR Description: drooping leaf [Oryza sativa (japonica
  misc_feature (7)..(158): Homolog of NCBI NO: 33333529 NR Description: CRC-related protein [Triticum aestivum]
  misc_feature (57)..(148): Homolog of NCBI NO: 32330677 NR Description: yabby15 protein [Zea mays]
  misc_feature (7)..(48): Homolog of NCBI NO: 32330677 NR Description: yabby15 protein [Zea mays]
  misc_feature (1)..(67): Homolog of NCBI NO: 6730647 NR Description: F4N2.14 [Arabidopsis thaliana]
  misc_feature (1)..(94): Homolog of NCBI NO: 38605890 NR Description: OSJNBb0020O11.2 [Oryza sativa (japonica
  misc_feature (79)..(148): Homolog of NCBI NO: 38605890 NR Description: OSJNBb0020O11.2 [Oryza sativa (japonica

SEQ ID NO: 105810 - protein, 140 aa, Arabidopsis thaliana; identical to SEQ ID NO: 28233
  peptide (1)..(140): Ceres Seq. ID no. 13618064
  misc_feature (1)..(123): Pfam Name: YABBY protein Pfam Description: YABBY protein
  misc_feature (1)..(140): Homolog of NCBI NO: 15222228 NR Description: transcription factor CRC [Arabidopsis thaliana]
  misc_feature (1)..(140): Homolog of NCBI NO: 21617944 NR Description: transcription factor CRC [Arabidopsis thaliana]
  misc_feature (1)..(129): Homolog of NCBI NO: 37542843 NR Description: crabs claw [Nicotiana langsdorffii x Nicotiana
  misc_feature (1)..(129): Homolog of NCBI NO: 40362873 NR Description: drooping leaf [Oryza sativa (japonica
  misc_feature (1)..(125): Homolog of NCBI NO: 33333529 NR Description: CRC-related protein [Triticum aestivum]
  misc_feature (24)..(115): Homolog of NCBI NO: 32330677 NR Description: yabby15 protein [Zea mays]
  misc_feature (1)..(15): Homolog of NCBI NO: 32330677 NR Description: yabby15 protein [Zea mays]
  misc_feature (1)..(34): Homolog of NCBI NO: 6730647 NR Description: F4N2.14 [Arabidopsis thaliana]
  misc_feature (1)..(61): Homolog of NCBI NO: 38605890 NR Description: OSJNBb0020O11.2 [Oryza sativa (japonica
  misc_feature (46)..(115): Homolog of NCBI NO: 38605890 NR Description: OSJNBb0020O11.2 [Oryza sativa (japonica

SEQ ID NO: 105811 - DNA, 1663 bp, Arabidopsis thaliana
  misc_feature (1)..(1663): Ceres Seq. ID no. 13618072
  misc_feature: MA Experiment ID: 108572 Result: Up-regulated in Transcription
  misc_feature: MA Experiment 108572 PARAMETER Experiment Name: At_Drought_cDNA_P Parameter: Timepoint (hr) Value: 1
  misc_feature: MA Experiment 108572 PARAMETER Experiment Name: At_Drought_cDNA_P Parameter: Tissue Value: Aerial
  misc_feature: MA Experiment 108572 PARAMETER Experiment Name: At_Drought_cDNA_P Parameter: Treatment Value: Drought vs. No Drought
  misc_feature: MA Experiment ID: 108573 Result: Up-regulated in Transcription
  misc_feature: MA Experiment 108573 PARAMETER Experiment Name: At_Drought_cDNA_P Parameter: Timepoint (hr) Value: 6
  misc_feature: MA Experiment 108573 PARAMETER Experiment Name: At_Drought_cDNA_P Parameter: Tissue Value: Aerial
  misc_feature: MA Experiment 108573 PARAMETER Experiment Name: At_Drought_cDNA_P Parameter: Treatment Value: Drought vs. No Drought
  misc_feature: MA Experiment ID: 108585 Result: Up-regulated in Transcription
  misc_feature: MA Experiment 108585 PARAMETER Experiment Name: At_5mM_NaNP_cDNA_P Parameter: Timepoint (hr) Value: 6
  misc_feature: MA Experiment 108585 PARAMETER Experiment Name: At_5mM_NaNP_cDNA_P Parameter: Tissue Value: Aerial
  misc_feature: MA Experiment 108585 PARAMETER Experiment Name: At_5mM_NaNP_cDNA_P Parameter: Treatment Value: null
  misc_feature: MA Experiment ID: 108595 Result: Up-regulated in Transcription
  misc_feature: MA Experiment 108595 PARAMETER Experiment Name: At_Ler-pi_Ovule_cDNA_P Parameter: Plant Line Value: null
  misc_feature: MA Experiment ID: 20000111 Result: Up-regulated in Transcription
  misc_feature: MA Experiment 20000111 PARAMETER Experiment Name: At_42deg_Heat_cDNA_P Parameter: Temperature (deg C) Value: 42 vs. 22
  misc_feature: MA Experiment 20000111 PARAMETER Experiment Name: At_42deg_Heat_cDNA_P Parameter: Timepoint (hr) Value: 6
  misc_feature: MA Experiment 20000111 PARAMETER Experiment Name: At_42deg_Heat_cDNA_P Parameter: Tissue Value: Aerial
  misc_feature: MA Experiment ID: 20000234 Result: Up-regulated in Transcription
  misc_feature: MA Experiment 20000234 PARAMETER Experiment Name: At_Siliques_P Parameter: Age (day) Value: 21
  misc_feature: MA Experiment 20000234 PARAMETER Experiment Name: At_Siliques_P Parameter: Organism Value: A. thaliana
  misc_feature: MA Experiment 20000234 PARAMETER Experiment Name: At_Siliques_P Parameter: Plant Line Value: WS
  misc_feature: MA Experiment 20000234 PARAMETER Experiment Name: At_Siliques_P Parameter: Tissue Value: Less Than 5mm Siliques vs. Whole Plant
  misc_feature: MA Experiment ID: 20000235 Result: Up-regulated in Transcription
  misc_feature: MA Experiment 20000235 PARAMETER Experiment Name: At_Siliques_P Parameter: Age (day) Value: 21
  misc_feature: MA Experiment 20000235 PARAMETER Experiment Name: At_Siliques_P Parameter: Organism Value: A. thaliana
  misc_feature: MA Experiment 20000235 PARAMETER Experiment Name: At_Siliques_P Parameter: Plant Line Value: WS
  misc_feature: MA Experiment 20000235 PARAMETER Experiment Name: At_Siliques_P Parameter: Tissue Value: 5-10mm Siliques vs. Whole Plant
  misc_feature: MA Experiment ID: 20000264 Result: Up-regulated in Transcription
  misc_feature: MA Experiment 20000264 PARAMETER Experiment Name: At_Open_Flower_P Parameter: Age (day) Value: 21
  misc_feature: MA Experiment 20000264 PARAMETER Experiment Name: At_Open_Flower_P Parameter: Plant Line Value: WS
  misc_feature: MA Experiment 20000264 PARAMETER Experiment Name: At_Open_Flower_P Parameter: Tissue Value: Open Flower vs. Whole Plant
  misc_feature: MA Experiment ID: 20000267 Result: Up-regulated in Transcription
  misc_feature: MA Experiment 20000267 PARAMETER Experiment Name: At_Drought_P Parameter: Age (day) Value: 7
  misc_feature: MA Experiment 20000267 PARAMETER Experiment Name: At_Drought_P Parameter: Organism Value: A. thaliana
  misc_feature: MA Experiment 20000267 PARAMETER Experiment Name: At_Drought_P Parameter: Plant Line Value: WS
  misc_feature: MA Experiment 20000267 PARAMETER Experiment Name: At_Drought_P Parameter: Timepoint (hr) Value: 6
  misc_feature: MA Experiment 20000267 PARAMETER Experiment Name: At_Drought_P Parameter: Tissue Value: Whole Plant
  misc_feature: MA Experiment 20000267 PARAMETER Experiment Name: At_Drought_P Parameter: Treatment Value: Drought vs. No Drought
  misc_feature: MA Experiment ID: 20000268 Result: Up-regulated in Transcription
  misc_feature: MA Experiment 20000268 PARAMETER Experiment Name: At_100mM_NaCl__P Parameter: Age (day) Value: 14
  misc_feature: MA Experiment 20000268 PARAMETER Experiment Name: At_100mM_NaCl__P Parameter: Organism Value: A. thaliana
  misc_feature: MA Experiment 20000268 PARAMETER Experiment Name: At_100mM_NaCl__P Parameter: Plant Line Value: WS
  misc_feature: MA Experiment 20000268 PARAMETER Experiment Name: At_100mM_NaCl__P Parameter: Timepoint (hr) Value: 6
  misc_feature: MA Experiment 20000268 PARAMETER Experiment Name: At_100mM_NaCl__P Parameter: Tissue Value: Whole Plant
  misc_feature: MA Experiment 20000268 PARAMETER Experiment Name: At_100mM_NaCl__P Parameter: Treatment Value: 100mM NaCl vs. No Treatment
  misc_feature: MA Experiment ID: 20000286 Result: Up-regulated in Transcription
  misc_feature: MA Experiment 20000286 PARAMETER Experiment Name: At_Open_Flower_P Parameter: Age (day) Value: 21
  misc_feature: MA Experiment 20000286 PARAMETER Experiment Name: At_Open_Flower_P Parameter: Plant Line Value: WS
  misc_feature: MA Experiment 20000286 PARAMETER Experiment Name: At_Open_Flower_P Parameter: Tissue Value: Half Open vs. Whole Plant
  misc_feature: MA Experiment ID: 20000436 Result: Up-regulated in Transcription
  misc_feature: MA Experiment 20000436 PARAMETER Experiment Name: At_Drought_P Parameter: Age (day) Value: 7
  misc_feature: MA Experiment 20000436 PARAMETER Experiment Name: At_Drought_P Parameter: Organism Value: A. thaliana
  misc_feature: MA Experiment 20000436 PARAMETER Experiment Name: At_Drought_P Parameter: Plant Line Value: WS
  misc_feature: MA Experiment 20000436 PARAMETER Experiment Name: At_Drought_P Parameter: Timepoint (hr) Value: 12
  misc_feature: MA Experiment 20000436 PARAMETER Experiment Name: At_Drought_P Parameter: Tissue Value: Whole Plant
  misc_feature: MA Experiment 20000436 PARAMETER Experiment Name: At_Drought_P Parameter: Treatment Value: Drought vs. No Drought
  misc_feature: MA Experiment ID: 20000437 Result: Up-regulated in Transcription
  misc_feature: MA Experiment 20000437 PARAMETER Experiment Name: At_Drought_P Parameter: Age (day) Value: 8
  misc_feature: MA Experiment 20000437 PARAMETER Experiment Name: At_Drought_P Parameter: Organism Value: A. thaliana
  misc_feature: MA Experiment 20000437 PARAMETER Experiment Name: At_Drought_P Parameter: Plant Line Value: WS
  misc_feature: MA Experiment 20000437 PARAMETER Experiment Name: At_Drought_P Parameter: Timepoint (hr) Value: 24
  misc_feature: MA Experiment 20000437 PARAMETER Experiment Name: At_Drought_P Parameter: Tissue Value: Whole Plant
  misc_feature: MA Experiment 20000437 PARAMETER Experiment Name: At_Drought_P Parameter: Treatment Value: Drought vs. No Drought
  misc_feature: MA Experiment ID: 20000496 Result: Up-regulated in Transcription
  misc_feature: MA Experiment 20000496 PARAMETER Experiment Name: At_Guard_Cells_P Parameter: Harvest Date Value: 7/19/2002
  misc_feature: MA Experiment 20000496 PARAMETER Experiment Name: At_Guard_Cells_P Parameter: Organism Value: Canola
  misc_feature: MA Experiment 20000496 PARAMETER Experiment Name: At_Guard_Cells_P Parameter: Tissue Value: Guard Cells vs. Leaves
  misc_feature: MA Experiment ID: 20000794 Result: Up-regulated in Transcription
  misc_feature: MA Experiment 20000794 PARAMETER Experiment Name: At_Petals_P Parameter: Age (day) Value: 23-25 days
  misc_feature: MA Experiment 20000794 PARAMETER Experiment Name: At_Petals_P Parameter: Plant Line Value: WS
  misc_feature: MA Experiment 20000794 PARAMETER Experiment Name: At_Petals_P Parameter: Tissue Value: Petals vs. Whole plant
  misc_feature: MA Experiment ID: 20001557 Result: Up-regulated in Transcription
  misc_feature: MA Experiment 20001557 PARAMETER Experiment Name: At_Drought_Soil_Dry_P Parameter: Age (day) Value: 27
  misc_feature: MA Experiment 20001557 PARAMETER Experiment Name: At_Drought_Soil_Dry_P Parameter: Organism Value: A. thaliana
  misc_feature: MA Experiment 20001557 PARAMETER Experiment Name: At_Drought_Soil_Dry_P Parameter: Plant Line Value: WS
  misc_feature: MA Experiment 20001557 PARAMETER Experiment Name: At_Drought_Soil_Dry_P Parameter: Post Timepoint (hr) Value: 3
  misc_feature: MA Experiment 20001557 PARAMETER Experiment Name: At_Drought_Soil_Dry_P Parameter: Post-Treatment Value: Re-Water vs. No Drought
  misc_feature: MA Experiment 20001557 PARAMETER Experiment Name: At_Drought_Soil_Dry_P Parameter: Timepoint (day) Value: 13
  misc_feature: MA Experiment 20001557 PARAMETER Experiment Name: At_Drought_Soil_Dry_P Parameter: Treatment Value: Drought vs. No Drought
  misc_feature: MA Experiment ID: 20001559 Result: Up-regulated in Transcription
  misc_feature: MA Experiment 20001559 PARAMETER Experiment Name: At_Drought_Soil_Dry_P Parameter: Age (day) Value: 28
  misc_feature: MA Experiment 20001559 PARAMETER Experiment Name: At_Drought_Soil_Dry_P Parameter: Organism Value: A. thaliana
  misc_feature: MA Experiment 20001559 PARAMETER Experiment Name: At_Drought_Soil_Dry_P Parameter: Plant Line Value: WS
  misc_feature: MA Experiment 20001559 PARAMETER Experiment Name: At_Drought_Soil_Dry_P Parameter: Post Timepoint (hr) Value: 29
  misc_feature: MA Experiment 20001559 PARAMETER Experiment Name: At_Drought_Soil_Dry_P Parameter: Post-Treatment Value: Re-Water vs. No Drought
  misc_feature: MA Experiment 20001559 PARAMETER Experiment Name: At_Drought_Soil_Dry_P Parameter: Timepoint (day) Value: 14
  misc_feature: MA Experiment 20001559 PARAMETER Experiment Name: At_Drought_Soil_Dry_P Parameter: Treatment Value: Drought vs. No Drought
  misc_feature: MA Experiment ID: 20001904 Result: Up-regulated in Transcription
  misc_feature: MA Experiment 20001904 PARAMETER Experiment Name: At_Drought_Reproduction_P Parameter: Age (day) Value: 37
  misc_feature: MA Experiment 20001904 PARAMETER Experiment Name: At_Drought_Reproduction_P Parameter: Organism Value: A. thaliana
  misc_feature: MA Experiment 20001904 PARAMETER Experiment Name: At_Drought_Reproduction_P Parameter: Plant Line Value: WS
  misc_feature: MA Experiment 20001904 PARAMETER Experiment Name: At_Drought_Reproduction_P Parameter: Timepoint (day) Value: 7
  misc_feature: MA Experiment 20001904 PARAMETER Experiment Name: At_Drought_Reproduction_P Parameter: Tissue Value: Rosettes
  misc_feature: MA Experiment 20001904 PARAMETER Experiment Name: At_Drought_Reproduction_P Parameter: Treatment Value: Drought vs. No Drought
  misc_feature: MA Experiment ID: 20001905 Result: Up-regulated in Transcription
  misc_feature: MA Experiment 20001905 PARAMETER Experiment Name: At_Drought_Reproduction_P Parameter: Age (day) Value: 40
  misc_feature: MA Experiment 20001905 PARAMETER Experiment Name: At_Drought_Reproduction_P Parameter: Organism Value: A. thaliana
  misc_feature: MA Experiment 20001905 PARAMETER Experiment Name: At_Drought_Reproduction_P Parameter: Plant Line Value: WS
  misc_feature: MA Experiment 20001905 PARAMETER Experiment Name: At_Drought_Reproduction_P Parameter: Timepoint (day) Value: 10
  misc_feature: MA Experiment 20001905 PARAMETER Experiment Name: At_Drought_Reproduction_P Parameter: Tissue Value: Rosettes
  misc_feature: MA Experiment 20001905 PARAMETER Experiment Name: At_Drought_Reproduction_P Parameter: Treatment Value: Drought vs. No Drought
  misc_feature: MA Experiment ID: 20001911 Result: Up-regulated in Transcription
  misc_feature: MA Experiment 20001911 PARAMETER Experiment Name: At_Drought_Reproduction_P Parameter: Age (day) Value: 40
  misc_feature: MA Experiment 20001911 PARAMETER Experiment Name: At_Drought_Reproduction_P Parameter: Organism Value: A. thaliana
  misc_feature: MA Experiment 20001911 PARAMETER Experiment Name: At_Drought_Reproduction_P Parameter: Plant Line Value: WS
  misc_feature: MA Experiment 20001911 PARAMETER Experiment Name: At_Drought_Reproduction_P Parameter: Timepoint (day) Value: 10
  misc_feature: MA Experiment 20001911 PARAMETER Experiment Name: At_Drought_Reproduction_P Parameter: Tissue Value: Flowers
  misc_feature: MA Experiment 20001911 PARAMETER Experiment Name: At_Drought_Reproduction_P Parameter: Treatment Value: Drought vs. No Drought
aacatttgttcgtgtaaggctttttttactatctcttctatttactcaatttcttcttacacatttgttatacgtaaaaggaacatttctttgattctttttttgttgtcactaccaaaacgtactgatttgttttttgaataggtgggttcctagagtaaaaaagagaccgatatttaaacttttgtcccttgactaaaactcaaaacatttctgtttgttttttgttagttaaatatgtttaaaataaataaataatcatatagctatttatgaaagtattaatatacaaataactttcaaaagttattaattaaatttcaaacaataatcctgtgtttcaatatctacttttgcaattgttatttccataattccattaatacaaatttttagatattgatagctacctaactcacactttttaaattttagttatgtcgacaagttttttttttgttacatgatgttaattacgactaatcaggtttttaaagtaataaatcaatattaaaaagtgcctcaacaaagaaaaagtgttggaccatggtcgtctataattatttatcaaaacatagtcacacacacccttgccgttattgtctagaactctctctcgctctcccaaaaactcatctctcaccaccgtctcaaaccaagttcgatctaaaagccttttcctttagattctctccaacaacaaatctctttgaatcactcagtcatgtcggttttacttcctctctgtctgattatctccatgttcacctattcaaacgcagcgtattgtctttgcaaagaggggaacgagcaagtgcttcagaaggcaatagactacgcttgtggaaatggagctgactgtacccagatccaacccaccggagcttgttaccaacctaacaccgtcaaaaaccactgtgacgtcgccgtcaacagttactaccagaaaaaagcttcttccggtgccacctgtgactttaacggcgccgcctccccctctactacccctccgtcaactgcttcaaactgtttaactggttcaagctctagtggcactcctaccacaggaacaccaactactgggacaccaaccagtgggaccccgactaccggaactccgaccaccggaacccccaccactggaactccaaccagtgggactccaactagtggcttcccaaataccgggactccaaacacagggactaacactgggatgccaaattccaacgggatgccaacttcatcgtcatcttcggtgttcccggggactactcttggcccgactgggagcgggggactaggcgatccaaatgctggagagaagctgtctgttcgaactaacacagtggtcttcttattaaccggtgtagcagcaatgcttgtcatatgagggcttagaagtcacacgcggttatggttgtaattgagttgctgagagatcagatcttgccaacggctcatggttgatagagtcatcttttttttcactcgtctttctaggatttggacttaggttggccgagagacgtaatgctggtagtagctagtattttgggttatgtacaactttaactaagagctttacttttgtaaatccggaggatgagatgctcttttgtttcttatattctttttaatccgtttacttggatctttcatc

SEQ ID NO: 105812 - protein, 222 aa, Arabidopsis thaliana; identical to SEQ ID NO: 30065
  peptide (1)..(222): Ceres Seq. ID no. 13618073
  misc_feature (78)..(188): Pfam Name: Equine herpesvirus glycoprotein gp2 Pfam Description: Equine herpesvirus glycoprotein gp2
  misc_feature (1)..(222): Homolog of NCBI NO: 18409239 NR Description: expressed protein [Arabidopsis thaliana] unknown protein [Arabidopsis thaliana] At1g69290/F23O10_12 [Arabidopsis thaliana]
  misc_feature (1)..(222): Homolog of NCBI NO: 21553768 NR Description: unknown [Arabidopsis thaliana]
  misc_feature (1)..(205): Homolog of NCBI NO: 25404810 NR Description: unknown protein, 45065-49536 [imported] -
  misc_feature (1)..(185): Homolog of NCBI NO: 15222715 NR Description: glycosyl hydrolase family 17 [Arabidopsis
  misc_feature (1)..(163): Homolog of NCBI NO: 30683485 NR Description: expressed protein [Arabidopsis thaliana] unknown protein [Arabidopsis thaliana]
  misc_feature (1)..(180): Homolog of NCBI NO: 30697478 NR Description: glycosyl hydrolase family 17 [Arabidopsis >gi|9759459|dbj|BAB10375.1| to unknown protein [Arabidopsis thaliana]
  misc_feature (1)..(166): Homolog of NCBI NO: 18394637 NR Description: glycosyl hydrolase family 17 [Arabidopsis
  misc_feature (1)..(189): Homolog of NCBI NO: 21592859 NR Description: unknown [Arabidopsis thaliana]
  misc_feature (1)..(189): Homolog of NCBI NO: 15241485 NR Description: glycosyl hydrolase family 17 [Arabidopsis
  misc_feature (16)..(180): Homolog of NCBI NO: 8778409 NR Description: F16A14.5 [Arabidopsis thaliana]

SEQ ID NO: 105813 - protein, 210 aa, Arabidopsis thaliana; identical to SEQ ID NO: 30066
  peptide (1)..(210): Ceres Seq. ID no. 13618074
  misc_feature (66)..(176): Pfam Name: Equine herpesvirus glycoprotein gp2 Pfam Description: Equine herpesvirus glycoprotein gp2
  misc_feature (1)..(210): Homolog of NCBI NO: 18409239 NR Description: expressed protein [Arabidopsis thaliana] unknown protein [Arabidopsis thaliana] At1g69290/F23O10_12 [Arabidopsis thaliana]
  misc_feature (1)..(210): Homolog of NCBI NO: 21553768 NR Description: unknown [Arabidopsis thaliana]
  misc_feature (1)..(193): Homolog of NCBI NO: 25404810 NR Description: unknown protein, 45065-49536 [imported] -
  misc_feature (1)..(173): Homolog of NCBI NO: 15222715 NR Description: glycosyl hydrolase family 17 [Arabidopsis
  misc_feature (1)..(151): Homolog of NCBI NO: 30683485 NR Description: expressed protein [Arabidopsis thaliana] unknown protein [Arabidopsis thaliana]
  misc_feature (1)..(168): Homolog of NCBI NO: 30697478 NR Description: glycosyl hydrolase family 17 [Arabidopsis >gi|9759459|dbj|BAB10375.1| to unknown protein [Arabidopsis thaliana]
  misc_feature (1)..(154): Homolog of NCBI NO: 18394637 NR Description: glycosyl hydrolase family 17 [Arabidopsis
  misc_feature (1)..(177): Homolog of NCBI NO: 21592859 NR Description: unknown [Arabidopsis thaliana]
  misc_feature (1)..(177): Homolog of NCBI NO: 15241485 NR Description: glycosyl hydrolase family 17 [Arabidopsis
  misc_feature (4)..(168): Homolog of NCBI NO: 8778409 NR Description: F16A14.5 [Arabidopsis thaliana]

SEQ ID NO: 105814 - DNA, 1215 bp, Arabidopsis thaliana
  misc_feature (1)..(1215): Ceres Seq. ID no. 13618083
  misc_feature: MA Experiment ID: 108464 Result: Down-regulated in Transcription
  misc_feature: MA Experiment 108464 PARAMETER Experiment Name: At_Germinating_Seeds_cDNA_P Parameter: Age (day) Value: 4 vs. 0
  misc_feature: MA Experiment 108464 PARAMETER Experiment Name: At_Germinating_Seeds_cDNA_P Parameter: Tissue Value: Germinating Seeds
  misc_feature: MA Experiment ID: 108569 Result: Down-regulated in Transcription
  misc_feature: MA Experiment 108569 PARAMETER Experiment Name: At_0.001%_MeJA__cDNA_P Parameter: Timepoint (hr) Value: 6
  misc_feature: MA Experiment 108569 PARAMETER Experiment Name: At_0.001%_MeJA__cDNA_P Parameter: Tissue Value: Aerial
  misc_feature: MA Experiment 108569 PARAMETER Experiment Name: At_0.001%_MeJA__cDNA_P Parameter: Treatment Value: 0.001% MeJA vs. No Treatment
  misc_feature: MA Experiment ID: 108595 Result: Up-regulated in Transcription
  misc_feature: MA Experiment 108595 PARAMETER Experiment Name: At_Ler-pi_Ovule_cDNA_P Parameter: Plant Line Value: null
  misc_feature: MA Experiment ID: 20000111 Result: Up-regulated in Transcription
  misc_feature: MA Experiment 20000111 PARAMETER Experiment Name: At_42deg_Heat_cDNA_P Parameter: Temperature (deg C) Value: 42 vs. 22
  misc_feature: MA Experiment 20000111 PARAMETER Experiment Name: At_42deg_Heat_cDNA_P Parameter: Timepoint (hr) Value: 6
  misc_feature: MA Experiment 20000111 PARAMETER Experiment Name: At_42deg_Heat_cDNA_P Parameter: Tissue Value: Aerial
gagataacgttcttctccaaaattgcttgaggaagtggttttgttgtgtctctctgggtttgaaatatgagcggagatagacttgaatttgaaaaccctatagaggatgcggtttcgaggctcagattctcccctcaatcaaacaatctcctcgttgcttcttgggattcttatctgagattgtatgatgtggagagctcttcgctaagtcttgaattaaactctcaagctgctcttcttgattgttgtttcgagaatgaatcaacttcatttacctctggttctgatggattcatccgaaggtatgatttaaacgctggaacagttgatacaattggaaggcatgatgacatttcaacatccattgtctactcttatgaaaaaggtgaagttatctcgactgggtttgatgagaagatcaaattctgggatacaagacaaagagaaagtcttgtgttttcgactgatgctggtggagcagtgggatgtgtcactgtatctggaaacaacttagttgtttgtgtggacgcatcgatgcatatatacgatttacgtaacttagatgaagcttttcaatcgtatgcatcccaagtggaggtgccaatcagatgtatcacctctgtaccttattccagaggatatgcagttgggtcagtagacggacgagtagctgtggatttccccaatacatcatgctccagtgagattaaatacagtttccgatgccatcccaagagtaggaatggaagacttgatggtgtatgcataaatgcaatcgaattcagtccatgtgggtcagggacttttgtaacaggtgacaatgaaggatacgtgatctcatggaatgctaaaagcagaagaagactcaatgagttgccaaggtactcaaatagcatcgcgtctttagcatttgaccacactggagaactcttggccattgcatcaagccacacttaccaagatgctaaagagaaggaagaagctcctcaagtgttcatacacaggctttgaaagattcgtaagcttcttgaatctcagtgtctacttgtatctatctagttatttttttgtgtgtttttggtagcacgttttagcttgatctcagaactgactcgtgtcaaccaacatgtaatgattgtatctctcacgtctctttatactacttgttctctaaactttgttttgactttttagtcaactatatgctttgacttt

SEQ ID NO: 105815 - protein, 314 aa, Arabidopsis thaliana
  peptide (1)..(314): Ceres Seq. ID no. 13618084
  misc_feature (222)..(260): Pfam Name: WD domain, G-beta repeat Pfam Description: WD domain, G-beta repeat
  misc_feature (1)..(314): Homolog of NCBI NO: 18409261 NR Description: transducin / WD-40 repeat protein family
  misc_feature (1)..(314): Homolog of NCBI NO: 12597795 NR Description: mitotic checkpoint protein, putative [Arabidopsis
  misc_feature (1)..(314): Homolog of NCBI NO: 21593642 NR Description: mitotic checkpoint protein, putative [Arabidopsis
  misc_feature (7)..(314): Homolog of NCBI NO: 18402300 NR Description: mitotic checkpoint protein [Arabidopsis thaliana]
  misc_feature (7)..(314): Homolog of NCBI NO: 15222841 NR Description: mitotic checkpoint protein, putative [Arabidopsis >gi|12597855|gb|AAG60165.1|AC074110_3 mitotic checkpoint protein,
  misc_feature (7)..(311): Homolog of NCBI NO: 28564814 NR Description: putative mitotic checkpoint protein [Oryza sativa
  misc_feature (1)..(314): Homolog of NCBI NO: 4757880 NR Description: BUB3 budding uninhibited by benzimidazoles 3 mitotic checkpoint component; BUB3 (budding uninhibited by
  misc_feature (1)..(314): Homolog of NCBI NO: 31560618 NR Description: budding uninhibited by benzimidazoles 3 homolog musculus] >gi|3378104|gb|AAC28439.1| testis mitotic checkpoint [Homo sapiens] >gi|19264055|gb|AAH25089.1| budding uninhibited by
  misc_feature (1)..(314): Homolog of NCBI NO: 7387559 NR Description: Mitotic checkpoint protein BUB3 (WD-repeat type I protein A72.5) >gi|5020213|gb|AAD38038.1|AF149822_1 mitotic
  misc_feature (13)..(314): Homolog of NCBI NO: 37362190 NR Description: BUB3 budding uninhibited by benzimidazoles 3-like
MSGDRLEFENPIEDAVSRLRFSPQSNNLLVASWDSYLRLYDVESSSLSLELNSQAALLDCCFENESTSFTSGSDGFIRRYDLNAGTVDTIGRHDDISTSIVYSYEKGEVISTGFDEKIKFWDTRQRESLVFSTDAGGAVGCVTVSGNNLVVCVDASMHIYDLRNLDEAFQSYASQVEVPIRCITSVPYSRGYAVGSVDGRVAVDFPNTSCSSEIKYSFRCHPKSRNGRLDGVCINAIEFSPCGSGTFVTGDNEGYVISWNAKSRRRLNELPRYSNSIASLAFDHTGELLAIASSHTYQDAKEKEEAPQVFIHRL

SEQ ID NO: 105816 - protein, 158 aa, Arabidopsis thaliana; identical to SEQ ID NO: 25545
  peptide (1)..(158): Ceres Seq. ID no. 13618085
  misc_feature (66)..(104): Pfam Name: WD domain, G-beta repeat Pfam Description: WD domain, G-beta repeat
  misc_feature (1)..(158): Homolog of NCBI NO: 18409261 NR Description: transducin / WD-40 repeat protein family
  misc_feature (1)..(158): Homolog of NCBI NO: 12597795 NR Description: mitotic checkpoint protein, putative [Arabidopsis
  misc_feature (1)..(158): Homolog of NCBI NO: 21593642 NR Description: mitotic checkpoint protein, putative [Arabidopsis
  misc_feature (1)..(158): Homolog of NCBI NO: 18402300 NR Description: mitotic checkpoint protein [Arabidopsis thaliana]
  misc_feature (1)..(158): Homolog of NCBI NO: 15222841 NR Description: mitotic checkpoint protein, putative [Arabidopsis >gi|12597855|gb|AAG60165.1|AC074110_3 mitotic checkpoint protein,
  misc_feature (1)..(155): Homolog of NCBI NO: 28564814 NR Description: putative mitotic checkpoint protein [Oryza sativa
  misc_feature (1)..(158): Homolog of NCBI NO: 4757880 NR Description: BUB3 budding uninhibited by benzimidazoles 3 mitotic checkpoint component; BUB3 (budding uninhibited by
  misc_feature (1)..(158): Homolog of NCBI NO: 31560618 NR Description: budding uninhibited by benzimidazoles 3 homolog musculus] >gi|3378104|gb|AAC28439.1| testis mitotic checkpoint [Homo sapiens] >gi|19264055|gb|AAH25089.1| budding uninhibited by
  misc_feature (1)..(158): Homolog of NCBI NO: 7387559 NR Description: Mitotic checkpoint protein BUB3 (WD-repeat type I protein A72.5) >gi|5020213|gb|AAD38038.1|AF149822_1 mitotic
  misc_feature (1)..(158): Homolog of NCBI NO: 37362190 NR Description: BUB3 budding uninhibited by benzimidazoles 3-like

SEQ ID NO: 105817 - DNA, 1304 bp, Arabidopsis thaliana
  misc_feature (1)..(1304): Ceres Seq. ID no. 13618086
  misc_feature: MA Experiment ID: 108434 Result: Down-regulated in Transcription
  misc_feature: MA Experiment 108434 PARAMETER Experiment Name: At_Root_Tips_cDNA_P Parameter: Tissue Value: Root Tips
  misc_feature: MA Experiment ID: 108464 Result: Up-regulated in Transcription
  misc_feature: MA Experiment 108464 PARAMETER Experiment Name: At_Germinating_Seeds_cDNA_P Parameter: Age (day) Value: 4 vs. 0
  misc_feature: MA Experiment 108464 PARAMETER Experiment Name: At_Germinating_Seeds_cDNA_P Parameter: Tissue Value: Germinating Seeds
  misc_feature: MA Experiment ID: 20000180 Result: Up-regulated in Transcription
  misc_feature: MA Experiment 20000180 PARAMETER Experiment Name: At_Germinating_Seeds_P Parameter: Age (hr) Value: 24 vs. 0
  misc_feature: MA Experiment 20000180 PARAMETER Experiment Name: At_Germinating_Seeds_P Parameter: Tissue Value: Germinating Seeds
  misc_feature: MA Experiment ID: 20000182 Result: Up-regulated in Transcription
  misc_feature: MA Experiment 20000182 PARAMETER Experiment Name: At_2mM_SA_P Parameter: Age (day) Value: 14
  misc_feature: MA Experiment 20000182 PARAMETER Experiment Name: At_2mM_SA_P Parameter: Organism Value: A. thaliana
  misc_feature: MA Experiment 20000182 PARAMETER Experiment Name: At_2mM_SA_P Parameter: Plant Line Value: WS
  misc_feature: MA Experiment 20000182 PARAMETER Experiment Name: At_2mM_SA_P Parameter: Timepoint (hr) Value: 6
  misc_feature: MA Experiment 20000182 PARAMETER Experiment Name: At_2mM_SA_P Parameter: Tissue Value: Aerial
  misc_feature: MA Experiment 20000182 PARAMETER Experiment Name: At_2mM_SA_P Parameter: Treatment Value: 2mM SA vs. No Treatment
  misc_feature: MA Experiment ID: 20000184 Result: Down-regulated in Transcription
  misc_feature: MA Experiment 20000184 PARAMETER Experiment Name: At_Shoots__P Parameter: Age (day) Value: 7
  misc_feature: MA Experiment 20000184 PARAMETER Experiment Name: At_Shoots__P Parameter: Tissue Value: Shoots vs. Whole Plant
  misc_feature: MA Experiment ID: 20000224 Result: Up-regulated in Transcription
  misc_feature: MA Experiment ID: 20000234 Result: Down-regulated in Transcription
  misc_feature: MA Experiment 20000234 PARAMETER Experiment Name: At_Siliques_P Parameter: Age (day) Value: 21
  misc_feature: MA Experiment 20000234 PARAMETER Experiment Name: At_Siliques_P Parameter: Organism Value: A. thaliana
  misc_feature: MA Experiment 20000234 PARAMETER Experiment Name: At_Siliques_P Parameter: Plant Line Value: WS
  misc_feature: MA Experiment 20000234 PARAMETER Experiment Name: At_Siliques_P Parameter: Tissue Value: Less Than 5mm Siliques vs. Whole Plant
  misc_feature: MA Experiment ID: 20000438 Result: Down-regulated in Transcription
  misc_feature: MA Experiment 20000438 PARAMETER Experiment Name: At_Shoots__P Parameter: Age (day) Value: 14
  misc_feature: MA Experiment 20000438 PARAMETER Experiment Name: At_Shoots__P Parameter: Tissue Value: Shoots vs. Whole Plant
  misc_feature: MA Experiment ID: 20000527 Result: Down-regulated in Transcription
  misc_feature: MA Experiment 20000527 PARAMETER Experiment Name: At_10percent_PEG_P Parameter: Age (day) Value: 20
  misc_feature: MA Experiment 20000527 PARAMETER Experiment Name: At_10percent_PEG_P Parameter: Organism Value: A. thaliana
  misc_feature: MA Experiment 20000527 PARAMETER Experiment Name: At_10percent_PEG_P Parameter: Plant Line Value: WS
  misc_feature: MA Experiment 20000527 PARAMETER Experiment Name: At_10percent_PEG_P Parameter: Timepoint (day) Value: 20
  misc_feature: MA Experiment 20000527 PARAMETER Experiment Name: At_10percent_PEG_P Parameter: Tissue Value: Whole Plant
  misc_feature: MA Experiment 20000527 PARAMETER Experiment Name: At_10percent_PEG_P Parameter: Treatment Value: 10percent PEG vs. No Treatment
  misc_feature: MA Experiment ID: 20001555 Result: Down-regulated in Transcription
  misc_feature: MA Experiment 20001555 PARAMETER Experiment Name: At_Drought_Soil_Dry_P Parameter: Age (day) Value: 24
  misc_feature: MA Experiment 20001555 PARAMETER Experiment Name: At_Drought_Soil_Dry_P Parameter: Organism Value: A. thaliana
  misc_feature: MA Experiment 20001555 PARAMETER Experiment Name: At_Drought_Soil_Dry_P Parameter: Plant Line Value: WS
  misc_feature: MA Experiment 20001555 PARAMETER Experiment Name: At_Drought_Soil_Dry_P Parameter: Post Timepoint (hr) Value: None
  misc_feature: MA Experiment 20001555 PARAMETER Experiment Name: At_Drought_Soil_Dry_P Parameter: Post-Treatment Value: None
  misc_feature: MA Experiment 20001555 PARAMETER Experiment Name: At_Drought_Soil_Dry_P Parameter: Timepoint (day) Value: 10
  misc_feature: MA Experiment 20001555 PARAMETER Experiment Name: At_Drought_Soil_Dry_P Parameter: Treatment Value: Drought vs. No Drought
  misc_feature: MA Experiment ID: 20001556 Result: Down-regulated in Transcription
  misc_feature: MA Experiment 20001556 PARAMETER Experiment Name: At_Drought_Soil_Dry_P Parameter: Age (day) Value: 26
  misc_feature: MA Experiment 20001556 PARAMETER Experiment Name: At_Drought_Soil_Dry_P Parameter: Organism Value: A. thaliana
  misc_feature: MA Experiment 20001556 PARAMETER Experiment Name: At_Drought_Soil_Dry_P Parameter: Plant Line Value: WS
  misc_feature: MA Experiment 20001556 PARAMETER Experiment Name: At_Drought_Soil_Dry_P Parameter: Post Timepoint (hr) Value: None
  misc_feature: MA Experiment 20001556 PARAMETER Experiment Name: At_Drought_Soil_Dry_P Parameter: Post-Treatment Value: None
  misc_feature: MA Experiment 20001556 PARAMETER Experiment Name: At_Drought_Soil_Dry_P Parameter: Timepoint (day) Value: 12
  misc_feature: MA Experiment 20001556 PARAMETER Experiment Name: At_Drought_Soil_Dry_P Parameter: Treatment Value: Drought vs. No Drought
  misc_feature: MA Experiment ID: 20001557 Result: Down-regulated in Transcription
  misc_feature: MA Experiment 20001557 PARAMETER Experiment Name: At_Drought_Soil_Dry_P Parameter: Age (day) Value: 27
  misc_feature: MA Experiment 20001557 PARAMETER Experiment Name: At_Drought_Soil_Dry_P Parameter: Organism Value: A. thaliana
  misc_feature: MA Experiment 20001557 PARAMETER Experiment Name: At_Drought_Soil_Dry_P Parameter: Plant Line Value: WS
  misc_feature: MA Experiment 20001557 PARAMETER Experiment Name: At_Drought_Soil_Dry_P Parameter: Post Timepoint (hr) Value: 3
  misc_feature: MA Experiment 20001557 PARAMETER Experiment Name: At_Drought_Soil_Dry_P Parameter: Post-Treatment Value: Re-Water vs. No Drought
  misc_feature: MA Experiment 20001557 PARAMETER Experiment Name: At_Drought_Soil_Dry_P Parameter: Timepoint (day) Value: 13
  misc_feature: MA Experiment 20001557 PARAMETER Experiment Name: At_Drought_Soil_Dry_P Parameter: Treatment Value: Drought vs. No Drought
  misc_feature: MA Experiment ID: 20001559 Result: Down-regulated in Transcription
  misc_feature: MA Experiment 20001559 PARAMETER Experiment Name: At_Drought_Soil_Dry_P Parameter: Age (day) Value: 28
  misc_feature: MA Experiment 20001559 PARAMETER Experiment Name: At_Drought_Soil_Dry_P Parameter: Organism Value: A. thaliana
  misc_feature: MA Experiment 20001559 PARAMETER Experiment Name: At_Drought_Soil_Dry_P Parameter: Plant Line Value: WS
  misc_feature: MA Experiment 20001559 PARAMETER Experiment Name: At_Drought_Soil_Dry_P Parameter: Post Timepoint (hr) Value: 29
  misc_feature: MA Experiment 20001559 PARAMETER Experiment Name: At_Drought_Soil_Dry_P Parameter: Post-Treatment Value: Re-Water vs. No Drought
  misc_feature: MA Experiment 20001559 PARAMETER Experiment Name: At_Drought_Soil_Dry_P Parameter: Timepoint (day) Value: 14
  misc_feature: MA Experiment 20001559 PARAMETER Experiment Name: At_Drought_Soil_Dry_P Parameter: Treatment Value: Drought vs. No Drought
cctgtttttaggctcactcgtggactttttttaatttctttcctttgccatatttataaaataaaagagagagaaagaattttcaataattttcaacaagcaaagttcatgatggggaataagcgaaatctcggatttgtgatcttcttctgggctctggtggttgcagtagtagccacggccatcgagcatcgtcgcaatgagaggactaaaggcgtcaatggtcttgacaagatcatcatccgcgaccgtcgtggccgatctgctgaggtttacttgtatggaggtcaagtcagttcttggaaaaatgagaatggagaggagttacttgttatgagtagcaaggctatattccagcctccaacaccgattcgtggaggaattccagtattgtttccgcaatacagtaacaccggtccacttccctcacatggatttgtaagacagaggttctgggaggttgagactaaaccacctcctttgccatcactttctactgctcatgttgacctgatcgtaagatcatccaatgaggatttgaagatctggccgcataagtttgagtatagactgagagtagcattgggacatgatggagatttgacgttaacatctcgtgttaagaatactgatacaaaaccatttaacttcacatttgctcttcacccctacttcgctgtttccaatatcagtgaaatccatgtcgaaggattacacaacttggattaccttgaccaacaaaagaacagaacacgtttcactgatcatgagaaggttataactttcaatgctcaacttgacaggttgtacctaagcactccagatcaactaagaatcgtggaccataagaaaaagaagactattgttgtacacaaggagggacaagttgatgccgtggtgtggaatccatgggataagaaagtatccgatttgggagttgaagactataagcgttttgtaacggtggaaagcgcggctgtcgcgaaaccgatcacagtgaaccccggcaaagaatggaaaggaatactccatgtttctgtggttccatcaaatcggaaagcttgaccctataaaagtcttgcattcatcatcctcatcctttaaaaaaaaaaacttaaaactgtctttattaaagtatacttaatgttcccgagagacatcacatggtgaacacaaagttagttgggttccaaactggactcttgaccagttttattgttttgtaactttagcattcatgaataaaaaaagtgcgttaattacaataattgttaaatgtaattaaataaaagtgcgttaactac

SEQ ID NO: 105818 - protein, 354 aa, Arabidopsis thaliana
  peptide (1)..(354): Ceres Seq. ID no. 13618087
  misc_feature (77)..(346): Pfam Name: Aldose 1-epimerase Pfam Description: Aldose 1-epimerase
  misc_feature (37)..(354): Homolog of NCBI NO: 18416643 NR Description: aldose 1-epimerase family [Arabidopsis thaliana]
  misc_feature (38)..(354): Homolog of NCBI NO: 21593295 NR Description: possible apospory-associated like protein
  misc_feature (38)..(354): Homolog of NCBI NO: 7485483 NR Description: hypothetical protein F14M19.180 - Arabidopsis
  misc_feature (134)..(354): Homolog of NCBI NO: 4538919 NR Description: possible apospory-associated like
  misc_feature (61)..(351): Homolog of NCBI NO: 15242099 NR Description: aldose 1-epimerase family [Arabidopsis thaliana]
  misc_feature (71)..(351): Homolog of NCBI NO: 19387263 NR Description: putative apospory-associated protein C [Oryza
  misc_feature (68)..(351): Homolog of NCBI NO: 38344152 NR Description: OSJNBa0041A02.19 [Oryza sativa (japonica
  misc_feature (68)..(351): Homolog of NCBI NO: 2501555 NR Description: POSSIBLE APOSPORY-ASSOCIATED PROTEIN C
  misc_feature (68)..(351): Homolog of NCBI NO: 40253263 NR Description: putative Aldose 1-epimerase [Oryza sativa
  misc_feature (71)..(350): Homolog of NCBI NO: 15236591 NR Description: aldose 1-epimerase family [Arabidopsis thaliana]
PVFRLTRGLFLISFLCHIYKIKERERIFNNFQQAKFMMGNKRNLGFVIFFWALVVAVVATAIEHRRNERTKGVNGLDKIIIRDRRGRSAEVYLYGGQVSSWKNENGEELLVMSSKAIFQPPTPIRGGIPVLFPQYSNTGPLPSHGFVRQRFWEVETKPPPLPSLSTAHVDLIVRSSNEDLKIWPHKFEYRLRVALGHDGDLTLTSRVKNTDTKPFNFTFALHPYFAVSNISEIHVEGLHNLDYLDQQKNRTRFTDHEKVITFNAQLDRLYLSTPDQLRIVDHKKKKTIVVHKEGQVDAVVWNPWDKKVSDLGVEDYKRFVTVESAAVAKPITVNPGKEWKGILHVSVVPSNRKA

SEQ ID NO: 105819 - protein, 318 aa, Arabidopsis thaliana; identical to SEQ ID NO: 39077
  peptide (1)..(318): Ceres Seq. ID no. 13618088
  misc_feature (41)..(310): Pfam Name: Aldose 1-epimerase Pfam Description: Aldose 1-epimerase
  misc_feature (1)..(318): Homolog of NCBI NO: 18416643 NR Description: aldose 1-epimerase family [Arabidopsis thaliana]
  misc_feature (2)..(318): Homolog of NCBI NO: 21593295 NR Description: possible apospory-associated like protein
  misc_feature (2)..(318): Homolog of NCBI NO: 7485483 NR Description: hypothetical protein F14M19.180 - Arabidopsis
  misc_feature (98)..(318): Homolog of NCBI NO: 4538919 NR Description: possible apospory-associated like
  misc_feature (25)..(315): Homolog of NCBI NO: 15242099 NR Description: aldose 1-epimerase family [Arabidopsis thaliana]
  misc_feature (35)..(315): Homolog of NCBI NO: 19387263 NR Description: putative apospory-associated protein C [Oryza
  misc_feature (32)..(315): Homolog of NCBI NO: 38344152 NR Description: OSJNBa0041A02.19 [Oryza sativa (japonica
  misc_feature (32)..(315): Homolog of NCBI NO: 2501555 NR Description: POSSIBLE APOSPORY-ASSOCIATED PROTEIN C
  misc_feature (32)..(315): Homolog of NCBI NO: 40253263 NR Description: putative Aldose 1-epimerase [Oryza sativa
  misc_feature (35)..(314): Homolog of NCBI NO: 15236591 NR Description: aldose 1-epimerase family [Arabidopsis thaliana]

SEQ ID NO: 105820 - protein, 317 aa, Arabidopsis thaliana; identical to SEQ ID NO: 39078
  peptide (1)..(317): Ceres Seq. ID no. 13618089
  misc_feature (40)..(309): Pfam Name: Aldose 1-epimerase Pfam Description: Aldose 1-epimerase
  misc_feature (1)..(317): Homolog of NCBI NO: 18416643 NR Description: aldose 1-epimerase family [Arabidopsis thaliana]
  misc_feature (1)..(317): Homolog of NCBI NO: 21593295 NR Description: possible apospory-associated like protein
  misc_feature (1)..(317): Homolog of NCBI NO: 7485483 NR Description: hypothetical protein F14M19.180 - Arabidopsis
  misc_feature (97)..(317): Homolog of NCBI NO: 4538919 NR Description: possible apospory-associated like
  misc_feature (24)..(314): Homolog of NCBI NO: 15242099 NR Description: aldose 1-epimerase family [Arabidopsis thaliana]
  misc_feature (34)..(314): Homolog of NCBI NO: 19387263 NR Description: putative apospory-associated protein C [Oryza
  misc_feature (31)..(314): Homolog of NCBI NO: 38344152 NR Description: OSJNBa0041A02.19 [Oryza sativa (japonica
  misc_feature (31)..(314): Homolog of NCBI NO: 2501555 NR Description: POSSIBLE APOSPORY-ASSOCIATED PROTEIN C
  misc_feature (31)..(314): Homolog of NCBI NO: 40253263 NR Description: putative Aldose 1-epimerase [Oryza sativa
  misc_feature (34)..(313): Homolog of NCBI NO: 15236591 NR Description: aldose 1-epimerase family [Arabidopsis thaliana]

SEQ ID NO: 105821 - DNA, 1134 bp, Arabidopsis thaliana
  misc_feature (1)..(1134): Ceres Seq. ID no. 13618098
  misc_feature: MA Experiment ID: 20000180 Result: Up-regulated in Transcription
  misc_feature: MA Experiment 20000180 PARAMETER Experiment Name: At_Germinating_Seeds_P Parameter: Age (hr) Value: 24 vs. 0
  misc_feature: MA Experiment 20000180 PARAMETER Experiment Name: At_Germinating_Seeds_P Parameter: Tissue Value: Germinating Seeds
  misc_feature: MA Experiment ID: 20000184 Result: Up-regulated in Transcription
  misc_feature: MA Experiment 20000184 PARAMETER Experiment Name: At_Shoots__P Parameter: Age (day) Value: 7
  misc_feature: MA Experiment 20000184 PARAMETER Experiment Name: At_Shoots__P Parameter: Tissue Value: Shoots vs. Whole Plant
  misc_feature: MA Experiment ID: 20000185 Result: Down-regulated in Transcription
  misc_feature: MA Experiment 20000185 PARAMETER Experiment Name: At_Roots__P Parameter: Age (day) Value: 7 vs. 21
  misc_feature: MA Experiment 20000185 PARAMETER Experiment Name: At_Roots__P Parameter: Organism Value: A. thaliana
  misc_feature: MA Experiment 20000185 PARAMETER Experiment Name: At_Roots__P Parameter: Tissue Value: Roots vs. Whole Plant
  misc_feature: MA Experiment ID: 20000264 Result: Up-regulated in Transcription
  misc_feature: MA Experiment 20000264 PARAMETER Experiment Name: At_Open_Flower_P Parameter: Age (day) Value: 21
  misc_feature: MA Experiment 20000264 PARAMETER Experiment Name: At_Open_Flower_P Parameter: Plant Line Value: WS
  misc_feature: MA Experiment 20000264 PARAMETER Experiment Name: At_Open_Flower_P Parameter: Tissue Value: Open Flower vs. Whole Plant
  misc_feature: MA Experiment ID: 20000267 Result: Down-regulated in Transcription
  misc_feature: MA Experiment 20000267 PARAMETER Experiment Name: At_Drought_P Parameter: Age (day) Value: 7
  misc_feature: MA Experiment 20000267 PARAMETER Experiment Name: At_Drought_P Parameter: Organism Value: A. thaliana
  misc_feature: MA Experiment 20000267 PARAMETER Experiment Name: At_Drought_P Parameter: Plant Line Value: WS
  misc_feature: MA Experiment 20000267 PARAMETER Experiment Name: At_Drought_P Parameter: Timepoint (hr) Value: 6
  misc_feature: MA Experiment 20000267 PARAMETER Experiment Name: At_Drought_P Parameter: Tissue Value: Whole Plant
  misc_feature: MA Experiment 20000267 PARAMETER Experiment Name: At_Drought_P Parameter: Treatment Value: Drought vs. No Drought
  misc_feature: MA Experiment ID: 20000286 Result: Up-regulated in Transcription
  misc_feature: MA Experiment 20000286 PARAMETER Experiment Name: At_Open_Flower_P Parameter: Age (day) Value: 21
  misc_feature: MA Experiment 20000286 PARAMETER Experiment Name: At_Open_Flower_P Parameter: Plant Line Value: WS
  misc_feature: MA Experiment 20000286 PARAMETER Experiment Name: At_Open_Flower_P Parameter: Tissue Value: Half Open vs. Whole Plant
  misc_feature: MA Experiment ID: 20000436 Result: Down-regulated in Transcription
  misc_feature: MA Experiment 20000436 PARAMETER Experiment Name: At_Drought_P Parameter: Age (day) Value: 7
  misc_feature: MA Experiment 20000436 PARAMETER Experiment Name: At_Drought_P Parameter: Organism Value: A. thaliana
  misc_feature: MA Experiment 20000436 PARAMETER Experiment Name: At_Drought_P Parameter: Plant Line Value: WS
  misc_feature: MA Experiment 20000436 PARAMETER Experiment Name: At_Drought_P Parameter: Timepoint (hr) Value: 12
  misc_feature: MA Experiment 20000436 PARAMETER Experiment Name: At_Drought_P Parameter: Tissue Value: Whole Plant
  misc_feature: MA Experiment 20000436 PARAMETER Experiment Name: At_Drought_P Parameter: Treatment Value: Drought vs. No Drought
  misc_feature: MA Experiment ID: 20000437 Result: Down-regulated in Transcription
  misc_feature: MA Experiment 20000437 PARAMETER Experiment Name: At_Drought_P Parameter: Age (day) Value: 8
  misc_feature: MA Experiment 20000437 PARAMETER Experiment Name: At_Drought_P Parameter: Organism Value: A. thaliana
  misc_feature: MA Experiment 20000437 PARAMETER Experiment Name: At_Drought_P Parameter: Plant Line Value: WS
  misc_feature: MA Experiment 20000437 PARAMETER Experiment Name: At_Drought_P Parameter: Timepoint (hr) Value: 24
  misc_feature: MA Experiment 20000437 PARAMETER Experiment Name: At_Drought_P Parameter: Tissue Value: Whole Plant
  misc_feature: MA Experiment 20000437 PARAMETER Experiment Name: At_Drought_P Parameter: Treatment Value: Drought vs. No Drought
  misc_feature: MA Experiment ID: 20000438 Result: Up-regulated in Transcription
  misc_feature: MA Experiment 20000438 PARAMETER Experiment Name: At_Shoots__P Parameter: Age (day) Value: 14
  misc_feature: MA Experiment 20000438 PARAMETER Experiment Name: At_Shoots__P Parameter: Tissue Value: Shoots vs. Whole Plant
  misc_feature: MA Experiment ID: 20000439 Result: Down-regulated in Transcription
  misc_feature: MA Experiment 20000439 PARAMETER Experiment Name: At_Roots__P Parameter: Age (day) Value: 14 vs. 21
  misc_feature: MA Experiment 20000439 PARAMETER Experiment Name: At_Roots__P Parameter: Organism Value: A. thaliana
  misc_feature: MA Experiment 20000439 PARAMETER Experiment Name: At_Roots__P Parameter: Tissue Value: Roots vs. Whole Plant
  misc_feature: MA Experiment ID: 20000443 Result: Up-regulated in Transcription
  misc_feature: MA Experiment 20000443 PARAMETER Experiment Name: At_1uM_BR-BRZ__P Parameter: Tissue Value: Shoot Apices
  misc_feature: MA Experiment 20000443 PARAMETER Experiment Name: At_1uM_BR-BRZ__P Parameter: Treatment Value: 1uM BRZ vs. No Treatment
  misc_feature: MA Experiment ID: 20000455 Result: Up-regulated in Transcription
  misc_feature: MA Experiment 20000455 PARAMETER Experiment Name: At_100uM_ABA_P Parameter: Age (day) Value: 16
  misc_feature: MA Experiment 20000455 PARAMETER Experiment Name: At_100uM_ABA_P Parameter: Organism Value: A. thaliana
  misc_feature: MA Experiment 20000455 PARAMETER Experiment Name: At_100uM_ABA_P Parameter: Plant Line Value: WS
  misc_feature: MA Experiment 20000455 PARAMETER Experiment Name: At_100uM_ABA_P Parameter: Timepoint (hr) Value: 48
  misc_feature: MA Experiment 20000455 PARAMETER Experiment Name: At_100uM_ABA_P Parameter: Tissue Value: Aerial
  misc_feature: MA Experiment 20000455 PARAMETER Experiment Name: At_100uM_ABA_P Parameter: Treatment Value: 100uM ABA vs. No Treatment
  misc_feature: MA Experiment ID: 20000495 Result: Down-regulated in Transcription
  misc_feature: MA Experiment 20000495 PARAMETER Experiment Name: At_Guard_Cells_P Parameter: Harvest Date Value: 8/2/2002
  misc_feature: MA Experiment 20000495 PARAMETER Experiment Name: At_Guard_Cells_P Parameter: Organism Value: A. thaliana
  misc_feature: MA Experiment 20000495 PARAMETER Experiment Name: At_Guard_Cells_P Parameter: Tissue Value: Guard Cells vs. Leaves
  misc_feature: MA Experiment ID: 20000527 Result: Down-regulated in Transcription
  misc_feature: MA Experiment 20000527 PARAMETER Experiment Name: At_10percent_PEG_P Parameter: Age (day) Value: 20
  misc_feature: MA Experiment 20000527 PARAMETER Experiment Name: At_10percent_PEG_P Parameter: Organism Value: A. thaliana
  misc_feature: MA Experiment 20000527 PARAMETER Experiment Name: At_10percent_PEG_P Parameter: Plant Line Value: WS
  misc_feature: MA Experiment 20000527 PARAMETER Experiment Name: At_10percent_PEG_P Parameter: Timepoint (day) Value: 20
  misc_feature: MA Experiment 20000527 PARAMETER Experiment Name: At_10percent_PEG_P Parameter: Tissue Value: Whole Plant
  misc_feature: MA Experiment 20000527 PARAMETER Experiment Name: At_10percent_PEG_P Parameter: Treatment Value: 10percent PEG vs. No Treatment
  misc_feature: MA Experiment ID: 20000573 Result: Down-regulated in Transcription
  misc_feature: MA Experiment 20000573 PARAMETER Experiment Name: At_100uM_ABA_Mutants__P Parameter: Organism Value: A. thaliana
  misc_feature: MA Experiment 20000573 PARAMETER Experiment Name: At_100uM_ABA_Mutants__P Parameter: Plant Line Value: CS22 vs. Ler wt
  misc_feature: MA Experiment 20000573 PARAMETER Experiment Name: At_100uM_ABA_Mutants__P Parameter: Timepoint (hr) Value: N/A
  misc_feature: MA Experiment 20000573 PARAMETER Experiment Name: At_100uM_ABA_Mutants__P Parameter: Tissue Value: Whole Plant
  misc_feature: MA Experiment 20000573 PARAMETER Experiment Name: At_100uM_ABA_Mutants__P Parameter: Treatment Value: None
  misc_feature: MA Experiment ID: 20000794 Result: Up-regulated in Transcription
  misc_feature: MA Experiment 20000794 PARAMETER Experiment Name: At_Petals_P Parameter: Age (day) Value: 23-25 days
  misc_feature: MA Experiment 20000794 PARAMETER Experiment Name: At_Petals_P Parameter: Plant Line Value: WS
  misc_feature: MA Experiment 20000794 PARAMETER Experiment Name: At_Petals_P Parameter: Tissue Value: Petals vs. Whole plant
  misc_feature: MA Experiment ID: 20001248 Result: Down-regulated in Transcription
  misc_feature: MA Experiment 20001248 PARAMETER Experiment Name: At_Far-red-induction_P Parameter: Age (day) Value: 7
  misc_feature: MA Experiment 20001248 PARAMETER Experiment Name: At_Far-red-induction_P Parameter: Light Value: Far-red vs. White
  misc_feature: MA Experiment 20001248 PARAMETER Experiment Name: At_Far-red-induction_P Parameter: Organism Value: A. thaliana
  misc_feature: MA Experiment 20001248 PARAMETER Experiment Name: At_Far-red-induction_P Parameter: Plant Line Value: Columbia
  misc_feature: MA Experiment 20001248 PARAMETER Experiment Name: At_Far-red-induction_P Parameter: Timepoint (hr) Value: 4
  misc_feature: MA Experiment 20001248 PARAMETER Experiment Name: At_Far-red-induction_P Parameter: Tissue Value: Whole Plant
  misc_feature: MA Experiment ID: 20001450 Result: Down-regulated in Transcription
  misc_feature: MA Experiment 20001450 PARAMETER Experiment Name: At_Far-red-induction_P Parameter: Age (day) Value: 7
  misc_feature: MA Experiment 20001450 PARAMETER Experiment Name: At_Far-red-induction_P Parameter: Light Value: Far-red vs. White
  misc_feature: MA Experiment 20001450 PARAMETER Experiment Name: At_Far-red-induction_P Parameter: Organism Value: A. thaliana
  misc_feature: MA Experiment 20001450 PARAMETER Experiment Name: At_Far-red-induction_P Parameter: Plant Line Value: Columbia
  misc_feature: MA Experiment 20001450 PARAMETER Experiment Name: At_Far-red-induction_P Parameter: Timepoint (hr) Value: 8
  misc_feature: MA Experiment 20001450 PARAMETER Experiment Name: At_Far-red-induction_P Parameter: Tissue Value: Whole Plant
  misc_feature: MA Experiment ID: 20001451 Result: Down-regulated in Transcription
  misc_feature: MA Experiment 20001451 PARAMETER Experiment Name: At_Far-red-induction_P Parameter: Age (day) Value: 7
  misc_feature: MA Experiment 20001451 PARAMETER Experiment Name: At_Far-red-induction_P Parameter: Light Value: Far-red vs. White
  misc_feature: MA Experiment 20001451 PARAMETER Experiment Name: At_Far-red-induction_P Parameter: Organism Value: A. thaliana
  misc_feature: MA Experiment 20001451 PARAMETER Experiment Name: At_Far-red-induction_P Parameter: Plant Line Value: Columbia
  misc_feature: MA Experiment 20001451 PARAMETER Experiment Name: At_Far-red-induction_P Parameter: Timepoint (hr) Value: 24
  misc_feature: MA Experiment 20001451 PARAMETER Experiment Name: At_Far-red-induction_P Parameter: Tissue Value: Whole Plant
  misc_feature: MA Experiment ID: 20001554 Result: Down-regulated in Transcription
  misc_feature: MA Experiment 20001554 PARAMETER Experiment Name: At_Drought_Soil_Dry_P Parameter: Age (day) Value: 21
  misc_feature: MA Experiment 20001554 PARAMETER Experiment Name: At_Drought_Soil_Dry_P Parameter: Organism Value: A. thaliana
  misc_feature: MA Experiment 20001554 PARAMETER Experiment Name: At_Drought_Soil_Dry_P Parameter: Plant Line Value: WS
  misc_feature: MA Experiment 20001554 PARAMETER Experiment Name: At_Drought_Soil_Dry_P Parameter: Post Timepoint (hr) Value: None
  misc_feature: MA Experiment 20001554 PARAMETER Experiment Name: At_Drought_Soil_Dry_P Parameter: Post-Treatment Value: None
  misc_feature: MA Experiment 20001554 PARAMETER Experiment Name: At_Drought_Soil_Dry_P Parameter: Timepoint (day) Value: 7
  misc_feature: MA Experiment 20001554 PARAMETER Experiment Name: At_Drought_Soil_Dry_P Parameter: Treatment Value: Drought vs. No Drought
  misc_feature: MA Experiment ID: 20001555 Result: Down-regulated in Transcription
  misc_feature: MA Experiment 20001555 PARAMETER Experiment Name: At_Drought_Soil_Dry_P Parameter: Age (day) Value: 24
  misc_feature: MA Experiment 20001555 PARAMETER Experiment Name: At_Drought_Soil_Dry_P Parameter: Organism Value: A. thaliana
  misc_feature: MA Experiment 20001555 PARAMETER Experiment Name: At_Drought_Soil_Dry_P Parameter: Plant Line Value: WS
  misc_feature: MA Experiment 20001555 PARAMETER Experiment Name: At_Drought_Soil_Dry_P Parameter: Post Timepoint (hr) Value: None
  misc_feature: MA Experiment 20001555 PARAMETER Experiment Name: At_Drought_Soil_Dry_P Parameter: Post-Treatment Value: None
  misc_feature: MA Experiment 20001555 PARAMETER Experiment Name: At_Drought_Soil_Dry_P Parameter: Timepoint (day) Value: 10
  misc_feature: MA Experiment 20001555 PARAMETER Experiment Name: At_Drought_Soil_Dry_P Parameter: Treatment Value: Drought vs. No Drought
  misc_feature: MA Experiment ID: 20001556 Result: Down-regulated in Transcription
  misc_feature: MA Experiment 20001556 PARAMETER Experiment Name: At_Drought_Soil_Dry_P Parameter: Age (day) Value: 26
  misc_feature: MA Experiment 20001556 PARAMETER Experiment Name: At_Drought_Soil_Dry_P Parameter: Organism Value: A. thaliana
  misc_feature: MA Experiment 20001556 PARAMETER Experiment Name: At_Drought_Soil_Dry_P Parameter: Plant Line Value: WS
  misc_feature: MA Experiment 20001556 PARAMETER Experiment Name: At_Drought_Soil_Dry_P Parameter: Post Timepoint (hr) Value: None
  misc_feature: MA Experiment 20001556 PARAMETER Experiment Name: At_Drought_Soil_Dry_P Parameter: Post-Treatment Value: None
  misc_feature: MA Experiment 20001556 PARAMETER Experiment Name: At_Drought_Soil_Dry_P Parameter: Timepoint (day) Value: 12
  misc_feature: MA Experiment 20001556 PARAMETER Experiment Name: At_Drought_Soil_Dry_P Parameter: Treatment Value: Drought vs. No Drought
  misc_feature: MA Experiment ID: 20001559 Result: Down-regulated in Transcription
  misc_feature: MA Experiment 20001559 PARAMETER Experiment Name: At_Drought_Soil_Dry_P Parameter: Age (day) Value: 28
  misc_feature: MA Experiment 20001559 PARAMETER Experiment Name: At_Drought_Soil_Dry_P Parameter: Organism Value: A. thaliana
  misc_feature: MA Experiment 20001559 PARAMETER Experiment Name: At_Drought_Soil_Dry_P Parameter: Plant Line Value: WS
  misc_feature: MA Experiment 20001559 PARAMETER Experiment Name: At_Drought_Soil_Dry_P Parameter: Post Timepoint (hr) Value: 29
  misc_feature: MA Experiment 20001559 PARAMETER Experiment Name: At_Drought_Soil_Dry_P Parameter: Post-Treatment Value: Re-Water vs. No Drought
  misc_feature: MA Experiment 20001559 PARAMETER Experiment Name: At_Drought_Soil_Dry_P Parameter: Timepoint (day) Value: 14
  misc_feature: MA Experiment 20001559 PARAMETER Experiment Name: At_Drought_Soil_Dry_P Parameter: Treatment Value: Drought vs. No Drought
  misc_feature: MA Experiment ID: 20001905 Result: Down-regulated in Transcription
  misc_feature: MA Experiment 20001905 PARAMETER Experiment Name: At_Drought_Reproduction_P Parameter: Age (day) Value: 40
  misc_feature: MA Experiment 20001905 PARAMETER Experiment Name: At_Drought_Reproduction_P Parameter: Organism Value: A. thaliana
  misc_feature: MA Experiment 20001905 PARAMETER Experiment Name: At_Drought_Reproduction_P Parameter: Plant Line Value: WS
  misc_feature: MA Experiment 20001905 PARAMETER Experiment Name: At_Drought_Reproduction_P Parameter: Timepoint (day) Value: 10
  misc_feature: MA Experiment 20001905 PARAMETER Experiment Name: At_Drought_Reproduction_P Parameter: Tissue Value: Rosettes
  misc_feature: MA Experiment 20001905 PARAMETER Experiment Name: At_Drought_Reproduction_P Parameter: Treatment Value: Drought vs. No Drought
  misc_feature: MA Experiment ID: 20001906 Result: Down-regulated in Transcription
  misc_feature: MA Experiment 20001906 PARAMETER Experiment Name: At_Drought_Reproduction_P Parameter: Age (day) Value: 35
  misc_feature: MA Experiment 20001906 PARAMETER Experiment Name: At_Drought_Reproduction_P Parameter: Organism Value: A. thaliana
  misc_feature: MA Experiment 20001906 PARAMETER Experiment Name: At_Drought_Reproduction_P Parameter: Plant Line Value: WS
  misc_feature: MA Experiment 20001906 PARAMETER Experiment Name: At_Drought_Reproduction_P Parameter: Timepoint (day) Value: 5
  misc_feature: MA Experiment 20001906 PARAMETER Experiment Name: At_Drought_Reproduction_P Parameter: Tissue Value: Siliques
  misc_feature: MA Experiment 20001906 PARAMETER Experiment Name: At_Drought_Reproduction_P Parameter: Treatment Value: Drought vs. No Drought
  misc_feature: MA Experiment ID: 20001908 Result: Down-regulated in Transcription
  misc_feature: MA Experiment 20001908 PARAMETER Experiment Name: At_Drought_Reproduction_P Parameter: Age (day) Value: 40
  misc_feature: MA Experiment 20001908 PARAMETER Experiment Name: At_Drought_Reproduction_P Parameter: Organism Value: A. thaliana
  misc_feature: MA Experiment 20001908 PARAMETER Experiment Name: At_Drought_Reproduction_P Parameter: Plant Line Value: WS
  misc_feature: MA Experiment 20001908 PARAMETER Experiment Name: At_Drought_Reproduction_P Parameter: Timepoint (day) Value: 10
  misc_feature: MA Experiment 20001908 PARAMETER Experiment Name: At_Drought_Reproduction_P Parameter: Tissue Value: Siliques
  misc_feature: MA Experiment 20001908 PARAMETER Experiment Name: At_Drought_Reproduction_P Parameter: Treatment Value: Drought vs. No Drought
  misc_feature: MA Experiment ID: 20001911 Result: Down-regulated in Transcription
  misc_feature: MA Experiment 20001911 PARAMETER Experiment Name: At_Drought_Reproduction_P Parameter: Age (day) Value: 40
  misc_feature: MA Experiment 20001911 PARAMETER Experiment Name: At_Drought_Reproduction_P Parameter: Organism Value: A. thaliana
  misc_feature: MA Experiment 20001911 PARAMETER Experiment Name: At_Drought_Reproduction_P Parameter: Plant Line Value: WS
  misc_feature: MA Experiment 20001911 PARAMETER Experiment Name: At_Drought_Reproduction_P Parameter: Timepoint (day) Value: 10
  misc_feature: MA Experiment 20001911 PARAMETER Experiment Name: At_Drought_Reproduction_P Parameter: Tissue Value: Flowers
  misc_feature: MA Experiment 20001911 PARAMETER Experiment Name: At_Drought_Reproduction_P Parameter: Treatment Value: Drought vs. No Drought
acaaactcatcatcataagcaacaatggtggtgtcactcttctcttccagaaatgttttctatacgttaagcttatgcttatttgcagcattataccagccggttatgagtagaccggctaagtttgaagatgactttaggatcgcatggtccgatactcatatcactcaaattgacggaggcagagccattcagctcaaattggaccctagctcaggatgtggatttgcttcgaagaagcaatacttgttcggccgtgtgagcatgaaaatcaaactgatccccggtgattctgccgggactgtcactgccttctacatgaattcagataccgattcggtacgagacgagcttgattttgagttcttaggaaatcgaagtggacaaccttacacagtgcaaaccaatgtgtttgctcatggtaaaggcgatagagagcaaagagttaacctttggttcgacccttctcgtgatttccacgaatatgccatctcatggaaccatctccgtattgtcttctacgtagacaatgtgcccatcagggtttacaagaacaatgaggcaaggaaagtaccatacccaagattccaaccaatgggtgtatattccacgttatgggaagccgatgattgggcgacacgtggaggaatagagaaaatcaattggtcgagagcgccattttatgcttattacaaagattttgatatagaaggatgtccggttccaggacccgcagattgtcccgctaattcgaagaattggtgggaaggcagtgcgtaccaccagttgagtccggtggaagctcgaagttatagatgggtccgagtgaaccatatggtctacgattattgcactgacaaatctcgttttcctgttccacctccagaatgctcggctggaatctgatccaaacattattgtcttaaaagcaaaacaagtgcgaagtggttccataagcaacgttgcaatgtatgtgaagtgattaatgagtcttgtggtatgtggtgaattgctcataatcgatctgattgtggtcaaatgttcatatatatatgtatatctttgaattttactttgttttcatgatgtcttatgttttgttgatctattgaagagaaccatgtttgtttgttg

SEQ ID NO: 105822 - protein, 293 aa, Arabidopsis thaliana; identical to SEQ ID NO: 42261
  peptide (1)..(293): Ceres Seq. ID no. 13618099
  misc_feature (34)..(216): Pfam Name: Glycosyl hydrolases family 16 Pfam Description: Glycosyl hydrolases family 16
  misc_feature (1)..(293): Homolog of NCBI NO: 15235714 NR Description: xyloglucan endotransglycosylase, putative
  misc_feature (1)..(293): Homolog of NCBI NO: 21553421 NR Description: endo-xyloglucan transferase-like protein
  misc_feature (15)..(289): Homolog of NCBI NO: 7447418 NR Description: probable endo-xyloglucan transferase - upland
  misc_feature (9)..(289): Homolog of NCBI NO: 30841326 NR Description: xyloglucan endotransglycosylase [Gossypium
  misc_feature (14)..(291): Homolog of NCBI NO: 18424986 NR Description: xyloglucan endotransglycosylase, putative thaliana] >gi|15982913|gb|AAL09803.1| AT5g65730/MPA24_8 thaliana] >gi|20334766|gb|AAM16244.1| AT5g65730/MPA24_8
  misc_feature (14)..(291): Homolog of NCBI NO: 21537188 NR Description: xyloglucan endo-transglycosylase-like protein
  misc_feature (27)..(291): Homolog of NCBI NO: 7447407 NR Description: xyloglucan endo-1,4-beta-D-glucanase (EC 3.2.1.-)
  misc_feature (27)..(293): Homolog of NCBI NO: 5070246 NR Description: xyloglucan endo-transglycosylase-like protein
  misc_feature (15)..(289): Homolog of NCBI NO: 950299 NR Description: xyloglucan endotransglycosylase precursor
  misc_feature (7)..(290): Homolog of NCBI NO: 3043422 NR Description: endoxyloglucan transferase [Cicer arietinum]

SEQ ID NO: 105823 - protein, 266 aa, Arabidopsis thaliana; identical to SEQ ID NO: 42262
  peptide (1)..(266): Ceres Seq. ID no. 13618100
  misc_feature (7)..(189): Pfam Name: Glycosyl hydrolases family 16 Pfam Description: Glycosyl hydrolases family 16
  misc_feature (1)..(266): Homolog of NCBI NO: 15235714 NR Description: xyloglucan endotransglycosylase, putative
  misc_feature (1)..(266): Homolog of NCBI NO: 21553421 NR Description: endo-xyloglucan transferase-like protein
  misc_feature (1)..(262): Homolog of NCBI NO: 7447418 NR Description: probable endo-xyloglucan transferase - upland
  misc_feature (1)..(262): Homolog of NCBI NO: 30841326 NR Description: xyloglucan endotransglycosylase [Gossypium
  misc_feature (1)..(264): Homolog of NCBI NO: 18424986 NR Description: xyloglucan endotransglycosylase, putative thaliana] >gi|15982913|gb|AAL09803.1| AT5g65730/MPA24_8 thaliana] >gi|20334766|gb|AAM16244.1| AT5g65730/MPA24_8
  misc_feature (1)..(264): Homolog of NCBI NO: 21537188 NR Description: xyloglucan endo-transglycosylase-like protein
  misc_feature (1)..(264): Homolog of NCBI NO: 7447407 NR Description: xyloglucan endo-1,4-beta-D-glucanase (EC 3.2.1.-)
  misc_feature (1)..(266): Homolog of NCBI NO: 5070246 NR Description: xyloglucan endo-transglycosylase-like protein
  misc_feature (1)..(262): Homolog of NCBI NO: 950299 NR Description: xyloglucan endotransglycosylase precursor
  misc_feature (1)..(263): Homolog of NCBI NO: 3043422 NR Description: endoxyloglucan transferase [Cicer arietinum]

SEQ ID NO: 105824 - protein, 213 aa, Arabidopsis thaliana; identical to SEQ ID NO: 42263
  peptide (1)..(213): Ceres Seq. ID no. 13618101
  misc_feature (1)..(136): Pfam Name: Glycosyl hydrolases family 16 Pfam Description: Glycosyl hydrolases family 16
  misc_feature (1)..(213): Homolog of NCBI NO: 15235714 NR Description: xyloglucan endotransglycosylase, putative
  misc_feature (1)..(213): Homolog of NCBI NO: 21553421 NR Description: endo-xyloglucan transferase-like protein
  misc_feature (1)..(209): Homolog of NCBI NO: 7447418 NR Description: probable endo-xyloglucan transferase - upland
  misc_feature (1)..(209): Homolog of NCBI NO: 30841326 NR Description: xyloglucan endotransglycosylase [Gossypium
  misc_feature (1)..(211): Homolog of NCBI NO: 18424986 NR Description: xyloglucan endotransglycosylase, putative thaliana] >gi|15982913|gb|AAL09803.1| AT5g65730/MPA24_8 thaliana] >gi|20334766|gb|AAM16244.1| AT5g65730/MPA24_8
  misc_feature (1)..(211): Homolog of NCBI NO: 21537188 NR Description: xyloglucan endo-transglycosylase-like protein
  misc_feature (1)..(211): Homolog of NCBI NO: 7447407 NR Description: xyloglucan endo-1,4-beta-D-glucanase (EC 3.2.1.-)
  misc_feature (1)..(213): Homolog of NCBI NO: 5070246 NR Description: xyloglucan endo-transglycosylase-like protein
  misc_feature (1)..(209): Homolog of NCBI NO: 950299 NR Description: xyloglucan endotransglycosylase precursor
  misc_feature (1)..(210): Homolog of NCBI NO: 3043422 NR Description: endoxyloglucan transferase [Cicer arietinum]

SEQ ID NO: 105825 - DNA, 1334 bp, Arabidopsis thaliana
  misc_feature (1)..(1334): Ceres Seq. ID no. 13618105
  misc_feature: MA Experiment ID: 108594 Result: Down-regulated in Transcription
  misc_feature: MA Experiment 108594 PARAMETER Experiment Name: At_Ler-rhl_Root_cDNA_P Parameter: Plant Line Value: null
  misc_feature: MA Experiment ID: 108595 Result: Down-regulated in Transcription
  misc_feature: MA Experiment 108595 PARAMETER Experiment Name: At_Ler-pi_Ovule_cDNA_P Parameter: Plant Line Value: null
  misc_feature: MA Experiment ID: 20000495 Result: Down-regulated in Transcription
  misc_feature: MA Experiment 20000495 PARAMETER Experiment Name: At_Guard_Cells_P Parameter: Harvest Date Value: 8/2/2002
  misc_feature: MA Experiment 20000495 PARAMETER Experiment Name: At_Guard_Cells_P Parameter: Organism Value: A. thaliana
  misc_feature: MA Experiment 20000495 PARAMETER Experiment Name: At_Guard_Cells_P Parameter: Tissue Value: Guard Cells vs. Leaves
aacgaaaaacaaaaaaaaaaagacagaagacaaaaaaaaatcacgaaatctgattttcctctcttttgctcgaagccaagtctctgcttttactttgatccaccaacttcatcttcaacctctcgattttaggtaagattcttagagtgattttgacttatctaagaatggagctaaagagcattaaggatgcgtttgatcgtgttgcgacgaagcagaagctctcttatagcaaaactaatgagattgttcatatgttgtctcaagaaatcgataaggctttgagcatattagaggagacaccatcatcagatactatgcttcttgatcatagatctatcctcgctgatgtgaagaaagtgtttatggagattgctccaatcactcaacttgaagctactgagaaagagctacatgcggctttgaccaagtaccctaaagttcttgagaaacagctgaatccagacatatcaaaggcttatagacacaatgttgagtttgatactcatatcgttaaccagattatcgccaactttttctaccgtcaaggaatgtttgacattggtgactgttttgttgctgaaactggtgaatctgaatgttctacaagacaatctttcgtggagatgtatcggatactagaagctatgaagagacgagatcttgaaccggctcttaattgggctgtttcgaactctgacaaactaaaggaagcaaggtctgatcttgagatgaagcttcatagtctacactttctggaaatagcacgaggcaaaaactccaaagaagctatcgactatgcgagaaagcatatcgccacgtttgcagatagctgcctcccggagatccagaagctcatgtgttctctcttatggaacagaaaactcgataaatcaccatactccgagtttctctcccccgctctgtggaacaatgcagtcaaagagctaacccgacagtactgcaacctactcggtgaatcatctgaaagcccgttgagtataacagtaacagcgggcacacaagcgttaccagtactattgaaatacatgaacgtggtgatggcgaataagaagcttgattggcagaccatggaacaacttcctgttgatgcgcaactatccgaggagtttcagtttcattcggtgtttgtctgtccagtctctaaagaacagtcaagtgatgataaccctccgatgatgatgtcttgtggacatgtgctttgcaagcagacgatcaacaaaatgtcaaagaatggctctaagtcgtcgttcaagtgtccttattgcccaaccgatgtagacatctcaaggtgtaggcagttgcacttttga

SEQ ID NO: 105826 - protein, 388 aa, Arabidopsis thaliana
  peptide (1)..(388): Ceres Seq. ID no. 13618106
  misc_feature (1)..(388): Homolog of NCBI NO: 15235735 NR Description: expressed protein [Arabidopsis thaliana]
  misc_feature (1)..(388): Homolog of NCBI NO: 21593562 NR Description: unknown [Arabidopsis thaliana]
  misc_feature (1)..(388): Homolog of NCBI NO: 18400050 NR Description: expressed protein [Arabidopsis thaliana]
  misc_feature (5)..(388): Homolog of NCBI NO: 15242463 NR Description: expressed protein [Arabidopsis thaliana]
  misc_feature (1)..(388): Homolog of NCBI NO: 28829262 NR Description: similar to Arabidopsis thaliana (Mouse-ear
  misc_feature (72)..(388): Homolog of NCBI NO: 12232469 NR Description: hypothetical protein FLJ13910 [Homo sapiens] hypothetical protein, clone MTA.D02.090 [Mus musculus] unnamed protein product [Homo sapiens]
  misc_feature (72)..(388): Homolog of NCBI NO: 10434433 NR Description: unnamed protein product [Homo sapiens]
  misc_feature (72)..(388): Homolog of NCBI NO: 31044429 NR Description: hypothetical protein MGC59617 [Mus musculus]
  misc_feature (4)..(388): Homolog of NCBI NO: 37590378 NR Description: Unknown (protein for MGC:73277) [Danio rerio]
  misc_feature (26)..(220): Homolog of NCBI NO: 27670796 NR Description: similar to RIKEN cDNA 0610039K22 [Mus musculus] norvegicus] >gi|27670802|ref|XP_220396.1| similar to RIKEN cDNA
MELKSIKDAFDRVATKQKLSYSKTNEIVHMLSQEIDKALSILEETPSSDTMLLDHRSILADVKKVFMEIAPITQLEATEKELHAALTKYPKVLEKQLNPDISKAYRHNVEFDTHIVNQIIANFFYRQGMFDIGDCFVAETGESECSTRQSFVEMYRILEAMKRRDLEPALNWAVSNSDKLKEARSDLEMKLHSLHFLEIARGKNSKEAIDYARKHIATFADSCLPEIQKLMCSLLWNRKLDKSPYSEFLSPALWNNAVKELTRQYCNLLGESSESPLSITVTAGTQALPVLLKYMNVVMANKKLDWQTMEQLPVDAQLSEEFQFHSVFVCPVSKEQSSDDNPPMMMSCGHVLCKQTINKMSKNGSKSSFKCPYCPTDVDISRCRQLHF

SEQ ID NO: 105827 - protein, 359 aa, Arabidopsis thaliana
  peptide (1)..(359): Ceres Seq. ID no. 13618107
  misc_feature (1)..(359): Homolog of NCBI NO: 15235735 NR Description: expressed protein [Arabidopsis thaliana]
  misc_feature (1)..(359): Homolog of NCBI NO: 21593562 NR Description: unknown [Arabidopsis thaliana]
  misc_feature (1)..(359): Homolog of NCBI NO: 18400050 NR Description: expressed protein [Arabidopsis thaliana]
  misc_feature (1)..(359): Homolog of NCBI NO: 15242463 NR Description: expressed protein [Arabidopsis thaliana]
  misc_feature (1)..(359): Homolog of NCBI NO: 28829262 NR Description: similar to Arabidopsis thaliana (Mouse-ear
  misc_feature (43)..(359): Homolog of NCBI NO: 12232469 NR Description: hypothetical protein FLJ13910 [Homo sapiens] hypothetical protein, clone MTA.D02.090 [Mus musculus] unnamed protein product [Homo sapiens]
  misc_feature (43)..(359): Homolog of NCBI NO: 10434433 NR Description: unnamed protein product [Homo sapiens]
  misc_feature (43)..(359): Homolog of NCBI NO: 31044429 NR Description: hypothetical protein MGC59617 [Mus musculus]
  misc_feature (1)..(359): Homolog of NCBI NO: 37590378 NR Description: Unknown (protein for MGC:73277) [Danio rerio]
  misc_feature (1)..(191): Homolog of NCBI NO: 27670796 NR Description: similar to RIKEN cDNA 0610039K22 [Mus musculus] norvegicus] >gi|27670802|ref|XP_220396.1| similar to RIKEN cDNA
MLSQEIDKALSILEETPSSDTMLLDHRSILADVKKVFMEIAPITQLEATEKELHAALTKYPKVLEKQLNPDISKAYRHNVEFDTHIVNQIIANFFYRQGMFDIGDCFVAETGESECSTRQSFVEMYRILEAMKRRDLEPALNWAVSNSDKLKEARSDLEMKLHSLHFLEIARGKNSKEAIDYARKHIATFADSCLPEIQKLMCSLLWNRKLDKSPYSEFLSPALWNNAVKELTRQYCNLLGESSESPLSITVTAGTQALPVLLKYMNVVMANKKLDWQTMEQLPVDAQLSEEFQFHSVFVCPVSKEQSSDDNPPMMMSCGHVLCKQTINKMSKNGSKSSFKCPYCPTDVDISRCRQLHF

SEQ ID NO: 105828 - protein, 338 aa, Arabidopsis thaliana
  peptide (1)..(338): Ceres Seq. ID no. 13618108
  misc_feature (1)..(338): Homolog of NCBI NO: 15235735 NR Description: expressed protein [Arabidopsis thaliana]
  misc_feature (1)..(338): Homolog of NCBI NO: 21593562 NR Description: unknown [Arabidopsis thaliana]
  misc_feature (1)..(338): Homolog of NCBI NO: 18400050 NR Description: expressed protein [Arabidopsis thaliana]
  misc_feature (1)..(338): Homolog of NCBI NO: 15242463 NR Description: expressed protein [Arabidopsis thaliana]
  misc_feature (1)..(338): Homolog of NCBI NO: 28829262 NR Description: similar to Arabidopsis thaliana (Mouse-ear
  misc_feature (22)..(338): Homolog of NCBI NO: 12232469 NR Description: hypothetical protein FLJ13910 [Homo sapiens] hypothetical protein, clone MTA.D02.090 [Mus musculus] unnamed protein product [Homo sapiens]
  misc_feature (22)..(338): Homolog of NCBI NO: 10434433 NR Description: unnamed protein product [Homo sapiens]
  misc_feature (22)..(338): Homolog of NCBI NO: 31044429 NR Description: hypothetical protein MGC59617 [Mus musculus]
  misc_feature (1)..(338): Homolog of NCBI NO: 37590378 NR Description: Unknown (protein for MGC:73277) [Danio rerio]
  misc_feature (1)..(170): Homolog of NCBI NO: 27670796 NR Description: similar to RIKEN cDNA 0610039K22 [Mus musculus] norvegicus] >gi|27670802|ref|XP_220396.1| similar to RIKEN cDNA
MLLDHRSILADVKKVFMEIAPITQLEATEKELHAALTKYPKVLEKQLNPDISKAYRHNVEFDTHIVNQIIANFFYRQGMFDIGDCFVAETGESECSTRQSFVEMYRILEAMKRRDLEPALNWAVSNSDKLKEARSDLEMKLHSLHFLEIARGKNSKEAIDYARKHIATFADSCLPEIQKLMCSLLWNRKLDKSPYSEFLSPALWNNAVKELTRQYCNLLGESSESPLSITVTAGTQALPVLLKYMNVVMANKKLDWQTMEQLPVDAQLSEEFQFHSVFVCPVSKEQSSDDNPPMMMSCGHVLCKQTINKMSKNGSKSSFKCPYCPTDVDISRCRQLHF

SEQ ID NO: 105829 - DNA, 1783 bp, Arabidopsis thaliana
  misc_feature (1)..(1783): Ceres Seq. ID no. 13618113
  misc_feature: MA Experiment ID: 108434 Result: Down-regulated in Transcription
  misc_feature: MA Experiment 108434 PARAMETER Experiment Name: At_Root_Tips_cDNA_P Parameter: Tissue Value: Root Tips
  misc_feature: MA Experiment ID: 108435 Result: Down-regulated in Transcription
  misc_feature: MA Experiment 108435 PARAMETER Experiment Name: At_stm_Mutants_cDNA_P Parameter: Plant Line Value: wt Landsburg vs stm
  misc_feature: MA Experiment 108435 PARAMETER Experiment Name: At_stm_Mutants_cDNA_P Parameter: Tissue Value: Shoot Apical Meristem Region
  misc_feature: MA Experiment ID: 108461 Result: Up-regulated in Transcription
  misc_feature: MA Experiment 108461 PARAMETER Experiment Name: At_Germinating_Seeds_cDNA_P Parameter: Age (day) Value: 1 vs. 0
  misc_feature: MA Experiment 108461 PARAMETER Experiment Name: At_Germinating_Seeds_cDNA_P Parameter: Tissue Value: Germinating Seeds
  misc_feature: MA Experiment ID: 108462 Result: Up-regulated in Transcription
  misc_feature: MA Experiment 108462 PARAMETER Experiment Name: At_Germinating_Seeds_cDNA_P Parameter: Age (day) Value: 2 vs. 0
  misc_feature: MA Experiment 108462 PARAMETER Experiment Name: At_Germinating_Seeds_cDNA_P Parameter: Tissue Value: Germinating Seeds
  misc_feature: MA Experiment ID: 108463 Result: Up-regulated in Transcription
  misc_feature: MA Experiment 108463 PARAMETER Experiment Name: At_Germinating_Seeds_cDNA_P Parameter: Age (day) Value: 3 vs. 0
  misc_feature: MA Experiment 108463 PARAMETER Experiment Name: At_Germinating_Seeds_cDNA_P Parameter: Tissue Value: Germinating Seeds
  misc_feature: MA Experiment ID: 108464 Result: Up-regulated in Transcription
  misc_feature: MA Experiment 108464 PARAMETER Experiment Name: At_Germinating_Seeds_cDNA_P Parameter: Age (day) Value: 4 vs. 0
  misc_feature: MA Experiment 108464 PARAMETER Experiment Name: At_Germinating_Seeds_cDNA_P Parameter: Tissue Value: Germinating Seeds
  misc_feature: MA Experiment ID: 108488 Result: Up-regulated in Transcription
  misc_feature: MA Experiment ID: 108595 Result: Down-regulated in Transcription
  misc_feature: MA Experiment 108595 PARAMETER Experiment Name: At_Ler-pi_Ovule_cDNA_P Parameter: Plant Line Value: null
  misc_feature: MA Experiment ID: 20000087 Result: Down-regulated in Transcription
  misc_feature: MA Experiment 20000087 PARAMETER Experiment Name: At_100uM_ABA_Mutants_cDNA_P Parameter: Plant Line Value: WS
  misc_feature: MA Experiment 20000087 PARAMETER Experiment Name: At_100uM_ABA_Mutants_cDNA_P Parameter: Timepoint (hr) Value: 6
  misc_feature: MA Experiment 20000087 PARAMETER Experiment Name: At_100uM_ABA_Mutants_cDNA_P Parameter: Tissue Value: Aerial
  misc_feature: MA Experiment 20000087 PARAMETER Experiment Name: At_100uM_ABA_Mutants_cDNA_P Parameter: Treatment Value: 100uM ABA vs. No Treatment
  misc_feature: MA Experiment ID: 20000117 Result: Down-regulated in Transcription
  misc_feature: MA Experiment 20000117 PARAMETER Experiment Name: At_100uM_ABA_Mutants_cDNA_P Parameter: Plant Line Value: Columbia
  misc_feature: MA Experiment 20000117 PARAMETER Experiment Name: At_100uM_ABA_Mutants_cDNA_P Parameter: Timepoint (hr) Value: 6
  misc_feature: MA Experiment 20000117 PARAMETER Experiment Name: At_100uM_ABA_Mutants_cDNA_P Parameter: Tissue Value: Aerial
  misc_feature: MA Experiment 20000117 PARAMETER Experiment Name: At_100uM_ABA_Mutants_cDNA_P Parameter: Treatment Value: 100uM ABA vs. No Treatment
  misc_feature: MA Experiment ID: 20000180 Result: Up-regulated in Transcription
  misc_feature: MA Experiment 20000180 PARAMETER Experiment Name: At_Germinating_Seeds_P Parameter: Age (hr) Value: 24 vs. 0
  misc_feature: MA Experiment 20000180 PARAMETER Experiment Name: At_Germinating_Seeds_P Parameter: Tissue Value: Germinating Seeds
  misc_feature: MA Experiment ID: 20000185 Result: Down-regulated in Transcription
  misc_feature: MA Experiment 20000185 PARAMETER Experiment Name: At_Roots__P Parameter: Age (day) Value: 7 vs. 21
  misc_feature: MA Experiment 20000185 PARAMETER Experiment Name: At_Roots__P Parameter: Organism Value: A. thaliana
  misc_feature: MA Experiment 20000185 PARAMETER Experiment Name: At_Roots__P Parameter: Tissue Value: Roots vs. Whole Plant
  misc_feature: MA Experiment ID: 20000214 Result: Up-regulated in Transcription
  misc_feature: MA Experiment 20000214 PARAMETER Experiment Name: At_4deg_Cold_P Parameter: Timepoint (hr) Value: 6
  misc_feature: MA Experiment ID: 20000437 Result: Down-regulated in Transcription
  misc_feature: MA Experiment 20000437 PARAMETER Experiment Name: At_Drought_P Parameter: Age (day) Value: 8
  misc_feature: MA Experiment 20000437 PARAMETER Experiment Name: At_Drought_P Parameter: Organism Value: A. thaliana
  misc_feature: MA Experiment 20000437 PARAMETER Experiment Name: At_Drought_P Parameter: Plant Line Value: WS
  misc_feature: MA Experiment 20000437 PARAMETER Experiment Name: At_Drought_P Parameter: Timepoint (hr) Value: 24
  misc_feature: MA Experiment 20000437 PARAMETER Experiment Name: At_Drought_P Parameter: Tissue Value: Whole Plant
  misc_feature: MA Experiment 20000437 PARAMETER Experiment Name: At_Drought_P Parameter: Treatment Value: Drought vs. No Drought
  misc_feature: MA Experiment ID: 20000438 Result: Up-regulated in Transcription
  misc_feature: MA Experiment 20000438 PARAMETER Experiment Name: At_Shoots__P Parameter: Age (day) Value: 14
  misc_feature: MA Experiment 20000438 PARAMETER Experiment Name: At_Shoots__P Parameter: Tissue Value: Shoots vs. Whole Plant
  misc_feature: MA Experiment ID: 20000439 Result: Down-regulated in Transcription
  misc_feature: MA Experiment 20000439 PARAMETER Experiment Name: At_Roots__P Parameter: Age (day) Value: 14 vs. 21
  misc_feature: MA Experiment 20000439 PARAMETER Experiment Name: At_Roots__P Parameter: Organism Value: A. thaliana
  misc_feature: MA Experiment 20000439 PARAMETER Experiment Name: At_Roots__P Parameter: Tissue Value: Roots vs. Whole Plant
  misc_feature: MA Experiment ID: 20000495 Result: Down-regulated in Transcription
  misc_feature: MA Experiment 20000495 PARAMETER Experiment Name: At_Guard_Cells_P Parameter: Harvest Date Value: 8/2/2002
  misc_feature: MA Experiment 20000495 PARAMETER Experiment Name: At_Guard_Cells_P Parameter: Organism Value: A. thaliana
  misc_feature: MA Experiment 20000495 PARAMETER Experiment Name: At_Guard_Cells_P Parameter: Tissue Value: Guard Cells vs. Leaves
  misc_feature: MA Experiment ID: 20001450 Result: Down-regulated in Transcription
  misc_feature: MA Experiment 20001450 PARAMETER Experiment Name: At_Far-red-induction_P Parameter: Age (day) Value: 7
  misc_feature: MA Experiment 20001450 PARAMETER Experiment Name: At_Far-red-induction_P Parameter: Light Value: Far-red vs. White
  misc_feature: MA Experiment 20001450 PARAMETER Experiment Name: At_Far-red-induction_P Parameter: Organism Value: A. thaliana
  misc_feature: MA Experiment 20001450 PARAMETER Experiment Name: At_Far-red-induction_P Parameter: Plant Line Value: Columbia
  misc_feature: MA Experiment 20001450 PARAMETER Experiment Name: At_Far-red-induction_P Parameter: Timepoint (hr) Value: 8
  misc_feature: MA Experiment 20001450 PARAMETER Experiment Name: At_Far-red-induction_P Parameter: Tissue Value: Whole Plant
  misc_feature: MA Experiment ID: 20001451 Result: Down-regulated in Transcription
  misc_feature: MA Experiment 20001451 PARAMETER Experiment Name: At_Far-red-induction_P Parameter: Age (day) Value: 7
  misc_feature: MA Experiment 20001451 PARAMETER Experiment Name: At_Far-red-induction_P Parameter: Light Value: Far-red vs. White
  misc_feature: MA Experiment 20001451 PARAMETER Experiment Name: At_Far-red-induction_P Parameter: Organism Value: A. thaliana
  misc_feature: MA Experiment 20001451 PARAMETER Experiment Name: At_Far-red-induction_P Parameter: Plant Line Value: Columbia
  misc_feature: MA Experiment 20001451 PARAMETER Experiment Name: At_Far-red-induction_P Parameter: Timepoint (hr) Value: 24
  misc_feature: MA Experiment 20001451 PARAMETER Experiment Name: At_Far-red-induction_P Parameter: Tissue Value: Whole Plant
  misc_feature: MA Experiment ID: 20001557 Result: Down-regulated in Transcription
  misc_feature: MA Experiment 20001557 PARAMETER Experiment Name: At_Drought_Soil_Dry_P Parameter: Age (day) Value: 27
  misc_feature: MA Experiment 20001557 PARAMETER Experiment Name: At_Drought_Soil_Dry_P Parameter: Organism Value: A. thaliana
  misc_feature: MA Experiment 20001557 PARAMETER Experiment Name: At_Drought_Soil_Dry_P Parameter: Plant Line Value: WS
  misc_feature: MA Experiment 20001557 PARAMETER Experiment Name: At_Drought_Soil_Dry_P Parameter: Post Timepoint (hr) Value: 3
  misc_feature: MA Experiment 20001557 PARAMETER Experiment Name: At_Drought_Soil_Dry_P Parameter: Post-Treatment Value: Re-Water vs. No Drought
  misc_feature: MA Experiment 20001557 PARAMETER Experiment Name: At_Drought_Soil_Dry_P Parameter: Timepoint (day) Value: 13
  misc_feature: MA Experiment 20001557 PARAMETER Experiment Name: At_Drought_Soil_Dry_P Parameter: Treatment Value: Drought vs. No Drought
  misc_feature: MA Experiment ID: 20001560 Result: Down-regulated in Transcription
  misc_feature: MA Experiment 20001560 PARAMETER Experiment Name: At_Drought_Soil_Dry_P Parameter: Age (day) Value: 28
  misc_feature: MA Experiment 20001560 PARAMETER Experiment Name: At_Drought_Soil_Dry_P Parameter: Organism Value: A. thaliana
  misc_feature: MA Experiment 20001560 PARAMETER Experiment Name: At_Drought_Soil_Dry_P Parameter: Plant Line Value: WS
  misc_feature: MA Experiment 20001560 PARAMETER Experiment Name: At_Drought_Soil_Dry_P Parameter: Post Timepoint (hr) Value: None
  misc_feature: MA Experiment 20001560 PARAMETER Experiment Name: At_Drought_Soil_Dry_P Parameter: Post-Treatment Value: None
  misc_feature: MA Experiment 20001560 PARAMETER Experiment Name: At_Drought_Soil_Dry_P Parameter: Timepoint (day) Value: 14
  misc_feature: MA Experiment 20001560 PARAMETER Experiment Name: At_Drought_Soil_Dry_P Parameter: Treatment Value: Drought vs. No Drought
  misc_feature: MA Experiment ID: 20001905 Result: Down-regulated in Transcription
  misc_feature: MA Experiment 20001905 PARAMETER Experiment Name: At_Drought_Reproduction_P Parameter: Age (day) Value: 40
  misc_feature: MA Experiment 20001905 PARAMETER Experiment Name: At_Drought_Reproduction_P Parameter: Organism Value: A. thaliana
  misc_feature: MA Experiment 20001905 PARAMETER Experiment Name: At_Drought_Reproduction_P Parameter: Plant Line Value: WS
  misc_feature: MA Experiment 20001905 PARAMETER Experiment Name: At_Drought_Reproduction_P Parameter: Timepoint (day) Value: 10
  misc_feature: MA Experiment 20001905 PARAMETER Experiment Name: At_Drought_Reproduction_P Parameter: Tissue Value: Rosettes
  misc_feature: MA Experiment 20001905 PARAMETER Experiment Name: At_Drought_Reproduction_P Parameter: Treatment Value: Drought vs. No Drought
  misc_feature: MA Experiment ID: 20001906 Result: Down-regulated in Transcription
  misc_feature: MA Experiment 20001906 PARAMETER Experiment Name: At_Drought_Reproduction_P Parameter: Age (day) Value: 35
  misc_feature: MA Experiment 20001906 PARAMETER Experiment Name: At_Drought_Reproduction_P Parameter: Organism Value: A. thaliana
  misc_feature: MA Experiment 20001906 PARAMETER Experiment Name: At_Drought_Reproduction_P Parameter: Plant Line Value: WS
  misc_feature: MA Experiment 20001906 PARAMETER Experiment Name: At_Drought_Reproduction_P Parameter: Timepoint (day) Value: 5
  misc_feature: MA Experiment 20001906 PARAMETER Experiment Name: At_Drought_Reproduction_P Parameter: Tissue Value: Siliques
  misc_feature: MA Experiment 20001906 PARAMETER Experiment Name: At_Drought_Reproduction_P Parameter: Treatment Value: Drought vs. No Drought
  misc_feature: MA Experiment ID: 20001908 Result: Down-regulated in Transcription
  misc_feature: MA Experiment 20001908 PARAMETER Experiment Name: At_Drought_Reproduction_P Parameter: Age (day) Value: 40
  misc_feature: MA Experiment 20001908 PARAMETER Experiment Name: At_Drought_Reproduction_P Parameter: Organism Value: A. thaliana
  misc_feature: MA Experiment 20001908 PARAMETER Experiment Name: At_Drought_Reproduction_P Parameter: Plant Line Value: WS
  misc_feature: MA Experiment 20001908 PARAMETER Experiment Name: At_Drought_Reproduction_P Parameter: Timepoint (day) Value: 10
  misc_feature: MA Experiment 20001908 PARAMETER Experiment Name: At_Drought_Reproduction_P Parameter: Tissue Value: Siliques
  misc_feature: MA Experiment 20001908 PARAMETER Experiment Name: At_Drought_Reproduction_P Parameter: Treatment Value: Drought vs. No Drought
aagataaacccaattttgttatttttgttctctcttctctctcgttcatgtttcaaatctgtttctagggtttcacaaaccagagatagagagaggtttagcgaaaaatggcgatggccatggctcttcgaaggctttcttcttcaattgacaaacccattcgtcctcttattcgatccacttcatgttacatgtcttctttgcccagtgaagctgttgatgagaaggaaagatctcgtgtcacttggccaaaacagcttaacgcacctttagaggaggttgatcctgagattgctgacattattgagcatgagaaagctagacaatggaagggacttgaacttattccatctgagaacttcacatctgtgtcggtgatgcaagctgttgggtctgtcatgactaacaaatacagtgaaggctatcctggtgccagatactatggaggaaatgagtatatagacatggcagaaaccttatgccagaagcgcgctcttgaagctttccggttagatcctgaaaagtggggagtgaatgttcaacctttgtctggatctcctgccaacttccatgtgtacactgcattgttaaagcctcatgaaagaatcatggcacttgatcttcctcatggtggtcatctttctcatggttatcagactgacaccaagaagatatcagctgtgtctatcttctttgaaacaatgccctatagattggacgagagcactggctacatcgactacgatcagatggagaaaagtgctactcttttcaggccaaaattgattgttgctggtgcaagtgcttatgctagattgtatgactatgcccgcatcagaaaggtctgtaacaagcaaaaagctgtaatgctagcagatatggcacacatcagtggtttggttgctgctaatgtaatcccttcaccgttcgactatgctgatgttgtaaccaccacaactcacaagtcacttcgtggaccccgtggagccatgattttcttcagaaagggtgttaaggaaattaacaagcaagggaaagaggttttgtatgattttgaagacaagatcaaccaagctgtcttccctggtcttcaaggtggtccacacaaccacactatcacaggactagctgttgctttgaaacaggcaactacttcagagtacaaagcataccaagaacaagtcctgagtaacagtgcaaagtttgctcagactctaatggagagaggatatgaacttgtttctggtggaactgacaaccatctggttctagtgaatctaaagcccaagggaattgatggatctagagttgagaaagtgttggaagctgttcacattgcatccaacaaaaacactgttcctggagatgtttctgccatggttcctggtggaatcagaatgggtactcctgctctcacttccagaggctttgttgaggaagactttgccaaagtagctgaatacttcgacaaagctgtgacaatagctctcaaagtcaaatctgaagctcaaggaaccaagttgaaggatttcgtgtcagcaatggaatcctcttcaaccatccaatccgagattgcgaaactgcgccatgaagtcgaggaattcgctaagcagttcccaacaattgggtttgagaaagaaaccatgaagtacaagaactaaactgtttcaccccacaagtgttttctgttatgctttgaattcccatggaatgtatagatgatacatgtaaaactctattttcacgctatgcgaaaaataatgatctgttaaattttctctct

SEQ ID NO: 105830 - protein, 517 aa, Arabidopsis thaliana
  peptide (1)..(517): Ceres Seq. ID no. 13618114
  misc_feature (55)..(453): Pfam Name: Serine hydroxymethyltransferase Pfam Description: Serine hydroxymethyltransferase
  misc_feature (1)..(517): Homolog of NCBI NO: 15235745 NR Description: glycine hydroxymethyltransferase like protein thaliana] >gi|7433551|pir||T05620 glycine
  misc_feature (1)..(517): Homolog of NCBI NO: 15809972 NR Description: AT4g37930/F20D10_50 [Arabidopsis thaliana]
  misc_feature (1)..(517): Homolog of NCBI NO: 1707998 NR Description: SERINE HYDROXYMETHYLTRANSFERASE, MITOCHONDRIAL
  misc_feature (1)..(517): Homolog of NCBI NO: 1346155 NR Description: Serine hydroxymethyltransferase 1, mitochondrial (Serine methylase) (Glycine hydroxymethyltransferase) (SHMT) glycine hydroxymethyltransferase (EC glycine
  misc_feature (1)..(515): Homolog of NCBI NO: 462187 NR Description: SERINE HYDROXYMETHYLTRANSFERASE, MITOCHONDRIAL
  misc_feature (1)..(517): Homolog of NCBI NO: 1346156 NR Description: Serine hydroxymethyltransferase 2, mitochondrial (Serine methylase) (Glycine hydroxymethyltransferase) (SHMT) glycine hydroxymethyltransferase (EC glycine
  misc_feature (1)..(517): Homolog of NCBI NO: 31126793 NR Description: putative glycine hydroxymethyltransferase [Oryza
  misc_feature (3)..(516): Homolog of NCBI NO: 30690394 NR Description: glycine hydroxymethyltransferase - like protein
  misc_feature (3)..(516): Homolog of NCBI NO: 14334888 NR Description: putative glycine hydroxymethyltransferase
  misc_feature (3)..(516): Homolog of NCBI NO: 30690400 NR Description: glycine hydroxymethyltransferase - like protein
MAMAMALRRLSSSIDKPIRPLIRSTSCYMSSLPSEAVDEKERSRVTWPKQLNAPLEEVDPEIADIIEHEKARQWKGLELIPSENFTSVSVMQAVGSVMTNKYSEGYPGARYYGGNEYIDMAETLCQKRALEAFRLDPEKWGVNVQPLSGSPANFHVYTALLKPHERIMALDLPHGGHLSHGYQTDTKKISAVSIFFETMPYRLDESTGYIDYDQMEKSATLFRPKLIVAGASAYARLYDYARIRKVCNKQKAVMLADMAHISGLVAANVIPSPFDYADVVTTTTHKSLRGPRGAMIFFRKGVKEINKQGKEVLYDFEDKINQAVFPGLQGGPHNHTITGLAVALKQATTSEYKAYQEQVLSNSAKFAQTLMERGYELVSGGTDNHLVLVNLKPKGIDGSRVEKVLEAVHIASNKNTVPGDVSAMVPGGIRMGTPALTSRGFVEEDFAKVAEYFDKAVTIALKVKSEAQGTKLKDFVSAMESSSTIQSEIAKLRHEVEEFAKQFPTIGFEKETMKYKN

SEQ ID NO: 105831 - protein, 515 aa, Arabidopsis thaliana
  peptide (1)..(515): Ceres Seq. ID no. 13618115
  misc_feature (53)..(451): Pfam Name: Serine hydroxymethyltransferase Pfam Description: Serine hydroxymethyltransferase
  misc_feature (1)..(515): Homolog of NCBI NO: 15235745 NR Description: glycine hydroxymethyltransferase like protein thaliana] >gi|7433551|pir||T05620 glycine
  misc_feature (1)..(515): Homolog of NCBI NO: 15809972 NR Description: AT4g37930/F20D10_50 [Arabidopsis thaliana]
  misc_feature (1)..(515): Homolog of NCBI NO: 1707998 NR Description: SERINE HYDROXYMETHYLTRANSFERASE, MITOCHONDRIAL
  misc_feature (1)..(515): Homolog of NCBI NO: 1346155 NR Description: Serine hydroxymethyltransferase 1, mitochondrial (Serine methylase) (Glycine hydroxymethyltransferase) (SHMT) glycine hydroxymethyltransferase (EC glycine
  misc_feature (1)..(513): Homolog of NCBI NO: 462187 NR Description: SERINE HYDROXYMETHYLTRANSFERASE, MITOCHONDRIAL
  misc_feature (1)..(515): Homolog of NCBI NO: 1346156 NR Description: Serine hydroxymethyltransferase 2, mitochondrial (Serine methylase) (Glycine hydroxymethyltransferase) (SHMT) glycine hydroxymethyltransferase (EC glycine
  misc_feature (1)..(515): Homolog of NCBI NO: 31126793 NR Description: putative glycine hydroxymethyltransferase [Oryza
  misc_feature (1)..(514): Homolog of NCBI NO: 30690394 NR Description: glycine hydroxymethyltransferase - like protein
  misc_feature (1)..(514): Homolog of NCBI NO: 14334888 NR Description: putative glycine hydroxymethyltransferase
  misc_feature (1)..(514): Homolog of NCBI NO: 30690400 NR Description: glycine hydroxymethyltransferase - like protein
MAMALRRLSSSIDKPIRPLIRSTSCYMSSLPSEAVDEKERSRVTWPKQLNAPLEEVDPEIADIIEHEKARQWKGLELIPSENFTSVSVMQAVGSVMTNKYSEGYPGARYYGGNEYIDMAETLCQKRALEAFRLDPEKWGVNVQPLSGSPANFHVYTALLKPHERIMALDLPHGGHLSHGYQTDTKKISAVSIFFETMPYRLDESTGYIDYDQMEKSATLFRPKLIVAGASAYARLYDYARIRKVCNKQKAVMLADMAHISGLVAANVIPSPFDYADVVTTTTHKSLRGPRGAMIFFRKGVKEINKQGKEVLYDFEDKINQAVFPGLQGGPHNHTITGLAVALKQATTSEYKAYQEQVLSNSAKFAQTLMERGYELVSGGTDNHLVLVNLKPKGIDGSRVEKVLEAVHIASNKNTVPGDVSAMVPGGIRMGTPALTSRGFVEEDFAKVAEYFDKAVTIALKVKSEAQGTKLKDFVSAMESSSTIQSEIAKLRHEVEEFAKQFPTIGFEKETMKYKN

SEQ ID NO: 105832 - protein, 513 aa, Arabidopsis thaliana
  peptide (1)..(513): Ceres Seq. ID no. 13618116
  misc_feature (51)..(449): Pfam Name: Serine hydroxymethyltransferase Pfam Description: Serine hydroxymethyltransferase
  misc_feature (1)..(513): Homolog of NCBI NO: 15235745 NR Description: glycine hydroxymethyltransferase like protein thaliana] >gi|7433551|pir||T05620 glycine
  misc_feature (1)..(513): Homolog of NCBI NO: 15809972 NR Description: AT4g37930/F20D10_50 [Arabidopsis thaliana]
  misc_feature (1)..(513): Homolog of NCBI NO: 1707998 NR Description: SERINE HYDROXYMETHYLTRANSFERASE, MITOCHONDRIAL
  misc_feature (1)..(513): Homolog of NCBI NO: 1346155 NR Description: Serine hydroxymethyltransferase 1, mitochondrial (Serine methylase) (Glycine hydroxymethyltransferase) (SHMT) glycine hydroxymethyltransferase (EC glycine
  misc_feature (1)..(511): Homolog of NCBI NO: 462187 NR Description: SERINE HYDROXYMETHYLTRANSFERASE, MITOCHONDRIAL
  misc_feature (1)..(513): Homolog of NCBI NO: 1346156 NR Description: Serine hydroxymethyltransferase 2, mitochondrial (Serine methylase) (Glycine hydroxymethyltransferase) (SHMT) glycine hydroxymethyltransferase (EC glycine
  misc_feature (1)..(513): Homolog of NCBI NO: 31126793 NR Description: putative glycine hydroxymethyltransferase [Oryza
  misc_feature (1)..(512): Homolog of NCBI NO: 30690394 NR Description: glycine hydroxymethyltransferase - like protein
  misc_feature (1)..(512): Homolog of NCBI NO: 14334888 NR Description: putative glycine hydroxymethyltransferase
  misc_feature (1)..(512): Homolog of NCBI NO: 30690400 NR Description: glycine hydroxymethyltransferase - like protein
MALRRLSSSIDKPIRPLIRSTSCYMSSLPSEAVDEKERSRVTWPKQLNAPLEEVDPEIADIIEHEKARQWKGLELIPSENFTSVSVMQAVGSVMTNKYSEGYPGARYYGGNEYIDMAETLCQKRALEAFRLDPEKWGVNVQPLSGSPANFHVYTALLKPHERIMALDLPHGGHLSHGYQTDTKKISAVSIFFETMPYRLDESTGYIDYDQMEKSATLFRPKLIVAGASAYARLYDYARIRKVCNKQKAVMLADMAHISGLVAANVIPSPFDYADVVTTTTHKSLRGPRGAMIFFRKGVKEINKQGKEVLYDFEDKINQAVFPGLQGGPHNHTITGLAVALKQATTSEYKAYQEQVLSNSAKFAQTLMERGYELVSGGTDNHLVLVNLKPKGIDGSRVEKVLEAVHIASNKNTVPGDVSAMVPGGIRMGTPALTSRGFVEEDFAKVAEYFDKAVTIALKVKSEAQGTKLKDFVSAMESSSTIQSEIAKLRHEVEEFAKQFPTIGFEKETMKYKN

SEQ ID NO: 105833 - DNA, 1139 bp, Arabidopsis thaliana
  misc_feature (1)..(1139): Ceres Seq. ID no. 13618136
  misc_feature: MA Experiment ID: 108463 Result: Down-regulated in Transcription
  misc_feature: MA Experiment 108463 PARAMETER Experiment Name: At_Germinating_Seeds_cDNA_P Parameter: Age (day) Value: 3 vs. 0
  misc_feature: MA Experiment 108463 PARAMETER Experiment Name: At_Germinating_Seeds_cDNA_P Parameter: Tissue Value: Germinating Seeds
  misc_feature: MA Experiment ID: 108464 Result: Down-regulated in Transcription
  misc_feature: MA Experiment 108464 PARAMETER Experiment Name: At_Germinating_Seeds_cDNA_P Parameter: Age (day) Value: 4 vs. 0
  misc_feature: MA Experiment 108464 PARAMETER Experiment Name: At_Germinating_Seeds_cDNA_P Parameter: Tissue Value: Germinating Seeds
  misc_feature: MA Experiment ID: 108595 Result: Up-regulated in Transcription
  misc_feature: MA Experiment 108595 PARAMETER Experiment Name: At_Ler-pi_Ovule_cDNA_P Parameter: Plant Line Value: null
  misc_feature: MA Experiment ID: 20000495 Result: Up-regulated in Transcription
  misc_feature: MA Experiment 20000495 PARAMETER Experiment Name: At_Guard_Cells_P Parameter: Harvest Date Value: 8/2/2002
  misc_feature: MA Experiment 20000495 PARAMETER Experiment Name: At_Guard_Cells_P Parameter: Organism Value: A. thaliana
  misc_feature: MA Experiment 20000495 PARAMETER Experiment Name: At_Guard_Cells_P Parameter: Tissue Value: Guard Cells vs. Leaves
aaaacatgtcagagcaatcttttgtcgcatccccacaagtcttgaaaagcggagcctgatgatcaaaaggaacccccaaaactctctcaaacgcatcacttttgtctgccacctgtgactgactgtgaggatcccaacaacacttcttgttcatggattctgggcttcagcaactcgcattgtgcctcttcttcattctctgccgcctctttcaagccactgccgaagatgactggaagatagccacagccacgctttctagagacagagacggctcctcctccgtcgctactggaggcgcttgtgggtatggagatctgaggcagagcagctttgccggctacagcgcaggcctgagcgggaagctgttcaacaggggaagcagctgcggagcttgtctagaagtgcggtgcgtgaaccacatccgttggtgtcttcaaggcagcccctccgtggtggtcaccgccaccgatttctgtcctcccaattcgggactctcctccgattacggaggttggtgcaacttcccaaaggaacacttggaactatctcatgccgccttcacagggatcgcagaaaccagagctgagatgatacctatacagtataggagggtcaagtgtgggcggagaggcgggttgagattcagcttgagcgggagctcccactttttccaggtgttgataagcaatgtgggcctcgacggggaagtggttggtgtgaaagtgaagggccacacaacggcttggatcccaatggccagaaactggggacagaactggcactcctctctcgatctcatcggacagtctctctctttcgaggttactctcaaaggcggcaaaaccattgcctcttatgatgtggctcctccgtattggcgcttcggaatgacataccaaggaaagcagttccactcctgactcctttatcttcttcaaatcatgattcactttcggtgactttattatgactttggagtcattagatatcatcacttcatttcaaggaggtataaatgactttccacgagtggctcatctttgtcttctcttttcttttttctttttatataatatatccttcacaatccttacttggaccgcatttagctgtgtgagagtatattatgcacattg

SEQ ID NO: 105834 - protein, 256 aa, Arabidopsis thaliana; identical to SEQ ID NO: 21891
  peptide (1)..(256): Ceres Seq. ID no. 13618137
  misc_feature (163)..(240): Pfam Name: Pollen allergen Pfam Description: Pollen allergen
  misc_feature (1)..(256): Homolog of NCBI NO: 15233735 NR Description: expansin, putative (EXP20) [Arabidopsis thaliana]
  misc_feature (1)..(254): Homolog of NCBI NO: 20135554 NR Description: expansin 1 [Musa acuminata]
  misc_feature (5)..(254): Homolog of NCBI NO: 21314543 NR Description: alpha-expansin precursor [Gossypium hirsutum]
  misc_feature (8)..(254): Homolog of NCBI NO: 6942322 NR Description: alpha-expansin 3 [Triphysaria versicolor]
  misc_feature (28)..(254): Homolog of NCBI NO: 38046730 NR Description: alpha-expansin 3 [Populus tremula x Populus
  misc_feature (5)..(254): Homolog of NCBI NO: 7484721 NR Description: expansin - upland cotton
  misc_feature (5)..(254): Homolog of NCBI NO: 30841322 NR Description: expansin [Gossypium hirsutum]
  misc_feature (22)..(256): Homolog of NCBI NO: 4138912 NR Description: expansin precursor [Lycopersicon esculentum]
  misc_feature (5)..(254): Homolog of NCBI NO: 21314545 NR Description: alpha-expansin precursor [Gossypium hirsutum]
  misc_feature (5)..(254): Homolog of NCBI NO: 3510538 NR Description: expansin [Prunus armeniaca]

SEQ ID NO: 105835 - DNA, 956 bp, Arabidopsis thaliana
  misc_feature (1)..(956): Ceres Seq. ID no. 13618148
  misc_feature: MA Experiment ID: 108434 Result: Up-regulated in Transcription
  misc_feature: MA Experiment 108434 PARAMETER Experiment Name: At_Root_Tips_cDNA_P Parameter: Tissue Value: Root Tips
  misc_feature: MA Experiment ID: 108462 Result: Down-regulated in Transcription
  misc_feature: MA Experiment 108462 PARAMETER Experiment Name: At_Germinating_Seeds_cDNA_P Parameter: Age (day) Value: 2 vs. 0
  misc_feature: MA Experiment 108462 PARAMETER Experiment Name: At_Germinating_Seeds_cDNA_P Parameter: Tissue Value: Germinating Seeds
  misc_feature: MA Experiment ID: 108463 Result: Down-regulated in Transcription
  misc_feature: MA Experiment 108463 PARAMETER Experiment Name: At_Germinating_Seeds_cDNA_P Parameter: Age (day) Value: 3 vs. 0
  misc_feature: MA Experiment 108463 PARAMETER Experiment Name: At_Germinating_Seeds_cDNA_P Parameter: Tissue Value: Germinating Seeds
  misc_feature: MA Experiment ID: 108464 Result: Down-regulated in Transcription
  misc_feature: MA Experiment 108464 PARAMETER Experiment Name: At_Germinating_Seeds_cDNA_P Parameter: Age (day) Value: 4 vs. 0
  misc_feature: MA Experiment 108464 PARAMETER Experiment Name: At_Germinating_Seeds_cDNA_P Parameter: Tissue Value: Germinating Seeds
  misc_feature: MA Experiment ID: 20000234 Result: Up-regulated in Transcription
  misc_feature: MA Experiment 20000234 PARAMETER Experiment Name: At_Siliques_P Parameter: Age (day) Value: 21
  misc_feature: MA Experiment 20000234 PARAMETER Experiment Name: At_Siliques_P Parameter: Organism Value: A. thaliana
  misc_feature: MA Experiment 20000234 PARAMETER Experiment Name: At_Siliques_P Parameter: Plant Line Value: WS
  misc_feature: MA Experiment 20000234 PARAMETER Experiment Name: At_Siliques_P Parameter: Tissue Value: Less Than 5mm Siliques vs. Whole Plant
  misc_feature: MA Experiment ID: 20001558 Result: Down-regulated in Transcription
  misc_feature: MA Experiment 20001558 PARAMETER Experiment Name: At_Drought_Soil_Dry_P Parameter: Age (day) Value: 27
  misc_feature: MA Experiment 20001558 PARAMETER Experiment Name: At_Drought_Soil_Dry_P Parameter: Organism Value: A. thaliana
  misc_feature: MA Experiment 20001558 PARAMETER Experiment Name: At_Drought_Soil_Dry_P Parameter: Plant Line Value: WS
  misc_feature: MA Experiment 20001558 PARAMETER Experiment Name: At_Drought_Soil_Dry_P Parameter: Post Timepoint (hr) Value: 6
  misc_feature: MA Experiment 20001558 PARAMETER Experiment Name: At_Drought_Soil_Dry_P Parameter: Post-Treatment Value: Re-Water vs. No Drought
  misc_feature: MA Experiment 20001558 PARAMETER Experiment Name: At_Drought_Soil_Dry_P Parameter: Timepoint (day) Value: 13
  misc_feature: MA Experiment 20001558 PARAMETER Experiment Name: At_Drought_Soil_Dry_P Parameter: Treatment Value: Drought vs. No Drought
aaatgaaatgtatagagaggtaaagtgggaattttgacattggtgggtttaggggaaaaacagagagaaagagatggattcgtcgtcagtagggaacaccaacaggtactgggtcctccgccacggcaagagcattcccaacgagagaggcctcgtcgtctcttccatggaaaatggtgtcctccccgagtaccagttagcccctgatggtgtcgctcaggctcgtctcgccggcgaatcgttcctccagcaactcaaggaaagtaacatagaactggacaaggttcgcatttgctactcccccttctccagaaccactcacaccgctagggttgttgctaaggtcctcaatctcccctttgatgctcctcaatgcaagatgatggaagatctgcgcgaacgctattttggacctacatttgaactcaagtcccatgacaagtacccagagatatgggctcttgatgaaaaagatccttttatgggaccagaaggaggtgaaagtgctgatgatgttgtttcccgacttgccactgccatgaaatccatggaagctgaatatcaaaggtgtgcaattctggtggtgagtcatggagatcctctgcagatgttgcagaacgttttccattcagcaaagcaacaggaaggagatggtttggcagagaagtttcagttgagcagagttgcttctgtcttgtcacagcaccgcaagtttgctttgctcactggggaactccgacccctcatctgattggcaatcaatgtattcagcttttggaatgtctttccttgaactcttttgttatcaattcctatttctctcccattggcattcttgcaattgccaaacttggattagcctgtttattatcacctctgtttgttagagaaaacatgaagatttactcctgtaataagaaatcatgctcatttatgttatatgtatcttcaaatct

SEQ ID NO: 105836 - protein, 225 aa, Arabidopsis thaliana
  peptide (1)..(225): Ceres Seq. ID no. 13618149
  misc_feature (10)..(220): Pfam Name: Phosphoglycerate mutase family Pfam Description: Phosphoglycerate mutase family
  misc_feature (1)..(225): Homolog of NCBI NO: 18420226 NR Description: expressed protein [Arabidopsis thaliana]
  misc_feature (1)..(225): Homolog of NCBI NO: 21592519 NR Description: unknown [Arabidopsis thaliana]
  misc_feature (102)..(225): Homolog of NCBI NO: 7485952 NR Description: hypothetical protein F22I13.140 - Arabidopsis >gi|4539345|emb|CAB37493.1| hypothetical protein [Arabidopsis >gi|7270821|emb|CAB80502.1| hypothetical protein [Arabidopsis
  misc_feature (1)..(108): Homolog of NCBI NO: 7485952 NR Description: hypothetical protein F22I13.140 - Arabidopsis >gi|4539345|emb|CAB37493.1| hypothetical protein [Arabidopsis >gi|7270821|emb|CAB80502.1| hypothetical protein [Arabidopsis
  misc_feature (10)..(225): Homolog of NCBI NO: 38344128 NR Description: OSJNBb0072N21.7 [Oryza sativa (japonica
MDSSSVGNTNRYWVLRHGKSIPNERGLVVSSMENGVLPEYQLAPDGVAQARLAGESFLQQLKESNIELDKVRICYSPFSRTTHTARVVAKVLNLPFDAPQCKMMEDLRERYFGPTFELKSHDKYPEIWALDEKDPFMGPEGGESADDVVSRLATAMKSMEAEYQRCAILVVSHGDPLQMLQNVFHSAKQQEGDGLAEKFQLSRVASVLSQHRKFALLTGELRPLI

SEQ ID NO: 105837 - protein, 194 aa, Arabidopsis thaliana
  peptide (1)..(194): Ceres Seq. ID no. 13618150
  misc_feature (1)..(189): Pfam Name: Phosphoglycerate mutase family Pfam Description: Phosphoglycerate mutase family
  misc_feature (1)..(194): Homolog of NCBI NO: 18420226 NR Description: expressed protein [Arabidopsis thaliana]
  misc_feature (1)..(194): Homolog of NCBI NO: 21592519 NR Description: unknown [Arabidopsis thaliana]
  misc_feature (71)..(194): Homolog of NCBI NO: 7485952 NR Description: hypothetical protein F22I13.140 - Arabidopsis >gi|4539345|emb|CAB37493.1| hypothetical protein [Arabidopsis >gi|7270821|emb|CAB80502.1| hypothetical protein [Arabidopsis
  misc_feature (1)..(77): Homolog of NCBI NO: 7485952 NR Description: hypothetical protein F22I13.140 - Arabidopsis >gi|4539345|emb|CAB37493.1| hypothetical protein [Arabidopsis >gi|7270821|emb|CAB80502.1| hypothetical protein [Arabidopsis
  misc_feature (1)..(194): Homolog of NCBI NO: 38344128 NR Description: OSJNBb0072N21.7 [Oryza sativa (japonica
MENGVLPEYQLAPDGVAQARLAGESFLQQLKESNIELDKVRICYSPFSRTTHTARVVAKVLNLPFDAPQCKMMEDLRERYFGPTFELKSHDKYPEIWALDEKDPFMGPEGGESADDVVSRLATAMKSMEAEYQRCAILVVSHGDPLQMLQNVFHSAKQQEGDGLAEKFQLSRVASVLSQHRKFALLTGELRPLI

SEQ ID NO: 105838 - protein, 123 aa, Arabidopsis thaliana; identical to SEQ ID NO: 36453
  peptide (1)..(123): Ceres Seq. ID no. 13618151
  misc_feature (1)..(118): Pfam Name: Phosphoglycerate mutase family Pfam Description: Phosphoglycerate mutase family
  misc_feature (1)..(123): Homolog of NCBI NO: 18420226 NR Description: expressed protein [Arabidopsis thaliana]
  misc_feature (1)..(123): Homolog of NCBI NO: 21592519 NR Description: unknown [Arabidopsis thaliana]
  misc_feature (1)..(123): Homolog of NCBI NO: 7485952 NR Description: hypothetical protein F22I13.140 - Arabidopsis >gi|4539345|emb|CAB37493.1| hypothetical protein [Arabidopsis >gi|7270821|emb|CAB80502.1| hypothetical protein [Arabidopsis
  misc_feature (1)..(123): Homolog of NCBI NO: 38344128 NR Description: OSJNBb0072N21.7 [Oryza sativa (japonica

SEQ ID NO: 105839 - DNA, 1286 bp, Arabidopsis thaliana
  misc_feature (1)..(1286): Ceres Seq. ID no. 13618156
  misc_feature: MA Experiment ID: 108434 Result: Down-regulated in Transcription
  misc_feature: MA Experiment 108434 PARAMETER Experiment Name: At_Root_Tips_cDNA_P Parameter: Tissue Value: Root Tips
  misc_feature: MA Experiment ID: 108464 Result: Up-regulated in Transcription
  misc_feature: MA Experiment 108464 PARAMETER Experiment Name: At_Germinating_Seeds_cDNA_P Parameter: Age (day) Value: 4 vs. 0
  misc_feature: MA Experiment 108464 PARAMETER Experiment Name: At_Germinating_Seeds_cDNA_P Parameter: Tissue Value: Germinating Seeds
  misc_feature: MA Experiment ID: 108573 Result: Down-regulated in Transcription
  misc_feature: MA Experiment 108573 PARAMETER Experiment Name: At_Drought_cDNA_P Parameter: Timepoint (hr) Value: 6
  misc_feature: MA Experiment 108573 PARAMETER Experiment Name: At_Drought_cDNA_P Parameter: Tissue Value: Aerial
  misc_feature: MA Experiment 108573 PARAMETER Experiment Name: At_Drought_cDNA_P Parameter: Treatment Value: Drought vs. No Drought
  misc_feature: MA Experiment ID: 108594 Result: Down-regulated in Transcription
  misc_feature: MA Experiment 108594 PARAMETER Experiment Name: At_Ler-rhl_Root_cDNA_P Parameter: Plant Line Value: null
  misc_feature: MA Experiment ID: 20000071 Result: Down-regulated in Transcription
  misc_feature: MA Experiment 20000071 PARAMETER Experiment Name: At_100uM_ABA_Mutants_cDNA_P Parameter: Plant Line Value: CS8104
  misc_feature: MA Experiment 20000071 PARAMETER Experiment Name: At_100uM_ABA_Mutants_cDNA_P Parameter: Timepoint (hr) Value: 6
  misc_feature: MA Experiment 20000071 PARAMETER Experiment Name: At_100uM_ABA_Mutants_cDNA_P Parameter: Tissue Value: Aerial
  misc_feature: MA Experiment 20000071 PARAMETER Experiment Name: At_100uM_ABA_Mutants_cDNA_P Parameter: Treatment Value: 100uM ABA vs. No Treatment
  misc_feature: MA Experiment ID: 20000072 Result: Down-regulated in Transcription
  misc_feature: MA Experiment 20000072 PARAMETER Experiment Name: At_100uM_ABA_Mutants_cDNA_P Parameter: Plant Line Value: CS8105
  misc_feature: MA Experiment 20000072 PARAMETER Experiment Name: At_100uM_ABA_Mutants_cDNA_P Parameter: Timepoint (hr) Value: 6
  misc_feature: MA Experiment 20000072 PARAMETER Experiment Name: At_100uM_ABA_Mutants_cDNA_P Parameter: Tissue Value: Aerial
  misc_feature: MA Experiment 20000072 PARAMETER Experiment Name: At_100uM_ABA_Mutants_cDNA_P Parameter: Treatment Value: 100uM ABA vs. No Treatment
  misc_feature: MA Experiment ID: 20000090 Result: Down-regulated in Transcription
  misc_feature: MA Experiment ID: 20000113 Result: Down-regulated in Transcription
  misc_feature: MA Experiment 20000113 PARAMETER Experiment Name: At_42deg_Heat_cDNA_P Parameter: Temperature (deg C) Value: 42 vs. 22
  misc_feature: MA Experiment 20000113 PARAMETER Experiment Name: At_42deg_Heat_cDNA_P Parameter: Timepoint (hr) Value: 8
  misc_feature: MA Experiment 20000113 PARAMETER Experiment Name: At_42deg_Heat_cDNA_P Parameter: Tissue Value: Aerial
  misc_feature: MA Experiment ID: 20000117 Result: Down-regulated in Transcription
  misc_feature: MA Experiment 20000117 PARAMETER Experiment Name: At_100uM_ABA_Mutants_cDNA_P Parameter: Plant Line Value: Columbia
  misc_feature: MA Experiment 20000117 PARAMETER Experiment Name: At_100uM_ABA_Mutants_cDNA_P Parameter: Timepoint (hr) Value: 6
  misc_feature: MA Experiment 20000117 PARAMETER Experiment Name: At_100uM_ABA_Mutants_cDNA_P Parameter: Tissue Value: Aerial
  misc_feature: MA Experiment 20000117 PARAMETER Experiment Name: At_100uM_ABA_Mutants_cDNA_P Parameter: Treatment Value: 100uM ABA vs. No Treatment
  misc_feature: MA Experiment ID: 20000180 Result: Up-regulated in Transcription
  misc_feature: MA Experiment 20000180 PARAMETER Experiment Name: At_Germinating_Seeds_P Parameter: Age (hr) Value: 24 vs. 0
  misc_feature: MA Experiment 20000180 PARAMETER Experiment Name: At_Germinating_Seeds_P Parameter: Tissue Value: Germinating Seeds
  misc_feature: MA Experiment ID: 20000184 Result: Down-regulated in Transcription
  misc_feature: MA Experiment 20000184 PARAMETER Experiment Name: At_Shoots__P Parameter: Age (day) Value: 7
  misc_feature: MA Experiment 20000184 PARAMETER Experiment Name: At_Shoots__P Parameter: Tissue Value: Shoots vs. Whole Plant
  misc_feature: MA Experiment ID: 20000185 Result: Up-regulated in Transcription
  misc_feature: MA Experiment 20000185 PARAMETER Experiment Name: At_Roots__P Parameter: Age (day) Value: 7 vs. 21
  misc_feature: MA Experiment 20000185 PARAMETER Experiment Name: At_Roots__P Parameter: Organism Value: A. thaliana
  misc_feature: MA Experiment 20000185 PARAMETER Experiment Name: At_Roots__P Parameter: Tissue Value: Roots vs. Whole Plant
  misc_feature: MA Experiment ID: 20000213 Result: Up-regulated in Transcription
  misc_feature: MA Experiment 20000213 PARAMETER Experiment Name: At_4deg_Cold_P Parameter: Timepoint (hr) Value: 2
  misc_feature: MA Experiment ID: 20000224 Result: Up-regulated in Transcription
  misc_feature: MA Experiment ID: 20000235 Result: Up-regulated in Transcription
  misc_feature: MA Experiment 20000235 PARAMETER Experiment Name: At_Siliques_P Parameter: Age (day) Value: 21
  misc_feature: MA Experiment 20000235 PARAMETER Experiment Name: At_Siliques_P Parameter: Organism Value: A. thaliana
  misc_feature: MA Experiment 20000235 PARAMETER Experiment Name: At_Siliques_P Parameter: Plant Line Value: WS
  misc_feature: MA Experiment 20000235 PARAMETER Experiment Name: At_Siliques_P Parameter: Tissue Value: 5-10mm Siliques vs. Whole Plant
  misc_feature: MA Experiment ID: 20000437 Result: Down-regulated in Transcription
  misc_feature: MA Experiment 20000437 PARAMETER Experiment Name: At_Drought_P Parameter: Age (day) Value: 8
  misc_feature: MA Experiment 20000437 PARAMETER Experiment Name: At_Drought_P Parameter: Organism Value: A. thaliana
  misc_feature: MA Experiment 20000437 PARAMETER Experiment Name: At_Drought_P Parameter: Plant Line Value: WS
  misc_feature: MA Experiment 20000437 PARAMETER Experiment Name: At_Drought_P Parameter: Timepoint (hr) Value: 24
  misc_feature: MA Experiment 20000437 PARAMETER Experiment Name: At_Drought_P Parameter: Tissue Value: Whole Plant
  misc_feature: MA Experiment 20000437 PARAMETER Experiment Name: At_Drought_P Parameter: Treatment Value: Drought vs. No Drought
  misc_feature: MA Experiment ID: 20000438 Result: Down-regulated in Transcription
  misc_feature: MA Experiment 20000438 PARAMETER Experiment Name: At_Shoots__P Parameter: Age (day) Value: 14
  misc_feature: MA Experiment 20000438 PARAMETER Experiment Name: At_Shoots__P Parameter: Tissue Value: Shoots vs. Whole Plant
  misc_feature: MA Experiment ID: 20000439 Result: Up-regulated in Transcription
  misc_feature: MA Experiment 20000439 PARAMETER Experiment Name: At_Roots__P Parameter: Age (day) Value: 14 vs. 21
  misc_feature: MA Experiment 20000439 PARAMETER Experiment Name: At_Roots__P Parameter: Organism Value: A. thaliana
  misc_feature: MA Experiment 20000439 PARAMETER Experiment Name: At_Roots__P Parameter: Tissue Value: Roots vs. Whole Plant
  misc_feature: MA Experiment ID: 20000452 Result: Up-regulated in Transcription
  misc_feature: MA Experiment 20000452 PARAMETER Experiment Name: At_CS6879_Shoots-Roots_P Parameter: Age (day) Value: 14
  misc_feature: MA Experiment 20000452 PARAMETER Experiment Name: At_CS6879_Shoots-Roots_P Parameter: Organism Value: A. thaliana
  misc_feature: MA Experiment 20000452 PARAMETER Experiment Name: At_CS6879_Shoots-Roots_P Parameter: Plant Line Value: CS6879 vs. WS
  misc_feature: MA Experiment 20000452 PARAMETER Experiment Name: At_CS6879_Shoots-Roots_P Parameter: Tissue Value: Shoots
  misc_feature: MA Experiment ID: 20000794 Result: Up-regulated in Transcription
  misc_feature: MA Experiment 20000794 PARAMETER Experiment Name: At_Petals_P Parameter: Age (day) Value: 23-25 days
  misc_feature: MA Experiment 20000794 PARAMETER Experiment Name: At_Petals_P Parameter: Plant Line Value: WS
  misc_feature: MA Experiment 20000794 PARAMETER Experiment Name: At_Petals_P Parameter: Tissue Value: Petals vs. Whole plant
  misc_feature: MA Experiment ID: 20001248 Result: Down-regulated in Transcription
  misc_feature: MA Experiment 20001248 PARAMETER Experiment Name: At_Far-red-induction_P Parameter: Age (day) Value: 7
  misc_feature: MA Experiment 20001248 PARAMETER Experiment Name: At_Far-red-induction_P Parameter: Light Value: Far-red vs. White
  misc_feature: MA Experiment 20001248 PARAMETER Experiment Name: At_Far-red-induction_P Parameter: Organism Value: A. thaliana
  misc_feature: MA Experiment 20001248 PARAMETER Experiment Name: At_Far-red-induction_P Parameter: Plant Line Value: Columbia
  misc_feature: MA Experiment 20001248 PARAMETER Experiment Name: At_Far-red-induction_P Parameter: Timepoint (hr) Value: 4
  misc_feature: MA Experiment 20001248 PARAMETER Experiment Name: At_Far-red-induction_P Parameter: Tissue Value: Whole Plant
  misc_feature: MA Experiment ID: 20001450 Result: Down-regulated in Transcription
  misc_feature: MA Experiment 20001450 PARAMETER Experiment Name: At_Far-red-induction_P Parameter: Age (day) Value: 7
  misc_feature: MA Experiment 20001450 PARAMETER Experiment Name: At_Far-red-induction_P Parameter: Light Value: Far-red vs. White
  misc_feature: MA Experiment 20001450 PARAMETER Experiment Name: At_Far-red-induction_P Parameter: Organism Value: A. thaliana
  misc_feature: MA Experiment 20001450 PARAMETER Experiment Name: At_Far-red-induction_P Parameter: Plant Line Value: Columbia
  misc_feature: MA Experiment 20001450 PARAMETER Experiment Name: At_Far-red-induction_P Parameter: Timepoint (hr) Value: 8
  misc_feature: MA Experiment 20001450 PARAMETER Experiment Name: At_Far-red-induction_P Parameter: Tissue Value: Whole Plant
  misc_feature: MA Experiment ID: 20001905 Result: Down-regulated in Transcription
  misc_feature: MA Experiment 20001905 PARAMETER Experiment Name: At_Drought_Reproduction_P Parameter: Age (day) Value: 40
  misc_feature: MA Experiment 20001905 PARAMETER Experiment Name: At_Drought_Reproduction_P Parameter: Organism Value: A. thaliana
  misc_feature: MA Experiment 20001905 PARAMETER Experiment Name: At_Drought_Reproduction_P Parameter: Plant Line Value: WS
  misc_feature: MA Experiment 20001905 PARAMETER Experiment Name: At_Drought_Reproduction_P Parameter: Timepoint (day) Value: 10
  misc_feature: MA Experiment 20001905 PARAMETER Experiment Name: At_Drought_Reproduction_P Parameter: Tissue Value: Rosettes
  misc_feature: MA Experiment 20001905 PARAMETER Experiment Name: At_Drought_Reproduction_P Parameter: Treatment Value: Drought vs. No Drought
atcatctagaagcatttgtgtatatatatatatgtgtgtatattcctctctagctttaagtcaaaaccctatataaactatacaccaaagctttgaaccttcaaccaaacccaaaatccaagtgccccaccaaatgcttcaatcctcttccactacacaaaaaaacaacttaatccctttatacccttttagccaaaaccctcgctaaaagccaatccctcaatataaaataacaagtagaattgatctgcctatatataagattttgagacgaaataagatctaaaccacaagaaagaaagtaaacataaaagtatgggaaggtcaccgtgctgtgagaaagctcacacaaacaaaggagcatggacgaaagaagaggacgagaggctcgtcgcctacattaaagctcatggagaaggctgctggagatctctccccaaagccgccggacttcttcgctgtggcaagagctgccgtctccggtggatcaactatctccggcctgaccttaagcgtggaaacttcaccgaggaagaagacgaactcatcatcaagctccatagccttcttggcaacaaatggtcgcttattgccgggagattaccgggaagaacagataacgagataaagaactattggaacacgcatatacgaagaaagcttataaacagagggattgatccaacgagtcatagaccaatccaagaatcatcagcttctcaagattctaaacctacacaactagaaccagttacgagtaataccattaatatctcattcacttctgctccaaaggtcgaaacgttccatgaaagtataagctttccgggaaaatcagagaaaatctcaatgcttacgttcaaagaagaaaaagatgagtgcccagttcaagaaaagttcccagatttgaatcttgagctcagaatcagtcttcctgatgatgttgatcgtcttcaagggcatggaaagtcaacaacgccacgttgtttcaagtgcagcttagggatgataaacggcatggagtgcagatgcggaagaatgagatgcgatgtagtcggaggtagcagcaaggggagtgacatgagcaatggatttgattttttagggttggcaaagaaagagaccacttctcttttgggctttcgaagcttggagatgaaataatattgtcaaattttaggcgtaactgtacaaaacttttgcctagataatttgaaagtatatcttcaacttgtatgagaaatttaactggtgaattataatatatagaatttgtttttttttct

SEQ ID NO: 105840 - protein, 282 aa, Arabidopsis thaliana; identical to SEQ ID NO: 41372
  peptide (1)..(282): Ceres Seq. ID no. 13618157
  misc_feature (14)..(61): Pfam Name: Myb-like DNA-binding domain Pfam Description: Myb-like DNA-binding domain
  misc_feature (1)..(282): Homolog of NCBI NO: 15233968 NR Description: transcription factor (MYB4) -related [Arabidopsis
  misc_feature (1)..(282): Homolog of NCBI NO: 11273985 NR Description: myb-related transcription factor MYB4 [imported] Arabidopsis thaliana >gi|3941412|gb|AAC83582.1| putative
  misc_feature (143)..(282): Homolog of NCBI NO: 13346194 NR Description: GHMYB9 [Gossypium hirsutum]
  misc_feature (1)..(137): Homolog of NCBI NO: 13346194 NR Description: GHMYB9 [Gossypium hirsutum]
  misc_feature (1)..(282): Homolog of NCBI NO: 2129933 NR Description: myb-related protein TMH27 - tomato
  misc_feature (1)..(282): Homolog of NCBI NO: 31980095 NR Description: MYB transcription factor R2R3 type [Populus
  misc_feature (1)..(282): Homolog of NCBI NO: 15236236 NR Description: myb family transcription factor [Arabidopsis
  misc_feature (1)..(282): Homolog of NCBI NO: 6467223 NR Description: DNA-binding protein [Arabidopsis thaliana]
  misc_feature (1)..(282): Homolog of NCBI NO: 15227288 NR Description: myb DNA-binding protein [Arabidopsis thaliana]
  misc_feature (1)..(239): Homolog of NCBI NO: 39725415 NR Description: MYB transcription factor [Eucalyptus gunnii]

SEQ ID NO: 105841 - DNA, 1395 bp, Arabidopsis thaliana
  misc_feature (1)..(1395): Ceres Seq. ID no. 13618158
  misc_feature: MA Experiment ID: 108433 Result: Down-regulated in Transcription
  misc_feature: MA Experiment 108433 PARAMETER Experiment Name: At_rhl_Mutant2_cDNA_P Parameter: Age (day) Value: 7
  misc_feature: MA Experiment 108433 PARAMETER Experiment Name: At_rhl_Mutant2_cDNA_P Parameter: Organism Value: A. thaliana
  misc_feature: MA Experiment 108433 PARAMETER Experiment Name: At_rhl_Mutant2_cDNA_P Parameter: Plant Line Value: rhl Mutant vs. wt landsburg
  misc_feature: MA Experiment 108433 PARAMETER Experiment Name: At_rhl_Mutant2_cDNA_P Parameter: Tissue Value: Roots
  misc_feature: MA Experiment ID: 108434 Result: Up-regulated in Transcription
  misc_feature: MA Experiment 108434 PARAMETER Experiment Name: At_Root_Tips_cDNA_P Parameter: Tissue Value: Root Tips
  misc_feature: MA Experiment ID: 108435 Result: Up-regulated in Transcription
  misc_feature: MA Experiment 108435 PARAMETER Experiment Name: At_stm_Mutants_cDNA_P Parameter: Plant Line Value: wt Landsburg vs stm
  misc_feature: MA Experiment 108435 PARAMETER Experiment Name: At_stm_Mutants_cDNA_P Parameter: Tissue Value: Shoot Apical Meristem Region
  misc_feature: MA Experiment ID: 108576 Result: Down-regulated in Transcription
  misc_feature: MA Experiment 108576 PARAMETER Experiment Name: At_42deg_Heat_cDNA_P Parameter: Temperature (deg C) Value: 42 vs. 22
  misc_feature: MA Experiment 108576 PARAMETER Experiment Name: At_42deg_Heat_cDNA_P Parameter: Timepoint (hr) Value: 1
  misc_feature: MA Experiment 108576 PARAMETER Experiment Name: At_42deg_Heat_cDNA_P Parameter: Tissue Value: Aerial
  misc_feature: MA Experiment ID: 20000069 Result: Down-regulated in Transcription
  misc_feature: MA Experiment 20000069 PARAMETER Experiment Name: At_100uM_ABA_Mutants_cDNA_P Parameter: Plant Line Value: CS23
  misc_feature: MA Experiment 20000069 PARAMETER Experiment Name: At_100uM_ABA_Mutants_cDNA_P Parameter: Timepoint (hr) Value: 6
  misc_feature: MA Experiment 20000069 PARAMETER Experiment Name: At_100uM_ABA_Mutants_cDNA_P Parameter: Tissue Value: Aerial
  misc_feature: MA Experiment 20000069 PARAMETER Experiment Name: At_100uM_ABA_Mutants_cDNA_P Parameter: Treatment Value: 100uM ABA vs. No Treatment
  misc_feature: MA Experiment ID: 20000071 Result: Down-regulated in Transcription
  misc_feature: MA Experiment 20000071 PARAMETER Experiment Name: At_100uM_ABA_Mutants_cDNA_P Parameter: Plant Line Value: CS8104
  misc_feature: MA Experiment 20000071 PARAMETER Experiment Name: At_100uM_ABA_Mutants_cDNA_P Parameter: Timepoint (hr) Value: 6
  misc_feature: MA Experiment 20000071 PARAMETER Experiment Name: At_100uM_ABA_Mutants_cDNA_P Parameter: Tissue Value: Aerial
  misc_feature: MA Experiment 20000071 PARAMETER Experiment Name: At_100uM_ABA_Mutants_cDNA_P Parameter: Treatment Value: 100uM ABA vs. No Treatment
  misc_feature: MA Experiment ID: 20000112 Result: Down-regulated in Transcription
  misc_feature: MA Experiment 20000112 PARAMETER Experiment Name: At_42deg_Heat_cDNA_P Parameter: Temperature (deg C) Value: 42 vs. 22
  misc_feature: MA Experiment 20000112 PARAMETER Experiment Name: At_42deg_Heat_cDNA_P Parameter: Timepoint (hr) Value: 2
  misc_feature: MA Experiment 20000112 PARAMETER Experiment Name: At_42deg_Heat_cDNA_P Parameter: Tissue Value: Aerial
  misc_feature: MA Experiment ID: 20000113 Result: Down-regulated in Transcription
  misc_feature: MA Experiment 20000113 PARAMETER Experiment Name: At_42deg_Heat_cDNA_P Parameter: Temperature (deg C) Value: 42 vs. 22
  misc_feature: MA Experiment 20000113 PARAMETER Experiment Name: At_42deg_Heat_cDNA_P Parameter: Timepoint (hr) Value: 8
  misc_feature: MA Experiment 20000113 PARAMETER Experiment Name: At_42deg_Heat_cDNA_P Parameter: Tissue Value: Aerial
  misc_feature: MA Experiment ID: 20000117 Result: Down-regulated in Transcription
  misc_feature: MA Experiment 20000117 PARAMETER Experiment Name: At_100uM_ABA_Mutants_cDNA_P Parameter: Plant Line Value: Columbia
  misc_feature: MA Experiment 20000117 PARAMETER Experiment Name: At_100uM_ABA_Mutants_cDNA_P Parameter: Timepoint (hr) Value: 6
  misc_feature: MA Experiment 20000117 PARAMETER Experiment Name: At_100uM_ABA_Mutants_cDNA_P Parameter: Tissue Value: Aerial
  misc_feature: MA Experiment 20000117 PARAMETER Experiment Name: At_100uM_ABA_Mutants_cDNA_P Parameter: Treatment Value: 100uM ABA vs. No Treatment
  misc_feature: MA Experiment ID: 20000144 Result: Down-regulated in Transcription
  misc_feature: MA Experiment 20000144 PARAMETER Experiment Name: At_42deg_Heat_cDNA_P Parameter: Temperature (deg C) Value: 42 vs. 22
  misc_feature: MA Experiment 20000144 PARAMETER Experiment Name: At_42deg_Heat_cDNA_P Parameter: Timepoint (hr) Value: 1
  misc_feature: MA Experiment 20000144 PARAMETER Experiment Name: At_42deg_Heat_cDNA_P Parameter: Tissue Value: Aerial
  misc_feature: MA Experiment ID: 20000182 Result: Down-regulated in Transcription
  misc_feature: MA Experiment 20000182 PARAMETER Experiment Name: At_2mM_SA_P Parameter: Age (day) Value: 14
  misc_feature: MA Experiment 20000182 PARAMETER Experiment Name: At_2mM_SA_P Parameter: Organism Value: A. thaliana
  misc_feature: MA Experiment 20000182 PARAMETER Experiment Name: At_2mM_SA_P Parameter: Plant Line Value: WS
  misc_feature: MA Experiment 20000182 PARAMETER Experiment Name: At_2mM_SA_P Parameter: Timepoint (hr) Value: 6
  misc_feature: MA Experiment 20000182 PARAMETER Experiment Name: At_2mM_SA_P Parameter: Tissue Value: Aerial
  misc_feature: MA Experiment 20000182 PARAMETER Experiment Name: At_2mM_SA_P Parameter: Treatment Value: 2mM SA vs. No Treatment
  misc_feature: MA Experiment ID: 20000184 Result: Up-regulated in Transcription
  misc_feature: MA Experiment 20000184 PARAMETER Experiment Name: At_Shoots__P Parameter: Age (day) Value: 7
  misc_feature: MA Experiment 20000184 PARAMETER Experiment Name: At_Shoots__P Parameter: Tissue Value: Shoots vs. Whole Plant
  misc_feature: MA Experiment ID: 20000286 Result: Up-regulated in Transcription
  misc_feature: MA Experiment 20000286 PARAMETER Experiment Name: At_Open_Flower_P Parameter: Age (day) Value: 21
  misc_feature: MA Experiment 20000286 PARAMETER Experiment Name: At_Open_Flower_P Parameter: Plant Line Value: WS
  misc_feature: MA Experiment 20000286 PARAMETER Experiment Name: At_Open_Flower_P Parameter: Tissue Value: Half Open vs. Whole Plant
  misc_feature: MA Experiment ID: 20000437 Result: Down-regulated in Transcription
  misc_feature: MA Experiment 20000437 PARAMETER Experiment Name: At_Drought_P Parameter: Age (day) Value: 8
  misc_feature: MA Experiment 20000437 PARAMETER Experiment Name: At_Drought_P Parameter: Organism Value: A. thaliana
  misc_feature: MA Experiment 20000437 PARAMETER Experiment Name: At_Drought_P Parameter: Plant Line Value: WS
  misc_feature: MA Experiment 20000437 PARAMETER Experiment Name: At_Drought_P Parameter: Timepoint (hr) Value: 24
  misc_feature: MA Experiment 20000437 PARAMETER Experiment Name: At_Drought_P Parameter: Tissue Value: Whole Plant
  misc_feature: MA Experiment 20000437 PARAMETER Experiment Name: At_Drought_P Parameter: Treatment Value: Drought vs. No Drought
  misc_feature: MA Experiment ID: 20000445 Result: Down-regulated in Transcription
  misc_feature: MA Experiment 20000445 PARAMETER Experiment Name: At_100uM_NAA__P Parameter: Age (day) Value: 14
  misc_feature: MA Experiment 20000445 PARAMETER Experiment Name: At_100uM_NAA__P Parameter: Organism Value: A. thaliana
  misc_feature: MA Experiment 20000445 PARAMETER Experiment Name: At_100uM_NAA__P Parameter: Plant Line Value: WS
  misc_feature: MA Experiment 20000445 PARAMETER Experiment Name: At_100uM_NAA__P Parameter: Timepoint (hr) Value: 6
  misc_feature: MA Experiment 20000445 PARAMETER Experiment Name: At_100uM_NAA__P Parameter: Tissue Value: Aerial
  misc_feature: MA Experiment 20000445 PARAMETER Experiment Name: At_100uM_NAA__P Parameter: Treatment Value: 100uM NAA vs. No Treatment
  misc_feature: MA Experiment ID: 20000495 Result: Up-regulated in Transcription
  misc_feature: MA Experiment 20000495 PARAMETER Experiment Name: At_Guard_Cells_P Parameter: Harvest Date Value: 8/2/2002
  misc_feature: MA Experiment 20000495 PARAMETER Experiment Name: At_Guard_Cells_P Parameter: Organism Value: A. thaliana
  misc_feature: MA Experiment 20000495 PARAMETER Experiment Name: At_Guard_Cells_P Parameter: Tissue Value: Guard Cells vs. Leaves
  misc_feature: MA Experiment ID: 20000573 Result: Down-regulated in Transcription
  misc_feature: MA Experiment 20000573 PARAMETER Experiment Name: At_100uM_ABA_Mutants__P Parameter: Organism Value: A. thaliana
  misc_feature: MA Experiment 20000573 PARAMETER Experiment Name: At_100uM_ABA_Mutants__P Parameter: Plant Line Value: CS22 vs. Ler wt
  misc_feature: MA Experiment 20000573 PARAMETER Experiment Name: At_100uM_ABA_Mutants__P Parameter: Timepoint (hr) Value: N/A
  misc_feature: MA Experiment 20000573 PARAMETER Experiment Name: At_100uM_ABA_Mutants__P Parameter: Tissue Value: Whole Plant
  misc_feature: MA Experiment 20000573 PARAMETER Experiment Name: At_100uM_ABA_Mutants__P Parameter: Treatment Value: None
  misc_feature: MA Experiment ID: 20000574 Result: Down-regulated in Transcription
  misc_feature: MA Experiment 20000574 PARAMETER Experiment Name: At_100uM_ABA_Mutants__P Parameter: Organism Value: A. thaliana
  misc_feature: MA Experiment 20000574 PARAMETER Experiment Name: At_100uM_ABA_Mutants__P Parameter: Plant Line Value: CS23 vs. Ler wt
  misc_feature: MA Experiment 20000574 PARAMETER Experiment Name: At_100uM_ABA_Mutants__P Parameter: Timepoint (hr) Value: N/A
  misc_feature: MA Experiment 20000574 PARAMETER Experiment Name: At_100uM_ABA_Mutants__P Parameter: Tissue Value: Whole Plant
  misc_feature: MA Experiment 20000574 PARAMETER Experiment Name: At_100uM_ABA_Mutants__P Parameter: Treatment Value: None
  misc_feature: MA Experiment ID: 20000794 Result: Down-regulated in Transcription
  misc_feature: MA Experiment 20000794 PARAMETER Experiment Name: At_Petals_P Parameter: Age (day) Value: 23-25 days
  misc_feature: MA Experiment 20000794 PARAMETER Experiment Name: At_Petals_P Parameter: Plant Line Value: WS
  misc_feature: MA Experiment 20000794 PARAMETER Experiment Name: At_Petals_P Parameter: Tissue Value: Petals vs. Whole plant
  misc_feature: MA Experiment ID: 20001248 Result: Down-regulated in Transcription
  misc_feature: MA Experiment 20001248 PARAMETER Experiment Name: At_Far-red-induction_P Parameter: Age (day) Value: 7
  misc_feature: MA Experiment 20001248 PARAMETER Experiment Name: At_Far-red-induction_P Parameter: Light Value: Far-red vs. White
  misc_feature: MA Experiment 20001248 PARAMETER Experiment Name: At_Far-red-induction_P Parameter: Organism Value: A. thaliana
  misc_feature: MA Experiment 20001248 PARAMETER Experiment Name: At_Far-red-induction_P Parameter: Plant Line Value: Columbia
  misc_feature: MA Experiment 20001248 PARAMETER Experiment Name: At_Far-red-induction_P Parameter: Timepoint (hr) Value: 4
  misc_feature: MA Experiment 20001248 PARAMETER Experiment Name: At_Far-red-induction_P Parameter: Tissue Value: Whole Plant
  misc_feature: MA Experiment ID: 20001555 Result: Down-regulated in Transcription
  misc_feature: MA Experiment 20001555 PARAMETER Experiment Name: At_Drought_Soil_Dry_P Parameter: Age (day) Value: 24
  misc_feature: MA Experiment 20001555 PARAMETER Experiment Name: At_Drought_Soil_Dry_P Parameter: Organism Value: A. thaliana
  misc_feature: MA Experiment 20001555 PARAMETER Experiment Name: At_Drought_Soil_Dry_P Parameter: Plant Line Value: WS
  misc_feature: MA Experiment 20001555 PARAMETER Experiment Name: At_Drought_Soil_Dry_P Parameter: Post Timepoint (hr) Value: None
  misc_feature: MA Experiment 20001555 PARAMETER Experiment Name: At_Drought_Soil_Dry_P Parameter: Post-Treatment Value: None
  misc_feature: MA Experiment 20001555 PARAMETER Experiment Name: At_Drought_Soil_Dry_P Parameter: Timepoint (day) Value: 10
  misc_feature: MA Experiment 20001555 PARAMETER Experiment Name: At_Drought_Soil_Dry_P Parameter: Treatment Value: Drought vs. No Drought
  misc_feature: MA Experiment ID: 20001557 Result: Up-regulated in Transcription
  misc_feature: MA Experiment 20001557 PARAMETER Experiment Name: At_Drought_Soil_Dry_P Parameter: Age (day) Value: 27
  misc_feature: MA Experiment 20001557 PARAMETER Experiment Name: At_Drought_Soil_Dry_P Parameter: Organism Value: A. thaliana
  misc_feature: MA Experiment 20001557 PARAMETER Experiment Name: At_Drought_Soil_Dry_P Parameter: Plant Line Value: WS
  misc_feature: MA Experiment 20001557 PARAMETER Experiment Name: At_Drought_Soil_Dry_P Parameter: Post Timepoint (hr) Value: 3
  misc_feature: MA Experiment 20001557 PARAMETER Experiment Name: At_Drought_Soil_Dry_P Parameter: Post-Treatment Value: Re-Water vs. No Drought
  misc_feature: MA Experiment 20001557 PARAMETER Experiment Name: At_Drought_Soil_Dry_P Parameter: Timepoint (day) Value: 13
  misc_feature: MA Experiment 20001557 PARAMETER Experiment Name: At_Drought_Soil_Dry_P Parameter: Treatment Value: Drought vs. No Drought
  misc_feature: MA Experiment ID: 20001558 Result: Up-regulated in Transcription
  misc_feature: MA Experiment 20001558 PARAMETER Experiment Name: At_Drought_Soil_Dry_P Parameter: Age (day) Value: 27
  misc_feature: MA Experiment 20001558 PARAMETER Experiment Name: At_Drought_Soil_Dry_P Parameter: Organism Value: A. thaliana
  misc_feature: MA Experiment 20001558 PARAMETER Experiment Name: At_Drought_Soil_Dry_P Parameter: Plant Line Value: WS
  misc_feature: MA Experiment 20001558 PARAMETER Experiment Name: At_Drought_Soil_Dry_P Parameter: Post Timepoint (hr) Value: 6
  misc_feature: MA Experiment 20001558 PARAMETER Experiment Name: At_Drought_Soil_Dry_P Parameter: Post-Treatment Value: Re-Water vs. No Drought
  misc_feature: MA Experiment 20001558 PARAMETER Experiment Name: At_Drought_Soil_Dry_P Parameter: Timepoint (day) Value: 13
  misc_feature: MA Experiment 20001558 PARAMETER Experiment Name: At_Drought_Soil_Dry_P Parameter: Treatment Value: Drought vs. No Drought
  misc_feature: MA Experiment ID: 20001560 Result: Up-regulated in Transcription
  misc_feature: MA Experiment 20001560 PARAMETER Experiment Name: At_Drought_Soil_Dry_P Parameter: Age (day) Value: 28
  misc_feature: MA Experiment 20001560 PARAMETER Experiment Name: At_Drought_Soil_Dry_P Parameter: Organism Value: A. thaliana
  misc_feature: MA Experiment 20001560 PARAMETER Experiment Name: At_Drought_Soil_Dry_P Parameter: Plant Line Value: WS
  misc_feature: MA Experiment 20001560 PARAMETER Experiment Name: At_Drought_Soil_Dry_P Parameter: Post Timepoint (hr) Value: None
  misc_feature: MA Experiment 20001560 PARAMETER Experiment Name: At_Drought_Soil_Dry_P Parameter: Post-Treatment Value: None
  misc_feature: MA Experiment 20001560 PARAMETER Experiment Name: At_Drought_Soil_Dry_P Parameter: Timepoint (day) Value: 14
  misc_feature: MA Experiment 20001560 PARAMETER Experiment Name: At_Drought_Soil_Dry_P Parameter: Treatment Value: Drought vs. No Drought
  misc_feature: MA Experiment ID: 20001911 Result: Down-regulated in Transcription
  misc_feature: MA Experiment 20001911 PARAMETER Experiment Name: At_Drought_Reproduction_P Parameter: Age (day) Value: 40
  misc_feature: MA Experiment 20001911 PARAMETER Experiment Name: At_Drought_Reproduction_P Parameter: Organism Value: A. thaliana
  misc_feature: MA Experiment 20001911 PARAMETER Experiment Name: At_Drought_Reproduction_P Parameter: Plant Line Value: WS
  misc_feature: MA Experiment 20001911 PARAMETER Experiment Name: At_Drought_Reproduction_P Parameter: Timepoint (day) Value: 10
  misc_feature: MA Experiment 20001911 PARAMETER Experiment Name: At_Drought_Reproduction_P Parameter: Tissue Value: Flowers
  misc_feature: MA Experiment 20001911 PARAMETER Experiment Name: At_Drought_Reproduction_P Parameter: Treatment Value: Drought vs. No Drought
tttcaactcaaatagcttcacagttttactaatctctctcatcttcttcccaacatcaaagaagacctttacttctggttagaatagaccaagaacactgagtacgacaaagaaccatgatgaatctttcttctcgtcgcgcctcttccactctcacattgagcttcactgttctccttttagcttccacaggttcgtatggctcaacattcacattcgctaatcggtgcggctacaccgtatggcctggaatcctatcgaatgctggctcacctactctctccaccaccggatttgagctccctaaaggcacctctcgctctctccaagctcccaccggttggtccggtcgattctgggctcgtaccggttgcaagttcgacagttctggctccggtacatgcaaaaccggtgactgcggctccaacgctgtcgaatgcgccgggcttggtgccgcaccgcctgtaactctcgcggagttcactctaggcactggcggcgatgatttctacgacgttagtctcgtcgacggttacaacattccgatgatagttgaagtcgccggtggatctgggcagtgcgcttctaccggatgcactacggatcttaacattcagtgccctgctgagctgcgtttcggcgacggagacgcttgcaaaagcgcgtgtttagcgtttcggagtcctgaatactgttgcagcggcgcgtatgctacaccttctagttgtcggccttccgtgtattcggagatgtttaaagccgcgtgtcctcgctcctatagctacgcttacgacgatgctacgagcactttcacttgcgccggtggagattatacggtgacgttttgcccttcttcccctagtcaaaaatcgactagctactcccctccagtgacagactcgtcgtcgacctcacaaggttccgatcctgtgcctggttctgatactggttacgctggtcagggtcaacagactccaggtcaaggtaatgtgtacgggtcacaggggactgggtcggagatgggtacgggtgagaccatgttacaagacggatcatggatggctggtttggccatgggagaggcaagcagaccagccggcgtttcattgacagtgctgcttgctgcatttacttttccgtttattttctcgtagcatcatcgtctttagatttggtagtcgttttgttagcattgcctttgtttagtttttgttgatactcgatgattatcgcttaagactgcgacaatttgggttttaggcttttagggttttgcattgtagctttgtcgtgtacgcgcgtgtttgcttgtatcatctgtcattgaagattgtttatcatgttcgaaattgtgagatatgctttgtgatttaaagaaagatcttttgtggcttt

SEQ ID NO: 105842 - protein, 345 aa, Arabidopsis thaliana; identical to SEQ ID NO: 21922
  peptide (1)..(345): Ceres Seq. ID no. 13618159
  misc_feature (36)..(245): Pfam Name: Thaumatin family Pfam Description: Thaumatin family
  misc_feature (1)..(345): Homolog of NCBI NO: 18420282 NR Description: thaumatin-like protein, putative [Arabidopsis >gi|17979355|gb|AAL49903.1| putative thaumatin protein thaliana] >gi|20466021|gb|AAM20232.1| putative thaumatin
  misc_feature (1)..(345): Homolog of NCBI NO: 21592749 NR Description: putative thaumatin-like protein [Arabidopsis
  misc_feature (26)..(345): Homolog of NCBI NO: 7442168 NR Description: pathogenesis-related protein F20M13.220 -
  misc_feature (11)..(248): Homolog of NCBI NO: 15233738 NR Description: thaumatin family [Arabidopsis thaliana]
  misc_feature (15)..(248): Homolog of NCBI NO: 2262099 NR Description: thaumatin isolog [Arabidopsis thaliana]
  misc_feature (13)..(293): Homolog of NCBI NO: 25296204 NR Description: hypothetical protein T20H2.19 [imported] - thaliana >gi|8778995|gb|AAF79910.1|AC022472_19 Contains to SCUTL1 mRNA from Vitis vinifera gb|AF195653 and is a member of
  misc_feature (6)..(257): Homolog of NCBI NO: 37531042 NR Description: putative thaumatin-like protein [Oryza sativa
  misc_feature (31)..(293): Homolog of NCBI NO: 30686652 NR Description: thaumatin family [Arabidopsis thaliana] calreticulin, putative [Arabidopsis thaliana]
  misc_feature (13)..(277): Homolog of NCBI NO: 15222875 NR Description: thaumatin family [Arabidopsis thaliana]
  misc_feature (13)..(246): Homolog of NCBI NO: 4105697 NR Description: thaumatin-like protein [Arabidopsis thaliana]

SEQ ID NO: 105843 - protein, 344 aa, Arabidopsis thaliana; identical to SEQ ID NO: 21923
  peptide (1)..(344): Ceres Seq. ID no. 13618160
  misc_feature (35)..(244): Pfam Name: Thaumatin family Pfam Description: Thaumatin family
  misc_feature (1)..(344): Homolog of NCBI NO: 18420282 NR Description: thaumatin-like protein, putative [Arabidopsis >gi|17979355|gb|AAL49903.1| putative thaumatin protein thaliana] >gi|20466021|gb|AAM20232.1| putative thaumatin
  misc_feature (1)..(344): Homolog of NCBI NO: 21592749 NR Description: putative thaumatin-like protein [Arabidopsis
  misc_feature (25)..(344): Homolog of NCBI NO: 7442168 NR Description: pathogenesis-related protein F20M13.220 -
  misc_feature (10)..(247): Homolog of NCBI NO: 15233738 NR Description: thaumatin family [Arabidopsis thaliana]
  misc_feature (14)..(247): Homolog of NCBI NO: 2262099 NR Description: thaumatin isolog [Arabidopsis thaliana]
  misc_feature (12)..(292): Homolog of NCBI NO: 25296204 NR Description: hypothetical protein T20H2.19 [imported] - thaliana >gi|8778995|gb|AAF79910.1|AC022472_19 Contains to SCUTL1 mRNA from Vitis vinifera gb|AF195653 and is a member of
  misc_feature (5)..(256): Homolog of NCBI NO: 37531042 NR Description: putative thaumatin-like protein [Oryza sativa
  misc_feature (30)..(292): Homolog of NCBI NO: 30686652 NR Description: thaumatin family [Arabidopsis thaliana] calreticulin, putative [Arabidopsis thaliana]
  misc_feature (12)..(276): Homolog of NCBI NO: 15222875 NR Description: thaumatin family [Arabidopsis thaliana]
  misc_feature (12)..(245): Homolog of NCBI NO: 4105697 NR Description: thaumatin-like protein [Arabidopsis thaliana]

SEQ ID NO: 105844 - protein, 202 aa, Arabidopsis thaliana; identical to SEQ ID NO: 21924
  peptide (1)..(202): Ceres Seq. ID no. 13618161
  misc_feature (1)..(102): Pfam Name: Thaumatin family Pfam Description: Thaumatin family
  misc_feature (1)..(202): Homolog of NCBI NO: 18420282 NR Description: thaumatin-like protein, putative [Arabidopsis >gi|17979355|gb|AAL49903.1| putative thaumatin protein thaliana] >gi|20466021|gb|AAM20232.1| putative thaumatin
  misc_feature (1)..(202): Homolog of NCBI NO: 21592749 NR Description: putative thaumatin-like protein [Arabidopsis
  misc_feature (1)..(202): Homolog of NCBI NO: 7442168 NR Description: pathogenesis-related protein F20M13.220 -
  misc_feature (1)..(105): Homolog of NCBI NO: 15233738 NR Description: thaumatin family [Arabidopsis thaliana]
  misc_feature (1)..(105): Homolog of NCBI NO: 2262099 NR Description: thaumatin isolog [Arabidopsis thaliana]
  misc_feature (1)..(150): Homolog of NCBI NO: 25296204 NR Description: hypothetical protein T20H2.19 [imported] - thaliana >gi|8778995|gb|AAF79910.1|AC022472_19 Contains to SCUTL1 mRNA from Vitis vinifera gb|AF195653 and is a member of
  misc_feature (1)..(114): Homolog of NCBI NO: 37531042 NR Description: putative thaumatin-like protein [Oryza sativa
  misc_feature (1)..(150): Homolog of NCBI NO: 30686652 NR Description: thaumatin family [Arabidopsis thaliana] calreticulin, putative [Arabidopsis thaliana]
  misc_feature (1)..(134): Homolog of NCBI NO: 15222875 NR Description: thaumatin family [Arabidopsis thaliana]
  misc_feature (1)..(103): Homolog of NCBI NO: 4105697 NR Description: thaumatin-like protein [Arabidopsis thaliana]

SEQ ID NO: 105845 - DNA, 1835 bp, Arabidopsis thaliana
  misc_feature (1)..(1835): Ceres Seq. ID no. 13618170
  misc_feature: MA Experiment ID: 20000180 Result: Down-regulated in Transcription
  misc_feature: MA Experiment 20000180 PARAMETER Experiment Name: At_Germinating_Seeds_P Parameter: Age (hr) Value: 24 vs. 0
  misc_feature: MA Experiment 20000180 PARAMETER Experiment Name: At_Germinating_Seeds_P Parameter: Tissue Value: Germinating Seeds
  misc_feature: MA Experiment ID: 20000234 Result: Up-regulated in Transcription
  misc_feature: MA Experiment 20000234 PARAMETER Experiment Name: At_Siliques_P Parameter: Age (day) Value: 21
  misc_feature: MA Experiment 20000234 PARAMETER Experiment Name: At_Siliques_P Parameter: Organism Value: A. thaliana
  misc_feature: MA Experiment 20000234 PARAMETER Experiment Name: At_Siliques_P Parameter: Plant Line Value: WS
  misc_feature: MA Experiment 20000234 PARAMETER Experiment Name: At_Siliques_P Parameter: Tissue Value: Less Than 5mm Siliques vs. Whole Plant
  misc_feature: MA Experiment ID: 20000235 Result: Up-regulated in Transcription
  misc_feature: MA Experiment 20000235 PARAMETER Experiment Name: At_Siliques_P Parameter: Age (day) Value: 21
  misc_feature: MA Experiment 20000235 PARAMETER Experiment Name: At_Siliques_P Parameter: Organism Value: A. thaliana
  misc_feature: MA Experiment 20000235 PARAMETER Experiment Name: At_Siliques_P Parameter: Plant Line Value: WS
  misc_feature: MA Experiment 20000235 PARAMETER Experiment Name: At_Siliques_P Parameter: Tissue Value: 5-10mm Siliques vs. Whole Plant
  misc_feature: MA Experiment ID: 20000264 Result: Up-regulated in Transcription
  misc_feature: MA Experiment 20000264 PARAMETER Experiment Name: At_Open_Flower_P Parameter: Age (day) Value: 21
  misc_feature: MA Experiment 20000264 PARAMETER Experiment Name: At_Open_Flower_P Parameter: Plant Line Value: WS
  misc_feature: MA Experiment 20000264 PARAMETER Experiment Name: At_Open_Flower_P Parameter: Tissue Value: Open Flower vs. Whole Plant
  misc_feature: MA Experiment ID: 20000265 Result: Up-regulated in Transcription
  misc_feature: MA Experiment 20000265 PARAMETER Experiment Name: At_Open_Flower_P Parameter: Age (day) Value: 21
  misc_feature: MA Experiment 20000265 PARAMETER Experiment Name: At_Open_Flower_P Parameter: Plant Line Value: WS
  misc_feature: MA Experiment 20000265 PARAMETER Experiment Name: At_Open_Flower_P Parameter: Tissue Value: Closed Flower vs. Whole Plant
  misc_feature: MA Experiment ID: 20000286 Result: Up-regulated in Transcription
  misc_feature: MA Experiment 20000286 PARAMETER Experiment Name: At_Open_Flower_P Parameter: Age (day) Value: 21
  misc_feature: MA Experiment 20000286 PARAMETER Experiment Name: At_Open_Flower_P Parameter: Plant Line Value: WS
  misc_feature: MA Experiment 20000286 PARAMETER Experiment Name: At_Open_Flower_P Parameter: Tissue Value: Half Open vs. Whole Plant
  misc_feature: MA Experiment ID: 20000495 Result: Up-regulated in Transcription
  misc_feature: MA Experiment 20000495 PARAMETER Experiment Name: At_Guard_Cells_P Parameter: Harvest Date Value: 8/2/2002
  misc_feature: MA Experiment 20000495 PARAMETER Experiment Name: At_Guard_Cells_P Parameter: Organism Value: A. thaliana
  misc_feature: MA Experiment 20000495 PARAMETER Experiment Name: At_Guard_Cells_P Parameter: Tissue Value: Guard Cells vs. Leaves
  misc_feature: MA Experiment ID: 20000794 Result: Up-regulated in Transcription
  misc_feature: MA Experiment 20000794 PARAMETER Experiment Name: At_Petals_P Parameter: Age (day) Value: 23-25 days
  misc_feature: MA Experiment 20000794 PARAMETER Experiment Name: At_Petals_P Parameter: Plant Line Value: WS
  misc_feature: MA Experiment 20000794 PARAMETER Experiment Name: At_Petals_P Parameter: Tissue Value: Petals vs. Whole plant
gtagttgcaaacaccgatcagtcacagacagtagcctctcaccatcaccaccacggcggccgtcaccgacgccgatacaccatgaaattacatttacaccctctctcacttgtcttcttctttttcttcttcttcttccgaccgacaatgtcgtcgaaccagcacgattactccgacgcactctcaaaatcaattctcttcttcgaaggccagcgctccggttacctcccaaacgaccagcgtatgacctggcgccgtaactccggtctgagcgacggttggacacacaacatcgatttaaccggcggttattacgacgccggagacaacgtcaaattcaatttcccgatggctttcaccaccacaatgctcgcctggagcgtaattgagttcggcgaattcatgccttcgtcggagctacgtaactctctcgtggctctccggtggagctctaattacctcctcaaatccgtttcacagctacctaaccggatcttcgtccaggtaggtgatccgatagcagatcataattgctgggaaagaccagaagacatggatacaccacggactgcttacgccgttaatgccccgaatccggcttctgaagttgccggagaaactacggcggccctctcagctgcttcgattgctttccgatcatcggatccaggatactctcaaacattgctccaaaatgctgtcaaaacttttcagttcgctgatatgtatcgcggtgcttatagcagcaatgacgatatcaaaaatgatgtgtgtcctttctactgcgatttcaacggatttcaggatgagttattgtggggagcagcttggctaagaaaagcgactggtgatgaaagctaccttaattacatagagagtaaccgtgaaccgtttggtgctaacgataacgtagacgaatttggctgggacaacaaagttggtggacttaatgttctcgtttcgaaggaagttattgaaggaaatatgtacaacttagaggcgtacaaggcatcagcagagagcttcatgtgtagtctggtcccggaatcttcgggaccgcatgttgagtatacttccgctggtctactttacaagcccggcggtagccagctccaacatgcgaccaccatatctttcctcctcctcgtatacgctcaatatctttcaagaagctctctctccctcaattgcggcacccttaccgtccctcctgattatctccgccgtcttgccaagaaacaggtggactatatattggggaataatccgatgggattatcgtacatggtcggatacggagagagatatccaaagaggatccatcaccgtggctcatcattgccatcgattgtggaccatccagaagccatcagatgcaaagacgggtcggtttatttcaattctaccgaaccgaacccgaacgttttgattggagcggtggtgggtgggcccggagaggacgatatgtacgatgatgatcggtccgatttccgcaagtccgagcccactacttacatcaatgctcctttcgttggcgttttggcgtactttgcagccaatcctggttctagctaagctgacgacatgggagtaaaattggaaaacattattcttaagttccaagagtatgggagttcttttttttcttacaagtctctcatcttcttgcccaagtaaagaaggaaaaagttcttacagttaaaatagtttttcttttacgcaaaattaatctgaataacttattcggattattcacctgttgatcatttgatacttctttttttatcaaatgtaattaatagtctattcatatatacatatatataatggttgct

SEQ ID NO: 105846 - protein, 524 aa, Arabidopsis thaliana; identical to SEQ ID NO: 43421
  peptide (1)..(524): Ceres Seq. ID no. 13618171
  misc_feature (56)..(517): Pfam Name: Glycosyl hydrolase family 9 Pfam Description: Glycosyl hydrolase family 9
  misc_feature (28)..(524): Homolog of NCBI NO: 18420359 NR Description: glycosyl hydrolase family 9 [Arabidopsis thaliana]
  misc_feature (50)..(524): Homolog of NCBI NO: 7484850 NR Description: cellulase (EC 3.2.1.4) F19H22.110 - Arabidopsis
  misc_feature (32)..(521): Homolog of NCBI NO: 22329248 NR Description: glycosyl hydrolase family 9 [Arabidopsis thaliana]
  misc_feature (28)..(524): Homolog of NCBI NO: 15234904 NR Description: glycosyl hydrolase family 9 [Arabidopsis thaliana]
  misc_feature (32)..(521): Homolog of NCBI NO: 7484851 NR Description: cellulase (EC 3.2.1.4) F19H22.90 - Arabidopsis
  misc_feature (55)..(520): Homolog of NCBI NO: 4220423 NR Description: putative cellulase [Fragaria x ananassa]
  misc_feature (55)..(520): Homolog of NCBI NO: 4972234 NR Description: endo-beta-1,4-glucanase [Fragaria x ananassa]
  misc_feature (55)..(520): Homolog of NCBI NO: 3549291 NR Description: endo-1,4-beta-glucanase precursor [Fragaria x
  misc_feature (38)..(520): Homolog of NCBI NO: 15223222 NR Description: glycosyl hydrolase family 9
  misc_feature (55)..(520): Homolog of NCBI NO: 3892180 NR Description: cellulase [Fragaria x ananassa]

SEQ ID NO: 105847 - protein, 497 aa, Arabidopsis thaliana; identical to SEQ ID NO: 43422
  peptide (1)..(497): Ceres Seq. ID no. 13618172
  misc_feature (29)..(490): Pfam Name: Glycosyl hydrolase family 9 Pfam Description: Glycosyl hydrolase family 9
  misc_feature (1)..(497): Homolog of NCBI NO: 18420359 NR Description: glycosyl hydrolase family 9 [Arabidopsis thaliana]
  misc_feature (23)..(497): Homolog of NCBI NO: 7484850 NR Description: cellulase (EC 3.2.1.4) F19H22.110 - Arabidopsis
  misc_feature (5)..(494): Homolog of NCBI NO: 22329248 NR Description: glycosyl hydrolase family 9 [Arabidopsis thaliana]
  misc_feature (1)..(497): Homolog of NCBI NO: 15234904 NR Description: glycosyl hydrolase family 9 [Arabidopsis thaliana]
  misc_feature (5)..(494): Homolog of NCBI NO: 7484851 NR Description: cellulase (EC 3.2.1.4) F19H22.90 - Arabidopsis
  misc_feature (28)..(493): Homolog of NCBI NO: 4220423 NR Description: putative cellulase [Fragaria x ananassa]
  misc_feature (28)..(493): Homolog of NCBI NO: 4972234 NR Description: endo-beta-1,4-glucanase [Fragaria x ananassa]
  misc_feature (28)..(493): Homolog of NCBI NO: 3549291 NR Description: endo-1,4-beta-glucanase precursor [Fragaria x
  misc_feature (11)..(493): Homolog of NCBI NO: 15223222 NR Description: glycosyl hydrolase family 9
  misc_feature (28)..(493): Homolog of NCBI NO: 3892180 NR Description: cellulase [Fragaria x ananassa]

SEQ ID NO: 105848 - protein, 475 aa, Arabidopsis thaliana; identical to SEQ ID NO: 43423
  peptide (1)..(475): Ceres Seq. ID no. 13618173
  misc_feature (7)..(468): Pfam Name: Glycosyl hydrolase family 9 Pfam Description: Glycosyl hydrolase family 9
  misc_feature (1)..(475): Homolog of NCBI NO: 18420359 NR Description: glycosyl hydrolase family 9 [Arabidopsis thaliana]
  misc_feature (1)..(475): Homolog of NCBI NO: 7484850 NR Description: cellulase (EC 3.2.1.4) F19H22.110 - Arabidopsis
  misc_feature (1)..(472): Homolog of NCBI NO: 22329248 NR Description: glycosyl hydrolase family 9 [Arabidopsis thaliana]
  misc_feature (1)..(475): Homolog of NCBI NO: 15234904 NR Description: glycosyl hydrolase family 9 [Arabidopsis thaliana]
  misc_feature (1)..(472): Homolog of NCBI NO: 7484851 NR Description: cellulase (EC 3.2.1.4) F19H22.90 - Arabidopsis
  misc_feature (6)..(471): Homolog of NCBI NO: 4220423 NR Description: putative cellulase [Fragaria x ananassa]
  misc_feature (6)..(471): Homolog of NCBI NO: 4972234 NR Description: endo-beta-1,4-glucanase [Fragaria x ananassa]
  misc_feature (6)..(471): Homolog of NCBI NO: 3549291 NR Description: endo-1,4-beta-glucanase precursor [Fragaria x
  misc_feature (1)..(471): Homolog of NCBI NO: 15223222 NR Description: glycosyl hydrolase family 9
  misc_feature (6)..(471): Homolog of NCBI NO: 3892180 NR Description: cellulase [Fragaria x ananassa]

SEQ ID NO: 105849 - DNA, 1358 bp, Arabidopsis thaliana
  misc_feature (1)..(1358): Ceres Seq. ID no. 13618192
  misc_feature: MA Experiment ID: 108433 Result: Down-regulated in Transcription
  misc_feature: MA Experiment 108433 PARAMETER Experiment Name: At_rhl_Mutant2_cDNA_P Parameter: Age (day) Value: 7
  misc_feature: MA Experiment 108433 PARAMETER Experiment Name: At_rhl_Mutant2_cDNA_P Parameter: Organism Value: A. thaliana
  misc_feature: MA Experiment 108433 PARAMETER Experiment Name: At_rhl_Mutant2_cDNA_P Parameter: Plant Line Value: rhl Mutant vs. wt landsburg
  misc_feature: MA Experiment 108433 PARAMETER Experiment Name: At_rhl_Mutant2_cDNA_P Parameter: Tissue Value: Roots
  misc_feature: MA Experiment ID: 108434 Result: Up-regulated in Transcription
  misc_feature: MA Experiment 108434 PARAMETER Experiment Name: At_Root_Tips_cDNA_P Parameter: Tissue Value: Root Tips
  misc_feature: MA Experiment ID: 108461 Result: Up-regulated in Transcription
  misc_feature: MA Experiment 108461 PARAMETER Experiment Name: At_Germinating_Seeds_cDNA_P Parameter: Age (day) Value: 1 vs. 0
  misc_feature: MA Experiment 108461 PARAMETER Experiment Name: At_Germinating_Seeds_cDNA_P Parameter: Tissue Value: Germinating Seeds
  misc_feature: MA Experiment ID: 108473 Result: Down-regulated in Transcription
  misc_feature: MA Experiment 108473 PARAMETER Experiment Name: At_Drought_Flowers_cDNA_P Parameter: Timepoint (hr) Value: 7 d
  misc_feature: MA Experiment 108473 PARAMETER Experiment Name: At_Drought_Flowers_cDNA_P Parameter: Tissue Value: Flower
  misc_feature: MA Experiment 108473 PARAMETER Experiment Name: At_Drought_Flowers_cDNA_P Parameter: Treatment Value: Drought vs. No Drought
  misc_feature: MA Experiment ID: 108573 Result: Up-regulated in Transcription
  misc_feature: MA Experiment 108573 PARAMETER Experiment Name: At_Drought_cDNA_P Parameter: Timepoint (hr) Value: 6
  misc_feature: MA Experiment 108573 PARAMETER Experiment Name: At_Drought_cDNA_P Parameter: Tissue Value: Aerial
  misc_feature: MA Experiment 108573 PARAMETER Experiment Name: At_Drought_cDNA_P Parameter: Treatment Value: Drought vs. No Drought
  misc_feature: MA Experiment ID: 20000111 Result: Down-regulated in Transcription
  misc_feature: MA Experiment 20000111 PARAMETER Experiment Name: At_42deg_Heat_cDNA_P Parameter: Temperature (deg C) Value: 42 vs. 22
  misc_feature: MA Experiment 20000111 PARAMETER Experiment Name: At_42deg_Heat_cDNA_P Parameter: Timepoint (hr) Value: 6
  misc_feature: MA Experiment 20000111 PARAMETER Experiment Name: At_42deg_Heat_cDNA_P Parameter: Tissue Value: Aerial
  misc_feature: MA Experiment ID: 20000171 Result: Down-regulated in Transcription
  misc_feature: MA Experiment 20000171 PARAMETER Experiment Name: At_42deg_Heat_P Parameter: Age (day) Value: 14
  misc_feature: MA Experiment 20000171 PARAMETER Experiment Name: At_42deg_Heat_P Parameter: Organism Value: A. thaliana
  misc_feature: MA Experiment 20000171 PARAMETER Experiment Name: At_42deg_Heat_P Parameter: Plant Line Value: WS
  misc_feature: MA Experiment 20000171 PARAMETER Experiment Name: At_42deg_Heat_P Parameter: Temperature (deg C) Value: 42 vs. 22
  misc_feature: MA Experiment 20000171 PARAMETER Experiment Name: At_42deg_Heat_P Parameter: Timepoint (hr) Value: 1
  misc_feature: MA Experiment 20000171 PARAMETER Experiment Name: At_42deg_Heat_P Parameter: Tissue Value: Aerial
  misc_feature: MA Experiment ID: 20000173 Result: Down-regulated in Transcription
  misc_feature: MA Experiment 20000173 PARAMETER Experiment Name: At_42deg_Heat_P Parameter: Age (day) Value: 14
  misc_feature: MA Experiment 20000173 PARAMETER Experiment Name: At_42deg_Heat_P Parameter: Organism Value: A. thaliana
  misc_feature: MA Experiment 20000173 PARAMETER Experiment Name: At_42deg_Heat_P Parameter: Plant Line Value: WS
  misc_feature: MA Experiment 20000173 PARAMETER Experiment Name: At_42deg_Heat_P Parameter: Temperature (deg C) Value: 42 vs. 22
  misc_feature: MA Experiment 20000173 PARAMETER Experiment Name: At_42deg_Heat_P Parameter: Timepoint (hr) Value: 6
  misc_feature: MA Experiment 20000173 PARAMETER Experiment Name: At_42deg_Heat_P Parameter: Tissue Value: Aerial
  misc_feature: MA Experiment ID: 20000180 Result: Up-regulated in Transcription
  misc_feature: MA Experiment 20000180 PARAMETER Experiment Name: At_Germinating_Seeds_P Parameter: Age (hr) Value: 24 vs. 0
  misc_feature: MA Experiment 20000180 PARAMETER Experiment Name: At_Germinating_Seeds_P Parameter: Tissue Value: Germinating Seeds
  misc_feature: MA Experiment ID: 20000184 Result: Down-regulated in Transcription
  misc_feature: MA Experiment 20000184 PARAMETER Experiment Name: At_Shoots__P Parameter: Age (day) Value: 7
  misc_feature: MA Experiment 20000184 PARAMETER Experiment Name: At_Shoots__P Parameter: Tissue Value: Shoots vs. Whole Plant
  misc_feature: MA Experiment ID: 20000224 Result: Up-regulated in Transcription
  misc_feature: MA Experiment ID: 20000265 Result: Up-regulated in Transcription
  misc_feature: MA Experiment 20000265 PARAMETER Experiment Name: At_Open_Flower_P Parameter: Age (day) Value: 21
  misc_feature: MA Experiment 20000265 PARAMETER Experiment Name: At_Open_Flower_P Parameter: Plant Line Value: WS
  misc_feature: MA Experiment 20000265 PARAMETER Experiment Name: At_Open_Flower_P Parameter: Tissue Value: Closed Flower vs. Whole Plant
  misc_feature: MA Experiment ID: 20000445 Result: Up-regulated in Transcription
  misc_feature: MA Experiment 20000445 PARAMETER Experiment Name: At_100uM_NAA__P Parameter: Age (day) Value: 14
  misc_feature: MA Experiment 20000445 PARAMETER Experiment Name: At_100uM_NAA__P Parameter: Organism Value: A. thaliana
  misc_feature: MA Experiment 20000445 PARAMETER Experiment Name: At_100uM_NAA__P Parameter: Plant Line Value: WS
  misc_feature: MA Experiment 20000445 PARAMETER Experiment Name: At_100uM_NAA__P Parameter: Timepoint (hr) Value: 6
  misc_feature: MA Experiment 20000445 PARAMETER Experiment Name: At_100uM_NAA__P Parameter: Tissue Value: Aerial
  misc_feature: MA Experiment 20000445 PARAMETER Experiment Name: At_100uM_NAA__P Parameter: Treatment Value: 100uM NAA vs. No Treatment
aagttcataactgaaaaataaaaataagacagaaaacaaagttaaaaataaaataaaaacggaagagagaaaataaataaataaaatcactcaaaggatttccacagtttttctttccatgttgatttagcccattcgtagacttcctccgcgccgccgttagacgccgcctcggaagtatcagcaaccgccgtggtgttcgtcgccttcaaaggctcgtttctctcctctctctgagatctgaatttgagatgtttaaaaaaatgagtgctactacaagcaagacggatcagaaagcggcattagacattgcatcatggctattcaatgtggttacttccgttggaatcatcctcgttaacaaagctttaatggctacttatggctttagtttcgctactacattaaccggtttgcatttcggaacaacgacattgttgacaactttcttgacatggcttggttatatccaaccttctcagcttccttggcctgatcttttgaaattcgttttgttcgctaacttctctatcgttgggatgaacgtcagtctcatgtggaattctgttggcttctaccagattgcgaagctgagtatgatcccggtttcttgtcttctagaagttatgcttgacaatgtcaggtattcaagagatacaaagcttagcattttgttagttcttgctggtgttgccgtctgtactgtaaccgatgttagtgtcaatctcaacggatttctagctgccgctattgctgtctggagcaccgcgcttcagcaatactatgtacattatctacaacggaaatattcactcggttctttcaatttactggcgcataccgctccagttcaagctgcgtcattgttgttggtcggaccatttctagactactggttgactaaccaaagagtggatgcatacaacttttcatttgtatctctgttcttcttaatactctcgtgcagtatcgcggttgggaccaatctcagccaattcatctgtattggaagattcacggcggtgtctttccaagtacttggtcacatgaagacaattctggttttggttttgggattcactttcttcggtaaggaaggattaaacctacaagtagtgcttggaatgctgattgctatactcggtatgatctggtacggtaatgcatcttctaaaccgggtggtaaagaacgtcgtagcctgtctattcccataaccaagtcacagaaactatctgaaacaaacgaatctgatgaaaaggtgtagaagaaagaagtgaatcgcattgacatagaaacaaaaacaagatactcagatacaaacaggtagagttatcaaatgggatattatttataaacc

SEQ ID NO: 105850 - protein, 337 aa, Arabidopsis thaliana; identical to SEQ ID NO: 22961
  peptide (1)..(337): Ceres Seq. ID no. 13618193
  misc_feature (1)..(337): Homolog of NCBI NO: 18420440 NR Description: transporter-related [Arabidopsis thaliana]
  misc_feature (5)..(337): Homolog of NCBI NO: 21593003 NR Description: unknown [Arabidopsis thaliana]
  misc_feature (5)..(337): Homolog of NCBI NO: 7486049 NR Description: hypothetical protein F23K16.20 - Arabidopsis >gi|5042155|emb|CAB44674.1| putative protein [Arabidopsis >gi|7270923|emb|CAB80602.1| putative protein [Arabidopsis
  misc_feature (7)..(335): Homolog of NCBI NO: 15234794 NR Description: transporter-related [Arabidopsis thaliana]
  misc_feature (7)..(335): Homolog of NCBI NO: 18399097 NR Description: transporter-related [Arabidopsis thaliana]
  misc_feature (7)..(335): Homolog of NCBI NO: 21595054 NR Description: unknown [Arabidopsis thaliana]
  misc_feature (7)..(337): Homolog of NCBI NO: 30313364 NR Description: putative transmembrane protein [Oryza sativa]
  misc_feature (5)..(337): Homolog of NCBI NO: 18394949 NR Description: transporter-related [Arabidopsis thaliana]
  misc_feature (5)..(337): Homolog of NCBI NO: 21536703 NR Description: unknown [Arabidopsis thaliana]
  misc_feature (11)..(337): Homolog of NCBI NO: 18411172 NR Description: transporter-related [Arabidopsis thaliana]

SEQ ID NO: 105851 - protein, 333 aa, Arabidopsis thaliana; identical to SEQ ID NO: 22962
  peptide (1)..(333): Ceres Seq. ID no. 13618194
  misc_feature (1)..(333): Homolog of NCBI NO: 18420440 NR Description: transporter-related [Arabidopsis thaliana]
  misc_feature (1)..(333): Homolog of NCBI NO: 21593003 NR Description: unknown [Arabidopsis thaliana]
  misc_feature (1)..(333): Homolog of NCBI NO: 7486049 NR Description: hypothetical protein F23K16.20 - Arabidopsis >gi|5042155|emb|CAB44674.1| putative protein [Arabidopsis >gi|7270923|emb|CAB80602.1| putative protein [Arabidopsis
  misc_feature (3)..(331): Homolog of NCBI NO: 15234794 NR Description: transporter-related [Arabidopsis thaliana]
  misc_feature (3)..(331): Homolog of NCBI NO: 18399097 NR Description: transporter-related [Arabidopsis thaliana]
  misc_feature (3)..(331): Homolog of NCBI NO: 21595054 NR Description: unknown [Arabidopsis thaliana]
  misc_feature (3)..(333): Homolog of NCBI NO: 30313364 NR Description: putative transmembrane protein [Oryza sativa]
  misc_feature (1)..(333): Homolog of NCBI NO: 18394949 NR Description: transporter-related [Arabidopsis thaliana]
  misc_feature (1)..(333): Homolog of NCBI NO: 21536703 NR Description: unknown [Arabidopsis thaliana]
  misc_feature (7)..(333): Homolog of NCBI NO: 18411172 NR Description: transporter-related [Arabidopsis thaliana]

SEQ ID NO: 105852 - protein, 297 aa, Arabidopsis thaliana; identical to SEQ ID NO: 22963
  peptide (1)..(297): Ceres Seq. ID no. 13618195
  misc_feature (1)..(297): Homolog of NCBI NO: 18420440 NR Description: transporter-related [Arabidopsis thaliana]
  misc_feature (1)..(297): Homolog of NCBI NO: 21593003 NR Description: unknown [Arabidopsis thaliana]
  misc_feature (1)..(297): Homolog of NCBI NO: 7486049 NR Description: hypothetical protein F23K16.20 - Arabidopsis >gi|5042155|emb|CAB44674.1| putative protein [Arabidopsis >gi|7270923|emb|CAB80602.1| putative protein [Arabidopsis
  misc_feature (1)..(295): Homolog of NCBI NO: 15234794 NR Description: transporter-related [Arabidopsis thaliana]
  misc_feature (1)..(295): Homolog of NCBI NO: 18399097 NR Description: transporter-related [Arabidopsis thaliana]
  misc_feature (1)..(295): Homolog of NCBI NO: 21595054 NR Description: unknown [Arabidopsis thaliana]
  misc_feature (1)..(297): Homolog of NCBI NO: 30313364 NR Description: putative transmembrane protein [Oryza sativa]
  misc_feature (1)..(297): Homolog of NCBI NO: 18394949 NR Description: transporter-related [Arabidopsis thaliana]
  misc_feature (1)..(297): Homolog of NCBI NO: 21536703 NR Description: unknown [Arabidopsis thaliana]
  misc_feature (1)..(297): Homolog of NCBI NO: 18411172 NR Description: transporter-related [Arabidopsis thaliana]

SEQ ID NO: 105853 - DNA, 1943 bp, Arabidopsis thaliana
  misc_feature (1)..(1943): Ceres Seq. ID no. 13618204
  misc_feature: MA Experiment ID: 108435 Result: Up-regulated in Transcription
  misc_feature: MA Experiment 108435 PARAMETER Experiment Name: At_stm_Mutants_cDNA_P Parameter: Plant Line Value: wt Landsburg vs stm
  misc_feature: MA Experiment 108435 PARAMETER Experiment Name: At_stm_Mutants_cDNA_P Parameter: Tissue Value: Shoot Apical Meristem Region
  misc_feature: MA Experiment ID: 108461 Result: Up-regulated in Transcription
  misc_feature: MA Experiment 108461 PARAMETER Experiment Name: At_Germinating_Seeds_cDNA_P Parameter: Age (day) Value: 1 vs. 0
  misc_feature: MA Experiment 108461 PARAMETER Experiment Name: At_Germinating_Seeds_cDNA_P Parameter: Tissue Value: Germinating Seeds
  misc_feature: MA Experiment ID: 108579 Result: Up-regulated in Transcription
  misc_feature: MA Experiment 108579 PARAMETER Experiment Name: At_4deg_Cold_cDNA_P Parameter: Temperature (deg C) Value: 4 vs. 22
  misc_feature: MA Experiment 108579 PARAMETER Experiment Name: At_4deg_Cold_cDNA_P Parameter: Timepoint (hr) Value: 6
  misc_feature: MA Experiment 108579 PARAMETER Experiment Name: At_4deg_Cold_cDNA_P Parameter: Tissue Value: Aerial
  misc_feature: MA Experiment ID: 20000180 Result: Up-regulated in Transcription
  misc_feature: MA Experiment 20000180 PARAMETER Experiment Name: At_Germinating_Seeds_P Parameter: Age (hr) Value: 24 vs. 0
  misc_feature: MA Experiment 20000180 PARAMETER Experiment Name: At_Germinating_Seeds_P Parameter: Tissue Value: Germinating Seeds
  misc_feature: MA Experiment ID: 20000234 Result: Up-regulated in Transcription
  misc_feature: MA Experiment 20000234 PARAMETER Experiment Name: At_Siliques_P Parameter: Age (day) Value: 21
  misc_feature: MA Experiment 20000234 PARAMETER Experiment Name: At_Siliques_P Parameter: Organism Value: A. thaliana
  misc_feature: MA Experiment 20000234 PARAMETER Experiment Name: At_Siliques_P Parameter: Plant Line Value: WS
  misc_feature: MA Experiment 20000234 PARAMETER Experiment Name: At_Siliques_P Parameter: Tissue Value: Less Than 5mm Siliques vs. Whole Plant
  misc_feature: MA Experiment ID: 20000235 Result: Up-regulated in Transcription
  misc_feature: MA Experiment 20000235 PARAMETER Experiment Name: At_Siliques_P Parameter: Age (day) Value: 21
  misc_feature: MA Experiment 20000235 PARAMETER Experiment Name: At_Siliques_P Parameter: Organism Value: A. thaliana
  misc_feature: MA Experiment 20000235 PARAMETER Experiment Name: At_Siliques_P Parameter: Plant Line Value: WS
  misc_feature: MA Experiment 20000235 PARAMETER Experiment Name: At_Siliques_P Parameter: Tissue Value: 5-10mm Siliques vs. Whole Plant
  misc_feature: MA Experiment ID: 20000264 Result: Up-regulated in Transcription
  misc_feature: MA Experiment 20000264 PARAMETER Experiment Name: At_Open_Flower_P Parameter: Age (day) Value: 21
  misc_feature: MA Experiment 20000264 PARAMETER Experiment Name: At_Open_Flower_P Parameter: Plant Line Value: WS
  misc_feature: MA Experiment 20000264 PARAMETER Experiment Name: At_Open_Flower_P Parameter: Tissue Value: Open Flower vs. Whole Plant
  misc_feature: MA Experiment ID: 20000265 Result: Up-regulated in Transcription
  misc_feature: MA Experiment 20000265 PARAMETER Experiment Name: At_Open_Flower_P Parameter: Age (day) Value: 21
  misc_feature: MA Experiment 20000265 PARAMETER Experiment Name: At_Open_Flower_P Parameter: Plant Line Value: WS
  misc_feature: MA Experiment 20000265 PARAMETER Experiment Name: At_Open_Flower_P Parameter: Tissue Value: Closed Flower vs. Whole Plant
  misc_feature: MA Experiment ID: 20001560 Result: Up-regulated in Transcription
  misc_feature: MA Experiment 20001560 PARAMETER Experiment Name: At_Drought_Soil_Dry_P Parameter: Age (day) Value: 28
  misc_feature: MA Experiment 20001560 PARAMETER Experiment Name: At_Drought_Soil_Dry_P Parameter: Organism Value: A. thaliana
  misc_feature: MA Experiment 20001560 PARAMETER Experiment Name: At_Drought_Soil_Dry_P Parameter: Plant Line Value: WS
  misc_feature: MA Experiment 20001560 PARAMETER Experiment Name: At_Drought_Soil_Dry_P Parameter: Post Timepoint (hr) Value: None
  misc_feature: MA Experiment 20001560 PARAMETER Experiment Name: At_Drought_Soil_Dry_P Parameter: Post-Treatment Value: None
  misc_feature: MA Experiment 20001560 PARAMETER Experiment Name: At_Drought_Soil_Dry_P Parameter: Timepoint (day) Value: 14
  misc_feature: MA Experiment 20001560 PARAMETER Experiment Name: At_Drought_Soil_Dry_P Parameter: Treatment Value: Drought vs. No Drought
  misc_feature: MA Experiment ID: 20001911 Result: Down-regulated in Transcription
  misc_feature: MA Experiment 20001911 PARAMETER Experiment Name: At_Drought_Reproduction_P Parameter: Age (day) Value: 40
  misc_feature: MA Experiment 20001911 PARAMETER Experiment Name: At_Drought_Reproduction_P Parameter: Organism Value: A. thaliana
  misc_feature: MA Experiment 20001911 PARAMETER Experiment Name: At_Drought_Reproduction_P Parameter: Plant Line Value: WS
  misc_feature: MA Experiment 20001911 PARAMETER Experiment Name: At_Drought_Reproduction_P Parameter: Timepoint (day) Value: 10
  misc_feature: MA Experiment 20001911 PARAMETER Experiment Name: At_Drought_Reproduction_P Parameter: Tissue Value: Flowers
  misc_feature: MA Experiment 20001911 PARAMETER Experiment Name: At_Drought_Reproduction_P Parameter: Treatment Value: Drought vs. No Drought
tttttccccattttcttactctcttgccctttcttctctcactctccggcgactgttacgagtttttaacacttccgtcgtcttctcagttgttgttgttgtttatgacaagatcttgttctatccattaaaaccaaagaaatggaggaaggtcataaagaaccattggtgctaagagttgaaggatcacattgttctttatcagagatggatgattttgatctaactcgggctttagagaagccgaggcagctaaagatcgaacggaagagatcgtttgacgaaaggtcgatgagcgagttatcgactggctatgtaagacaagatagcattttagaaatggctcattctcctggaagtaggtcaatggtggacactcctctctctgttaggaactctttcgagcctcatccgatggttgctgaggcttgggaagctttgagaaggtcaatggtgttctttcgtggtcaacccgttggtaccattgcagcttatgaccatgcctccgaggaggtcttgaactatgatcaggtgtttgtacgtgactttgtaccaagtgcattggcgtttctgatgaatggagagcccgatatagtgaaaaacttcttgctcaagacacttcagcttcaaggttgggagaaacgggttgaccggttcaagcttggggaaggcgttatgccagcgagtttcaaggtgcttcatgatccagttcgtaaaaccgacacaattattgcggattttggagaaagcgctataggaagagtagcaccggtggattcaggattctggtggatcatacttctccgtgcttacacgaaatctacgggagatttgactttatctgagacaccagagtgtcagaggggaatgaggcttatactctctctttgcttatccgaaggttttgatactttccctacgcttctttgtgctgacggttgttctatggttgataggagaatgggtgtttatggatatccaatagagattcaagctctgtttttcatggcattgagatgcgccttgtcgatgcttaaaccagacgaggaaggtcgagatttcatagaaaggattgtgaagagacttcacgcgctgagtttccatatgcgcagttacttttggcttgactttcaacaactcaacgatatctataggtacaagacagaggagtactcacacaccgcggtgaacaagttcaacgtgatgccggactcgataccagactgggttttcgactttatgcctctccgtggaggatattttgtcggcaatgtaagcccggcccgtatggatttcaggtggttttccttaggaaattgtgtctccatcctttcttccttggcaactccggatcagtcaatggctattatggacctcctcgagcaccgttgggaggagctagtaggcgagatgccgctcaagatatgttacccttgcatcgaaagccacgagtggcggattgttaccggttgtgatcctaaaaacacgaggtggagttaccacaacggtggatcttggccagtattgctgtggacgctgacggcggcatgcatcaagactggacggcctcaaatagcgagacgtgcgattgatctaattgaatcacggctacaccgagattgctggccggaatactatgatggtaagcaaggaaggtacgttggaaaacaagcaaggaagtaccagacttggtcaatcgcgggttacttggttgcgaaaatgatgcttgaagatccttcacatattggaatgatctctcttgaagaagacaaacagatgaaacctgttatcaagagatctgcttcatggacttgctgaattttgtttcttgttttgtattataatgtcatttgattaagcattcaaaagacctttaatcagcgagagagtagttctgtttgtatttctctttgatccaactatggtttattttcacttgaggc

SEQ ID NO: 105854 - protein, 558 aa, Arabidopsis thaliana
  peptide (1)..(558): Ceres Seq. ID no. 13618205
  misc_feature (84)..(551): Pfam Name: Plant neutral invertase Pfam Description: Plant neutral invertase
  misc_feature (1)..(558): Homolog of NCBI NO: 18413234 NR Description: neutral invertase like protein [Arabidopsis
  misc_feature (1)..(558): Homolog of NCBI NO: 25354737 NR Description: neutral invertase like protein [imported] - thaliana >gi|7267646|emb|CAB78074.1| neutral invertase like
  misc_feature (7)..(556): Homolog of NCBI NO: 30693221 NR Description: invertase -related [Arabidopsis thaliana]
  misc_feature (13)..(557): Homolog of NCBI NO: 18395144 NR Description: invertase -related [Arabidopsis thaliana]
  misc_feature (13)..(557): Homolog of NCBI NO: 21594008 NR Description: putative invertase [Arabidopsis thaliana]
  misc_feature (19)..(558): Homolog of NCBI NO: 15236209 NR Description: invertase - like protein [Arabidopsis thaliana]
  misc_feature (64)..(557): Homolog of NCBI NO: 7487359 NR Description: hypothetical protein T22J18.18 - Arabidopsis >gi|3287693|gb|AAC25521.1|AAC25521 Similar to LIM17 gene product from the genome of Synechocystis sp. gb|D90916. [Arabidopsis
  misc_feature (63)..(557): Homolog of NCBI NO: 15218303 NR Description: neutral invertase -related [Arabidopsis thaliana]
  misc_feature (21)..(557): Homolog of NCBI NO: 38344939 NR Description: OSJNBa0084A10.15 [Oryza sativa (japonica
  misc_feature (95)..(547): Homolog of NCBI NO: 15242261 NR Description: alkaline/neutral invertase [Arabidopsis thaliana] alkaline/neutral invertase [Arabidopsis thaliana]
MEEGHKEPLVLRVEGSHCSLSEMDDFDLTRALEKPRQLKIERKRSFDERSMSELSTGYVRQDSILEMAHSPGSRSMVDTPLSVRNSFEPHPMVAEAWEALRRSMVFFRGQPVGTIAAYDHASEEVLNYDQVFVRDFVPSALAFLMNGEPDIVKNFLLKTLQLQGWEKRVDRFKLGEGVMPASFKVLHDPVRKTDTIIADFGESAIGRVAPVDSGFWWIILLRAYTKSTGDLTLSETPECQRGMRLILSLCLSEGFDTFPTLLCADGCSMVDRRMGVYGYPIEIQALFFMALRCALSMLKPDEEGRDFIERIVKRLHALSFHMRSYFWLDFQQLNDIYRYKTEEYSHTAVNKFNVMPDSIPDWVFDFMPLRGGYFVGNVSPARMDFRWFSLGNCVSILSSLATPDQSMAIMDLLEHRWEELVGEMPLKICYPCIESHEWRIVTGCDPKNTRWSYHNGGSWPVLLWTLTAACIKTGRPQIARRAIDLIESRLHRDCWPEYYDGKQGRYVGKQARKYQTWSIAGYLVAKMMLEDPSHIGMISLEEDKQMKPVIKRSASWTC

SEQ ID NO: 105855 - protein, 536 aa, Arabidopsis thaliana
  peptide (1)..(536): Ceres Seq. ID no. 13618206
  misc_feature (62)..(529): Pfam Name: Plant neutral invertase Pfam Description: Plant neutral invertase
  misc_feature (1)..(536): Homolog of NCBI NO: 18413234 NR Description: neutral invertase like protein [Arabidopsis
  misc_feature (1)..(536): Homolog of NCBI NO: 25354737 NR Description: neutral invertase like protein [imported] - thaliana >gi|7267646|emb|CAB78074.1| neutral invertase like
  misc_feature (1)..(534): Homolog of NCBI NO: 30693221 NR Description: invertase -related [Arabidopsis thaliana]
  misc_feature (1)..(535): Homolog of NCBI NO: 18395144 NR Description: invertase -related [Arabidopsis thaliana]
  misc_feature (1)..(535): Homolog of NCBI NO: 21594008 NR Description: putative invertase [Arabidopsis thaliana]
  misc_feature (1)..(536): Homolog of NCBI NO: 15236209 NR Description: invertase - like protein [Arabidopsis thaliana]
  misc_feature (42)..(535): Homolog of NCBI NO: 7487359 NR Description: hypothetical protein T22J18.18 - Arabidopsis >gi|3287693|gb|AAC25521.1|AAC25521 Similar to LIM17 gene product from the genome of Synechocystis sp. gb|D90916. [Arabidopsis
  misc_feature (41)..(535): Homolog of NCBI NO: 15218303 NR Description: neutral invertase -related [Arabidopsis thaliana]
  misc_feature (1)..(535): Homolog of NCBI NO: 38344939 NR Description: OSJNBa0084A10.15 [Oryza sativa (japonica
  misc_feature (73)..(525): Homolog of NCBI NO: 15242261 NR Description: alkaline/neutral invertase [Arabidopsis thaliana] alkaline/neutral invertase [Arabidopsis thaliana]
MDDFDLTRALEKPRQLKIERKRSFDERSMSELSTGYVRQDSILEMAHSPGSRSMVDTPLSVRNSFEPHPMVAEAWEALRRSMVFFRGQPVGTIAAYDHASEEVLNYDQVFVRDFVPSALAFLMNGEPDIVKNFLLKTLQLQGWEKRVDRFKLGEGVMPASFKVLHDPVRKTDTIIADFGESAIGRVAPVDSGFWWIILLRAYTKSTGDLTLSETPECQRGMRLILSLCLSEGFDTFPTLLCADGCSMVDRRMGVYGYPIEIQALFFMALRCALSMLKPDEEGRDFIERIVKRLHALSFHMRSYFWLDFQQLNDIYRYKTEEYSHTAVNKFNVMPDSIPDWVFDFMPLRGGYFVGNVSPARMDFRWFSLGNCVSILSSLATPDQSMAIMDLLEHRWEELVGEMPLKICYPCIESHEWRIVTGCDPKNTRWSYHNGGSWPVLLWTLTAACIKTGRPQIARRAIDLIESRLHRDCWPEYYDGKQGRYVGKQARKYQTWSIAGYLVAKMMLEDPSHIGMISLEEDKQMKPVIKRSASWTC

SEQ ID NO: 105856 - protein, 508 aa, Arabidopsis thaliana
  peptide (1)..(508): Ceres Seq. ID no. 13618207
  misc_feature (34)..(501): Pfam Name: Plant neutral invertase Pfam Description: Plant neutral invertase
  misc_feature (1)..(508): Homolog of NCBI NO: 18413234 NR Description: neutral invertase like protein [Arabidopsis
  misc_feature (1)..(508): Homolog of NCBI NO: 25354737 NR Description: neutral invertase like protein [imported] - thaliana >gi|7267646|emb|CAB78074.1| neutral invertase like
  misc_feature (1)..(506): Homolog of NCBI NO: 30693221 NR Description: invertase -related [Arabidopsis thaliana]
  misc_feature (1)..(507): Homolog of NCBI NO: 18395144 NR Description: invertase -related [Arabidopsis thaliana]
  misc_feature (1)..(507): Homolog of NCBI NO: 21594008 NR Description: putative invertase [Arabidopsis thaliana]
  misc_feature (1)..(508): Homolog of NCBI NO: 15236209 NR Description: invertase - like protein [Arabidopsis thaliana]
  misc_feature (14)..(507): Homolog of NCBI NO: 7487359 NR Description: hypothetical protein T22J18.18 - Arabidopsis >gi|3287693|gb|AAC25521.1|AAC25521 Similar to LIM17 gene product from the genome of Synechocystis sp. gb|D90916. [Arabidopsis
  misc_feature (13)..(507): Homolog of NCBI NO: 15218303 NR Description: neutral invertase -related [Arabidopsis thaliana]
  misc_feature (1)..(507): Homolog of NCBI NO: 38344939 NR Description: OSJNBa0084A10.15 [Oryza sativa (japonica
  misc_feature (45)..(497): Homolog of NCBI NO: 15242261 NR Description: alkaline/neutral invertase [Arabidopsis thaliana] alkaline/neutral invertase [Arabidopsis thaliana]
MSELSTGYVRQDSILEMAHSPGSRSMVDTPLSVRNSFEPHPMVAEAWEALRRSMVFFRGQPVGTIAAYDHASEEVLNYDQVFVRDFVPSALAFLMNGEPDIVKNFLLKTLQLQGWEKRVDRFKLGEGVMPASFKVLHDPVRKTDTIIADFGESAIGRVAPVDSGFWWIILLRAYTKSTGDLTLSETPECQRGMRLILSLCLSEGFDTFPTLLCADGCSMVDRRMGVYGYPIEIQALFFMALRCALSMLKPDEEGRDFIERIVKRLHALSFHMRSYFWLDFQQLNDIYRYKTEEYSHTAVNKFNVMPDSIPDWVFDFMPLRGGYFVGNVSPARMDFRWFSLGNCVSILSSLATPDQSMAIMDLLEHRWEELVGEMPLKICYPCIESHEWRIVTGCDPKNTRWSYHNGGSWPVLLWTLTAACIKTGRPQIARRAIDLIESRLHRDCWPEYYDGKQGRYVGKQARKYQTWSIAGYLVAKMMLEDPSHIGMISLEEDKQMKPVIKRSASWTC

SEQ ID NO: 105857 - DNA, 1304 bp, Arabidopsis thaliana
  misc_feature (1)..(1304): Ceres Seq. ID no. 13618208
  misc_feature: MA Experiment ID: 108463 Result: Down-regulated in Transcription
  misc_feature: MA Experiment 108463 PARAMETER Experiment Name: At_Germinating_Seeds_cDNA_P Parameter: Age (day) Value: 3 vs. 0
  misc_feature: MA Experiment 108463 PARAMETER Experiment Name: At_Germinating_Seeds_cDNA_P Parameter: Tissue Value: Germinating Seeds
  misc_feature: MA Experiment ID: 108573 Result: Up-regulated in Transcription
  misc_feature: MA Experiment 108573 PARAMETER Experiment Name: At_Drought_cDNA_P Parameter: Timepoint (hr) Value: 6
  misc_feature: MA Experiment 108573 PARAMETER Experiment Name: At_Drought_cDNA_P Parameter: Tissue Value: Aerial
  misc_feature: MA Experiment 108573 PARAMETER Experiment Name: At_Drought_cDNA_P Parameter: Treatment Value: Drought vs. No Drought
  misc_feature: MA Experiment ID: 20000224 Result: Down-regulated in Transcription
  misc_feature: MA Experiment ID: 20000227 Result: Down-regulated in Transcription
  misc_feature: MA Experiment 20000227 PARAMETER Experiment Name: At_Root-Tips-vs-Tops_P Parameter: Tissue Value: Root Tips vs. Root Tops
atatccaacaaatgttaagttcttcagtttccttcaaaattgggttttcttgagaaagcattacagacacagtaatggcggctcctcggaatttaacaggtgacggtggagcaagacagctagtaaaagacgaagaaagccccgcagcttcatcggcagctaaaggactcttaaacgatgactcaccgactggtaaacgaaccaaatcggagagatttcctctctcacggtgggaattcgccgtgtttttcaccgtctttctcgttttcaccaccggactcttttgtatttacctcaccatgcctgccgctgaatacggcaagctcaaagttcctagaactatctccgatcttcgattgctcaaagagaatcttgggtcttatgcaagtgagtaccaagcacggttcattttaggttactgttcgacgtatatctttatgcagacatttatgatacctggaacgatctttatgtcattgcttgctggagctcttttcggtgtggttagaggttttgttcttgttgtccttaatgcaactgctggagcatgttcttgcttcttcttatcgaaattggtcggtaggccattggttaactggttatggcctgaaaagttgaggtttttccaagctgagattgcgaaaagaagagataggctgctaaactacatgctgttcttaaggataacaccaacacttccaaacctctttatcaatttgtcttctccaatcgttgacataccctttcacgtcttctttttggcgactctagtcggtcttatgccagcttcgtacatcacagttagagctggtttggctcttggagatctcagatcagtaaaggatttgtatgatttcaagaccttgtcagtgctgttcctcattggatccatctccatattccctgcccttctaaagagaaagagagtatatgaatgaagagtcgaagactgaagagtataatcatttatatagatattgatgagcagcacctttcagtcgcatggcagcatttcaaaggtgtttatgagctcaagataaaagaagaagattgtttctgcaacatcgcggagcttaaaatcgctaactctggctttgatttgtttattgtcttcgatttgagagcttctcttacccccttgtagtagtaagtgtttgtgtagctagtttactgaatcatgattggctttgtatattgaatacttgattcagagatctgactctgcagcctattggcttatgtataacaaacatgattatgtaaatgcttgaagacattgctttgaccaaatatgggtgattctg

SEQ ID NO: 105858 - protein, 287 aa, Arabidopsis thaliana; identical to SEQ ID NO: 23979
  peptide (1)..(287): Ceres Seq. ID no. 13618209
  misc_feature (1)..(287): Homolog of NCBI NO: 30681121 NR Description: expressed protein [Arabidopsis thaliana] unknown protein [Arabidopsis thaliana]
  misc_feature (14)..(287): Homolog of NCBI NO: 18409951 NR Description: expressed protein [Arabidopsis thaliana]
  misc_feature (1)..(189): Homolog of NCBI NO: 25407510 NR Description: hypothetical protein AT4g09580 [imported] - thaliana >gi|7267653|emb|CAB78081.1| putative protein thaliana] >gi|7321077|emb|CAB82125.1| putative protein
  misc_feature (48)..(284): Homolog of NCBI NO: 18414967 NR Description: expressed protein [Arabidopsis thaliana]
  misc_feature (48)..(284): Homolog of NCBI NO: 21593768 NR Description: unknown [Arabidopsis thaliana]
  misc_feature (34)..(283): Homolog of NCBI NO: 28850296 NR Description: similar to Mus musculus (Mouse). Colon RCB-0549
  misc_feature (15)..(283): Homolog of NCBI NO: 436224 NR Description: KIAA0033 [Homo sapiens]
  misc_feature (15)..(283): Homolog of NCBI NO: 20558053 NR Description: similar to KIAA0033 [Homo sapiens]
  misc_feature (56)..(283): Homolog of NCBI NO: 18859941 NR Description: CG8408-PA [Drosophila melanogaster]
  misc_feature (51)..(283): Homolog of NCBI NO: 22268065 NR Description: D7Ertd743e protein [Mus musculus] unnamed protein product [Mus musculus] unnamed protein product [Mus musculus]

SEQ ID NO: 105859 - protein, 212 aa, Arabidopsis thaliana; identical to SEQ ID NO: 23980
  peptide (1)..(212): Ceres Seq. ID no. 13618210
  misc_feature (1)..(212): Homolog of NCBI NO: 30681121 NR Description: expressed protein [Arabidopsis thaliana] unknown protein [Arabidopsis thaliana]
  misc_feature (1)..(212): Homolog of NCBI NO: 18409951 NR Description: expressed protein [Arabidopsis thaliana]
  misc_feature (1)..(114): Homolog of NCBI NO: 25407510 NR Description: hypothetical protein AT4g09580 [imported] - thaliana >gi|7267653|emb|CAB78081.1| putative protein thaliana] >gi|7321077|emb|CAB82125.1| putative protein
  misc_feature (1)..(209): Homolog of NCBI NO: 18414967 NR Description: expressed protein [Arabidopsis thaliana]
  misc_feature (1)..(209): Homolog of NCBI NO: 21593768 NR Description: unknown [Arabidopsis thaliana]
  misc_feature (1)..(208): Homolog of NCBI NO: 28850296 NR Description: similar to Mus musculus (Mouse). Colon RCB-0549
  misc_feature (1)..(208): Homolog of NCBI NO: 436224 NR Description: KIAA0033 [Homo sapiens]
  misc_feature (1)..(208): Homolog of NCBI NO: 20558053 NR Description: similar to KIAA0033 [Homo sapiens]
  misc_feature (1)..(208): Homolog of NCBI NO: 18859941 NR Description: CG8408-PA [Drosophila melanogaster]
  misc_feature (1)..(208): Homolog of NCBI NO: 22268065 NR Description: D7Ertd743e protein [Mus musculus] unnamed protein product [Mus musculus] unnamed protein product [Mus musculus]

SEQ ID NO: 105860 - protein, 166 aa, Arabidopsis thaliana; identical to SEQ ID NO: 23981
  peptide (1)..(166): Ceres Seq. ID no. 13618211
  misc_feature (1)..(166): Homolog of NCBI NO: 30681121 NR Description: expressed protein [Arabidopsis thaliana] unknown protein [Arabidopsis thaliana]
  misc_feature (1)..(166): Homolog of NCBI NO: 18409951 NR Description: expressed protein [Arabidopsis thaliana]
  misc_feature (1)..(68): Homolog of NCBI NO: 25407510 NR Description: hypothetical protein AT4g09580 [imported] - thaliana >gi|7267653|emb|CAB78081.1| putative protein thaliana] >gi|7321077|emb|CAB82125.1| putative protein
  misc_feature (1)..(163): Homolog of NCBI NO: 18414967 NR Description: expressed protein [Arabidopsis thaliana]
  misc_feature (1)..(163): Homolog of NCBI NO: 21593768 NR Description: unknown [Arabidopsis thaliana]
  misc_feature (1)..(162): Homolog of NCBI NO: 28850296 NR Description: similar to Mus musculus (Mouse). Colon RCB-0549
  misc_feature (1)..(162): Homolog of NCBI NO: 436224 NR Description: KIAA0033 [Homo sapiens]
  misc_feature (1)..(162): Homolog of NCBI NO: 20558053 NR Description: similar to KIAA0033 [Homo sapiens]
  misc_feature (1)..(162): Homolog of NCBI NO: 18859941 NR Description: CG8408-PA [Drosophila melanogaster]
  misc_feature (1)..(162): Homolog of NCBI NO: 22268065 NR Description: D7Ertd743e protein [Mus musculus] unnamed protein product [Mus musculus] unnamed protein product [Mus musculus]

SEQ ID NO: 105861 - DNA, 813 bp, Arabidopsis thaliana
  misc_feature (1)..(813): Ceres Seq. ID no. 13618212
  misc_feature: MA Experiment ID: 20000315 Result: Up-regulated in Transcription
  misc_feature: MA Experiment 20000315 PARAMETER Experiment Name: At_14day_Shoots-Roots_Sub_P Parameter: Age (day) Value: 14
  misc_feature: MA Experiment 20000315 PARAMETER Experiment Name: At_14day_Shoots-Roots_Sub_P Parameter: Organism Value: A. thaliana
  misc_feature: MA Experiment 20000315 PARAMETER Experiment Name: At_14day_Shoots-Roots_Sub_P Parameter: Plant Line Value: WS
  misc_feature: MA Experiment 20000315 PARAMETER Experiment Name: At_14day_Shoots-Roots_Sub_P Parameter: Tissue Value: Shoots vs. Whole Plant
  misc_feature: MA Experiment ID: 20000327 Result: Down-regulated in Transcription
  misc_feature: MA Experiment 20000327 PARAMETER Experiment Name: At_42deg_Heat_Sub_P Parameter: Age (day) Value: 14
  misc_feature: MA Experiment 20000327 PARAMETER Experiment Name: At_42deg_Heat_Sub_P Parameter: Organism Value: A. thaliana
  misc_feature: MA Experiment 20000327 PARAMETER Experiment Name: At_42deg_Heat_Sub_P Parameter: Plant Line Value: WS
  misc_feature: MA Experiment 20000327 PARAMETER Experiment Name: At_42deg_Heat_Sub_P Parameter: Temperature (deg C) Value: 42 vs. 22
  misc_feature: MA Experiment 20000327 PARAMETER Experiment Name: At_42deg_Heat_Sub_P Parameter: Timepoint (hr) Value: 1
  misc_feature: MA Experiment 20000327 PARAMETER Experiment Name: At_42deg_Heat_Sub_P Parameter: Tissue Value: Aerial
  misc_feature: MA Experiment ID: 20000328 Result: Down-regulated in Transcription
  misc_feature: MA Experiment 20000328 PARAMETER Experiment Name: At_42deg_Heat_Sub_P Parameter: Age (day) Value: 14
  misc_feature: MA Experiment 20000328 PARAMETER Experiment Name: At_42deg_Heat_Sub_P Parameter: Organism Value: A. thaliana
  misc_feature: MA Experiment 20000328 PARAMETER Experiment Name: At_42deg_Heat_Sub_P Parameter: Plant Line Value: WS
  misc_feature: MA Experiment 20000328 PARAMETER Experiment Name: At_42deg_Heat_Sub_P Parameter: Temperature (deg C) Value: 42 vs. 22
  misc_feature: MA Experiment 20000328 PARAMETER Experiment Name: At_42deg_Heat_Sub_P Parameter: Timepoint (hr) Value: 6
  misc_feature: MA Experiment 20000328 PARAMETER Experiment Name: At_42deg_Heat_Sub_P Parameter: Tissue Value: Aerial
  misc_feature: MA Experiment ID: 20000329 Result: Up-regulated in Transcription
  misc_feature: MA Experiment 20000329 PARAMETER Experiment Name: At_4deg_Cold_Sub_P Parameter: Age (day) Value: 14
  misc_feature: MA Experiment 20000329 PARAMETER Experiment Name: At_4deg_Cold_Sub_P Parameter: Organism Value: A. thaliana
  misc_feature: MA Experiment 20000329 PARAMETER Experiment Name: At_4deg_Cold_Sub_P Parameter: Plant Line Value: WS
  misc_feature: MA Experiment 20000329 PARAMETER Experiment Name: At_4deg_Cold_Sub_P Parameter: Temperature (deg C) Value: 4 vs. 22
  misc_feature: MA Experiment 20000329 PARAMETER Experiment Name: At_4deg_Cold_Sub_P Parameter: Timepoint (hr) Value: 6
  misc_feature: MA Experiment 20000329 PARAMETER Experiment Name: At_4deg_Cold_Sub_P Parameter: Tissue Value: Aerial
  misc_feature: MA Experiment ID: 20000349 Result: Down-regulated in Transcription
  misc_feature: MA Experiment 20000349 PARAMETER Experiment Name: At_100uM_ABA_Sub_P Parameter: Age (day) Value: 14
  misc_feature: MA Experiment 20000349 PARAMETER Experiment Name: At_100uM_ABA_Sub_P Parameter: Organism Value: A. thaliana
  misc_feature: MA Experiment 20000349 PARAMETER Experiment Name: At_100uM_ABA_Sub_P Parameter: Plant Line Value: WS
  misc_feature: MA Experiment 20000349 PARAMETER Experiment Name: At_100uM_ABA_Sub_P Parameter: Timepoint (hr) Value: 6
  misc_feature: MA Experiment 20000349 PARAMETER Experiment Name: At_100uM_ABA_Sub_P Parameter: Tissue Value: Aerial
  misc_feature: MA Experiment 20000349 PARAMETER Experiment Name: At_100uM_ABA_Sub_P Parameter: Treatment Value: 100uM ABA vs. No Treatment
  misc_feature: MA Experiment ID: 20000440 Result: Up-regulated in Transcription
  misc_feature: MA Experiment 20000440 PARAMETER Experiment Name: At_Closed-Flower__Sub_P Parameter: Tissue Value: Closed Flower vs. Whole Plant
cactcatacatcttctccatccatcacacgacgaagcataatggcaaaccgtaaatacataataccaatgacgaccaaagagtgcggaaaccacggtggtggcggtggaggaggcggaaccgcctgtagaatctgtggagcaatcatcggcttcatcatcatcgtcttgatgacaatcttcctcgtttggataatcctccaaccgaaaaacccagaattcatcctccaagacaccaccgtctacgcctttaacctctcgcagcctaacctcctcacctcaaagtttcagataacaatcgcttcacgcaaccgaaactccaacatcggaatctactacgaccatcttcacgcctacgcttcttaccggaaccagcaaatcactctagctagcgaccttcctccgacgtaccaaagacacaaagaagatagcgtttggtcacctctcttatatggaaaccaagtccctatcgctcctttcaacgccgtggctctcggggacgagcagaatagtggggttttcacgttgactatatgcgttgatggacaagtgaggtggaaggtcgggactcttactatagggaattatcatctccatgttcgttgtcaggcgttcataaaccaggctgataaagccgccggagttcatgtcggcgaaaacaccgttaagtacacgttgatcaataagtgcagtgtcaatttttaggaggtaaaaggacacaactttgacgacgtcaatgtttgcttttactctttcttcttcttttcatttttcttctactcagataatgtttttgcttctatatcgtttaattt

SEQ ID NO: 105862 - protein, 233 aa, Arabidopsis thaliana
  peptide (1)..(233): Ceres Seq. ID no. 13618213
  misc_feature (23)..(233): Homolog of NCBI NO: 15233951 NR Description: harpin-induced protein 1 family (HIN1)
  misc_feature (23)..(233): Homolog of NCBI NO: 15227540 NR Description: harpin-induced protein 1 family (HIN1)
  misc_feature (23)..(232): Homolog of NCBI NO: 15227538 NR Description: harpin-induced protein 1 family (HIN1)
  misc_feature (25)..(232): Homolog of NCBI NO: 15231227 NR Description: harpin-induced protein 1 family (HIN1)
  misc_feature (26)..(232): Homolog of NCBI NO: 18399308 NR Description: harpin-induced protein 1 family (HIN1) thaliana] >gi|6041819|gb|AAF02134.1|AC009918_6 unknown protein
  misc_feature (26)..(232): Homolog of NCBI NO: 28392929 NR Description: putative VAMP protein SEC22 [Arabidopsis thaliana]
  misc_feature (23)..(232): Homolog of NCBI NO: 15240001 NR Description: harpin-induced protein, putative (HIN1)
  misc_feature (23)..(232): Homolog of NCBI NO: 15229906 NR Description: harpin-induced protein 1 family (HIN1)
  misc_feature (23)..(232): Homolog of NCBI NO: 22326984 NR Description: harpin-induced protein 1 family (HIN1)
  misc_feature (26)..(232): Homolog of NCBI NO: 32488715 NR Description: OSJNBa0088H09.16 [Oryza sativa (japonica
THTSSPSITRRSIMANRKYIIPMTTKECGNHGGGGGGGGTACRICGAIIGFIIIVLMTIFLVWIILQPKNPEFILQDTTVYAFNLSQPNLLTSKFQITIASRNRNSNIGIYYDHLHAYASYRNQQITLASDLPPTYQRHKEDSVWSPLLYGNQVPIAPFNAVALGDEQNSGVFTLTICVDGQVRWKVGTLTIGNYHLHVRCQAFINQADKAAGVHVGENTVKYTLINKCSVNF

SEQ ID NO: 105863 - protein, 220 aa, Arabidopsis thaliana
  peptide (1)..(220): Ceres Seq. ID no. 13618214
  misc_feature (10)..(220): Homolog of NCBI NO: 15233951 NR Description: harpin-induced protein 1 family (HIN1)
  misc_feature (10)..(220): Homolog of NCBI NO: 15227540 NR Description: harpin-induced protein 1 family (HIN1)
  misc_feature (10)..(219): Homolog of NCBI NO: 15227538 NR Description: harpin-induced protein 1 family (HIN1)
  misc_feature (12)..(219): Homolog of NCBI NO: 15231227 NR Description: harpin-induced protein 1 family (HIN1)
  misc_feature (13)..(219): Homolog of NCBI NO: 18399308 NR Description: harpin-induced protein 1 family (HIN1) thaliana] >gi|6041819|gb|AAF02134.1|AC009918_6 unknown protein
  misc_feature (13)..(219): Homolog of NCBI NO: 28392929 NR Description: putative VAMP protein SEC22 [Arabidopsis thaliana]
  misc_feature (10)..(219): Homolog of NCBI NO: 15240001 NR Description: harpin-induced protein, putative (HIN1)
  misc_feature (10)..(219): Homolog of NCBI NO: 15229906 NR Description: harpin-induced protein 1 family (HIN1)
  misc_feature (10)..(219): Homolog of NCBI NO: 22326984 NR Description: harpin-induced protein 1 family (HIN1)
  misc_feature (13)..(219): Homolog of NCBI NO: 32488715 NR Description: OSJNBa0088H09.16 [Oryza sativa (japonica
MANRKYIIPMTTKECGNHGGGGGGGGTACRICGAIIGFIIIVLMTIFLVWIILQPKNPEFILQDTTVYAFNLSQPNLLTSKFQITIASRNRNSNIGIYYDHLHAYASYRNQQITLASDLPPTYQRHKEDSVWSPLLYGNQVPIAPFNAVALGDEQNSGVFTLTICVDGQVRWKVGTLTIGNYHLHVRCQAFINQADKAAGVHVGENTVKYTLINKCSVNF

SEQ ID NO: 105864 - protein, 211 aa, Arabidopsis thaliana; identical to SEQ ID NO: 81818
  peptide (1)..(211): Ceres Seq. ID no. 13618215
  misc_feature (1)..(211): Homolog of NCBI NO: 15233951 NR Description: harpin-induced protein 1 family (HIN1)
  misc_feature (1)..(211): Homolog of NCBI NO: 15227540 NR Description: harpin-induced protein 1 family (HIN1)
  misc_feature (1)..(210): Homolog of NCBI NO: 15227538 NR Description: harpin-induced protein 1 family (HIN1)
  misc_feature (3)..(210): Homolog of NCBI NO: 15231227 NR Description: harpin-induced protein 1 family (HIN1)
  misc_feature (4)..(210): Homolog of NCBI NO: 18399308 NR Description: harpin-induced protein 1 family (HIN1) thaliana] >gi|6041819|gb|AAF02134.1|AC009918_6 unknown protein
  misc_feature (4)..(210): Homolog of NCBI NO: 28392929 NR Description: putative VAMP protein SEC22 [Arabidopsis thaliana]
  misc_feature (1)..(210): Homolog of NCBI NO: 15240001 NR Description: harpin-induced protein, putative (HIN1)
  misc_feature (1)..(210): Homolog of NCBI NO: 15229906 NR Description: harpin-induced protein 1 family (HIN1)
  misc_feature (1)..(210): Homolog of NCBI NO: 22326984 NR Description: harpin-induced protein 1 family (HIN1)
  misc_feature (4)..(210): Homolog of NCBI NO: 32488715 NR Description: OSJNBa0088H09.16 [Oryza sativa (japonica

SEQ ID NO: 105865 - DNA, 1376 bp, Arabidopsis thaliana
  misc_feature (1)..(1376): Ceres Seq. ID no. 13618216
  misc_feature: MA Experiment ID: 108433 Result: Up-regulated in Transcription
  misc_feature: MA Experiment 108433 PARAMETER Experiment Name: At_rhl_Mutant2_cDNA_P Parameter: Age (day) Value: 7
  misc_feature: MA Experiment 108433 PARAMETER Experiment Name: At_rhl_Mutant2_cDNA_P Parameter: Organism Value: A. thaliana
  misc_feature: MA Experiment 108433 PARAMETER Experiment Name: At_rhl_Mutant2_cDNA_P Parameter: Plant Line Value: rhl Mutant vs. wt landsburg
  misc_feature: MA Experiment 108433 PARAMETER Experiment Name: At_rhl_Mutant2_cDNA_P Parameter: Tissue Value: Roots
  misc_feature: MA Experiment ID: 108461 Result: Down-regulated in Transcription
  misc_feature: MA Experiment 108461 PARAMETER Experiment Name: At_Germinating_Seeds_cDNA_P Parameter: Age (day) Value: 1 vs. 0
  misc_feature: MA Experiment 108461 PARAMETER Experiment Name: At_Germinating_Seeds_cDNA_P Parameter: Tissue Value: Germinating Seeds
  misc_feature: MA Experiment ID: 108462 Result: Down-regulated in Transcription
  misc_feature: MA Experiment 108462 PARAMETER Experiment Name: At_Germinating_Seeds_cDNA_P Parameter: Age (day) Value: 2 vs. 0
  misc_feature: MA Experiment 108462 PARAMETER Experiment Name: At_Germinating_Seeds_cDNA_P Parameter: Tissue Value: Germinating Seeds
  misc_feature: MA Experiment ID: 108572 Result: Up-regulated in Transcription
  misc_feature: MA Experiment 108572 PARAMETER Experiment Name: At_Drought_cDNA_P Parameter: Timepoint (hr) Value: 1
  misc_feature: MA Experiment 108572 PARAMETER Experiment Name: At_Drought_cDNA_P Parameter: Tissue Value: Aerial
  misc_feature: MA Experiment 108572 PARAMETER Experiment Name: At_Drought_cDNA_P Parameter: Treatment Value: Drought vs. No Drought
  misc_feature: MA Experiment ID: 108573 Result: Up-regulated in Transcription
  misc_feature: MA Experiment 108573 PARAMETER Experiment Name: At_Drought_cDNA_P Parameter: Timepoint (hr) Value: 6
  misc_feature: MA Experiment 108573 PARAMETER Experiment Name: At_Drought_cDNA_P Parameter: Tissue Value: Aerial
  misc_feature: MA Experiment 108573 PARAMETER Experiment Name: At_Drought_cDNA_P Parameter: Treatment Value: Drought vs. No Drought
  misc_feature: MA Experiment ID: 108577 Result: Down-regulated in Transcription
  misc_feature: MA Experiment 108577 PARAMETER Experiment Name: At_42deg_Heat_cDNA_P Parameter: Temperature (deg C) Value: 42 vs. 22
  misc_feature: MA Experiment 108577 PARAMETER Experiment Name: At_42deg_Heat_cDNA_P Parameter: Timepoint (hr) Value: 6
  misc_feature: MA Experiment 108577 PARAMETER Experiment Name: At_42deg_Heat_cDNA_P Parameter: Tissue Value: Aerial
  misc_feature: MA Experiment ID: 108585 Result: Down-regulated in Transcription
  misc_feature: MA Experiment 108585 PARAMETER Experiment Name: At_5mM_NaNP_cDNA_P Parameter: Timepoint (hr) Value: 6
  misc_feature: MA Experiment 108585 PARAMETER Experiment Name: At_5mM_NaNP_cDNA_P Parameter: Tissue Value: Aerial
  misc_feature: MA Experiment 108585 PARAMETER Experiment Name: At_5mM_NaNP_cDNA_P Parameter: Treatment Value: null
  misc_feature: MA Experiment ID: 108594 Result: Down-regulated in Transcription
  misc_feature: MA Experiment 108594 PARAMETER Experiment Name: At_Ler-rhl_Root_cDNA_P Parameter: Plant Line Value: null
  misc_feature: MA Experiment ID: 108595 Result: Down-regulated in Transcription
  misc_feature: MA Experiment 108595 PARAMETER Experiment Name: At_Ler-pi_Ovule_cDNA_P Parameter: Plant Line Value: null
  misc_feature: MA Experiment ID: 108605 Result: Up-regulated in Transcription
  misc_feature: MA Experiment 108605 PARAMETER Experiment Name: At_100uM_ABA_cDNA_P Parameter: Timepoint (hr) Value: 6
  misc_feature: MA Experiment 108605 PARAMETER Experiment Name: At_100uM_ABA_cDNA_P Parameter: Tissue Value: Aerial
  misc_feature: MA Experiment 108605 PARAMETER Experiment Name: At_100uM_ABA_cDNA_P Parameter: Treatment Value: 100uM ABA vs. No Treatment
  misc_feature: MA Experiment ID: 20000111 Result: Down-regulated in Transcription
  misc_feature: MA Experiment 20000111 PARAMETER Experiment Name: At_42deg_Heat_cDNA_P Parameter: Temperature (deg C) Value: 42 vs. 22
  misc_feature: MA Experiment 20000111 PARAMETER Experiment Name: At_42deg_Heat_cDNA_P Parameter: Timepoint (hr) Value: 6
  misc_feature: MA Experiment 20000111 PARAMETER Experiment Name: At_42deg_Heat_cDNA_P Parameter: Tissue Value: Aerial
  misc_feature: MA Experiment ID: 20000113 Result: Down-regulated in Transcription
  misc_feature: MA Experiment 20000113 PARAMETER Experiment Name: At_42deg_Heat_cDNA_P Parameter: Temperature (deg C) Value: 42 vs. 22
  misc_feature: MA Experiment 20000113 PARAMETER Experiment Name: At_42deg_Heat_cDNA_P Parameter: Timepoint (hr) Value: 8
  misc_feature: MA Experiment 20000113 PARAMETER Experiment Name: At_42deg_Heat_cDNA_P Parameter: Tissue Value: Aerial
  misc_feature: MA Experiment ID: 20000169 Result: Up-regulated in Transcription
  misc_feature: MA Experiment 20000169 PARAMETER Experiment Name: At_100uM_ABA_P Parameter: Age (day) Value: 14
  misc_feature: MA Experiment 20000169 PARAMETER Experiment Name: At_100uM_ABA_P Parameter: Organism Value: A. thaliana
  misc_feature: MA Experiment 20000169 PARAMETER Experiment Name: At_100uM_ABA_P Parameter: Plant Line Value: WS
  misc_feature: MA Experiment 20000169 PARAMETER Experiment Name: At_100uM_ABA_P Parameter: Timepoint (hr) Value: 6
  misc_feature: MA Experiment 20000169 PARAMETER Experiment Name: At_100uM_ABA_P Parameter: Tissue Value: Aerial
  misc_feature: MA Experiment 20000169 PARAMETER Experiment Name: At_100uM_ABA_P Parameter: Treatment Value: 100uM ABA vs. No Treatment
  misc_feature: MA Experiment ID: 20000173 Result: Down-regulated in Transcription
  misc_feature: MA Experiment 20000173 PARAMETER Experiment Name: At_42deg_Heat_P Parameter: Age (day) Value: 14
  misc_feature: MA Experiment 20000173 PARAMETER Experiment Name: At_42deg_Heat_P Parameter: Organism Value: A. thaliana
  misc_feature: MA Experiment 20000173 PARAMETER Experiment Name: At_42deg_Heat_P Parameter: Plant Line Value: WS
  misc_feature: MA Experiment 20000173 PARAMETER Experiment Name: At_42deg_Heat_P Parameter: Temperature (deg C) Value: 42 vs. 22
  misc_feature: MA Experiment 20000173 PARAMETER Experiment Name: At_42deg_Heat_P Parameter: Timepoint (hr) Value: 6
  misc_feature: MA Experiment 20000173 PARAMETER Experiment Name: At_42deg_Heat_P Parameter: Tissue Value: Aerial
  misc_feature: MA Experiment ID: 20000184 Result: Down-regulated in Transcription
  misc_feature: MA Experiment 20000184 PARAMETER Experiment Name: At_Shoots__P Parameter: Age (day) Value: 7
  misc_feature: MA Experiment 20000184 PARAMETER Experiment Name: At_Shoots__P Parameter: Tissue Value: Shoots vs. Whole Plant
  misc_feature: MA Experiment ID: 20000227 Result: Down-regulated in Transcription
  misc_feature: MA Experiment 20000227 PARAMETER Experiment Name: At_Root-Tips-vs-Tops_P Parameter: Tissue Value: Root Tips vs. Root Tops
  misc_feature: MA Experiment ID: 20000234 Result: Down-regulated in Transcription
  misc_feature: MA Experiment 20000234 PARAMETER Experiment Name: At_Siliques_P Parameter: Age (day) Value: 21
  misc_feature: MA Experiment 20000234 PARAMETER Experiment Name: At_Siliques_P Parameter: Organism Value: A. thaliana
  misc_feature: MA Experiment 20000234 PARAMETER Experiment Name: At_Siliques_P Parameter: Plant Line Value: WS
  misc_feature: MA Experiment 20000234 PARAMETER Experiment Name: At_Siliques_P Parameter: Tissue Value: Less Than 5mm Siliques vs. Whole Plant
  misc_feature: MA Experiment ID: 20000235 Result: Down-regulated in Transcription
  misc_feature: MA Experiment 20000235 PARAMETER Experiment Name: At_Siliques_P Parameter: Age (day) Value: 21
  misc_feature: MA Experiment 20000235 PARAMETER Experiment Name: At_Siliques_P Parameter: Organism Value: A. thaliana
  misc_feature: MA Experiment 20000235 PARAMETER Experiment Name: At_Siliques_P Parameter: Plant Line Value: WS
  misc_feature: MA Experiment 20000235 PARAMETER Experiment Name: At_Siliques_P Parameter: Tissue Value: 5-10mm Siliques vs. Whole Plant
  misc_feature: MA Experiment ID: 20000265 Result: Down-regulated in Transcription
  misc_feature: MA Experiment 20000265 PARAMETER Experiment Name: At_Open_Flower_P Parameter: Age (day) Value: 21
  misc_feature: MA Experiment 20000265 PARAMETER Experiment Name: At_Open_Flower_P Parameter: Plant Line Value: WS
  misc_feature: MA Experiment 20000265 PARAMETER Experiment Name: At_Open_Flower_P Parameter: Tissue Value: Closed Flower vs. Whole Plant
  misc_feature: MA Experiment ID: 20000286 Result: Down-regulated in Transcription
  misc_feature: MA Experiment 20000286 PARAMETER Experiment Name: At_Open_Flower_P Parameter: Age (day) Value: 21
  misc_feature: MA Experiment 20000286 PARAMETER Experiment Name: At_Open_Flower_P Parameter: Plant Line Value: WS
  misc_feature: MA Experiment 20000286 PARAMETER Experiment Name: At_Open_Flower_P Parameter: Tissue Value: Half Open vs. Whole Plant
  misc_feature: MA Experiment ID: 20000436 Result: Up-regulated in Transcription
  misc_feature: MA Experiment 20000436 PARAMETER Experiment Name: At_Drought_P Parameter: Age (day) Value: 7
  misc_feature: MA Experiment 20000436 PARAMETER Experiment Name: At_Drought_P Parameter: Organism Value: A. thaliana
  misc_feature: MA Experiment 20000436 PARAMETER Experiment Name: At_Drought_P Parameter: Plant Line Value: WS
  misc_feature: MA Experiment 20000436 PARAMETER Experiment Name: At_Drought_P Parameter: Timepoint (hr) Value: 12
  misc_feature: MA Experiment 20000436 PARAMETER Experiment Name: At_Drought_P Parameter: Tissue Value: Whole Plant
  misc_feature: MA Experiment 20000436 PARAMETER Experiment Name: At_Drought_P Parameter: Treatment Value: Drought vs. No Drought
  misc_feature: MA Experiment ID: 20000437 Result: Up-regulated in Transcription
  misc_feature: MA Experiment 20000437 PARAMETER Experiment Name: At_Drought_P Parameter: Age (day) Value: 8
  misc_feature: MA Experiment 20000437 PARAMETER Experiment Name: At_Drought_P Parameter: Organism Value: A. thaliana
  misc_feature: MA Experiment 20000437 PARAMETER Experiment Name: At_Drought_P Parameter: Plant Line Value: WS
  misc_feature: MA Experiment 20000437 PARAMETER Experiment Name: At_Drought_P Parameter: Timepoint (hr) Value: 24
  misc_feature: MA Experiment 20000437 PARAMETER Experiment Name: At_Drought_P Parameter: Tissue Value: Whole Plant
  misc_feature: MA Experiment 20000437 PARAMETER Experiment Name: At_Drought_P Parameter: Treatment Value: Drought vs. No Drought
  misc_feature: MA Experiment ID: 20000573 Result: Down-regulated in Transcription
  misc_feature: MA Experiment 20000573 PARAMETER Experiment Name: At_100uM_ABA_Mutants__P Parameter: Organism Value: A. thaliana
  misc_feature: MA Experiment 20000573 PARAMETER Experiment Name: At_100uM_ABA_Mutants__P Parameter: Plant Line Value: CS22 vs. Ler wt
  misc_feature: MA Experiment 20000573 PARAMETER Experiment Name: At_100uM_ABA_Mutants__P Parameter: Timepoint (hr) Value: N/A
  misc_feature: MA Experiment 20000573 PARAMETER Experiment Name: At_100uM_ABA_Mutants__P Parameter: Tissue Value: Whole Plant
  misc_feature: MA Experiment 20000573 PARAMETER Experiment Name: At_100uM_ABA_Mutants__P Parameter: Treatment Value: None
  misc_feature: MA Experiment ID: 20000574 Result: Down-regulated in Transcription
  misc_feature: MA Experiment 20000574 PARAMETER Experiment Name: At_100uM_ABA_Mutants__P Parameter: Organism Value: A. thaliana
  misc_feature: MA Experiment 20000574 PARAMETER Experiment Name: At_100uM_ABA_Mutants__P Parameter: Plant Line Value: CS23 vs. Ler wt
  misc_feature: MA Experiment 20000574 PARAMETER Experiment Name: At_100uM_ABA_Mutants__P Parameter: Timepoint (hr) Value: N/A
  misc_feature: MA Experiment 20000574 PARAMETER Experiment Name: At_100uM_ABA_Mutants__P Parameter: Tissue Value: Whole Plant
  misc_feature: MA Experiment 20000574 PARAMETER Experiment Name: At_100uM_ABA_Mutants__P Parameter: Treatment Value: None
  misc_feature: MA Experiment ID: 20000794 Result: Up-regulated in Transcription
  misc_feature: MA Experiment 20000794 PARAMETER Experiment Name: At_Petals_P Parameter: Age (day) Value: 23-25 days
  misc_feature: MA Experiment 20000794 PARAMETER Experiment Name: At_Petals_P Parameter: Plant Line Value: WS
  misc_feature: MA Experiment 20000794 PARAMETER Experiment Name: At_Petals_P Parameter: Tissue Value: Petals vs. Whole plant
  misc_feature: MA Experiment ID: 20001557 Result: Down-regulated in Transcription
  misc_feature: MA Experiment 20001557 PARAMETER Experiment Name: At_Drought_Soil_Dry_P Parameter: Age (day) Value: 27
  misc_feature: MA Experiment 20001557 PARAMETER Experiment Name: At_Drought_Soil_Dry_P Parameter: Organism Value: A. thaliana
  misc_feature: MA Experiment 20001557 PARAMETER Experiment Name: At_Drought_Soil_Dry_P Parameter: Plant Line Value: WS
  misc_feature: MA Experiment 20001557 PARAMETER Experiment Name: At_Drought_Soil_Dry_P Parameter: Post Timepoint (hr) Value: 3
  misc_feature: MA Experiment 20001557 PARAMETER Experiment Name: At_Drought_Soil_Dry_P Parameter: Post-Treatment Value: Re-Water vs. No Drought
  misc_feature: MA Experiment 20001557 PARAMETER Experiment Name: At_Drought_Soil_Dry_P Parameter: Timepoint (day) Value: 13
  misc_feature: MA Experiment 20001557 PARAMETER Experiment Name: At_Drought_Soil_Dry_P Parameter: Treatment Value: Drought vs. No Drought
  misc_feature: MA Experiment ID: 20001558 Result: Down-regulated in Transcription
  misc_feature: MA Experiment 20001558 PARAMETER Experiment Name: At_Drought_Soil_Dry_P Parameter: Age (day) Value: 27
  misc_feature: MA Experiment 20001558 PARAMETER Experiment Name: At_Drought_Soil_Dry_P Parameter: Organism Value: A. thaliana
  misc_feature: MA Experiment 20001558 PARAMETER Experiment Name: At_Drought_Soil_Dry_P Parameter: Plant Line Value: WS
  misc_feature: MA Experiment 20001558 PARAMETER Experiment Name: At_Drought_Soil_Dry_P Parameter: Post Timepoint (hr) Value: 6
  misc_feature: MA Experiment 20001558 PARAMETER Experiment Name: At_Drought_Soil_Dry_P Parameter: Post-Treatment Value: Re-Water vs. No Drought
  misc_feature: MA Experiment 20001558 PARAMETER Experiment Name: At_Drought_Soil_Dry_P Parameter: Timepoint (day) Value: 13
  misc_feature: MA Experiment 20001558 PARAMETER Experiment Name: At_Drought_Soil_Dry_P Parameter: Treatment Value: Drought vs. No Drought
  misc_feature: MA Experiment ID: 20001560 Result: Down-regulated in Transcription
  misc_feature: MA Experiment 20001560 PARAMETER Experiment Name: At_Drought_Soil_Dry_P Parameter: Age (day) Value: 28
  misc_feature: MA Experiment 20001560 PARAMETER Experiment Name: At_Drought_Soil_Dry_P Parameter: Organism Value: A. thaliana
  misc_feature: MA Experiment 20001560 PARAMETER Experiment Name: At_Drought_Soil_Dry_P Parameter: Plant Line Value: WS
  misc_feature: MA Experiment 20001560 PARAMETER Experiment Name: At_Drought_Soil_Dry_P Parameter: Post Timepoint (hr) Value: None
  misc_feature: MA Experiment 20001560 PARAMETER Experiment Name: At_Drought_Soil_Dry_P Parameter: Post-Treatment Value: None
  misc_feature: MA Experiment 20001560 PARAMETER Experiment Name: At_Drought_Soil_Dry_P Parameter: Timepoint (day) Value: 14
  misc_feature: MA Experiment 20001560 PARAMETER Experiment Name: At_Drought_Soil_Dry_P Parameter: Treatment Value: Drought vs. No Drought
  misc_feature: MA Experiment ID: 20001911 Result: Up-regulated in Transcription
  misc_feature: MA Experiment 20001911 PARAMETER Experiment Name: At_Drought_Reproduction_P Parameter: Age (day) Value: 40
  misc_feature: MA Experiment 20001911 PARAMETER Experiment Name: At_Drought_Reproduction_P Parameter: Organism Value: A. thaliana
  misc_feature: MA Experiment 20001911 PARAMETER Experiment Name: At_Drought_Reproduction_P Parameter: Plant Line Value: WS
  misc_feature: MA Experiment 20001911 PARAMETER Experiment Name: At_Drought_Reproduction_P Parameter: Timepoint (day) Value: 10
  misc_feature: MA Experiment 20001911 PARAMETER Experiment Name: At_Drought_Reproduction_P Parameter: Tissue Value: Flowers
  misc_feature: MA Experiment 20001911 PARAMETER Experiment Name: At_Drought_Reproduction_P Parameter: Treatment Value: Drought vs. No Drought
ctctctcacactcaccatgcaatttttctttccttgtgaccaagacttctctccaactctaaaccaaaaaacacccagattttttctctctgatttcaagattccccaaaactttttctccaagaccctctacaactttcttgatggcggtaggaatctttggattgatcccaagctcatcaccagacgagctaaggaagattcttcaagcgctttcgacgaaatggggagacgtagttgaggattttgagagtcttgaagtgaagccaatgaaaggagcgatgactaacgaagtgttcatggttagttggcctagaaaagaaacgaatcttcgatgtaggaagcttcttgttcgtgtttatggtgaaggtgttgagcttttcttcaatagagacgatgagattcgtacttttgagtatgttgctcgtcatggtcacggtcctacacttcttggtcgcttcgccggcggtagagtcgaagagtttatccatgcccggacactatcggcaaccgatcttcgtgatccgaacatatcagctcttgttgcatctaagctaagaagatttcacagcatacacattcctggagatagaattatgctcatctgggacaggatgaggacttgggtaggacaagccaagaatctatgttcaaatgaacattcaacagagtttggtctagacgacattgaagatgaaatcaacctgctggaacaagaagtgaacaatgaacaagagattggcttctgtcacaatgacttgcagtatggtaacatcatgattgatgaagaaaccaatgcaattactatcattgattatgagtatgcaagttataatccgatcgcttacgacatagcaaatcatttctgtgaaatggcggcagattatcattcaaacactcctcatatcttggactacactctatatccaggggaagaagaaaggaggagattcatatgtaactacttaacctcttcaggtgaagaagcaagagaagaagacatagaacaacttttggatgatattgagaagtatacattggcaagccatctcttctggggtttatggggaatcatatctggttatgtgaacaagattgagtttgattatatcgagtattcgaggcagagattcaaacagtattggcttcgcaagccaaagcttttatctttcttcccatcctaataagtaaattctctgtttacttatgtttactctttgcgaataacgcggtaaaaacccgatgatggatccatgatatagctatgccaaagctaaaactatgtgtaattcttctgttctgaacttctgatactatgtaataagtaaaagatataaatattccatactataatatttccacaataatgagaaaag

SEQ ID NO: 105866 - protein, 346 aa, Arabidopsis thaliana; identical to SEQ ID NO: 74472
  peptide (1)..(346): Ceres Seq. ID no. 13618217
  misc_feature (64)..(335): Pfam Name: Choline/ethanolamine kinase Pfam Description: Choline/ethanolamine kinase
  misc_feature (1)..(346): Homolog of NCBI NO: 15234032 NR Description: choline kinase GmCK2p -related protein
  misc_feature (1)..(346): Homolog of NCBI NO: 21594823 NR Description: choline kinase GmCK2p-like protein [Arabidopsis
  misc_feature (1)..(346): Homolog of NCBI NO: 21537276 NR Description: choline kinase GmCK2p-like protein [Arabidopsis
  misc_feature (8)..(341): Homolog of NCBI NO: 15217543 NR Description: choline kinase -related [Arabidopsis thaliana]
  misc_feature (1)..(341): Homolog of NCBI NO: 7488653 NR Description: choline kinase (EC 2.7.1.32) CK2 - soybean
  misc_feature (1)..(341): Homolog of NCBI NO: 12311795 NR Description: choline kinase [Pisum sativum]
  misc_feature (14)..(342): Homolog of NCBI NO: 22330627 NR Description: choline kinase -related [Arabidopsis thaliana] At1g74320/F1O17_1 [Arabidopsis thaliana] putative choline kinase [Arabidopsis thaliana]
  misc_feature (14)..(342): Homolog of NCBI NO: 25348157 NR Description: protein choline kinase F1O17.1 [imported] -
  misc_feature (1)..(341): Homolog of NCBI NO: 7488652 NR Description: choline kinase (EC 2.7.1.32) CK1 - soybean
  misc_feature (8)..(341): Homolog of NCBI NO: 12323732 NR Description: putative choline kinase; 4535-2895 [Arabidopsis

SEQ ID NO: 105867 - protein, 304 aa, Arabidopsis thaliana; identical to SEQ ID NO: 42058
  peptide (1)..(304): Ceres Seq. ID no. 13618218
  misc_feature (22)..(293): Pfam Name: Choline/ethanolamine kinase Pfam Description: Choline/ethanolamine kinase
  misc_feature (1)..(304): Homolog of NCBI NO: 15234032 NR Description: choline kinase GmCK2p -related protein
  misc_feature (1)..(304): Homolog of NCBI NO: 21594823 NR Description: choline kinase GmCK2p-like protein [Arabidopsis
  misc_feature (1)..(304): Homolog of NCBI NO: 21537276 NR Description: choline kinase GmCK2p-like protein [Arabidopsis
  misc_feature (1)..(299): Homolog of NCBI NO: 15217543 NR Description: choline kinase -related [Arabidopsis thaliana]
  misc_feature (1)..(299): Homolog of NCBI NO: 7488653 NR Description: choline kinase (EC 2.7.1.32) CK2 - soybean
  misc_feature (1)..(299): Homolog of NCBI NO: 12311795 NR Description: choline kinase [Pisum sativum]
  misc_feature (1)..(300): Homolog of NCBI NO: 22330627 NR Description: choline kinase -related [Arabidopsis thaliana] At1g74320/F1O17_1 [Arabidopsis thaliana] putative choline kinase [Arabidopsis thaliana]
  misc_feature (1)..(300): Homolog of NCBI NO: 25348157 NR Description: protein choline kinase F1O17.1 [imported] -
  misc_feature (1)..(299): Homolog of NCBI NO: 7488652 NR Description: choline kinase (EC 2.7.1.32) CK1 - soybean
  misc_feature (1)..(299): Homolog of NCBI NO: 12323732 NR Description: putative choline kinase; 4535-2895 [Arabidopsis

SEQ ID NO: 105868 - protein, 300 aa, Arabidopsis thaliana; identical to SEQ ID NO: 42059
  peptide (1)..(300): Ceres Seq. ID no. 13618219
  misc_feature (18)..(289): Pfam Name: Choline/ethanolamine kinase Pfam Description: Choline/ethanolamine kinase
  misc_feature (1)..(300): Homolog of NCBI NO: 15234032 NR Description: choline kinase GmCK2p -related protein
  misc_feature (1)..(300): Homolog of NCBI NO: 21594823 NR Description: choline kinase GmCK2p-like protein [Arabidopsis
  misc_feature (1)..(300): Homolog of NCBI NO: 21537276 NR Description: choline kinase GmCK2p-like protein [Arabidopsis
  misc_feature (1)..(295): Homolog of NCBI NO: 15217543 NR Description: choline kinase -related [Arabidopsis thaliana]
  misc_feature (1)..(295): Homolog of NCBI NO: 7488653 NR Description: choline kinase (EC 2.7.1.32) CK2 - soybean
  misc_feature (1)..(295): Homolog of NCBI NO: 12311795 NR Description: choline kinase [Pisum sativum]
  misc_feature (1)..(296): Homolog of NCBI NO: 22330627 NR Description: choline kinase -related [Arabidopsis thaliana] At1g74320/F1O17_1 [Arabidopsis thaliana] putative choline kinase [Arabidopsis thaliana]
  misc_feature (1)..(296): Homolog of NCBI NO: 25348157 NR Description: protein choline kinase F1O17.1 [imported] -
  misc_feature (1)..(295): Homolog of NCBI NO: 7488652 NR Description: choline kinase (EC 2.7.1.32) CK1 - soybean
  misc_feature (1)..(295): Homolog of NCBI NO: 12323732 NR Description: putative choline kinase; 4535-2895 [Arabidopsis

SEQ ID NO: 105869 - DNA, 1229 bp, Arabidopsis thaliana
  misc_feature (1)..(1229): Ceres Seq. ID no. 13618228
  misc_feature: MA Experiment ID: 108595 Result: Down-regulated in Transcription
  misc_feature: MA Experiment 108595 PARAMETER Experiment Name: At_Ler-pi_Ovule_cDNA_P Parameter: Plant Line Value: null
  misc_feature: MA Experiment ID: 20000071 Result: Up-regulated in Transcription
  misc_feature: MA Experiment 20000071 PARAMETER Experiment Name: At_100uM_ABA_Mutants_cDNA_P Parameter: Plant Line Value: CS8104
  misc_feature: MA Experiment 20000071 PARAMETER Experiment Name: At_100uM_ABA_Mutants_cDNA_P Parameter: Timepoint (hr) Value: 6
  misc_feature: MA Experiment 20000071 PARAMETER Experiment Name: At_100uM_ABA_Mutants_cDNA_P Parameter: Tissue Value: Aerial
  misc_feature: MA Experiment 20000071 PARAMETER Experiment Name: At_100uM_ABA_Mutants_cDNA_P Parameter: Treatment Value: 100uM ABA vs. No Treatment
  misc_feature: MA Experiment ID: 20000113 Result: Down-regulated in Transcription
  misc_feature: MA Experiment 20000113 PARAMETER Experiment Name: At_42deg_Heat_cDNA_P Parameter: Temperature (deg C) Value: 42 vs. 22
  misc_feature: MA Experiment 20000113 PARAMETER Experiment Name: At_42deg_Heat_cDNA_P Parameter: Timepoint (hr) Value: 8
  misc_feature: MA Experiment 20000113 PARAMETER Experiment Name: At_42deg_Heat_cDNA_P Parameter: Tissue Value: Aerial
tttggtgaatcgattgttctcctttcttcgatatcgaattagggtttctgtagaatccagtttttgataggaacaatgtcaatttcggtggttgatagcagtctctgccatccgactgcgtcgtttccgtcatccatggttcattctaatcgattctcgaagagaatatcagggaacgggaattgggttcgcgaaaggagaagactttatgtgaaatcgagtaactcagaaggtaaaaaggaggaagcagcacagaaatcgagcagtaataatacatctagcttcttgtcttttctctgtccattgcttaaagttttctctggaggtgatccttctcaacagcggaatcatgctctcgaggttgcaacttcttcattggcatctgttgcaagacttccatggggatctcgagtatcaactgggagtatagataaccaggatgtctcttctaatccgcctttgcgattgcagctttttgaatttgaggcatgtcccttttgtcggagagtgcgggaagccatgactgagctagacctttcagtagaagtttatccttgtcctaaaggatctataagacacagagaactggttagaagatctggcggaaaagagatgtttccatttctcgtcgacccgaatactgaaactttaatgtatgagagtggtgacatcgtaaagtacctatttaaacaatatggaaatggaagaggcccttccacaggacttctggaaagcaccttgttcactggatggatgccaactcttctccgagcaggtagaggcatgtcattgtgggataaggcttcaacagatctgccacctaaaatgctcgagctcttctcttacgaaaacaacccgtattcacggttggtgcgtgaagcactgtgtgagctggagcttccctatgtattacacaacattggagaagggtccacacggatgaaatcacttctaaatgcttcaggatccaataaggttccattcttggttgatccaaacaccggtgtccaattaggtgattacgagaagattctggcttacctcttcaagacatattcttcagcagcatttgcatagtccatagaacctatacatcattattcccaaggtacaagcttttgagtccacatgttttaacaatactgagaaactggttgacatggaagttacatacatggtcaaaatctgaacttttgaatatatgatgagtcggtaggtatcgcaagttg

SEQ ID NO: 105870 - protein, 333 aa, Arabidopsis thaliana
  peptide (1)..(333): Ceres Seq. ID no. 13618229
  misc_feature (1)..(333): Homolog of NCBI NO: 18413285 NR Description: expressed protein [Arabidopsis thaliana]
  misc_feature (1)..(333): Homolog of NCBI NO: 21593568 NR Description: unknown [Arabidopsis thaliana]
  misc_feature (1)..(333): Homolog of NCBI NO: 7487730 NR Description: hypothetical protein T5L19.130 - Arabidopsis >gi|4539003|emb|CAB39624.1| putative protein [Arabidopsis >gi|7267696|emb|CAB78123.1| putative protein [Arabidopsis
  misc_feature (123)..(329): Homolog of NCBI NO: 18414386 NR Description: auxin-regulated protein [Arabidopsis thaliana] Unknown protein [Arabidopsis thaliana]
  misc_feature (123)..(329): Homolog of NCBI NO: 21593275 NR Description: unknown [Arabidopsis thaliana]
  misc_feature (123)..(329): Homolog of NCBI NO: 11282317 NR Description: hypothetical protein F8F6.90 - Arabidopsis >gi|7406398|emb|CAB85508.1| putative protein [Arabidopsis >gi|9758017|dbj|BAB08614.1|
  misc_feature (92)..(245): Homolog of NCBI NO: 15488040 NR Description: unknown [Photobacterium profundum]
  misc_feature (133)..(207): Homolog of NCBI NO: 27366955 NR Description: Glutaredoxin [Vibrio vulnificus CMCP6]
  misc_feature (133)..(207): Homolog of NCBI NO: 28900404 NR Description: hypothetical protein [Vibrio parahaemolyticus
MSISVVDSSLCHPTASFPSSMVHSNRFSKRISGNGNWVRERRRLYVKSSNSEGKKEEAAQKSSSNNTSSFLSFLCPLLKVFSGGDPSQQRNHALEVATSSLASVARLPWGSRVSTGSIDNQDVSSNPPLRLQLFEFEACPFCRRVREAMTELDLSVEVYPCPKGSIRHRELVRRSGGKEMFPFLVDPNTETLMYESGDIVKYLFKQYGNGRGPSTGLLESTLFTGWMPTLLRAGRGMSLWDKASTDLPPKMLELFSYENNPYSRLVREALCELELPYVLHNIGEGSTRMKSLLNASGSNKVPFLVDPNTGVQLGDYEKILAYLFKTYSSAAFA

SEQ ID NO: 105871 - protein, 313 aa, Arabidopsis thaliana
  peptide (1)..(313): Ceres Seq. ID no. 13618230
  misc_feature (1)..(313): Homolog of NCBI NO: 18413285 NR Description: expressed protein [Arabidopsis thaliana]
  misc_feature (1)..(313): Homolog of NCBI NO: 21593568 NR Description: unknown [Arabidopsis thaliana]
  misc_feature (1)..(313): Homolog of NCBI NO: 7487730 NR Description: hypothetical protein T5L19.130 - Arabidopsis >gi|4539003|emb|CAB39624.1| putative protein [Arabidopsis >gi|7267696|emb|CAB78123.1| putative protein [Arabidopsis
  misc_feature (103)..(309): Homolog of NCBI NO: 18414386 NR Description: auxin-regulated protein [Arabidopsis thaliana] Unknown protein [Arabidopsis thaliana]
  misc_feature (103)..(309): Homolog of NCBI NO: 21593275 NR Description: unknown [Arabidopsis thaliana]
  misc_feature (103)..(309): Homolog of NCBI NO: 11282317 NR Description: hypothetical protein F8F6.90 - Arabidopsis >gi|7406398|emb|CAB85508.1| putative protein [Arabidopsis >gi|9758017|dbj|BAB08614.1|
  misc_feature (72)..(225): Homolog of NCBI NO: 15488040 NR Description: unknown [Photobacterium profundum]
  misc_feature (113)..(187): Homolog of NCBI NO: 27366955 NR Description: Glutaredoxin [Vibrio vulnificus CMCP6]
  misc_feature (113)..(187): Homolog of NCBI NO: 28900404 NR Description: hypothetical protein [Vibrio parahaemolyticus
MVHSNRFSKRISGNGNWVRERRRLYVKSSNSEGKKEEAAQKSSSNNTSSFLSFLCPLLKVFSGGDPSQQRNHALEVATSSLASVARLPWGSRVSTGSIDNQDVSSNPPLRLQLFEFEACPFCRRVREAMTELDLSVEVYPCPKGSIRHRELVRRSGGKEMFPFLVDPNTETLMYESGDIVKYLFKQYGNGRGPSTGLLESTLFTGWMPTLLRAGRGMSLWDKASTDLPPKMLELFSYENNPYSRLVREALCELELPYVLHNIGEGSTRMKSLLNASGSNKVPFLVDPNTGVQLGDYEKILAYLFKTYSSAAFA

SEQ ID NO: 105872 - protein, 185 aa, Arabidopsis thaliana
  peptide (1)..(185): Ceres Seq. ID no. 13618231
  misc_feature (1)..(185): Homolog of NCBI NO: 18413285 NR Description: expressed protein [Arabidopsis thaliana]
  misc_feature (1)..(185): Homolog of NCBI NO: 21593568 NR Description: unknown [Arabidopsis thaliana]
  misc_feature (1)..(185): Homolog of NCBI NO: 7487730 NR Description: hypothetical protein T5L19.130 - Arabidopsis >gi|4539003|emb|CAB39624.1| putative protein [Arabidopsis >gi|7267696|emb|CAB78123.1| putative protein [Arabidopsis
  misc_feature (1)..(181): Homolog of NCBI NO: 18414386 NR Description: auxin-regulated protein [Arabidopsis thaliana] Unknown protein [Arabidopsis thaliana]
  misc_feature (1)..(181): Homolog of NCBI NO: 21593275 NR Description: unknown [Arabidopsis thaliana]
  misc_feature (1)..(181): Homolog of NCBI NO: 11282317 NR Description: hypothetical protein F8F6.90 - Arabidopsis >gi|7406398|emb|CAB85508.1| putative protein [Arabidopsis >gi|9758017|dbj|BAB08614.1|
  misc_feature (1)..(97): Homolog of NCBI NO: 15488040 NR Description: unknown [Photobacterium profundum]
  misc_feature (1)..(59): Homolog of NCBI NO: 27366955 NR Description: Glutaredoxin [Vibrio vulnificus CMCP6]
  misc_feature (1)..(59): Homolog of NCBI NO: 28900404 NR Description: hypothetical protein [Vibrio parahaemolyticus
MTELDLSVEVYPCPKGSIRHRELVRRSGGKEMFPFLVDPNTETLMYESGDIVKYLFKQYGNGRGPSTGLLESTLFTGWMPTLLRAGRGMSLWDKASTDLPPKMLELFSYENNPYSRLVREALCELELPYVLHNIGEGSTRMKSLLNASGSNKVPFLVDPNTGVQLGDYEKILAYLFKTYSSAAFA

SEQ ID NO: 105873 - DNA, 1518 bp, Arabidopsis thaliana
  misc_feature (1)..(1518): Ceres Seq. ID no. 13618232
  misc_feature: MA Experiment ID: 108463 Result: Up-regulated in Transcription
  misc_feature: MA Experiment 108463 PARAMETER Experiment Name: At_Germinating_Seeds_cDNA_P Parameter: Age (day) Value: 3 vs. 0
  misc_feature: MA Experiment 108463 PARAMETER Experiment Name: At_Germinating_Seeds_cDNA_P Parameter: Tissue Value: Germinating Seeds
  misc_feature: MA Experiment ID: 108573 Result: Up-regulated in Transcription
  misc_feature: MA Experiment 108573 PARAMETER Experiment Name: At_Drought_cDNA_P Parameter: Timepoint (hr) Value: 6
  misc_feature: MA Experiment 108573 PARAMETER Experiment Name: At_Drought_cDNA_P Parameter: Tissue Value: Aerial
  misc_feature: MA Experiment 108573 PARAMETER Experiment Name: At_Drought_cDNA_P Parameter: Treatment Value: Drought vs. No Drought
  misc_feature: MA Experiment ID: 20000214 Result: Down-regulated in Transcription
  misc_feature: MA Experiment 20000214 PARAMETER Experiment Name: At_4deg_Cold_P Parameter: Timepoint (hr) Value: 6
  misc_feature: MA Experiment ID: 20000224 Result: Down-regulated in Transcription
  misc_feature: MA Experiment ID: 20001450 Result: Up-regulated in Transcription
  misc_feature: MA Experiment 20001450 PARAMETER Experiment Name: At_Far-red-induction_P Parameter: Age (day) Value: 7
  misc_feature: MA Experiment 20001450 PARAMETER Experiment Name: At_Far-red-induction_P Parameter: Light Value: Far-red vs. White
  misc_feature: MA Experiment 20001450 PARAMETER Experiment Name: At_Far-red-induction_P Parameter: Organism Value: A. thaliana
  misc_feature: MA Experiment 20001450 PARAMETER Experiment Name: At_Far-red-induction_P Parameter: Plant Line Value: Columbia
  misc_feature: MA Experiment 20001450 PARAMETER Experiment Name: At_Far-red-induction_P Parameter: Timepoint (hr) Value: 8
  misc_feature: MA Experiment 20001450 PARAMETER Experiment Name: At_Far-red-induction_P Parameter: Tissue Value: Whole Plant
acagaggaggaaaagaagcacattgtcgccgtctctttaacttccttcatcaatctccgtctcgtgaatctctgtttctttgatctgtaattgcgaattcgtcgtttcccaattttgaaattgttgtaatgtcggcggtctcgtgctccacggcgagttctagcggaggatgtgcatttaggtttcgatcaaagacatcaatccattctcctaatttcatcagaattgggacaaattctcagagtgacagattctgtaatcatcgtttggaattggtacatggaactcgtaaagtgaaaggagcatctgtacgtatggcattagttgaggagagacaatcaacgagcaaagatgttgctgagcctcctcgggtcctggcgtatgatcttgttcaaggagcacttgtgaaatggagatggaaggatgacaaatctgttccagatacacctactgctgttctcctacacggaattttagggagcgggaaaaactggggcacttttgctcgtagattggctcatgaattcccaacgtggcagtttctattggtagacctgcgttgccatggggattcaacatctctcaagaagagaggtccacactcggttgctactactgcttctgatgttctaaaacttgttggtcagttgaggttaacacctcgggtccttgttggtcatagctttggggggaaagttgtattaagcatggtagagcaagcagctaagcctcttccacgaccagtccgagcttgggtattggatgctactcctggtaaagttcgtgcaggaggagatggagaagatcatccacgagagcttatatcatttctacgtaaattgccaaaagtggtcttgtcaaagcgcgaggttcttaaagctcttataaatgaagggttttccaatgatgtcgcacagtgggtcattaccaatctcagacctactggaccatcagcttctagcttctcgtggacatttgacctagacgggatcgctgaactttaccagtcttacgaagagacaaatctatggaactttgttgagaatcttccaagaggagtacatgtgaattttctgaaagcggaaagaagcttgcaccgttgggccctagaagaccttcagcgaatccacgccgctgaagagctagcctctgaagaaggcggtggtgtagaaatgcatgtcttggaagatgccggtcattgggttcacacggataacccggatggtctcttcaggatcttgtcatcttctttccaggttctcagagcctagaggtgctgaacggtcttggttcggctctttttctgtgtaatacttgtggagaagttaggtctaaaaacagttgacagatacaatatcatatacatcaacactgtgtccgtgtaatgttctgtgtgacataagtaattcagaagtaacatcatatggctgtatcatccggtattattcttgactcgatgtcctttacattgcttttctttttttgtggttcacttggtcagagaaagttctaaagctc

SEQ ID NO: 105874 - protein, 380 aa, Arabidopsis thaliana; identical to SEQ ID NO: 27590
  peptide (1)..(380): Ceres Seq. ID no. 13618233
  misc_feature (136)..(373): Pfam Name: alpha/beta hydrolase fold Pfam Description: alpha/beta hydrolase fold
  misc_feature (1)..(380): Homolog of NCBI NO: 15234891 NR Description: hydrolase, alpha/beta fold family [Arabidopsis
  misc_feature (209)..(377): Homolog of NCBI NO: 20161236 NR Description: P0408G07.9 [Oryza sativa (japonica
  misc_feature (108)..(375): Homolog of NCBI NO: 22331752 NR Description: expressed protein [Arabidopsis thaliana] AT3g52570/F22O6_50 [Arabidopsis thaliana]
  misc_feature (209)..(375): Homolog of NCBI NO: 34908512 NR Description: P0679C12.26 [Oryza sativa (japonica
  misc_feature (104)..(200): Homolog of NCBI NO: 34908512 NR Description: P0679C12.26 [Oryza sativa (japonica
  misc_feature (108)..(375): Homolog of NCBI NO: 7486010 NR Description: hypothetical protein F22O6.50 - Arabidopsis >gi|4886270|emb|CAB43409.1| putative protein [Arabidopsis
  misc_feature (52)..(290): Homolog of NCBI NO: 34873230 NR Description: similar to Williams-Beuren syndrome critical
  misc_feature (50)..(290): Homolog of NCBI NO: 21644577 NR Description: Williams-Beuren syndrome critical region 21 [Mus
  misc_feature (137)..(213): Homolog of NCBI NO: 20161236 NR Description: P0408G07.9 [Oryza sativa (japonica
  misc_feature (108)..(304): Homolog of NCBI NO: 15642097 NR Description: esterase/lipase YbfF, putative [Vibrio cholerae]

SEQ ID NO: 105875 - protein, 318 aa, Arabidopsis thaliana; identical to SEQ ID NO: 27591
  peptide (1)..(318): Ceres Seq. ID no. 13618234
  misc_feature (74)..(311): Pfam Name: alpha/beta hydrolase fold Pfam Description: alpha/beta hydrolase fold
  misc_feature (1)..(318): Homolog of NCBI NO: 15234891 NR Description: hydrolase, alpha/beta fold family [Arabidopsis
  misc_feature (147)..(315): Homolog of NCBI NO: 20161236 NR Description: P0408G07.9 [Oryza sativa (japonica
  misc_feature (46)..(313): Homolog of NCBI NO: 22331752 NR Description: expressed protein [Arabidopsis thaliana] AT3g52570/F22O6_50 [Arabidopsis thaliana]
  misc_feature (147)..(313): Homolog of NCBI NO: 34908512 NR Description: P0679C12.26 [Oryza sativa (japonica
  misc_feature (42)..(138): Homolog of NCBI NO: 34908512 NR Description: P0679C12.26 [Oryza sativa (japonica
  misc_feature (46)..(313): Homolog of NCBI NO: 7486010 NR Description: hypothetical protein F22O6.50 - Arabidopsis >gi|4886270|emb|CAB43409.1| putative protein [Arabidopsis
  misc_feature (1)..(228): Homolog of NCBI NO: 34873230 NR Description: similar to Williams-Beuren syndrome critical
  misc_feature (1)..(228): Homolog of NCBI NO: 21644577 NR Description: Williams-Beuren syndrome critical region 21 [Mus
  misc_feature (75)..(151): Homolog of NCBI NO: 20161236 NR Description: P0408G07.9 [Oryza sativa (japonica
  misc_feature (46)..(242): Homolog of NCBI NO: 15642097 NR Description: esterase/lipase YbfF, putative [Vibrio cholerae]

SEQ ID NO: 105876 - DNA, 1308 bp, Arabidopsis thaliana
  misc_feature (1)..(1308): Ceres Seq. ID no. 13618235
  misc_feature: MA Experiment ID: 20000111 Result: Down-regulated in Transcription
  misc_feature: MA Experiment 20000111 PARAMETER Experiment Name: At_42deg_Heat_cDNA_P Parameter: Temperature (deg C) Value: 42 vs. 22
  misc_feature: MA Experiment 20000111 PARAMETER Experiment Name: At_42deg_Heat_cDNA_P Parameter: Timepoint (hr) Value: 6
  misc_feature: MA Experiment 20000111 PARAMETER Experiment Name: At_42deg_Heat_cDNA_P Parameter: Tissue Value: Aerial
  misc_feature: MA Experiment ID: 20000173 Result: Down-regulated in Transcription
  misc_feature: MA Experiment 20000173 PARAMETER Experiment Name: At_42deg_Heat_P Parameter: Age (day) Value: 14
  misc_feature: MA Experiment 20000173 PARAMETER Experiment Name: At_42deg_Heat_P Parameter: Organism Value: A. thaliana
  misc_feature: MA Experiment 20000173 PARAMETER Experiment Name: At_42deg_Heat_P Parameter: Plant Line Value: WS
  misc_feature: MA Experiment 20000173 PARAMETER Experiment Name: At_42deg_Heat_P Parameter: Temperature (deg C) Value: 42 vs. 22
  misc_feature: MA Experiment 20000173 PARAMETER Experiment Name: At_42deg_Heat_P Parameter: Timepoint (hr) Value: 6
  misc_feature: MA Experiment 20000173 PARAMETER Experiment Name: At_42deg_Heat_P Parameter: Tissue Value: Aerial
  misc_feature: MA Experiment ID: 20000184 Result: Down-regulated in Transcription
  misc_feature: MA Experiment 20000184 PARAMETER Experiment Name: At_Shoots__P Parameter: Age (day) Value: 7
  misc_feature: MA Experiment 20000184 PARAMETER Experiment Name: At_Shoots__P Parameter: Tissue Value: Shoots vs. Whole Plant
  misc_feature: MA Experiment ID: 20000224 Result: Up-regulated in Transcription
  misc_feature: MA Experiment ID: 20000264 Result: Up-regulated in Transcription
  misc_feature: MA Experiment 20000264 PARAMETER Experiment Name: At_Open_Flower_P Parameter: Age (day) Value: 21
  misc_feature: MA Experiment 20000264 PARAMETER Experiment Name: At_Open_Flower_P Parameter: Plant Line Value: WS
  misc_feature: MA Experiment 20000264 PARAMETER Experiment Name: At_Open_Flower_P Parameter: Tissue Value: Open Flower vs. Whole Plant
  misc_feature: MA Experiment ID: 20000794 Result: Up-regulated in Transcription
  misc_feature: MA Experiment 20000794 PARAMETER Experiment Name: At_Petals_P Parameter: Age (day) Value: 23-25 days
  misc_feature: MA Experiment 20000794 PARAMETER Experiment Name: At_Petals_P Parameter: Plant Line Value: WS
  misc_feature: MA Experiment 20000794 PARAMETER Experiment Name: At_Petals_P Parameter: Tissue Value: Petals vs. Whole plant
  misc_feature: MA Experiment ID: 20001557 Result: Down-regulated in Transcription
  misc_feature: MA Experiment 20001557 PARAMETER Experiment Name: At_Drought_Soil_Dry_P Parameter: Age (day) Value: 27
  misc_feature: MA Experiment 20001557 PARAMETER Experiment Name: At_Drought_Soil_Dry_P Parameter: Organism Value: A. thaliana
  misc_feature: MA Experiment 20001557 PARAMETER Experiment Name: At_Drought_Soil_Dry_P Parameter: Plant Line Value: WS
  misc_feature: MA Experiment 20001557 PARAMETER Experiment Name: At_Drought_Soil_Dry_P Parameter: Post Timepoint (hr) Value: 3
  misc_feature: MA Experiment 20001557 PARAMETER Experiment Name: At_Drought_Soil_Dry_P Parameter: Post-Treatment Value: Re-Water vs. No Drought
  misc_feature: MA Experiment 20001557 PARAMETER Experiment Name: At_Drought_Soil_Dry_P Parameter: Timepoint (day) Value: 13
  misc_feature: MA Experiment 20001557 PARAMETER Experiment Name: At_Drought_Soil_Dry_P Parameter: Treatment Value: Drought vs. No Drought
agaagaagaagaagaagagtgatactgagaagatctgtgagattattatattcgattttgatcagtttctaaaaagctttcaacaatggattcgtcttcaaatttgaatcctcttcgtgaagatacctcagaggaacatttagaacccatagaagctccggcgtctgtcttcgccgctcgtcctcttcgtcctccttctacgaattcgtcggagaagtattcgcctgtagaatggaaaagctattttgataaagaagatgatatatcaatcactggctctgatgatgtgtttcatgtgtatatggcaggaaatgaaggacctgttgtcttttgtctccatggtggtggctactctgggctctcgttttctatagtagcaagtaaaattaaggagaaagcacgtgtggttgcgatggacttgagagggcacggtaaatcggtttcggagaacgaattggagttatcgcttgagacaatgagcaatgatgttttggctgtcattaaggaattgtatggagactctcctccagctattgtgctagttggtcacagcatgggaggttcggtcgctgtgcaagttgctgcaaacaaaacattgcctagcttggctgggcttgtcgttgtggatgttgttgagggtactgctatttcctcattgattcacatgcagaaaattctttcaaacagaatgcaacattttcccagcatcgaaaaagcaattgaatacagcgttagaggagggtcattaagaaacattgattcagcccgtgtctctatccccacaactctcaaatatgatgattcaaagcattgctacgtttaccgaacacgtctagaggaaacagagcaatattggaaaggctggtacgatggtctctcagagaagtttttgtcatccccagttccgaaactcttgctattagctggaactgataggttggacaggaccctcacaattggtcaaatgcaaggaaagtttcagatgattgtggtcaaacacaccggacatgccatacaggaagatgtaccggaggagtttgcgaatctagttctgaatttcatatcacgtaacagaattggtcctcatggtgttgagataccaggaatgtggaaaccttcacaacagactaagacttgaagcagccatcactggacaatgccaaagtcgtcgtgtggctctactcacttgtttcgctttgtccgtttatgaataaacagaattaacaaactctagctcgtgttaaggagttggcaatacaagaagaaaacagagtaaaaagattaaaatcactttctatatttttccat

SEQ ID NO: 105877 - protein, 350 aa, Arabidopsis thaliana; identical to SEQ ID NO: 27633
  peptide (1)..(350): Ceres Seq. ID no. 13618236
  misc_feature (105)..(324): Pfam Name: alpha/beta hydrolase fold Pfam Description: alpha/beta hydrolase fold
  misc_feature (1)..(350): Homolog of NCBI NO: 18413291 NR Description: hydrolase, alpha/beta fold family [Arabidopsis
  misc_feature (1)..(184): Homolog of NCBI NO: 7487732 NR Description: hypothetical protein T5L19.180 - Arabidopsis
  misc_feature (212)..(261): Homolog of NCBI NO: 7487732 NR Description: hypothetical protein T5L19.180 - Arabidopsis
  misc_feature (310)..(340): Homolog of NCBI NO: 7487732 NR Description: hypothetical protein T5L19.180 - Arabidopsis
  misc_feature (9)..(346): Homolog of NCBI NO: 32479665 NR Description: P0041A24.6 [Oryza sativa (japonica
  misc_feature (45)..(236): Homolog of NCBI NO: 30794138 NR Description: protein phosphatase methylesterase 1 [Mus
  misc_feature (230)..(335): Homolog of NCBI NO: 30794138 NR Description: protein phosphatase methylesterase 1 [Mus
  misc_feature (45)..(236): Homolog of NCBI NO: 7706645 NR Description: protein phosphatase methylesterase-1 [Homo
  misc_feature (230)..(335): Homolog of NCBI NO: 7706645 NR Description: protein phosphatase methylesterase-1 [Homo
  misc_feature (45)..(236): Homolog of NCBI NO: 34858774 NR Description: similar to Protein phosphatase methylesterase 1

SEQ ID NO: 105878 - protein, 278 aa, Arabidopsis thaliana; identical to SEQ ID NO: 27634
  peptide (1)..(278): Ceres Seq. ID no. 13618237
  misc_feature (33)..(252): Pfam Name: alpha/beta hydrolase fold Pfam Description: alpha/beta hydrolase fold
  misc_feature (1)..(278): Homolog of NCBI NO: 18413291 NR Description: hydrolase, alpha/beta fold family [Arabidopsis
  misc_feature (1)..(112): Homolog of NCBI NO: 7487732 NR Description: hypothetical protein T5L19.180 - Arabidopsis
  misc_feature (140)..(189): Homolog of NCBI NO: 7487732 NR Description: hypothetical protein T5L19.180 - Arabidopsis
  misc_feature (238)..(268): Homolog of NCBI NO: 7487732 NR Description: hypothetical protein T5L19.180 - Arabidopsis
  misc_feature (1)..(274): Homolog of NCBI NO: 32479665 NR Description: P0041A24.6 [Oryza sativa (japonica
  misc_feature (1)..(164): Homolog of NCBI NO: 30794138 NR Description: protein phosphatase methylesterase 1 [Mus
  misc_feature (158)..(263): Homolog of NCBI NO: 30794138 NR Description: protein phosphatase methylesterase 1 [Mus
  misc_feature (1)..(164): Homolog of NCBI NO: 7706645 NR Description: protein phosphatase methylesterase-1 [Homo
  misc_feature (158)..(263): Homolog of NCBI NO: 7706645 NR Description: protein phosphatase methylesterase-1 [Homo
  misc_feature (1)..(164): Homolog of NCBI NO: 34858774 NR Description: similar to Protein phosphatase methylesterase 1

SEQ ID NO: 105879 - protein, 241 aa, Arabidopsis thaliana; identical to SEQ ID NO: 27635
  peptide (1)..(241): Ceres Seq. ID no. 13618238
  misc_feature (1)..(215): Pfam Name: alpha/beta hydrolase fold Pfam Description: alpha/beta hydrolase fold
  misc_feature (1)..(241): Homolog of NCBI NO: 18413291 NR Description: hydrolase, alpha/beta fold family [Arabidopsis
  misc_feature (1)..(75): Homolog of NCBI NO: 7487732 NR Description: hypothetical protein T5L19.180 - Arabidopsis
  misc_feature (103)..(152): Homolog of NCBI NO: 7487732 NR Description: hypothetical protein T5L19.180 - Arabidopsis
  misc_feature (201)..(231): Homolog of NCBI NO: 7487732 NR Description: hypothetical protein T5L19.180 - Arabidopsis
  misc_feature (1)..(237): Homolog of NCBI NO: 32479665 NR Description: P0041A24.6 [Oryza sativa (japonica
  misc_feature (1)..(127): Homolog of NCBI NO: 30794138 NR Description: protein phosphatase methylesterase 1 [Mus
  misc_feature (121)..(226): Homolog of NCBI NO: 30794138 NR Description: protein phosphatase methylesterase 1 [Mus
  misc_feature (1)..(127): Homolog of NCBI NO: 7706645 NR Description: protein phosphatase methylesterase-1 [Homo
  misc_feature (121)..(226): Homolog of NCBI NO: 7706645 NR Description: protein phosphatase methylesterase-1 [Homo
  misc_feature (1)..(127): Homolog of NCBI NO: 34858774 NR Description: similar to Protein phosphatase methylesterase 1

SEQ ID NO: 105880 - DNA, 1009 bp, Arabidopsis thaliana
  misc_feature (1)..(1009): Ceres Seq. ID no. 13618239
  misc_feature: MA Experiment ID: 108434 Result: Up-regulated in Transcription
  misc_feature: MA Experiment 108434 PARAMETER Experiment Name: At_Root_Tips_cDNA_P Parameter: Tissue Value: Root Tips
  misc_feature: MA Experiment ID: 108461 Result: Down-regulated in Transcription
  misc_feature: MA Experiment 108461 PARAMETER Experiment Name: At_Germinating_Seeds_cDNA_P Parameter: Age (day) Value: 1 vs. 0
  misc_feature: MA Experiment 108461 PARAMETER Experiment Name: At_Germinating_Seeds_cDNA_P Parameter: Tissue Value: Germinating Seeds
  misc_feature: MA Experiment ID: 108462 Result: Down-regulated in Transcription
  misc_feature: MA Experiment 108462 PARAMETER Experiment Name: At_Germinating_Seeds_cDNA_P Parameter: Age (day) Value: 2 vs. 0
  misc_feature: MA Experiment 108462 PARAMETER Experiment Name: At_Germinating_Seeds_cDNA_P Parameter: Tissue Value: Germinating Seeds
  misc_feature: MA Experiment ID: 108463 Result: Down-regulated in Transcription
  misc_feature: MA Experiment 108463 PARAMETER Experiment Name: At_Germinating_Seeds_cDNA_P Parameter: Age (day) Value: 3 vs. 0
  misc_feature: MA Experiment 108463 PARAMETER Experiment Name: At_Germinating_Seeds_cDNA_P Parameter: Tissue Value: Germinating Seeds
  misc_feature: MA Experiment ID: 108464 Result: Down-regulated in Transcription
  misc_feature: MA Experiment 108464 PARAMETER Experiment Name: At_Germinating_Seeds_cDNA_P Parameter: Age (day) Value: 4 vs. 0
  misc_feature: MA Experiment 108464 PARAMETER Experiment Name: At_Germinating_Seeds_cDNA_P Parameter: Tissue Value: Germinating Seeds
  misc_feature: MA Experiment ID: 20000495 Result: Up-regulated in Transcription
  misc_feature: MA Experiment 20000495 PARAMETER Experiment Name: At_Guard_Cells_P Parameter: Harvest Date Value: 8/2/2002
  misc_feature: MA Experiment 20000495 PARAMETER Experiment Name: At_Guard_Cells_P Parameter: Organism Value: A. thaliana
  misc_feature: MA Experiment 20000495 PARAMETER Experiment Name: At_Guard_Cells_P Parameter: Tissue Value: Guard Cells vs. Leaves
ccaaatttctccatggatcgttctttgaatctcctcgatttagccttagggttcgatgagcagctagctattccatcgccactaaatggaaaagtaatactaatagaagactgtgtagagacgagtggttcctttgtacttcaccagctaatgaaacgtgttctctcctctaactcctccgacgcacttatctttctcgcttttgctcgccctttctctcattatgatcgaatcttgcgtaaactgggatgtaatttagctacccataagtcgaataatcgattggtgttctttgacatgctcatggttaagtgttcagatggggatcaaatggaagacaatgtgagtgcagttgcgaaactatttcgggagatacaagaaaccgttcgaaagctacagagtgtaacaagtggtaacataactgttatggtggatgacatgtctctgctggaaattgctactaccggcagcaactcagatcacgtattggacttcttgcattattgccacacattaagttctgaaagcaattgttcattggtcatcctcaatcatgaagatatatacgcgagcatggagagacctgcatttttgctacagatggtatgccttgcagatgttgtgataaaggcagagcctttagcctctggtttagcaaatgatgtacatggccaattgactgttctgaacaaagggataagcaactcaggtagaggaagctcgaggaacaagttgcagaattttcaattcaggatcaaagaaaatggtatcgactatttctatcctggttgcagaagctgaggattagacaccgttctgagcattagcatggtagtgagatgtttttctagacagttttgttatttgcgtttaggttaaacagagacactctgttaaacatttttactttagtgtctcttctggttgtaacttgatgacttagctaaagttgaatgcttgagacacagaaacttgtagacatggaaaattagtaacattctatatcttt

SEQ ID NO: 105881 - protein, 266 aa, Arabidopsis thaliana; identical to SEQ ID NO: 37643
  peptide (1)..(266): Ceres Seq. ID no. 13618240
  misc_feature (5)..(266): Homolog of NCBI NO: 18413296 NR Description: expressed protein [Arabidopsis thaliana]
  misc_feature (75)..(227): Homolog of NCBI NO: 7486308 NR Description: hypothetical protein F28M11.10 - Arabidopsis >gi|4538973|emb|CAB39761.1| hypothetical protein [Arabidopsis >gi|7267705|emb|CAB78132.1| hypothetical protein [Arabidopsis
  misc_feature (5)..(106): Homolog of NCBI NO: 7486308 NR Description: hypothetical protein F28M11.10 - Arabidopsis >gi|4538973|emb|CAB39761.1| hypothetical protein [Arabidopsis >gi|7267705|emb|CAB78132.1| hypothetical protein [Arabidopsis
  misc_feature (31)..(265): Homolog of NCBI NO: 24796809 NR Description: unknown protein [Oryza sativa (japonica

SEQ ID NO: 105882 - protein, 262 aa, Arabidopsis thaliana; identical to SEQ ID NO: 37644
  peptide (1)..(262): Ceres Seq. ID no. 13618241
  misc_feature (1)..(262): Homolog of NCBI NO: 18413296 NR Description: expressed protein [Arabidopsis thaliana]
  misc_feature (71)..(223): Homolog of NCBI NO: 7486308 NR Description: hypothetical protein F28M11.10 - Arabidopsis >gi|4538973|emb|CAB39761.1| hypothetical protein [Arabidopsis >gi|7267705|emb|CAB78132.1| hypothetical protein [Arabidopsis
  misc_feature (1)..(102): Homolog of NCBI NO: 7486308 NR Description: hypothetical protein F28M11.10 - Arabidopsis >gi|4538973|emb|CAB39761.1| hypothetical protein [Arabidopsis >gi|7267705|emb|CAB78132.1| hypothetical protein [Arabidopsis
  misc_feature (27)..(261): Homolog of NCBI NO: 24796809 NR Description: unknown protein [Oryza sativa (japonica

SEQ ID NO: 105883 - protein, 216 aa, Arabidopsis thaliana; identical to SEQ ID NO: 37645
  peptide (1)..(216): Ceres Seq. ID no. 13618242
  misc_feature (1)..(216): Homolog of NCBI NO: 18413296 NR Description: expressed protein [Arabidopsis thaliana]
  misc_feature (25)..(177): Homolog of NCBI NO: 7486308 NR Description: hypothetical protein F28M11.10 - Arabidopsis >gi|4538973|emb|CAB39761.1| hypothetical protein [Arabidopsis >gi|7267705|emb|CAB78132.1| hypothetical protein [Arabidopsis
  misc_feature (1)..(56): Homolog of NCBI NO: 7486308 NR Description: hypothetical protein F28M11.10 - Arabidopsis >gi|4538973|emb|CAB39761.1| hypothetical protein [Arabidopsis >gi|7267705|emb|CAB78132.1| hypothetical protein [Arabidopsis
  misc_feature (1)..(215): Homolog of NCBI NO: 24796809 NR Description: unknown protein [Oryza sativa (japonica

SEQ ID NO: 105884 - DNA, 1032 bp, Arabidopsis thaliana
  misc_feature (1)..(1032): Ceres Seq. ID no. 13618266
  misc_feature: MA Experiment ID: 108434 Result: Down-regulated in Transcription
  misc_feature: MA Experiment 108434 PARAMETER Experiment Name: At_Root_Tips_cDNA_P Parameter: Tissue Value: Root Tips
  misc_feature: MA Experiment ID: 108435 Result: Down-regulated in Transcription
  misc_feature: MA Experiment 108435 PARAMETER Experiment Name: At_stm_Mutants_cDNA_P Parameter: Plant Line Value: wt Landsburg vs stm
  misc_feature: MA Experiment 108435 PARAMETER Experiment Name: At_stm_Mutants_cDNA_P Parameter: Tissue Value: Shoot Apical Meristem Region
  misc_feature: MA Experiment ID: 108461 Result: Up-regulated in Transcription
  misc_feature: MA Experiment 108461 PARAMETER Experiment Name: At_Germinating_Seeds_cDNA_P Parameter: Age (day) Value: 1 vs. 0
  misc_feature: MA Experiment 108461 PARAMETER Experiment Name: At_Germinating_Seeds_cDNA_P Parameter: Tissue Value: Germinating Seeds
  misc_feature: MA Experiment ID: 108462 Result: Up-regulated in Transcription
  misc_feature: MA Experiment 108462 PARAMETER Experiment Name: At_Germinating_Seeds_cDNA_P Parameter: Age (day) Value: 2 vs. 0
  misc_feature: MA Experiment 108462 PARAMETER Experiment Name: At_Germinating_Seeds_cDNA_P Parameter: Tissue Value: Germinating Seeds
  misc_feature: MA Experiment ID: 108464 Result: Up-regulated in Transcription
  misc_feature: MA Experiment 108464 PARAMETER Experiment Name: At_Germinating_Seeds_cDNA_P Parameter: Age (day) Value: 4 vs. 0
  misc_feature: MA Experiment 108464 PARAMETER Experiment Name: At_Germinating_Seeds_cDNA_P Parameter: Tissue Value: Germinating Seeds
  misc_feature: MA Experiment ID: 108488 Result: Up-regulated in Transcription
  misc_feature: MA Experiment ID: 108489 Result: Down-regulated in Transcription
  misc_feature: MA Experiment ID: 108594 Result: Down-regulated in Transcription
  misc_feature: MA Experiment 108594 PARAMETER Experiment Name: At_Ler-rhl_Root_cDNA_P Parameter: Plant Line Value: null
  misc_feature: MA Experiment ID: 20000180 Result: Up-regulated in Transcription
  misc_feature: MA Experiment 20000180 PARAMETER Experiment Name: At_Germinating_Seeds_P Parameter: Age (hr) Value: 24 vs. 0
  misc_feature: MA Experiment 20000180 PARAMETER Experiment Name: At_Germinating_Seeds_P Parameter: Tissue Value: Germinating Seeds
  misc_feature: MA Experiment ID: 20000185 Result: Down-regulated in Transcription
  misc_feature: MA Experiment 20000185 PARAMETER Experiment Name: At_Roots__P Parameter: Age (day) Value: 7 vs. 21
  misc_feature: MA Experiment 20000185 PARAMETER Experiment Name: At_Roots__P Parameter: Organism Value: A. thaliana
  misc_feature: MA Experiment 20000185 PARAMETER Experiment Name: At_Roots__P Parameter: Tissue Value: Roots vs. Whole Plant
  misc_feature: MA Experiment ID: 20000269 Result: Down-regulated in Transcription
  misc_feature: MA Experiment 20000269 PARAMETER Experiment Name: At_1mM_KNO3_L-vs-H_Roots_P Parameter: Age (day) Value: 7,10,12
  misc_feature: MA Experiment 20000269 PARAMETER Experiment Name: At_1mM_KNO3_L-vs-H_Roots_P Parameter: Organism Value: A. thaliana
  misc_feature: MA Experiment 20000269 PARAMETER Experiment Name: At_1mM_KNO3_L-vs-H_Roots_P Parameter: Plant Line Value: WS
  misc_feature: MA Experiment 20000269 PARAMETER Experiment Name: At_1mM_KNO3_L-vs-H_Roots_P Parameter: Timepoint (day) Value: 7,10,12
  misc_feature: MA Experiment 20000269 PARAMETER Experiment Name: At_1mM_KNO3_L-vs-H_Roots_P Parameter: Tissue Value: Roots
  misc_feature: MA Experiment 20000269 PARAMETER Experiment Name: At_1mM_KNO3_L-vs-H_Roots_P Parameter: Treatment Value: 1mM KNO3 vs. 50mM KNO3
  misc_feature: MA Experiment ID: 20000437 Result: Down-regulated in Transcription
  misc_feature: MA Experiment 20000437 PARAMETER Experiment Name: At_Drought_P Parameter: Age (day) Value: 8
  misc_feature: MA Experiment 20000437 PARAMETER Experiment Name: At_Drought_P Parameter: Organism Value: A. thaliana
  misc_feature: MA Experiment 20000437 PARAMETER Experiment Name: At_Drought_P Parameter: Plant Line Value: WS
  misc_feature: MA Experiment 20000437 PARAMETER Experiment Name: At_Drought_P Parameter: Timepoint (hr) Value: 24
  misc_feature: MA Experiment 20000437 PARAMETER Experiment Name: At_Drought_P Parameter: Tissue Value: Whole Plant
  misc_feature: MA Experiment 20000437 PARAMETER Experiment Name: At_Drought_P Parameter: Treatment Value: Drought vs. No Drought
  misc_feature: MA Experiment ID: 20000439 Result: Down-regulated in Transcription
  misc_feature: MA Experiment 20000439 PARAMETER Experiment Name: At_Roots__P Parameter: Age (day) Value: 14 vs. 21
  misc_feature: MA Experiment 20000439 PARAMETER Experiment Name: At_Roots__P Parameter: Organism Value: A. thaliana
  misc_feature: MA Experiment 20000439 PARAMETER Experiment Name: At_Roots__P Parameter: Tissue Value: Roots vs. Whole Plant
  misc_feature: MA Experiment ID: 20000794 Result: Down-regulated in Transcription
  misc_feature: MA Experiment 20000794 PARAMETER Experiment Name: At_Petals_P Parameter: Age (day) Value: 23-25 days
  misc_feature: MA Experiment 20000794 PARAMETER Experiment Name: At_Petals_P Parameter: Plant Line Value: WS
  misc_feature: MA Experiment 20000794 PARAMETER Experiment Name: At_Petals_P Parameter: Tissue Value: Petals vs. Whole plant
  misc_feature: MA Experiment ID: 20001557 Result: Down-regulated in Transcription
  misc_feature: MA Experiment 20001557 PARAMETER Experiment Name: At_Drought_Soil_Dry_P Parameter: Age (day) Value: 27
  misc_feature: MA Experiment 20001557 PARAMETER Experiment Name: At_Drought_Soil_Dry_P Parameter: Organism Value: A. thaliana
  misc_feature: MA Experiment 20001557 PARAMETER Experiment Name: At_Drought_Soil_Dry_P Parameter: Plant Line Value: WS
  misc_feature: MA Experiment 20001557 PARAMETER Experiment Name: At_Drought_Soil_Dry_P Parameter: Post Timepoint (hr) Value: 3
  misc_feature: MA Experiment 20001557 PARAMETER Experiment Name: At_Drought_Soil_Dry_P Parameter: Post-Treatment Value: Re-Water vs. No Drought
  misc_feature: MA Experiment 20001557 PARAMETER Experiment Name: At_Drought_Soil_Dry_P Parameter: Timepoint (day) Value: 13
  misc_feature: MA Experiment 20001557 PARAMETER Experiment Name: At_Drought_Soil_Dry_P Parameter: Treatment Value: Drought vs. No Drought
  misc_feature: MA Experiment ID: 20001757 Result: Up-regulated in Transcription
  misc_feature: MA Experiment 20001757 PARAMETER Experiment Name: At_50mM_NH4NO3_L-to-H_P Parameter: Timepoint (hr) Value: 6
  misc_feature: MA Experiment 20001757 PARAMETER Experiment Name: At_50mM_NH4NO3_L-to-H_P Parameter: Tissue Value: Leaf
  misc_feature: MA Experiment 20001757 PARAMETER Experiment Name: At_50mM_NH4NO3_L-to-H_P Parameter: Treatment Value: 50mM NH4NO3 vs 100mM Mannitol
  misc_feature: MA Experiment ID: 20001904 Result: Down-regulated in Transcription
  misc_feature: MA Experiment 20001904 PARAMETER Experiment Name: At_Drought_Reproduction_P Parameter: Age (day) Value: 37
  misc_feature: MA Experiment 20001904 PARAMETER Experiment Name: At_Drought_Reproduction_P Parameter: Organism Value: A. thaliana
  misc_feature: MA Experiment 20001904 PARAMETER Experiment Name: At_Drought_Reproduction_P Parameter: Plant Line Value: WS
  misc_feature: MA Experiment 20001904 PARAMETER Experiment Name: At_Drought_Reproduction_P Parameter: Timepoint (day) Value: 7
  misc_feature: MA Experiment 20001904 PARAMETER Experiment Name: At_Drought_Reproduction_P Parameter: Tissue Value: Rosettes
  misc_feature: MA Experiment 20001904 PARAMETER Experiment Name: At_Drought_Reproduction_P Parameter: Treatment Value: Drought vs. No Drought
  misc_feature: MA Experiment ID: 20001906 Result: Down-regulated in Transcription
  misc_feature: MA Experiment 20001906 PARAMETER Experiment Name: At_Drought_Reproduction_P Parameter: Age (day) Value: 35
  misc_feature: MA Experiment 20001906 PARAMETER Experiment Name: At_Drought_Reproduction_P Parameter: Organism Value: A. thaliana
  misc_feature: MA Experiment 20001906 PARAMETER Experiment Name: At_Drought_Reproduction_P Parameter: Plant Line Value: WS
  misc_feature: MA Experiment 20001906 PARAMETER Experiment Name: At_Drought_Reproduction_P Parameter: Timepoint (day) Value: 5
  misc_feature: MA Experiment 20001906 PARAMETER Experiment Name: At_Drought_Reproduction_P Parameter: Tissue Value: Siliques
  misc_feature: MA Experiment 20001906 PARAMETER Experiment Name: At_Drought_Reproduction_P Parameter: Treatment Value: Drought vs. No Drought
  misc_feature: MA Experiment ID: 20001908 Result: Down-regulated in Transcription
  misc_feature: MA Experiment 20001908 PARAMETER Experiment Name: At_Drought_Reproduction_P Parameter: Age (day) Value: 40
  misc_feature: MA Experiment 20001908 PARAMETER Experiment Name: At_Drought_Reproduction_P Parameter: Organism Value: A. thaliana
  misc_feature: MA Experiment 20001908 PARAMETER Experiment Name: At_Drought_Reproduction_P Parameter: Plant Line Value: WS
  misc_feature: MA Experiment 20001908 PARAMETER Experiment Name: At_Drought_Reproduction_P Parameter: Timepoint (day) Value: 10
  misc_feature: MA Experiment 20001908 PARAMETER Experiment Name: At_Drought_Reproduction_P Parameter: Tissue Value: Siliques
  misc_feature: MA Experiment 20001908 PARAMETER Experiment Name: At_Drought_Reproduction_P Parameter: Treatment Value: Drought vs. No Drought
accttataggagcagtttcgtctcttcctccttctttcacttagctcttcctagtgttaaaccagagtaaagcttgaaactttggactaaaagaatggcgtctttgggtgtgtcggaaatgcttggtactccccttaacttcagggcagtttcaagatcgtctgctccgttggcatcaagcccatccacgttcaagactgttgctctcttctctaagaaaaagccagctcctgctaagtccaaggctgtctctgagactagcgatgagctcgccaagtggtatggtcctgacaggagaattttcttgcctgatggtcttttggatagatcagagatcccagagtacttaaacggtgaagttgctggagattatggttatgacccatttggtcttggaaagaagcctgagaactttgctaaataccaagcttttgaattgatccatgcgagatgggctatgttaggagcagctggtttcatcattcctgaagctttaaacaaatatggcgctaactgtggccctgaagctgtctggtttaagactggtgctttgcttcttgatggaaacacattgaactactttggcaagaacatccctatcaaccttgttctcgccgtagttgctgaggttgttctcctcggtggagccgagtactacagaatcaccaacggattggatttcgaggacaagctacacccaggaggtccatttgatcctctaggccttgctaaggaccctgagcaaggagctcttctcaaagtcaaagagatcaagaacgggagattagccatgtttgcgatgctcggtttctttatccaagcgtatgttaccggagaaggtcctgttgagaaccttgcaaagcatctcagtgatccttttggaaacaacttgcttaccgtcatcgctggaactgccgagagagctcccactctctaagccatttctactttttttaagagcttccaaaatgtacactttgttcgattggaactccttttgacaatgttaaaaaaacttccatctgaatcttc

SEQ ID NO: 105885 - protein, 280 aa, Arabidopsis thaliana; identical to SEQ ID NO: 25086
  peptide (1)..(280): Ceres Seq. ID no. 13618267
  misc_feature (80)..(244): Pfam Name: Chlorophyll A-B binding protein Pfam Description: Chlorophyll A-B binding protein
  misc_feature (1)..(280): Homolog of NCBI NO: 15235029 NR Description: light-harvesting chlorophyll a/b binding protein
  misc_feature (1)..(280): Homolog of NCBI NO: 21593520 NR Description: chlorophyll a/b-binding protein-like [Arabidopsis
  misc_feature (3)..(280): Homolog of NCBI NO: 1644289 NR Description: chlorophyll a/b-binding protein CP26 in PS II
  misc_feature (3)..(280): Homolog of NCBI NO: 100200 NR Description: chlorophyll a/b-binding protein type I precursor
  misc_feature (3)..(280): Homolog of NCBI NO: 19184 NR Description: Type I (26 kD) CP29 polypeptide [Lycopersicon
  misc_feature (1)..(280): Homolog of NCBI NO: 7443227 NR Description: chlorophyll a/b-binding protein CP26 precursor -
  misc_feature (1)..(280): Homolog of NCBI NO: 100573 NR Description: chlorophyll a/b-binding protein CP29 precursor - >gi|18958|emb|CAA44777.1| Precursor of CP29, core chlorophyll a/b
  misc_feature (1)..(280): Homolog of NCBI NO: 7443226 NR Description: chlorophyll a/b-binding protein CP26 precursor -
  misc_feature (2)..(280): Homolog of NCBI NO: 322391 NR Description: chlorophyll a/b-binding protein Lhcb5 - Scotch >gi|22750|emb|CAA78900.1| Lhcb5 protein [Pinus sylvestris]
  misc_feature (110)..(280): Homolog of NCBI NO: 15487754 NR Description: ASCAB9 [Centromadia pungens]

SEQ ID NO: 105886 - protein, 272 aa, Arabidopsis thaliana; identical to SEQ ID NO: 25087
  peptide (1)..(272): Ceres Seq. ID no. 13618268
  misc_feature (72)..(236): Pfam Name: Chlorophyll A-B binding protein Pfam Description: Chlorophyll A-B binding protein
  misc_feature (1)..(272): Homolog of NCBI NO: 15235029 NR Description: light-harvesting chlorophyll a/b binding protein
  misc_feature (1)..(272): Homolog of NCBI NO: 21593520 NR Description: chlorophyll a/b-binding protein-like [Arabidopsis
  misc_feature (1)..(272): Homolog of NCBI NO: 1644289 NR Description: chlorophyll a/b-binding protein CP26 in PS II
  misc_feature (1)..(272): Homolog of NCBI NO: 100200 NR Description: chlorophyll a/b-binding protein type I precursor
  misc_feature (1)..(272): Homolog of NCBI NO: 19184 NR Description: Type I (26 kD) CP29 polypeptide [Lycopersicon
  misc_feature (1)..(272): Homolog of NCBI NO: 7443227 NR Description: chlorophyll a/b-binding protein CP26 precursor -
  misc_feature (1)..(272): Homolog of NCBI NO: 100573 NR Description: chlorophyll a/b-binding protein CP29 precursor - >gi|18958|emb|CAA44777.1| Precursor of CP29, core chlorophyll a/b
  misc_feature (1)..(272): Homolog of NCBI NO: 7443226 NR Description: chlorophyll a/b-binding protein CP26 precursor -
  misc_feature (1)..(272): Homolog of NCBI NO: 322391 NR Description: chlorophyll a/b-binding protein Lhcb5 - Scotch >gi|22750|emb|CAA78900.1| Lhcb5 protein [Pinus sylvestris]
  misc_feature (102)..(272): Homolog of NCBI NO: 15487754 NR Description: ASCAB9 [Centromadia pungens]

SEQ ID NO: 105887 - protein, 159 aa, Arabidopsis thaliana; identical to SEQ ID NO: 25088
  peptide (1)..(159): Ceres Seq. ID no. 13618269
  misc_feature (1)..(123): Pfam Name: Chlorophyll A-B binding protein Pfam Description: Chlorophyll A-B binding protein
  misc_feature (1)..(159): Homolog of NCBI NO: 15235029 NR Description: light-harvesting chlorophyll a/b binding protein
  misc_feature (1)..(159): Homolog of NCBI NO: 21593520 NR Description: chlorophyll a/b-binding protein-like [Arabidopsis
  misc_feature (1)..(159): Homolog of NCBI NO: 1644289 NR Description: chlorophyll a/b-binding protein CP26 in PS II
  misc_feature (1)..(159): Homolog of NCBI NO: 100200 NR Description: chlorophyll a/b-binding protein type I precursor
  misc_feature (1)..(159): Homolog of NCBI NO: 19184 NR Description: Type I (26 kD) CP29 polypeptide [Lycopersicon
  misc_feature (1)..(159): Homolog of NCBI NO: 7443227 NR Description: chlorophyll a/b-binding protein CP26 precursor -
  misc_feature (1)..(159): Homolog of NCBI NO: 100573 NR Description: chlorophyll a/b-binding protein CP29 precursor - >gi|18958|emb|CAA44777.1| Precursor of CP29, core chlorophyll a/b
  misc_feature (1)..(159): Homolog of NCBI NO: 7443226 NR Description: chlorophyll a/b-binding protein CP26 precursor -
  misc_feature (1)..(159): Homolog of NCBI NO: 322391 NR Description: chlorophyll a/b-binding protein Lhcb5 - Scotch >gi|22750|emb|CAA78900.1| Lhcb5 protein [Pinus sylvestris]
  misc_feature (1)..(159): Homolog of NCBI NO: 15487754 NR Description: ASCAB9 [Centromadia pungens]

SEQ ID NO: 105888 - DNA, 1763 bp, Arabidopsis thaliana
  misc_feature (1)..(1763): Ceres Seq. ID no. 13618270
  misc_feature: MA Experiment ID: 108434 Result: Down-regulated in Transcription
  misc_feature: MA Experiment 108434 PARAMETER Experiment Name: At_Root_Tips_cDNA_P Parameter: Tissue Value: Root Tips
  misc_feature: MA Experiment ID: 108435 Result: Up-regulated in Transcription
  misc_feature: MA Experiment 108435 PARAMETER Experiment Name: At_stm_Mutants_cDNA_P Parameter: Plant Line Value: wt Landsburg vs stm
  misc_feature: MA Experiment 108435 PARAMETER Experiment Name: At_stm_Mutants_cDNA_P Parameter: Tissue Value: Shoot Apical Meristem Region
  misc_feature: MA Experiment ID: 108463 Result: Up-regulated in Transcription
  misc_feature: MA Experiment 108463 PARAMETER Experiment Name: At_Germinating_Seeds_cDNA_P Parameter: Age (day) Value: 3 vs. 0
  misc_feature: MA Experiment 108463 PARAMETER Experiment Name: At_Germinating_Seeds_cDNA_P Parameter: Tissue Value: Germinating Seeds
  misc_feature: MA Experiment ID: 108464 Result: Up-regulated in Transcription
  misc_feature: MA Experiment 108464 PARAMETER Experiment Name: At_Germinating_Seeds_cDNA_P Parameter: Age (day) Value: 4 vs. 0
  misc_feature: MA Experiment 108464 PARAMETER Experiment Name: At_Germinating_Seeds_cDNA_P Parameter: Tissue Value: Germinating Seeds
  misc_feature: MA Experiment ID: 108473 Result: Up-regulated in Transcription
  misc_feature: MA Experiment 108473 PARAMETER Experiment Name: At_Drought_Flowers_cDNA_P Parameter: Timepoint (hr) Value: 7 d
  misc_feature: MA Experiment 108473 PARAMETER Experiment Name: At_Drought_Flowers_cDNA_P Parameter: Tissue Value: Flower
  misc_feature: MA Experiment 108473 PARAMETER Experiment Name: At_Drought_Flowers_cDNA_P Parameter: Treatment Value: Drought vs. No Drought
  misc_feature: MA Experiment ID: 108489 Result: Down-regulated in Transcription
  misc_feature: MA Experiment ID: 108595 Result: Up-regulated in Transcription
  misc_feature: MA Experiment 108595 PARAMETER Experiment Name: At_Ler-pi_Ovule_cDNA_P Parameter: Plant Line Value: null
  misc_feature: MA Experiment ID: 20001908 Result: Up-regulated in Transcription
  misc_feature: MA Experiment 20001908 PARAMETER Experiment Name: At_Drought_Reproduction_P Parameter: Age (day) Value: 40
  misc_feature: MA Experiment 20001908 PARAMETER Experiment Name: At_Drought_Reproduction_P Parameter: Organism Value: A. thaliana
  misc_feature: MA Experiment 20001908 PARAMETER Experiment Name: At_Drought_Reproduction_P Parameter: Plant Line Value: WS
  misc_feature: MA Experiment 20001908 PARAMETER Experiment Name: At_Drought_Reproduction_P Parameter: Timepoint (day) Value: 10
  misc_feature: MA Experiment 20001908 PARAMETER Experiment Name: At_Drought_Reproduction_P Parameter: Tissue Value: Siliques
  misc_feature: MA Experiment 20001908 PARAMETER Experiment Name: At_Drought_Reproduction_P Parameter: Treatment Value: Drought vs. No Drought
ataagctcaaagactaaccaaacccatcatcttcattccaacttcttttctctttttattcacaaccttagctttgagaatcagtctttgttcagtgttaacgtaggcatatctctctatgtgtgtgttgtctttgctttttataagattcggtttctgagtttggtttttatttcttaaggtggctatctttcttgttcttcttcttaaaacgtagtaacagctttataaaaatctttcaaagcatgtaaatttaagtcctagctccattttcgttttcttcttctcaaaaaaaaaaacaaaaaaaaagtttttgatcgattgatgagttttctcatttattgatctctctagttttaacttgtgtttggtgaaaccggtactggcgaagtttaaaacacaagtgtaaacacaaatttataaaaatttcaaatcatgtaaatttcgtctctatcaatttatttcccctcaccaaaaaaaaacaaaaaaaaattagaatttagtacttttattttaaacaaaaaccaaaaaaaaaaccaaaaaaaaaaacgttggaaatggctccaccggaggctgaggtgggtgcggtaatggtgatggctcctccaacgccggggacaccgggaacaccgggaggaccgttgatcacggggatgagagtggattcaatgtcgtttgatcatcggaaaccaacgcctcgatgcaaatgcttgccggtgatgggatcaacttggggtcaacatgacacatgcttcaccgattttccctctcctgatgtctccctcactcgcaagcttggagccgagttcgtgggaacattcatcttgatattcaccgcgacagccggtccaatcgtgaaccagaaatacgatggagcagaaaccctaatcggtaacgctgcatgcgcaggactcgcagtgatgatcataatactctcaacaggtcatatctcaggggctcacctaaacccatcactgaccatagcattcgctgctctaaggcacttcccttgggcacacgtccctgcttacatagcggctcaagtctcagcttccatttgcgcttcattcgcacttaaaggagtgttccatccttttatgtccggtggtgtcactattccatctgttagccttggacaagcctttgctcttgagttcatcatcactttcattctcctctttgttgtaactgccgtcgctaccgacactcgtgccgttggagaattggcaggtatagccgttggagccacggtcatgctcaatattctagtcgcagggccatcgactggtggatctatgaatcctgtgagaactctaggaccagccgttgcatcaggaaactataggtcactatgggtgtatctggtggctcctacacttggtgccatatctggtgcagcggtctacacaggtgttaagcttaacgatagcgtgactgacccgcctcgtccggttaggagctttcgtcgttaagtgagtgagagacttgtttacaagtcttttgctttgtataattttactgtatgattatgtaatgatatgaaaaagctttggaagcttgtgtgaagaataaaaggcgatgtgactataagtccacgcatggcatcggtctatataaacctgatgcgaacttgtctcgtcattgtcaaattgtgtctgtgtaataatacacttttatgtgtggtttgggtttctttgttggtttgctgttgtatgttacctcggagacgaggctgtttttattaataaaatctatggcatgtg

SEQ ID NO: 105889 - protein, 304 aa, Arabidopsis thaliana; identical to SEQ ID NO: 23583
  peptide (1)..(304): Ceres Seq. ID no. 13618271
  misc_feature (70)..(283): Pfam Name: Major intrinsic protein Pfam Description: Major intrinsic protein
  misc_feature (1)..(304): Homolog of NCBI NO: 15235034 NR Description: major intrinsic protein (MIP) family [Arabidopsis
  misc_feature (16)..(304): Homolog of NCBI NO: 13447791 NR Description: NOD26-like membrane integral protein ZmNIP3-1
  misc_feature (16)..(304): Homolog of NCBI NO: 15220826 NR Description: major intrinsic protein (MIP) family [Arabidopsis
  misc_feature (80)..(304): Homolog of NCBI NO: 37536006 NR Description: putative nodulin-26 [Oryza sativa (japonica
  misc_feature (68)..(288): Homolog of NCBI NO: 37573042 NR Description: putative nodulin [Oryza sativa (japonica
  misc_feature (70)..(288): Homolog of NCBI NO: 28971941 NR Description: putative nodulin [Oryza sativa (japonica
  misc_feature (70)..(294): Homolog of NCBI NO: 9971217 NR Description: MIP [Adiantum capillus-veneris]
  misc_feature (63)..(290): Homolog of NCBI NO: 541944 NR Description: nodulin-26 - soybean
  misc_feature (54)..(287): Homolog of NCBI NO: 17025880 NR Description: multifunctional aquaporin [Medicago truncatula]
  misc_feature (60)..(304): Homolog of NCBI NO: 15240348 NR Description: major intrinsic protein (MIP) family [Arabidopsis

SEQ ID NO: 105890 - protein, 293 aa, Arabidopsis thaliana; identical to SEQ ID NO: 23584
  peptide (1)..(293): Ceres Seq. ID no. 13618272
  misc_feature (59)..(272): Pfam Name: Major intrinsic protein Pfam Description: Major intrinsic protein
  misc_feature (1)..(293): Homolog of NCBI NO: 15235034 NR Description: major intrinsic protein (MIP) family [Arabidopsis
  misc_feature (5)..(293): Homolog of NCBI NO: 13447791 NR Description: NOD26-like membrane integral protein ZmNIP3-1
  misc_feature (5)..(293): Homolog of NCBI NO: 15220826 NR Description: major intrinsic protein (MIP) family [Arabidopsis
  misc_feature (69)..(293): Homolog of NCBI NO: 37536006 NR Description: putative nodulin-26 [Oryza sativa (japonica
  misc_feature (57)..(277): Homolog of NCBI NO: 37573042 NR Description: putative nodulin [Oryza sativa (japonica
  misc_feature (59)..(277): Homolog of NCBI NO: 28971941 NR Description: putative nodulin [Oryza sativa (japonica
  misc_feature (59)..(283): Homolog of NCBI NO: 9971217 NR Description: MIP [Adiantum capillus-veneris]
  misc_feature (52)..(279): Homolog of NCBI NO: 541944 NR Description: nodulin-26 - soybean
  misc_feature (43)..(276): Homolog of NCBI NO: 17025880 NR Description: multifunctional aquaporin [Medicago truncatula]
  misc_feature (49)..(293): Homolog of NCBI NO: 15240348 NR Description: major intrinsic protein (MIP) family [Arabidopsis

SEQ ID NO: 105891 - protein, 291 aa, Arabidopsis thaliana; identical to SEQ ID NO: 23585
  peptide (1)..(291): Ceres Seq. ID no. 13618273
  misc_feature (57)..(270): Pfam Name: Major intrinsic protein Pfam Description: Major intrinsic protein
  misc_feature (1)..(291): Homolog of NCBI NO: 15235034 NR Description: major intrinsic protein (MIP) family [Arabidopsis
  misc_feature (3)..(291): Homolog of NCBI NO: 13447791 NR Description: NOD26-like membrane integral protein ZmNIP3-1
  misc_feature (3)..(291): Homolog of NCBI NO: 15220826 NR Description: major intrinsic protein (MIP) family [Arabidopsis
  misc_feature (67)..(291): Homolog of NCBI NO: 37536006 NR Description: putative nodulin-26 [Oryza sativa (japonica
  misc_feature (55)..(275): Homolog of NCBI NO: 37573042 NR Description: putative nodulin [Oryza sativa (japonica
  misc_feature (57)..(275): Homolog of NCBI NO: 28971941 NR Description: putative nodulin [Oryza sativa (japonica
  misc_feature (57)..(281): Homolog of NCBI NO: 9971217 NR Description: MIP [Adiantum capillus-veneris]
  misc_feature (50)..(277): Homolog of NCBI NO: 541944 NR Description: nodulin-26 - soybean
  misc_feature (41)..(274): Homolog of NCBI NO: 17025880 NR Description: multifunctional aquaporin [Medicago truncatula]
  misc_feature (47)..(291): Homolog of NCBI NO: 15240348 NR Description: major intrinsic protein (MIP) family [Arabidopsis

SEQ ID NO: 105892 - DNA, 634 bp, Arabidopsis thaliana
  misc_feature (1)..(634): Ceres Seq. ID no. 13618282
  misc_feature: MA Experiment ID: 108434 Result: Up-regulated in Transcription
  misc_feature: MA Experiment 108434 PARAMETER Experiment Name: At_Root_Tips_cDNA_P Parameter: Tissue Value: Root Tips
  misc_feature: MA Experiment ID: 108462 Result: Down-regulated in Transcription
  misc_feature: MA Experiment 108462 PARAMETER Experiment Name: At_Germinating_Seeds_cDNA_P Parameter: Age (day) Value: 2 vs. 0
  misc_feature: MA Experiment 108462 PARAMETER Experiment Name: At_Germinating_Seeds_cDNA_P Parameter: Tissue Value: Germinating Seeds
  misc_feature: MA Experiment ID: 108463 Result: Down-regulated in Transcription
  misc_feature: MA Experiment 108463 PARAMETER Experiment Name: At_Germinating_Seeds_cDNA_P Parameter: Age (day) Value: 3 vs. 0
  misc_feature: MA Experiment 108463 PARAMETER Experiment Name: At_Germinating_Seeds_cDNA_P Parameter: Tissue Value: Germinating Seeds
  misc_feature: MA Experiment ID: 108464 Result: Down-regulated in Transcription
  misc_feature: MA Experiment 108464 PARAMETER Experiment Name: At_Germinating_Seeds_cDNA_P Parameter: Age (day) Value: 4 vs. 0
  misc_feature: MA Experiment 108464 PARAMETER Experiment Name: At_Germinating_Seeds_cDNA_P Parameter: Tissue Value: Germinating Seeds
  misc_feature: MA Experiment ID: 108573 Result: Down-regulated in Transcription
  misc_feature: MA Experiment 108573 PARAMETER Experiment Name: At_Drought_cDNA_P Parameter: Timepoint (hr) Value: 6
  misc_feature: MA Experiment 108573 PARAMETER Experiment Name: At_Drought_cDNA_P Parameter: Tissue Value: Aerial
  misc_feature: MA Experiment 108573 PARAMETER Experiment Name: At_Drought_cDNA_P Parameter: Treatment Value: Drought vs. No Drought
  misc_feature: MA Experiment ID: 20001451 Result: Down-regulated in Transcription
  misc_feature: MA Experiment 20001451 PARAMETER Experiment Name: At_Far-red-induction_P Parameter: Age (day) Value: 7
  misc_feature: MA Experiment 20001451 PARAMETER Experiment Name: At_Far-red-induction_P Parameter: Light Value: Far-red vs. White
  misc_feature: MA Experiment 20001451 PARAMETER Experiment Name: At_Far-red-induction_P Parameter: Organism Value: A. thaliana
  misc_feature: MA Experiment 20001451 PARAMETER Experiment Name: At_Far-red-induction_P Parameter: Plant Line Value: Columbia
  misc_feature: MA Experiment 20001451 PARAMETER Experiment Name: At_Far-red-induction_P Parameter: Timepoint (hr) Value: 24
  misc_feature: MA Experiment 20001451 PARAMETER Experiment Name: At_Far-red-induction_P Parameter: Tissue Value: Whole Plant
gaaccctaaaaaccccaggtgagaagaacggagagagagagagagatgtcgttcatgtatgagaagagcaatacatggagatggctagtgatgaagacgcgagattcgagatccttcttcttcacgttcgctgctttatgtggtgtcattcctggcgttattggctatggagttatgcaggtcaccaattccagtaaccctgagctcgaagcccgcctccgtaaatctgctcgcccagatactctcatgatgggtaaagtaaaccaagagaggctagctgaatatcttggtgagttgaaacagaagcaggatacaaacgacagatacgttgctgctcttaggggagagactcttaccaggaagccttatcaaagaatccaaccaatgccaaagccagatgacacggtgacaaccaaaactcagtaaggatgaattattttaagagtcaatgttagtgaatgcctctcactcgaatcttttgtcgatacaaaaatggcgtgtttcctggccgtaatatcttttgtttttgaaaccggcatctagcgacacaacttttgtgctatgcaaacggctacaatgtcaatcacttcaaaccttttgttatgatgaataaaatgtaaaacttatgttttgt

SEQ ID NO: 105893 - protein, 126 aa, Arabidopsis thaliana; identical to SEQ ID NO: 43068
  peptide (1)..(126): Ceres Seq. ID no. 13618283
  misc_feature (1)..(126): Homolog of NCBI NO: 18412355 NR Description: expressed protein [Arabidopsis thaliana]

SEQ ID NO: 105894 - protein, 123 aa, Arabidopsis thaliana; identical to SEQ ID NO: 43069
  peptide (1)..(123): Ceres Seq. ID no. 13618284
  misc_feature (1)..(123): Homolog of NCBI NO: 18412355 NR Description: expressed protein [Arabidopsis thaliana]

SEQ ID NO: 105895 - protein, 111 aa, Arabidopsis thaliana; identical to SEQ ID NO: 43070
  peptide (1)..(111): Ceres Seq. ID no. 13618285
  misc_feature (1)..(111): Homolog of NCBI NO: 18412355 NR Description: expressed protein [Arabidopsis thaliana]

SEQ ID NO: 105896 - DNA, 1883 bp, Arabidopsis thaliana
  misc_feature (1)..(1883): Ceres Seq. ID no. 13618286
  misc_feature: MA Experiment ID: 108434 Result: Down-regulated in Transcription
  misc_feature: MA Experiment 108434 PARAMETER Experiment Name: At_Root_Tips_cDNA_P Parameter: Tissue Value: Root Tips
  misc_feature: MA Experiment ID: 108435 Result: Down-regulated in Transcription
  misc_feature: MA Experiment 108435 PARAMETER Experiment Name: At_stm_Mutants_cDNA_P Parameter: Plant Line Value: wt Landsburg vs stm
  misc_feature: MA Experiment 108435 PARAMETER Experiment Name: At_stm_Mutants_cDNA_P Parameter: Tissue Value: Shoot Apical Meristem Region
  misc_feature: MA Experiment ID: 108461 Result: Up-regulated in Transcription
  misc_feature: MA Experiment 108461 PARAMETER Experiment Name: At_Germinating_Seeds_cDNA_P Parameter: Age (day) Value: 1 vs. 0
  misc_feature: MA Experiment 108461 PARAMETER Experiment Name: At_Germinating_Seeds_cDNA_P Parameter: Tissue Value: Germinating Seeds
  misc_feature: MA Experiment ID: 108573 Result: Up-regulated in Transcription
  misc_feature: MA Experiment 108573 PARAMETER Experiment Name: At_Drought_cDNA_P Parameter: Timepoint (hr) Value: 6
  misc_feature: MA Experiment 108573 PARAMETER Experiment Name: At_Drought_cDNA_P Parameter: Tissue Value: Aerial
  misc_feature: MA Experiment 108573 PARAMETER Experiment Name: At_Drought_cDNA_P Parameter: Treatment Value: Drought vs. No Drought
  misc_feature: MA Experiment ID: 108577 Result: Down-regulated in Transcription
  misc_feature: MA Experiment 108577 PARAMETER Experiment Name: At_42deg_Heat_cDNA_P Parameter: Temperature (deg C) Value: 42 vs. 22
  misc_feature: MA Experiment 108577 PARAMETER Experiment Name: At_42deg_Heat_cDNA_P Parameter: Timepoint (hr) Value: 6
  misc_feature: MA Experiment 108577 PARAMETER Experiment Name: At_42deg_Heat_cDNA_P Parameter: Tissue Value: Aerial
  misc_feature: MA Experiment ID: 108585 Result: Down-regulated in Transcription
  misc_feature: MA Experiment 108585 PARAMETER Experiment Name: At_5mM_NaNP_cDNA_P Parameter: Timepoint (hr) Value: 6
  misc_feature: MA Experiment 108585 PARAMETER Experiment Name: At_5mM_NaNP_cDNA_P Parameter: Tissue Value: Aerial
  misc_feature: MA Experiment 108585 PARAMETER Experiment Name: At_5mM_NaNP_cDNA_P Parameter: Treatment Value: null
  misc_feature: MA Experiment ID: 108668 Result: Down-regulated in Transcription
  misc_feature: MA Experiment 108668 PARAMETER Experiment Name: At_2mM_SA_cDNA_P Parameter: Plant Line Value: WS
  misc_feature: MA Experiment 108668 PARAMETER Experiment Name: At_2mM_SA_cDNA_P Parameter: Timepoint (hr) Value: 6
  misc_feature: MA Experiment 108668 PARAMETER Experiment Name: At_2mM_SA_cDNA_P Parameter: Treatment Value: 2mM SA vs. No Treatment
  misc_feature: MA Experiment ID: 20000069 Result: Up-regulated in Transcription
  misc_feature: MA Experiment 20000069 PARAMETER Experiment Name: At_100uM_ABA_Mutants_cDNA_P Parameter: Plant Line Value: CS23
  misc_feature: MA Experiment 20000069 PARAMETER Experiment Name: At_100uM_ABA_Mutants_cDNA_P Parameter: Timepoint (hr) Value: 6
  misc_feature: MA Experiment 20000069 PARAMETER Experiment Name: At_100uM_ABA_Mutants_cDNA_P Parameter: Tissue Value: Aerial
  misc_feature: MA Experiment 20000069 PARAMETER Experiment Name: At_100uM_ABA_Mutants_cDNA_P Parameter: Treatment Value: 100uM ABA vs. No Treatment
  misc_feature: MA Experiment ID: 20000070 Result: Up-regulated in Transcription
  misc_feature: MA Experiment 20000070 PARAMETER Experiment Name: At_100uM_ABA_Mutants_cDNA_P Parameter: Plant Line Value: CS24
  misc_feature: MA Experiment 20000070 PARAMETER Experiment Name: At_100uM_ABA_Mutants_cDNA_P Parameter: Timepoint (hr) Value: 6
  misc_feature: MA Experiment 20000070 PARAMETER Experiment Name: At_100uM_ABA_Mutants_cDNA_P Parameter: Tissue Value: Aerial
  misc_feature: MA Experiment 20000070 PARAMETER Experiment Name: At_100uM_ABA_Mutants_cDNA_P Parameter: Treatment Value: 100uM ABA vs. No Treatment
  misc_feature: MA Experiment ID: 20000071 Result: Up-regulated in Transcription
  misc_feature: MA Experiment 20000071 PARAMETER Experiment Name: At_100uM_ABA_Mutants_cDNA_P Parameter: Plant Line Value: CS8104
  misc_feature: MA Experiment 20000071 PARAMETER Experiment Name: At_100uM_ABA_Mutants_cDNA_P Parameter: Timepoint (hr) Value: 6
  misc_feature: MA Experiment 20000071 PARAMETER Experiment Name: At_100uM_ABA_Mutants_cDNA_P Parameter: Tissue Value: Aerial
  misc_feature: MA Experiment 20000071 PARAMETER Experiment Name: At_100uM_ABA_Mutants_cDNA_P Parameter: Treatment Value: 100uM ABA vs. No Treatment
  misc_feature: MA Experiment ID: 20000072 Result: Up-regulated in Transcription
  misc_feature: MA Experiment 20000072 PARAMETER Experiment Name: At_100uM_ABA_Mutants_cDNA_P Parameter: Plant Line Value: CS8105
  misc_feature: MA Experiment 20000072 PARAMETER Experiment Name: At_100uM_ABA_Mutants_cDNA_P Parameter: Timepoint (hr) Value: 6
  misc_feature: MA Experiment 20000072 PARAMETER Experiment Name: At_100uM_ABA_Mutants_cDNA_P Parameter: Tissue Value: Aerial
  misc_feature: MA Experiment 20000072 PARAMETER Experiment Name: At_100uM_ABA_Mutants_cDNA_P Parameter: Treatment Value: 100uM ABA vs. No Treatment
  misc_feature: MA Experiment ID: 20000086 Result: Up-regulated in Transcription
  misc_feature: MA Experiment 20000086 PARAMETER Experiment Name: At_100uM_ABA_Mutants_cDNA_P Parameter: Plant Line Value: CS22
  misc_feature: MA Experiment 20000086 PARAMETER Experiment Name: At_100uM_ABA_Mutants_cDNA_P Parameter: Timepoint (hr) Value: 6
  misc_feature: MA Experiment 20000086 PARAMETER Experiment Name: At_100uM_ABA_Mutants_cDNA_P Parameter: Tissue Value: Aerial
  misc_feature: MA Experiment 20000086 PARAMETER Experiment Name: At_100uM_ABA_Mutants_cDNA_P Parameter: Treatment Value: 100uM ABA vs. No Treatment
  misc_feature: MA Experiment ID: 20000087 Result: Up-regulated in Transcription
  misc_feature: MA Experiment 20000087 PARAMETER Experiment Name: At_100uM_ABA_Mutants_cDNA_P Parameter: Plant Line Value: WS
  misc_feature: MA Experiment 20000087 PARAMETER Experiment Name: At_100uM_ABA_Mutants_cDNA_P Parameter: Timepoint (hr) Value: 6
  misc_feature: MA Experiment 20000087 PARAMETER Experiment Name: At_100uM_ABA_Mutants_cDNA_P Parameter: Tissue Value: Aerial
  misc_feature: MA Experiment 20000087 PARAMETER Experiment Name: At_100uM_ABA_Mutants_cDNA_P Parameter: Treatment Value: 100uM ABA vs. No Treatment
  misc_feature: MA Experiment ID: 20000088 Result: Up-regulated in Transcription
  misc_feature: MA Experiment 20000088 PARAMETER Experiment Name: At_100uM_ABA_Mutants_cDNA_P Parameter: Plant Line Value: Landsberg
  misc_feature: MA Experiment 20000088 PARAMETER Experiment Name: At_100uM_ABA_Mutants_cDNA_P Parameter: Timepoint (hr) Value: 6
  misc_feature: MA Experiment 20000088 PARAMETER Experiment Name: At_100uM_ABA_Mutants_cDNA_P Parameter: Tissue Value: Aerial
  misc_feature: MA Experiment 20000088 PARAMETER Experiment Name: At_100uM_ABA_Mutants_cDNA_P Parameter: Treatment Value: 100uM ABA vs. No Treatment
  misc_feature: MA Experiment ID: 20000089 Result: Up-regulated in Transcription
  misc_feature: MA Experiment ID: 20000090 Result: Up-regulated in Transcription
  misc_feature: MA Experiment ID: 20000111 Result: Down-regulated in Transcription
  misc_feature: MA Experiment 20000111 PARAMETER Experiment Name: At_42deg_Heat_cDNA_P Parameter: Temperature (deg C) Value: 42 vs. 22
  misc_feature: MA Experiment 20000111 PARAMETER Experiment Name: At_42deg_Heat_cDNA_P Parameter: Timepoint (hr) Value: 6
  misc_feature: MA Experiment 20000111 PARAMETER Experiment Name: At_42deg_Heat_cDNA_P Parameter: Tissue Value: Aerial
  misc_feature: MA Experiment ID: 20000113 Result: Down-regulated in Transcription
  misc_feature: MA Experiment 20000113 PARAMETER Experiment Name: At_42deg_Heat_cDNA_P Parameter: Temperature (deg C) Value: 42 vs. 22
  misc_feature: MA Experiment 20000113 PARAMETER Experiment Name: At_42deg_Heat_cDNA_P Parameter: Timepoint (hr) Value: 8
  misc_feature: MA Experiment 20000113 PARAMETER Experiment Name: At_42deg_Heat_cDNA_P Parameter: Tissue Value: Aerial
  misc_feature: MA Experiment ID: 20000117 Result: Up-regulated in Transcription
  misc_feature: MA Experiment 20000117 PARAMETER Experiment Name: At_100uM_ABA_Mutants_cDNA_P Parameter: Plant Line Value: Columbia
  misc_feature: MA Experiment 20000117 PARAMETER Experiment Name: At_100uM_ABA_Mutants_cDNA_P Parameter: Timepoint (hr) Value: 6
  misc_feature: MA Experiment 20000117 PARAMETER Experiment Name: At_100uM_ABA_Mutants_cDNA_P Parameter: Tissue Value: Aerial
  misc_feature: MA Experiment 20000117 PARAMETER Experiment Name: At_100uM_ABA_Mutants_cDNA_P Parameter: Treatment Value: 100uM ABA vs. No Treatment
  misc_feature: MA Experiment ID: 20000173 Result: Down-regulated in Transcription
  misc_feature: MA Experiment 20000173 PARAMETER Experiment Name: At_42deg_Heat_P Parameter: Age (day) Value: 14
  misc_feature: MA Experiment 20000173 PARAMETER Experiment Name: At_42deg_Heat_P Parameter: Organism Value: A. thaliana
  misc_feature: MA Experiment 20000173 PARAMETER Experiment Name: At_42deg_Heat_P Parameter: Plant Line Value: WS
  misc_feature: MA Experiment 20000173 PARAMETER Experiment Name: At_42deg_Heat_P Parameter: Temperature (deg C) Value: 42 vs. 22
  misc_feature: MA Experiment 20000173 PARAMETER Experiment Name: At_42deg_Heat_P Parameter: Timepoint (hr) Value: 6
  misc_feature: MA Experiment 20000173 PARAMETER Experiment Name: At_42deg_Heat_P Parameter: Tissue Value: Aerial
  misc_feature: MA Experiment ID: 20000179 Result: Up-regulated in Transcription
  misc_feature: MA Experiment 20000179 PARAMETER Experiment Name: At_Germinating_Seeds_P Parameter: Age (hr) Value: 6 vs. 0
  misc_feature: MA Experiment 20000179 PARAMETER Experiment Name: At_Germinating_Seeds_P Parameter: Tissue Value: Germinating Seeds
  misc_feature: MA Experiment ID: 20000182 Result: Down-regulated in Transcription
  misc_feature: MA Experiment 20000182 PARAMETER Experiment Name: At_2mM_SA_P Parameter: Age (day) Value: 14
  misc_feature: MA Experiment 20000182 PARAMETER Experiment Name: At_2mM_SA_P Parameter: Organism Value: A. thaliana
  misc_feature: MA Experiment 20000182 PARAMETER Experiment Name: At_2mM_SA_P Parameter: Plant Line Value: WS
  misc_feature: MA Experiment 20000182 PARAMETER Experiment Name: At_2mM_SA_P Parameter: Timepoint (hr) Value: 6
  misc_feature: MA Experiment 20000182 PARAMETER Experiment Name: At_2mM_SA_P Parameter: Tissue Value: Aerial
  misc_feature: MA Experiment 20000182 PARAMETER Experiment Name: At_2mM_SA_P Parameter: Treatment Value: 2mM SA vs. No Treatment
  misc_feature: MA Experiment ID: 20000184 Result: Down-regulated in Transcription
  misc_feature: MA Experiment 20000184 PARAMETER Experiment Name: At_Shoots__P Parameter: Age (day) Value: 7
  misc_feature: MA Experiment 20000184 PARAMETER Experiment Name: At_Shoots__P Parameter: Tissue Value: Shoots vs. Whole Plant
  misc_feature: MA Experiment ID: 20000185 Result: Down-regulated in Transcription
  misc_feature: MA Experiment 20000185 PARAMETER Experiment Name: At_Roots__P Parameter: Age (day) Value: 7 vs. 21
  misc_feature: MA Experiment 20000185 PARAMETER Experiment Name: At_Roots__P Parameter: Organism Value: A. thaliana
  misc_feature: MA Experiment 20000185 PARAMETER Experiment Name: At_Roots__P Parameter: Tissue Value: Roots vs. Whole Plant
  misc_feature: MA Experiment ID: 20000437 Result: Up-regulated in Transcription
  misc_feature: MA Experiment 20000437 PARAMETER Experiment Name: At_Drought_P Parameter: Age (day) Value: 8
  misc_feature: MA Experiment 20000437 PARAMETER Experiment Name: At_Drought_P Parameter: Organism Value: A. thaliana
  misc_feature: MA Experiment 20000437 PARAMETER Experiment Name: At_Drought_P Parameter: Plant Line Value: WS
  misc_feature: MA Experiment 20000437 PARAMETER Experiment Name: At_Drought_P Parameter: Timepoint (hr) Value: 24
  misc_feature: MA Experiment 20000437 PARAMETER Experiment Name: At_Drought_P Parameter: Tissue Value: Whole Plant
  misc_feature: MA Experiment 20000437 PARAMETER Experiment Name: At_Drought_P Parameter: Treatment Value: Drought vs. No Drought
  misc_feature: MA Experiment ID: 20000438 Result: Down-regulated in Transcription
  misc_feature: MA Experiment 20000438 PARAMETER Experiment Name: At_Shoots__P Parameter: Age (day) Value: 14
  misc_feature: MA Experiment 20000438 PARAMETER Experiment Name: At_Shoots__P Parameter: Tissue Value: Shoots vs. Whole Plant
  misc_feature: MA Experiment ID: 20000441 Result: Down-regulated in Transcription
  misc_feature: MA Experiment 20000441 PARAMETER Experiment Name: At_1uM_BR-BRZ__P Parameter: Tissue Value: Shoot Apices
  misc_feature: MA Experiment 20000441 PARAMETER Experiment Name: At_1uM_BR-BRZ__P Parameter: Treatment Value: 1uM BR vs. No Treatment
  misc_feature: MA Experiment ID: 20001247 Result: Down-regulated in Transcription
  misc_feature: MA Experiment 20001247 PARAMETER Experiment Name: At_Far-red-induction_P Parameter: Age (day) Value: 7
  misc_feature: MA Experiment 20001247 PARAMETER Experiment Name: At_Far-red-induction_P Parameter: Light Value: Far-red vs. White
  misc_feature: MA Experiment 20001247 PARAMETER Experiment Name: At_Far-red-induction_P Parameter: Organism Value: A. thaliana
  misc_feature: MA Experiment 20001247 PARAMETER Experiment Name: At_Far-red-induction_P Parameter: Plant Line Value: Columbia
  misc_feature: MA Experiment 20001247 PARAMETER Experiment Name: At_Far-red-induction_P Parameter: Timepoint (hr) Value: 1
  misc_feature: MA Experiment 20001247 PARAMETER Experiment Name: At_Far-red-induction_P Parameter: Tissue Value: Whole Plant
  misc_feature: MA Experiment ID: 20001248 Result: Up-regulated in Transcription
  misc_feature: MA Experiment 20001248 PARAMETER Experiment Name: At_Far-red-induction_P Parameter: Age (day) Value: 7
  misc_feature: MA Experiment 20001248 PARAMETER Experiment Name: At_Far-red-induction_P Parameter: Light Value: Far-red vs. White
  misc_feature: MA Experiment 20001248 PARAMETER Experiment Name: At_Far-red-induction_P Parameter: Organism Value: A. thaliana
  misc_feature: MA Experiment 20001248 PARAMETER Experiment Name: At_Far-red-induction_P Parameter: Plant Line Value: Columbia
  misc_feature: MA Experiment 20001248 PARAMETER Experiment Name: At_Far-red-induction_P Parameter: Timepoint (hr) Value: 4
  misc_feature: MA Experiment 20001248 PARAMETER Experiment Name: At_Far-red-induction_P Parameter: Tissue Value: Whole Plant
  misc_feature: MA Experiment ID: 20001458 Result: Up-regulated in Transcription
  misc_feature: MA Experiment 20001458 PARAMETER Experiment Name: At_50mM_NH4NO3_L-to-H_P Parameter: Age (day) Value: Undefined
  misc_feature: MA Experiment 20001458 PARAMETER Experiment Name: At_50mM_NH4NO3_L-to-H_P Parameter: Organism Value: Undefined
  misc_feature: MA Experiment 20001458 PARAMETER Experiment Name: At_50mM_NH4NO3_L-to-H_P Parameter: Plant Line Value: Undefined
  misc_feature: MA Experiment 20001458 PARAMETER Experiment Name: At_50mM_NH4NO3_L-to-H_P Parameter: Timepoint (hr) Value: 2
  misc_feature: MA Experiment 20001458 PARAMETER Experiment Name: At_50mM_NH4NO3_L-to-H_P Parameter: Tissue Value: Siliques
  misc_feature: MA Experiment 20001458 PARAMETER Experiment Name: At_50mM_NH4NO3_L-to-H_P Parameter: Treatment Value: 50mM NH4NO3 vs. 100mM Manitol
  misc_feature: MA Experiment ID: 20001558 Result: Down-regulated in Transcription
  misc_feature: MA Experiment 20001558 PARAMETER Experiment Name: At_Drought_Soil_Dry_P Parameter: Age (day) Value: 27
  misc_feature: MA Experiment 20001558 PARAMETER Experiment Name: At_Drought_Soil_Dry_P Parameter: Organism Value: A. thaliana
  misc_feature: MA Experiment 20001558 PARAMETER Experiment Name: At_Drought_Soil_Dry_P Parameter: Plant Line Value: WS
  misc_feature: MA Experiment 20001558 PARAMETER Experiment Name: At_Drought_Soil_Dry_P Parameter: Post Timepoint (hr) Value: 6
  misc_feature: MA Experiment 20001558 PARAMETER Experiment Name: At_Drought_Soil_Dry_P Parameter: Post-Treatment Value: Re-Water vs. No Drought
  misc_feature: MA Experiment 20001558 PARAMETER Experiment Name: At_Drought_Soil_Dry_P Parameter: Timepoint (day) Value: 13
  misc_feature: MA Experiment 20001558 PARAMETER Experiment Name: At_Drought_Soil_Dry_P Parameter: Treatment Value: Drought vs. No Drought
  misc_feature: MA Experiment ID: 20001559 Result: Up-regulated in Transcription
  misc_feature: MA Experiment 20001559 PARAMETER Experiment Name: At_Drought_Soil_Dry_P Parameter: Age (day) Value: 28
  misc_feature: MA Experiment 20001559 PARAMETER Experiment Name: At_Drought_Soil_Dry_P Parameter: Organism Value: A. thaliana
  misc_feature: MA Experiment 20001559 PARAMETER Experiment Name: At_Drought_Soil_Dry_P Parameter: Plant Line Value: WS
  misc_feature: MA Experiment 20001559 PARAMETER Experiment Name: At_Drought_Soil_Dry_P Parameter: Post Timepoint (hr) Value: 29
  misc_feature: MA Experiment 20001559 PARAMETER Experiment Name: At_Drought_Soil_Dry_P Parameter: Post-Treatment Value: Re-Water vs. No Drought
  misc_feature: MA Experiment 20001559 PARAMETER Experiment Name: At_Drought_Soil_Dry_P Parameter: Timepoint (day) Value: 14
  misc_feature: MA Experiment 20001559 PARAMETER Experiment Name: At_Drought_Soil_Dry_P Parameter: Treatment Value: Drought vs. No Drought
acagcttctgatctcactagtgttcgtcatctttgttcgattgaagtttgggaagtggtgatggtaataggagcagcagcgcgtgtagccatcggcggttgtcgaaagctcatctcgtcacatacctccctcctcctcgtctcttctcagtgtcgccagatgagtatggacgcacaaagcgtttctgaaaagcttaggagttctggtctattacgaactcaaggtctaattggaggcaagtggcttgactcgtatgacaataagacaatcaaggttaacaatccagcaaccggtgaaattatagctgatgttgcatgtatgggaacaaaagagacaaatgatgctattgcttcttcttatgaagcatttacttcttggagcagattgactgctggagagaggagtaaagttttacggagatggtatgacctcctgattgcacacaaggaagaacttggacaacttataactttggagcaaggaaaaccactcaaggaagccatcggagaggtagcatatggggcaagttttattgagtactatgcggaggaggcaaaacgtgtatatggtgatataattcctccgaatctgtctgatcgccgactgttggttctaaaacagcctgtcggtgttgttggtgcaattaccccttggaacttccccttagccatgattactcggaaggtcggccctgctcttgcttctggatgcacggtggttgttaaaccatctgaacttacgcccctaacagcacttgctgcggctgaacttgcacttcaagctggagttcctccgggggcacttaatgtggtcatgggaaatgctcctgaaattggggatgctttgcttacgagtccacaggtgagaaaaatcacgttcacgggatcaacagcagttgggaagaagttgatggcagctgctgcacctaccgtcaagaaggtttctctagaacttggcggcaacgcaccctctatagtatttgatgatgcagacctggatgtagctgtaaaaggaacgcttgcagcgaaatttaggaatagtggtcagacatgtgtttgtgcgaacagagtacttgtgcaagatggtatctatgataaatttgctgaggccttttctgaagcggttcaaaaattagaagtaggagatgggtttagggatgggacaacccagggtccacttataaatgatgcagcagtgcaaaaggtagagacatttgtacaagatgctgtttctaagggagcaaaaatcatcattggtggcaaaaggcacagtctagggatgactttctatgagcctactgttatccgcgatgtttcggataacatgatcatgtctaaggaggagatttttggacctgtagctccccttattcggttcaaaaccgaggaggacgctatcagaattgctaatgacacaattgcaggacttgctgcttatatattcacaaacagtgtccaaagatcttggcgtgtatttgaagcacttgaatatggacttgtaggggtgaacgaaggactcatatcaacagaggtggctccattcgggggagtgaagcagtctggtcttggaagggaaggatccaagtatggtatggacgaataccttgagatcaaatacgtatgcttgggagatatgaatagacactgatttggtttgtttgaaaagctttagaaattgtaagtttttctcctccactcgtatccttctaataaaagcttactgtggaacataataaggattcggaggatacttcttaagaaataaagatttggtctacgaccaattgttagcatgatttttaagtaataatttggggtttccattttatttatctttgtttacgttatttttttctttgttttacgttaatttttgtaattcgg

SEQ ID NO: 105897 - protein, 548 aa, Arabidopsis thaliana
  peptide (1)..(548): Ceres Seq. ID no. 13618287
  misc_feature (21)..(548): Homolog of NCBI NO: 15219379 NR Description: succinate-semialdehyde dehydrogenase, putative [Arabidopsis thaliana] >gi|6684442|gb|AAF23590.1|AF117335_1 semialdehyde dehydrogenase [Arabidopsis thaliana]
  misc_feature (56)..(548): Homolog of NCBI NO: 25284177 NR Description: hypothetical protein T8K14.14 [imported] - thaliana >gi|4835765|gb|AAD30232.1|AC007202_14 Is a member of the
  misc_feature (65)..(543): Homolog of NCBI NO: 23014760 NR Description: hypothetical protein [Magnetospirillum
  misc_feature (64)..(543): Homolog of NCBI NO: 16130575 NR Description: succinate-semialdehyde dehydrogenase,
  misc_feature (64)..(543): Homolog of NCBI NO: 15595462 NR Description: succinate-semialdehyde dehydrogenase [Pseudomonas
  misc_feature (64)..(543): Homolog of NCBI NO: 32043436 NR Description: hypothetical protein [Pseudomonas aeruginosa
  misc_feature (64)..(541): Homolog of NCBI NO: 16119363 NR Description: AGR_pAT_197p [Agrobacterium tumefaciens]
  misc_feature (64)..(541): Homolog of NCBI NO: 17938723 NR Description: NAD-dependent succinate aldehyde dehydrogenases
  misc_feature (64)..(541): Homolog of NCBI NO: 17223783 NR Description: AttK [Agrobacterium tumefaciens]
  misc_feature (64)..(543): Homolog of NCBI NO: 15803178 NR Description: succinate-semialdehyde dehydrogenase, activity [Escherichia coli O157:H7 EDL933]
TASDLTSVRHLCSIEVWEVVMVIGAAARVAIGGCRKLISSHTSLLLVSSQCRQMSMDAQSVSEKLRSSGLLRTQGLIGGKWLDSYDNKTIKVNNPATGEIIADVACMGTKETNDAIASSYEAFTSWSRLTAGERSKVLRRWYDLLIAHKEELGQLITLEQGKPLKEAIGEVAYGASFIEYYAEEAKRVYGDIIPPNLSDRRLLVLKQPVGVVGAITPWNFPLAMITRKVGPALASGCTVVVKPSELTPLTALAAAELALQAGVPPGALNVVMGNAPEIGDALLTSPQVRKITFTGSTAVGKKLMAAAAPTVKKVSLELGGNAPSIVFDDADLDVAVKGTLAAKFRNSGQTCVCANRVLVQDGIYDKFAEAFSEAVQKLEVGDGFRDGTTQGPLINDAAVQKVETFVQDAVSKGAKIIIGGKRHSLGMTFYEPTVIRDVSDNMIMSKEEIFGPVAPLIRFKTEEDAIRIANDTIAGLAAYIFTNSVQRSWRVFEALEYGLVGVNEGLISTEVAPFGGVKQSGLGREGSKYGMDEYLEIKYVCLGDMNRH

SEQ ID NO: 105898 - protein, 528 aa, Arabidopsis thaliana; identical to SEQ ID NO: 40529
  peptide (1)..(528): Ceres Seq. ID no. 13618288
  misc_feature (1)..(528): Homolog of NCBI NO: 15219379 NR Description: succinate-semialdehyde dehydrogenase, putative [Arabidopsis thaliana] >gi|6684442|gb|AAF23590.1|AF117335_1 semialdehyde dehydrogenase [Arabidopsis thaliana]
  misc_feature (36)..(528): Homolog of NCBI NO: 25284177 NR Description: hypothetical protein T8K14.14 [imported] - thaliana >gi|4835765|gb|AAD30232.1|AC007202_14 Is a member of the
  misc_feature (45)..(523): Homolog of NCBI NO: 23014760 NR Description: hypothetical protein [Magnetospirillum
  misc_feature (44)..(523): Homolog of NCBI NO: 16130575 NR Description: succinate-semialdehyde dehydrogenase,
  misc_feature (44)..(523): Homolog of NCBI NO: 15595462 NR Description: succinate-semialdehyde dehydrogenase [Pseudomonas
  misc_feature (44)..(523): Homolog of NCBI NO: 32043436 NR Description: hypothetical protein [Pseudomonas aeruginosa
  misc_feature (44)..(521): Homolog of NCBI NO: 16119363 NR Description: AGR_pAT_197p [Agrobacterium tumefaciens]
  misc_feature (44)..(521): Homolog of NCBI NO: 17938723 NR Description: NAD-dependent succinate aldehyde dehydrogenases
  misc_feature (44)..(521): Homolog of NCBI NO: 17223783 NR Description: AttK [Agrobacterium tumefaciens]
  misc_feature (44)..(523): Homolog of NCBI NO: 15803178 NR Description: succinate-semialdehyde dehydrogenase, activity [Escherichia coli O157:H7 EDL933]

SEQ ID NO: 105899 - protein, 495 aa, Arabidopsis thaliana; identical to SEQ ID NO: 40530
  peptide (1)..(495): Ceres Seq. ID no. 13618289
  misc_feature (1)..(495): Homolog of NCBI NO: 15219379 NR Description: succinate-semialdehyde dehydrogenase, putative [Arabidopsis thaliana] >gi|6684442|gb|AAF23590.1|AF117335_1 semialdehyde dehydrogenase [Arabidopsis thaliana]
  misc_feature (3)..(495): Homolog of NCBI NO: 25284177 NR Description: hypothetical protein T8K14.14 [imported] - thaliana >gi|4835765|gb|AAD30232.1|AC007202_14 Is a member of the
  misc_feature (12)..(490): Homolog of NCBI NO: 23014760 NR Description: hypothetical protein [Magnetospirillum
  misc_feature (11)..(490): Homolog of NCBI NO: 16130575 NR Description: succinate-semialdehyde dehydrogenase,
  misc_feature (11)..(490): Homolog of NCBI NO: 15595462 NR Description: succinate-semialdehyde dehydrogenase [Pseudomonas
  misc_feature (11)..(490): Homolog of NCBI NO: 32043436 NR Description: hypothetical protein [Pseudomonas aeruginosa
  misc_feature (11)..(488): Homolog of NCBI NO: 16119363 NR Description: AGR_pAT_197p [Agrobacterium tumefaciens]
  misc_feature (11)..(488): Homolog of NCBI NO: 17938723 NR Description: NAD-dependent succinate aldehyde dehydrogenases
  misc_feature (11)..(488): Homolog of NCBI NO: 17223783 NR Description: AttK [Agrobacterium tumefaciens]
  misc_feature (11)..(490): Homolog of NCBI NO: 15803178 NR Description: succinate-semialdehyde dehydrogenase, activity [Escherichia coli O157:H7 EDL933]

SEQ ID NO: 105900 - DNA, 1540 bp, Arabidopsis thaliana
  misc_feature (1)..(1540): Ceres Seq. ID no. 13618290
  misc_feature: MA Experiment ID: 108434 Result: Up-regulated in Transcription
  misc_feature: MA Experiment 108434 PARAMETER Experiment Name: At_Root_Tips_cDNA_P Parameter: Tissue Value: Root Tips
  misc_feature: MA Experiment ID: 108462 Result: Down-regulated in Transcription
  misc_feature: MA Experiment 108462 PARAMETER Experiment Name: At_Germinating_Seeds_cDNA_P Parameter: Age (day) Value: 2 vs. 0
  misc_feature: MA Experiment 108462 PARAMETER Experiment Name: At_Germinating_Seeds_cDNA_P Parameter: Tissue Value: Germinating Seeds
  misc_feature: MA Experiment ID: 108569 Result: Up-regulated in Transcription
  misc_feature: MA Experiment 108569 PARAMETER Experiment Name: At_0.001%_MeJA__cDNA_P Parameter: Timepoint (hr) Value: 6
  misc_feature: MA Experiment 108569 PARAMETER Experiment Name: At_0.001%_MeJA__cDNA_P Parameter: Tissue Value: Aerial
  misc_feature: MA Experiment 108569 PARAMETER Experiment Name: At_0.001%_MeJA__cDNA_P Parameter: Treatment Value: 0.001% MeJA vs. No Treatment
  misc_feature: MA Experiment ID: 108573 Result: Up-regulated in Transcription
  misc_feature: MA Experiment 108573 PARAMETER Experiment Name: At_Drought_cDNA_P Parameter: Timepoint (hr) Value: 6
  misc_feature: MA Experiment 108573 PARAMETER Experiment Name: At_Drought_cDNA_P Parameter: Tissue Value: Aerial
  misc_feature: MA Experiment 108573 PARAMETER Experiment Name: At_Drought_cDNA_P Parameter: Treatment Value: Drought vs. No Drought
  misc_feature: MA Experiment ID: 108576 Result: Up-regulated in Transcription
  misc_feature: MA Experiment 108576 PARAMETER Experiment Name: At_42deg_Heat_cDNA_P Parameter: Temperature (deg C) Value: 42 vs. 22
  misc_feature: MA Experiment 108576 PARAMETER Experiment Name: At_42deg_Heat_cDNA_P Parameter: Timepoint (hr) Value: 1
  misc_feature: MA Experiment 108576 PARAMETER Experiment Name: At_42deg_Heat_cDNA_P Parameter: Tissue Value: Aerial
  misc_feature: MA Experiment ID: 108577 Result: Up-regulated in Transcription
  misc_feature: MA Experiment 108577 PARAMETER Experiment Name: At_42deg_Heat_cDNA_P Parameter: Temperature (deg C) Value: 42 vs. 22
  misc_feature: MA Experiment 108577 PARAMETER Experiment Name: At_42deg_Heat_cDNA_P Parameter: Timepoint (hr) Value: 6
  misc_feature: MA Experiment 108577 PARAMETER Experiment Name: At_42deg_Heat_cDNA_P Parameter: Tissue Value: Aerial
  misc_feature: MA Experiment ID: 108585 Result: Up-regulated in Transcription
  misc_feature: MA Experiment 108585 PARAMETER Experiment Name: At_5mM_NaNP_cDNA_P Parameter: Timepoint (hr) Value: 6
  misc_feature: MA Experiment 108585 PARAMETER Experiment Name: At_5mM_NaNP_cDNA_P Parameter: Tissue Value: Aerial
  misc_feature: MA Experiment 108585 PARAMETER Experiment Name: At_5mM_NaNP_cDNA_P Parameter: Treatment Value: null
  misc_feature: MA Experiment ID: 20000069 Result: Down-regulated in Transcription
  misc_feature: MA Experiment 20000069 PARAMETER Experiment Name: At_100uM_ABA_Mutants_cDNA_P Parameter: Plant Line Value: CS23
  misc_feature: MA Experiment 20000069 PARAMETER Experiment Name: At_100uM_ABA_Mutants_cDNA_P Parameter: Timepoint (hr) Value: 6
  misc_feature: MA Experiment 20000069 PARAMETER Experiment Name: At_100uM_ABA_Mutants_cDNA_P Parameter: Tissue Value: Aerial
  misc_feature: MA Experiment 20000069 PARAMETER Experiment Name: At_100uM_ABA_Mutants_cDNA_P Parameter: Treatment Value: 100uM ABA vs. No Treatment
  misc_feature: MA Experiment ID: 20000087 Result: Down-regulated in Transcription
  misc_feature: MA Experiment 20000087 PARAMETER Experiment Name: At_100uM_ABA_Mutants_cDNA_P Parameter: Plant Line Value: WS
  misc_feature: MA Experiment 20000087 PARAMETER Experiment Name: At_100uM_ABA_Mutants_cDNA_P Parameter: Timepoint (hr) Value: 6
  misc_feature: MA Experiment 20000087 PARAMETER Experiment Name: At_100uM_ABA_Mutants_cDNA_P Parameter: Tissue Value: Aerial
  misc_feature: MA Experiment 20000087 PARAMETER Experiment Name: At_100uM_ABA_Mutants_cDNA_P Parameter: Treatment Value: 100uM ABA vs. No Treatment
  misc_feature: MA Experiment ID: 20000093 Result: Up-regulated in Transcription
  misc_feature: MA Experiment 20000093 PARAMETER Experiment Name: At_42deg_Heat_cDNA_P Parameter: Temperature (deg C) Value: 42 vs. 22
  misc_feature: MA Experiment 20000093 PARAMETER Experiment Name: At_42deg_Heat_cDNA_P Parameter: Timepoint (hr) Value: 0.5
  misc_feature: MA Experiment 20000093 PARAMETER Experiment Name: At_42deg_Heat_cDNA_P Parameter: Tissue Value: Aerial
  misc_feature: MA Experiment ID: 20000112 Result: Up-regulated in Transcription
  misc_feature: MA Experiment 20000112 PARAMETER Experiment Name: At_42deg_Heat_cDNA_P Parameter: Temperature (deg C) Value: 42 vs. 22
  misc_feature: MA Experiment 20000112 PARAMETER Experiment Name: At_42deg_Heat_cDNA_P Parameter: Timepoint (hr) Value: 2
  misc_feature: MA Experiment 20000112 PARAMETER Experiment Name: At_42deg_Heat_cDNA_P Parameter: Tissue Value: Aerial
  misc_feature: MA Experiment ID: 20000144 Result: Up-regulated in Transcription
  misc_feature: MA Experiment 20000144 PARAMETER Experiment Name: At_42deg_Heat_cDNA_P Parameter: Temperature (deg C) Value: 42 vs. 22
  misc_feature: MA Experiment 20000144 PARAMETER Experiment Name: At_42deg_Heat_cDNA_P Parameter: Timepoint (hr) Value: 1
  misc_feature: MA Experiment 20000144 PARAMETER Experiment Name: At_42deg_Heat_cDNA_P Parameter: Tissue Value: Aerial
  misc_feature: MA Experiment ID: 20000171 Result: Up-regulated in Transcription
  misc_feature: MA Experiment 20000171 PARAMETER Experiment Name: At_42deg_Heat_P Parameter: Age (day) Value: 14
  misc_feature: MA Experiment 20000171 PARAMETER Experiment Name: At_42deg_Heat_P Parameter: Organism Value: A. thaliana
  misc_feature: MA Experiment 20000171 PARAMETER Experiment Name: At_42deg_Heat_P Parameter: Plant Line Value: WS
  misc_feature: MA Experiment 20000171 PARAMETER Experiment Name: At_42deg_Heat_P Parameter: Temperature (deg C) Value: 42 vs. 22
  misc_feature: MA Experiment 20000171 PARAMETER Experiment Name: At_42deg_Heat_P Parameter: Timepoint (hr) Value: 1
  misc_feature: MA Experiment 20000171 PARAMETER Experiment Name: At_42deg_Heat_P Parameter: Tissue Value: Aerial
  misc_feature: MA Experiment ID: 20000173 Result: Up-regulated in Transcription
  misc_feature: MA Experiment 20000173 PARAMETER Experiment Name: At_42deg_Heat_P Parameter: Age (day) Value: 14
  misc_feature: MA Experiment 20000173 PARAMETER Experiment Name: At_42deg_Heat_P Parameter: Organism Value: A. thaliana
  misc_feature: MA Experiment 20000173 PARAMETER Experiment Name: At_42deg_Heat_P Parameter: Plant Line Value: WS
  misc_feature: MA Experiment 20000173 PARAMETER Experiment Name: At_42deg_Heat_P Parameter: Temperature (deg C) Value: 42 vs. 22
  misc_feature: MA Experiment 20000173 PARAMETER Experiment Name: At_42deg_Heat_P Parameter: Timepoint (hr) Value: 6
  misc_feature: MA Experiment 20000173 PARAMETER Experiment Name: At_42deg_Heat_P Parameter: Tissue Value: Aerial
  misc_feature: MA Experiment ID: 20000179 Result: Down-regulated in Transcription
  misc_feature: MA Experiment 20000179 PARAMETER Experiment Name: At_Germinating_Seeds_P Parameter: Age (hr) Value: 6 vs. 0
  misc_feature: MA Experiment 20000179 PARAMETER Experiment Name: At_Germinating_Seeds_P Parameter: Tissue Value: Germinating Seeds
  misc_feature: MA Experiment ID: 20000184 Result: Up-regulated in Transcription
  misc_feature: MA Experiment 20000184 PARAMETER Experiment Name: At_Shoots__P Parameter: Age (day) Value: 7
  misc_feature: MA Experiment 20000184 PARAMETER Experiment Name: At_Shoots__P Parameter: Tissue Value: Shoots vs. Whole Plant
  misc_feature: MA Experiment ID: 20000185 Result: Up-regulated in Transcription
  misc_feature: MA Experiment 20000185 PARAMETER Experiment Name: At_Roots__P Parameter: Age (day) Value: 7 vs. 21
  misc_feature: MA Experiment 20000185 PARAMETER Experiment Name: At_Roots__P Parameter: Organism Value: A. thaliana
  misc_feature: MA Experiment 20000185 PARAMETER Experiment Name: At_Roots__P Parameter: Tissue Value: Roots vs. Whole Plant
  misc_feature: MA Experiment ID: 20000234 Result: Up-regulated in Transcription
  misc_feature: MA Experiment 20000234 PARAMETER Experiment Name: At_Siliques_P Parameter: Age (day) Value: 21
  misc_feature: MA Experiment 20000234 PARAMETER Experiment Name: At_Siliques_P Parameter: Organism Value: A. thaliana
  misc_feature: MA Experiment 20000234 PARAMETER Experiment Name: At_Siliques_P Parameter: Plant Line Value: WS
  misc_feature: MA Experiment 20000234 PARAMETER Experiment Name: At_Siliques_P Parameter: Tissue Value: Less Than 5mm Siliques vs. Whole Plant
  misc_feature: MA Experiment ID: 20000439 Result: Up-regulated in Transcription
  misc_feature: MA Experiment 20000439 PARAMETER Experiment Name: At_Roots__P Parameter: Age (day) Value: 14 vs. 21
  misc_feature: MA Experiment 20000439 PARAMETER Experiment Name: At_Roots__P Parameter: Organism Value: A. thaliana
  misc_feature: MA Experiment 20000439 PARAMETER Experiment Name: At_Roots__P Parameter: Tissue Value: Roots vs. Whole Plant
  misc_feature: MA Experiment ID: 20000794 Result: Up-regulated in Transcription
  misc_feature: MA Experiment 20000794 PARAMETER Experiment Name: At_Petals_P Parameter: Age (day) Value: 23-25 days
  misc_feature: MA Experiment 20000794 PARAMETER Experiment Name: At_Petals_P Parameter: Plant Line Value: WS
  misc_feature: MA Experiment 20000794 PARAMETER Experiment Name: At_Petals_P Parameter: Tissue Value: Petals vs. Whole plant
  misc_feature: MA Experiment ID: 20001248 Result: Down-regulated in Transcription
  misc_feature: MA Experiment 20001248 PARAMETER Experiment Name: At_Far-red-induction_P Parameter: Age (day) Value: 7
  misc_feature: MA Experiment 20001248 PARAMETER Experiment Name: At_Far-red-induction_P Parameter: Light Value: Far-red vs. White
  misc_feature: MA Experiment 20001248 PARAMETER Experiment Name: At_Far-red-induction_P Parameter: Organism Value: A. thaliana
  misc_feature: MA Experiment 20001248 PARAMETER Experiment Name: At_Far-red-induction_P Parameter: Plant Line Value: Columbia
  misc_feature: MA Experiment 20001248 PARAMETER Experiment Name: At_Far-red-induction_P Parameter: Timepoint (hr) Value: 4
  misc_feature: MA Experiment 20001248 PARAMETER Experiment Name: At_Far-red-induction_P Parameter: Tissue Value: Whole Plant
  misc_feature: MA Experiment ID: 20001450 Result: Down-regulated in Transcription
  misc_feature: MA Experiment 20001450 PARAMETER Experiment Name: At_Far-red-induction_P Parameter: Age (day) Value: 7
  misc_feature: MA Experiment 20001450 PARAMETER Experiment Name: At_Far-red-induction_P Parameter: Light Value: Far-red vs. White
  misc_feature: MA Experiment 20001450 PARAMETER Experiment Name: At_Far-red-induction_P Parameter: Organism Value: A. thaliana
  misc_feature: MA Experiment 20001450 PARAMETER Experiment Name: At_Far-red-induction_P Parameter: Plant Line Value: Columbia
  misc_feature: MA Experiment 20001450 PARAMETER Experiment Name: At_Far-red-induction_P Parameter: Timepoint (hr) Value: 8
  misc_feature: MA Experiment 20001450 PARAMETER Experiment Name: At_Far-red-induction_P Parameter: Tissue Value: Whole Plant
  misc_feature: MA Experiment ID: 20001451 Result: Down-regulated in Transcription
  misc_feature: MA Experiment 20001451 PARAMETER Experiment Name: At_Far-red-induction_P Parameter: Age (day) Value: 7
  misc_feature: MA Experiment 20001451 PARAMETER Experiment Name: At_Far-red-induction_P Parameter: Light Value: Far-red vs. White
  misc_feature: MA Experiment 20001451 PARAMETER Experiment Name: At_Far-red-induction_P Parameter: Organism Value: A. thaliana
  misc_feature: MA Experiment 20001451 PARAMETER Experiment Name: At_Far-red-induction_P Parameter: Plant Line Value: Columbia
  misc_feature: MA Experiment 20001451 PARAMETER Experiment Name: At_Far-red-induction_P Parameter: Timepoint (hr) Value: 24
  misc_feature: MA Experiment 20001451 PARAMETER Experiment Name: At_Far-red-induction_P Parameter: Tissue Value: Whole Plant
agattccgattgttttcttcgattaagttttgagctagattctctagatctgtttcaccgatttggttgatttctccgtcaatctgaactcgcggtgtgcatcttgttgtttgcagtgtttttagtttgttttacgaagaatcaactatggcgacgaagagaagcgttggaactttgaaggaagcggatctgaagggaaagagtgtgttcgtgagggttgatctcaacgttcctttggatgataactctaacatcaccgatgacaccaggattcgtgccgctgttcccaccatcaagtacttgatgggtaatggatctagggttgttctctgcagtcacttgggccgcccaaaaggtgttactcctaagtacagcttaaagcctcttgtgcccagattgtctgaacttcttggtgttgaggttgtaatggcaaatgactctattggtgaggaagtccagaagttggttgcaggactacctgaaggtggtgttttgctcttggagaatgtgaggttctacgccgaggaagagaagaatgatcctgaatttgcaaagaagcttgctgctcttgccgatgtttacgttaatgatgccttcggaactgctcacagagctcatgcttccactgagggagttgccaaattcttgaagccttcagttgctggtttcctcatgcagaaggaacttgattaccttgtcggagctgtggcaaaccccaagaagccttttgctgccattgttggaggctcaaaggtttcaacaaagattggtgtcattgagtctctcttgaacacagttgacatcctcctgctcggtggaggtatgatttttactttctacaaggcacaaggactctcagtcggatcttcccttgtggaggaggacaagcttgacttggcaaagtcactcatggagaaagcaaaggccaaaggtgtctctctcttgctcccaaccgatgtggttattgctgacaagtttgctcccgatgctaacagcaagatagtgccagccactgccatccctgatggctggatgggtctagatattggtccagactccatcaagacattcagcgaagctctggacacaaccaaaaccatcatctggaatggtcccatgggtgtgtttgaattcgataagtttgctgctggaactgaggccgtagcaaagcagcttgcagaactaagcggaaagggagtaaccacaatcattggaggaggtgactctgttgctgccgtcgagaaggttggtttggcagacaagatgagccacatctctaccggaggcggtgctagtttggagcttcttgagggtaagccacttccaggagtcctcgctctcgacgaagcttgaaaatcctcacgttggatttcatcgctattttgtgttgttatatgtataacaagtcgtctggttatcttgtgaccagacgagcaagccattatttatcagcttgagattttcgtctacggctctctttttatgagttttttagtttggagcctttttttaataataagagatgaaactctgattgacg

SEQ ID NO: 105901 - protein, 401 aa, Arabidopsis thaliana; identical to SEQ ID NO: 24557
  peptide (1)..(401): Ceres Seq. ID no. 13618291
  misc_feature (3)..(401): Pfam Name: Phosphoglycerate kinase Pfam Description: Phosphoglycerate kinase
  misc_feature (1)..(401): Homolog of NCBI NO: 15219412 NR Description: phosphoglycerate kinase -related [Arabidopsis
  misc_feature (1)..(401): Homolog of NCBI NO: 21536853 NR Description: phosphoglycerate kinase, putative [Arabidopsis
  misc_feature (1)..(401): Homolog of NCBI NO: 3738257 NR Description: cytosolic phosphoglycerate kinase 1 [Populus
  misc_feature (1)..(401): Homolog of NCBI NO: 2499498 NR Description: Phosphoglycerate kinase, cytosolic
  misc_feature (1)..(401): Homolog of NCBI NO: 9230771 NR Description: cytosolic phosphoglycerate kinase [Pisum sativum]
  misc_feature (1)..(401): Homolog of NCBI NO: 29124969 NR Description: 3-phosphoglycerate kinase [Populus tremuloides]
  misc_feature (1)..(401): Homolog of NCBI NO: 3738259 NR Description: cytosolic phosphoglycerate kinase 1 [Populus
  misc_feature (1)..(401): Homolog of NCBI NO: 129916 NR Description: Phosphoglycerate kinase, cytosolic
  misc_feature (1)..(401): Homolog of NCBI NO: 2499497 NR Description: Phosphoglycerate kinase, chloroplast precursor
  misc_feature (1)..(401): Homolog of NCBI NO: 7434544 NR Description: phosphoglycerate kinase (EC 2.7.2.3) precursor,

SEQ ID NO: 105902 - protein, 349 aa, Arabidopsis thaliana; identical to SEQ ID NO: 24558
  peptide (1)..(349): Ceres Seq. ID no. 13618292
  misc_feature (1)..(349): Pfam Name: Phosphoglycerate kinase Pfam Description: Phosphoglycerate kinase
  misc_feature (1)..(349): Homolog of NCBI NO: 15219412 NR Description: phosphoglycerate kinase -related [Arabidopsis
  misc_feature (1)..(349): Homolog of NCBI NO: 21536853 NR Description: phosphoglycerate kinase, putative [Arabidopsis
  misc_feature (1)..(349): Homolog of NCBI NO: 3738257 NR Description: cytosolic phosphoglycerate kinase 1 [Populus
  misc_feature (1)..(349): Homolog of NCBI NO: 2499498 NR Description: Phosphoglycerate kinase, cytosolic
  misc_feature (1)..(349): Homolog of NCBI NO: 9230771 NR Description: cytosolic phosphoglycerate kinase [Pisum sativum]
  misc_feature (1)..(349): Homolog of NCBI NO: 29124969 NR Description: 3-phosphoglycerate kinase [Populus tremuloides]
  misc_feature (1)..(349): Homolog of NCBI NO: 3738259 NR Description: cytosolic phosphoglycerate kinase 1 [Populus
  misc_feature (1)..(349): Homolog of NCBI NO: 129916 NR Description: Phosphoglycerate kinase, cytosolic
  misc_feature (1)..(349): Homolog of NCBI NO: 2499497 NR Description: Phosphoglycerate kinase, chloroplast precursor
  misc_feature (1)..(349): Homolog of NCBI NO: 7434544 NR Description: phosphoglycerate kinase (EC 2.7.2.3) precursor,

SEQ ID NO: 105903 - protein, 308 aa, Arabidopsis thaliana; identical to SEQ ID NO: 40269
  peptide (1)..(308): Ceres Seq. ID no. 13618293
  misc_feature (1)..(308): Pfam Name: Phosphoglycerate kinase Pfam Description: Phosphoglycerate kinase
  misc_feature (1)..(308): Homolog of NCBI NO: 15219412 NR Description: phosphoglycerate kinase -related [Arabidopsis
  misc_feature (1)..(308): Homolog of NCBI NO: 21536853 NR Description: phosphoglycerate kinase, putative [Arabidopsis
  misc_feature (1)..(308): Homolog of NCBI NO: 3738257 NR Description: cytosolic phosphoglycerate kinase 1 [Populus
  misc_feature (1)..(308): Homolog of NCBI NO: 2499498 NR Description: Phosphoglycerate kinase, cytosolic
  misc_feature (1)..(308): Homolog of NCBI NO: 9230771 NR Description: cytosolic phosphoglycerate kinase [Pisum sativum]
  misc_feature (1)..(308): Homolog of NCBI NO: 29124969 NR Description: 3-phosphoglycerate kinase [Populus tremuloides]
  misc_feature (1)..(308): Homolog of NCBI NO: 3738259 NR Description: cytosolic phosphoglycerate kinase 1 [Populus
  misc_feature (1)..(308): Homolog of NCBI NO: 129916 NR Description: Phosphoglycerate kinase, cytosolic
  misc_feature (1)..(308): Homolog of NCBI NO: 2499497 NR Description: Phosphoglycerate kinase, chloroplast precursor
  misc_feature (1)..(308): Homolog of NCBI NO: 7434544 NR Description: phosphoglycerate kinase (EC 2.7.2.3) precursor,

SEQ ID NO: 105904 - DNA, 1135 bp, Arabidopsis thaliana
  misc_feature (1)..(1135): Ceres Seq. ID no. 13618294
  misc_feature: MA Experiment ID: 108434 Result: Down-regulated in Transcription
  misc_feature: MA Experiment 108434 PARAMETER Experiment Name: At_Root_Tips_cDNA_P Parameter: Tissue Value: Root Tips
  misc_feature: MA Experiment ID: 108573 Result: Up-regulated in Transcription
  misc_feature: MA Experiment 108573 PARAMETER Experiment Name: At_Drought_cDNA_P Parameter: Timepoint (hr) Value: 6
  misc_feature: MA Experiment 108573 PARAMETER Experiment Name: At_Drought_cDNA_P Parameter: Tissue Value: Aerial
  misc_feature: MA Experiment 108573 PARAMETER Experiment Name: At_Drought_cDNA_P Parameter: Treatment Value: Drought vs. No Drought
  misc_feature: MA Experiment ID: 108585 Result: Up-regulated in Transcription
  misc_feature: MA Experiment 108585 PARAMETER Experiment Name: At_5mM_NaNP_cDNA_P Parameter: Timepoint (hr) Value: 6
  misc_feature: MA Experiment 108585 PARAMETER Experiment Name: At_5mM_NaNP_cDNA_P Parameter: Tissue Value: Aerial
  misc_feature: MA Experiment 108585 PARAMETER Experiment Name: At_5mM_NaNP_cDNA_P Parameter: Treatment Value: null
  misc_feature: MA Experiment ID: 108609 Result: Up-regulated in Transcription
  misc_feature: MA Experiment 108609 PARAMETER Experiment Name: At_100uM_ABA_cDNA_P Parameter: Timepoint (hr) Value: 24
  misc_feature: MA Experiment 108609 PARAMETER Experiment Name: At_100uM_ABA_cDNA_P Parameter: Tissue Value: Aerial
  misc_feature: MA Experiment 108609 PARAMETER Experiment Name: At_100uM_ABA_cDNA_P Parameter: Treatment Value: 100uM ABA vs. No Treatment
  misc_feature: MA Experiment ID: 20000224 Result: Down-regulated in Transcription
  misc_feature: MA Experiment ID: 20000235 Result: Down-regulated in Transcription
  misc_feature: MA Experiment 20000235 PARAMETER Experiment Name: At_Siliques_P Parameter: Age (day) Value: 21
  misc_feature: MA Experiment 20000235 PARAMETER Experiment Name: At_Siliques_P Parameter: Organism Value: A. thaliana
  misc_feature: MA Experiment 20000235 PARAMETER Experiment Name: At_Siliques_P Parameter: Plant Line Value: WS
  misc_feature: MA Experiment 20000235 PARAMETER Experiment Name: At_Siliques_P Parameter: Tissue Value: 5-10mm Siliques vs. Whole Plant
  misc_feature: MA Experiment ID: 20001248 Result: Up-regulated in Transcription
  misc_feature: MA Experiment 20001248 PARAMETER Experiment Name: At_Far-red-induction_P Parameter: Age (day) Value: 7
  misc_feature: MA Experiment 20001248 PARAMETER Experiment Name: At_Far-red-induction_P Parameter: Light Value: Far-red vs. White
  misc_feature: MA Experiment 20001248 PARAMETER Experiment Name: At_Far-red-induction_P Parameter: Organism Value: A. thaliana
  misc_feature: MA Experiment 20001248 PARAMETER Experiment Name: At_Far-red-induction_P Parameter: Plant Line Value: Columbia
  misc_feature: MA Experiment 20001248 PARAMETER Experiment Name: At_Far-red-induction_P Parameter: Timepoint (hr) Value: 4
  misc_feature: MA Experiment 20001248 PARAMETER Experiment Name: At_Far-red-induction_P Parameter: Tissue Value: Whole Plant
tcattcttcaaataaattaaaatcttcgttggcgttgttgttggttgcgttacagattttggactaatcattattttcgtgcctgcaaagtcagcacgacgatcgcgtttcgatcttcaaagtagaagaagacccgccacaatcacaaatcgcggtgcatatagtctaaagggtcaatggcctcttcttcggatccatggatgagagagtacaatgaggctttgaaactctctgaggatattaatggcatgatgtctgaaaggaatgcctccgggttaaccgggcctgatgctcaacgtcgtgcctctgcaattcgaagaaagatcaccattttggggactcgattagacagtctgcaatcccttcttgtcaaggttcctggcaagcagcatgtttcggagaaagagatgaatcgtcgcaaggatatggttgggaatttgagatcaaaaacaaatcaggtggcctctgctttgaatatgtcaaactttgcaaacagagacagcttgtttggaacagatttaaagccggatgatgcgataaatagagtctctggcatggacaaccaaggaattgttgtatttcaacggcaagttatgagagaacaagacgagggacttgagaagttggaggaaacagtcatgagtaccaaacacattgctctcgctgttaacgaggagctcaccctgcagacaaggcttattgatgacttagattacgatgtggatatcactgactctcgcttacggcgtgttcaaaagagccttgccttgatgaacaagagcatgaaaagtggttgctcatgcatgtctatgctcttgtctgtgcttggaatcgttggtcttgctcttgtaatttggctgctggttaagtacctgtaatgccaatgtggtggcaacttgtgaaagctcatccttttctctcagcctatcctctgtgcttaatggttgttttctattccttctatcgattgattcgtgtctgtgaggcaaagaagaataccactgcgtgtaagaaaccctcagaagtacataatctgtattaccttcgtatcaaccacgaattgtaaactaagttgacatttgtctatatatggtatggctcctacttggttcaataaagagaactagtggcttgg

SEQ ID NO: 105905 - protein, 233 aa, Arabidopsis thaliana; identical to SEQ ID NO: 35486
  peptide (1)..(233): Ceres Seq. ID no. 13618295
  misc_feature (142)..(204): Pfam Name: SNARE domain Pfam Description: SNARE domain
  misc_feature (1)..(233): Homolog of NCBI NO: 18412435 NR Description: syntaxin of plants 52 (SYP52) [Arabidopsis >gi|28380159|sp|Q94KK7|SY52_ARATH Syntaxin 52 (AtSYP52) syntaxin of plants 52 [Arabidopsis thaliana]
  misc_feature (1)..(233): Homolog of NCBI NO: 21592406 NR Description: unknown [Arabidopsis thaliana]
  misc_feature (1)..(175): Homolog of NCBI NO: 25372945 NR Description: protein F20B17.2 [imported] - Arabidopsis >gi|7715588|gb|AAF68106.1|AC010793_1 F20B17.2 [Arabidopsis
  misc_feature (160)..(233): Homolog of NCBI NO: 25372945 NR Description: protein F20B17.2 [imported] - Arabidopsis >gi|7715588|gb|AAF68106.1|AC010793_1 F20B17.2 [Arabidopsis
  misc_feature (1)..(233): Homolog of NCBI NO: 18394339 NR Description: syntaxin of plants 51 (SYP51) [Arabidopsis >gi|28380164|sp|Q9SA23|SY51_ARATH Syntaxin 51 (AtSYP51)
  misc_feature (1)..(232): Homolog of NCBI NO: 34902234 NR Description: Hypothetical protein [Oryza sativa (japonica group)] >gi|21426122|gb|AAM52319.1| Hypothetical protein [Oryza
  misc_feature (1)..(175): Homolog of NCBI NO: 15219172 NR Description: hypothetical protein [Arabidopsis thaliana]
  misc_feature (1)..(196): Homolog of NCBI NO: 22329605 NR Description: hypothetical protein [Arabidopsis thaliana]
  misc_feature (6)..(227): Homolog of NCBI NO: 13928908 NR Description: syntaxin 8; syntaxin-like protein 3I35 [Rattus >gi|14548268|sp|Q9Z2Q7|STX8_RAT Syntaxin 8
  misc_feature (6)..(227): Homolog of NCBI NO: 9055356 NR Description: syntaxin 8; syntaxin-like protein 3I35 [Mus

SEQ ID NO: 105906 - protein, 225 aa, Arabidopsis thaliana; identical to SEQ ID NO: 35487
  peptide (1)..(225): Ceres Seq. ID no. 13618296
  misc_feature (134)..(196): Pfam Name: SNARE domain Pfam Description: SNARE domain
  misc_feature (1)..(225): Homolog of NCBI NO: 18412435 NR Description: syntaxin of plants 52 (SYP52) [Arabidopsis >gi|28380159|sp|Q94KK7|SY52_ARATH Syntaxin 52 (AtSYP52) syntaxin of plants 52 [Arabidopsis thaliana]
  misc_feature (1)..(225): Homolog of NCBI NO: 21592406 NR Description: unknown [Arabidopsis thaliana]
  misc_feature (1)..(167): Homolog of NCBI NO: 25372945 NR Description: protein F20B17.2 [imported] - Arabidopsis >gi|7715588|gb|AAF68106.1|AC010793_1 F20B17.2 [Arabidopsis
  misc_feature (152)..(225): Homolog of NCBI NO: 25372945 NR Description: protein F20B17.2 [imported] - Arabidopsis >gi|7715588|gb|AAF68106.1|AC010793_1 F20B17.2 [Arabidopsis
  misc_feature (1)..(225): Homolog of NCBI NO: 18394339 NR Description: syntaxin of plants 51 (SYP51) [Arabidopsis >gi|28380164|sp|Q9SA23|SY51_ARATH Syntaxin 51 (AtSYP51)
  misc_feature (1)..(224): Homolog of NCBI NO: 34902234 NR Description: Hypothetical protein [Oryza sativa (japonica group)] >gi|21426122|gb|AAM52319.1| Hypothetical protein [Oryza
  misc_feature (1)..(167): Homolog of NCBI NO: 15219172 NR Description: hypothetical protein [Arabidopsis thaliana]
  misc_feature (1)..(188): Homolog of NCBI NO: 22329605 NR Description: hypothetical protein [Arabidopsis thaliana]
  misc_feature (1)..(219): Homolog of NCBI NO: 13928908 NR Description: syntaxin 8; syntaxin-like protein 3I35 [Rattus >gi|14548268|sp|Q9Z2Q7|STX8_RAT Syntaxin 8
  misc_feature (1)..(219): Homolog of NCBI NO: 9055356 NR Description: syntaxin 8; syntaxin-like protein 3I35 [Mus

SEQ ID NO: 105907 - protein, 209 aa, Arabidopsis thaliana; identical to SEQ ID NO: 35488
  peptide (1)..(209): Ceres Seq. ID no. 13618297
  misc_feature (118)..(180): Pfam Name: SNARE domain Pfam Description: SNARE domain
  misc_feature (1)..(209): Homolog of NCBI NO: 18412435 NR Description: syntaxin of plants 52 (SYP52) [Arabidopsis >gi|28380159|sp|Q94KK7|SY52_ARATH Syntaxin 52 (AtSYP52) syntaxin of plants 52 [Arabidopsis thaliana]
  misc_feature (1)..(209): Homolog of NCBI NO: 21592406 NR Description: unknown [Arabidopsis thaliana]
  misc_feature (1)..(151): Homolog of NCBI NO: 25372945 NR Description: protein F20B17.2 [imported] - Arabidopsis >gi|7715588|gb|AAF68106.1|AC010793_1 F20B17.2 [Arabidopsis
  misc_feature (136)..(209): Homolog of NCBI NO: 25372945 NR Description: protein F20B17.2 [imported] - Arabidopsis >gi|7715588|gb|AAF68106.1|AC010793_1 F20B17.2 [Arabidopsis
  misc_feature (1)..(209): Homolog of NCBI NO: 18394339 NR Description: syntaxin of plants 51 (SYP51) [Arabidopsis >gi|28380164|sp|Q9SA23|SY51_ARATH Syntaxin 51 (AtSYP51)
  misc_feature (1)..(208): Homolog of NCBI NO: 34902234 NR Description: Hypothetical protein [Oryza sativa (japonica group)] >gi|21426122|gb|AAM52319.1| Hypothetical protein [Oryza
  misc_feature (1)..(151): Homolog of NCBI NO: 15219172 NR Description: hypothetical protein [Arabidopsis thaliana]
  misc_feature (1)..(172): Homolog of NCBI NO: 22329605 NR Description: hypothetical protein [Arabidopsis thaliana]
  misc_feature (1)..(203): Homolog of NCBI NO: 13928908 NR Description: syntaxin 8; syntaxin-like protein 3I35 [Rattus >gi|14548268|sp|Q9Z2Q7|STX8_RAT Syntaxin 8
  misc_feature (1)..(203): Homolog of NCBI NO: 9055356 NR Description: syntaxin 8; syntaxin-like protein 3I35 [Mus

SEQ ID NO: 105908 - DNA, 3145 bp, Arabidopsis thaliana
  misc_feature (1)..(3145): Ceres Seq. ID no. 13618312
  misc_feature: MA Experiment ID: 20000306 Result: Up-regulated in Transcription
  misc_feature: MA Experiment 20000306 PARAMETER Experiment Name: At_Germinating_Seeds_Sub_P Parameter: Age (hr) Value: 6 vs. 0
  misc_feature: MA Experiment 20000306 PARAMETER Experiment Name: At_Germinating_Seeds_Sub_P Parameter: Organism Value: A. thaliana
  misc_feature: MA Experiment 20000306 PARAMETER Experiment Name: At_Germinating_Seeds_Sub_P Parameter: Plant Line Value: WS
  misc_feature: MA Experiment 20000306 PARAMETER Experiment Name: At_Germinating_Seeds_Sub_P Parameter: Tissue Value: Germinating Seeds
  misc_feature: MA Experiment ID: 20000307 Result: Up-regulated in Transcription
  misc_feature: MA Experiment 20000307 PARAMETER Experiment Name: At_Germinating_Seeds_Sub_P Parameter: Age (hr) Value: 24 vs. 0
  misc_feature: MA Experiment 20000307 PARAMETER Experiment Name: At_Germinating_Seeds_Sub_P Parameter: Organism Value: A. thaliana
  misc_feature: MA Experiment 20000307 PARAMETER Experiment Name: At_Germinating_Seeds_Sub_P Parameter: Plant Line Value: WS
  misc_feature: MA Experiment 20000307 PARAMETER Experiment Name: At_Germinating_Seeds_Sub_P Parameter: Tissue Value: Germinating Seeds
gcactggaagtgggatcaccaccactgcgcttcttcttcttcgtcatctctgatcccccctgcgatcaggggccatttccgtcgataatccgatctccggttcagacattcgtttggacttgcaaagatgccactgagactcgaaatcaagcgtaagtttgctcaaagatcagaaagagtcaaatctgtagatctccatccaacagagccatggatcctggcaagtttgtattccggaactctgtgcatctggaattaccagacccagacaatggtaaaatctttcgacgtgactgaattgcctgttcggtcagcaaagttcattgcacggaagcagtgggttgtagctggagctgatgacatgtttattcgtgtctacaactacaacactatggataagatcaaagtatttgaggctcatgctgattacattcgctgtgttgctgttcatcccacgcttccctatgtcttatcatcatctgatgatatgctcatcaagctctgggactgggaaaagggttggctttgcactcaaattttcgaaggccattcccattatgttatgcaagtcactttcaaccccaaagacaccaatacttttgctagtgcatcccttgaccgtaccataaaaatatggaatcttggctctccggatccaaattttactttggatgcacatctcaaaggggtaaactgtgtagactactttactggtggggataaaccatacctaatcactggttctgatgatcatactgctaaggtgtgggattaccaaacaaagagttgcgttcagactctcgaaggtcatacacacaatgtttctgcagtatcttttcatccagagctacctataattattacaggatccgaggatggaactgttcgcatatggcacgccaccacttacaggcttgagaatacattgaactatggccttgagagggtttgggctattggacacattaaaggttcacgccgggttgtaattggttatgacgaaggatccataatggtgaaacttggccgtgaaataccagtggctagtatggataacagcggaaaaattatttgggctaaacacaatgagatacatactgtaaacatcaagagtgtgggcgcagatgaggtcactgatggtgagagacttcctttggccgttaaagagctagggacctgcgatctttatcctcaaagcttgaagcacaaccctaatggtaggtttgtggtagtttgtggagatggtgagtatattatctacactgccttggcgtggcgaaataggtcatttggctctgcgctagaatttgtttggtcatctgatggggagcatgctgtcagggaaagctcgacaaagatcaagatcttcagcaagaatttccaggaaaagaagactgtgagacccaccttctcagcagagcacatttttggtgggacgttattgacaatgtgctcaagtgattttatatgcttctatgattgggcggaatgtaggttgattaggcgaatagatgttactgtcaaaaatctttattgggcggacagtggtgatctagttgcaattgccagtgatacatcattctacatccttaagttcaatcgtgacattgtttcctcttattttgatggcggtaaacaaattgatgaggaaggcattgaggacgcatttgagcttctcaatgaaaccaatgaacgtgttcggactggcttatgggttggggattgttttatctataccaactcttcttggaggcttaattactgtgttggtggtgaggtaactacaatgtatcatctggaccgtcctatgtacttgttgggttatctcgctaatcaaagcagggtttatttgattgacaaagagttcaatgttattggatacactttacttttaagtttgattgagtacaagactcttgtgatgcgtggagatttggaacaggctaatgaagtcttaccttcaattcctaaggagcaccataatagcgtggcacactttttggagtcacgtggcatgacagaagatgctctagaagtagcaactgatcctgactacagatttgagttggccatacagctcggtagattggctgtcgcaaaggacattgctgtagaggcacaaaatgaatctaaatggaagcaacttggagaattagctatgtcaagtgggaagctggatatggctgaggaatgcatgaggcatgctatggatttgagtggtctgctgctgctttattcttcattgggagatgcagatggaatgatgaagctggcagcacttgcaaaagagcaaggaaagaacaatgtcgcttttctttgcttgttcatgttgggtcaagtagaagactgcctgcatctgttggtggaaagtaatcgaatacctgaagccgctctgatggcgagatcgtaccttccaagcaaggtctccgaaatagtggcattgtggagaaacgatttgaccaagataagtccaaaggctgctgaatctctggctgatcccgaagagtatcccaatctctttgaggagtggcaagtcgccctgtcccttgaaaatagagctgcagagacgaggggcgtccatcctcctgctggggattattgtagtcatgcagacagagatcatacaactttagtggatgcttttagaattatgcaaatagaggaagagggtcgacttgagcaaggggatgttctcgacgaggttggggaagagggggaagatggagaggaagaggaggaggaggatcgtcaggaagagagtagtgatgggagacagcagaatgtggaagaagaggctgttgtggtggacgctgactctacggatggtgctgtgctagttaatggtaacgagtctgaagaacagtgggttctaacaccgccacaagagtagggttggtgaagagtgaagacatacacagatagatattttcttggctttgaaacttgatacattcagcagagaaatgaggcagcacagagagagattagtttccattgttaaaaaactgatctattgatagcttccgctttgtgcttttaatacagatacatattaaaaaaaaagggggttttgggactcttatgtagctttaacttatgagagatttcacctgtagaatatctgttttgaactgagatttcaccc

SEQ ID NO: 105909 - protein, 920 aa, Arabidopsis thaliana
  peptide (1)..(920): Ceres Seq. ID no. 13618313
  misc_feature (319)..(778): Pfam Name: Coatomer WD associated region Pfam Description: Coatomer WD associated region
  misc_feature (1)..(824): Homolog of NCBI NO: 4758032 NR Description: coatomer protein complex, subunit beta 2 (beta
  misc_feature (1)..(824): Homolog of NCBI NO: 486784 NR Description: Golgi-associated particle 102K chain - human
  misc_feature (1)..(824): Homolog of NCBI NO: 27805865 NR Description: coatomer protein complex, subunit beta 2 (beta
  misc_feature (1)..(824): Homolog of NCBI NO: 27697187 NR Description: Similar to coatomer protein complex, subunit beta
  misc_feature (2)..(798): Homolog of NCBI NO: 31228182 NR Description: ENSANGP00000010744 [Anopheles gambiae]
  misc_feature (1)..(821): Homolog of NCBI NO: 24584107 NR Description: beta'-coatomer protein CG6699-PA [Drosophila
  misc_feature (1)..(821): Homolog of NCBI NO: 3204159 NR Description: coatomer, beta-prime subunit [Drosophila
  misc_feature (1)..(821): Homolog of NCBI NO: 17540286 NR Description: Coatomer (111.1 kD) [Caenorhabditis elegans]
  misc_feature (1)..(821): Homolog of NCBI NO: 3287963 NR Description: PROBABLE COATOMER BETA' SUBUNIT (BETA'-COAT
  misc_feature (1)..(871): Homolog of NCBI NO: 32414251 NR Description: hypothetical protein [Neurospora crassa]
MPLRLEIKRKFAQRSERVKSVDLHPTEPWILASLYSGTLCIWNYQTQTMVKSFDVTELPVRSAKFIARKQWVVAGADDMFIRVYNYNTMDKIKVFEAHADYIRCVAVHPTLPYVLSSSDDMLIKLWDWEKGWLCTQIFEGHSHYVMQVTFNPKDTNTFASASLDRTIKIWNLGSPDPNFTLDAHLKGVNCVDYFTGGDKPYLITGSDDHTAKVWDYQTKSCVQTLEGHTHNVSAVSFHPELPIIITGSEDGTVRIWHATTYRLENTLNYGLERVWAIGHIKGSRRVVIGYDEGSIMVKLGREIPVASMDNSGKIIWAKHNEIHTVNIKSVGADEVTDGERLPLAVKELGTCDLYPQSLKHNPNGRFVVVCGDGEYIIYTALAWRNRSFGSALEFVWSSDGEHAVRESSTKIKIFSKNFQEKKTVRPTFSAEHIFGGTLLTMCSSDFICFYDWAECRLIRRIDVTVKNLYWADSGDLVAIASDTSFYILKFNRDIVSSYFDGGKQIDEEGIEDAFELLNETNERVRTGLWVGDCFIYTNSSWRLNYCVGGEVTTMYHLDRPMYLLGYLANQSRVYLIDKEFNVIGYTLLLSLIEYKTLVMRGDLEQANEVLPSIPKEHHNSVAHFLESRGMTEDALEVATDPDYRFELAIQLGRLAVAKDIAVEAQNESKWKQLGELAMSSGKLDMAEECMRHAMDLSGLLLLYSSLGDADGMMKLAALAKEQGKNNVAFLCLFMLGQVEDCLHLLVESNRIPEAALMARSYLPSKVSEIVALWRNDLTKISPKAAESLADPEEYPNLFEEWQVALSLENRAAETRGVHPPAGDYCSHADRDHTTLVDAFRIMQIEEEGRLEQGDVLDEVGEEGEDGEEEEEEDRQEESSDGRQQNVEEEAVVVDADSTDGAVLVNGNESEEQWVLTPPQE

SEQ ID NO: 105910 - protein, 872 aa, Arabidopsis thaliana
  peptide (1)..(872): Ceres Seq. ID no. 13618314
  misc_feature (271)..(730): Pfam Name: Coatomer WD associated region Pfam Description: Coatomer WD associated region
  misc_feature (1)..(776): Homolog of NCBI NO: 4758032 NR Description: coatomer protein complex, subunit beta 2 (beta
  misc_feature (1)..(776): Homolog of NCBI NO: 486784 NR Description: Golgi-associated particle 102K chain - human
  misc_feature (1)..(776): Homolog of NCBI NO: 27805865 NR Description: coatomer protein complex, subunit beta 2 (beta
  misc_feature (1)..(776): Homolog of NCBI NO: 27697187 NR Description: Similar to coatomer protein complex, subunit beta
  misc_feature (1)..(750): Homolog of NCBI NO: 31228182 NR Description: ENSANGP00000010744 [Anopheles gambiae]
  misc_feature (1)..(773): Homolog of NCBI NO: 24584107 NR Description: beta'-coatomer protein CG6699-PA [Drosophila
  misc_feature (1)..(773): Homolog of NCBI NO: 3204159 NR Description: coatomer, beta-prime subunit [Drosophila
  misc_feature (1)..(773): Homolog of NCBI NO: 17540286 NR Description: Coatomer (111.1 kD) [Caenorhabditis elegans]
  misc_feature (1)..(773): Homolog of NCBI NO: 3287963 NR Description: PROBABLE COATOMER BETA' SUBUNIT (BETA'-COAT
  misc_feature (1)..(823): Homolog of NCBI NO: 32414251 NR Description: hypothetical protein [Neurospora crassa]
MVKSFDVTELPVRSAKFIARKQWVVAGADDMFIRVYNYNTMDKIKVFEAHADYIRCVAVHPTLPYVLSSSDDMLIKLWDWEKGWLCTQIFEGHSHYVMQVTFNPKDTNTFASASLDRTIKIWNLGSPDPNFTLDAHLKGVNCVDYFTGGDKPYLITGSDDHTAKVWDYQTKSCVQTLEGHTHNVSAVSFHPELPIIITGSEDGTVRIWHATTYRLENTLNYGLERVWAIGHIKGSRRVVIGYDEGSIMVKLGREIPVASMDNSGKIIWAKHNEIHTVNIKSVGADEVTDGERLPLAVKELGTCDLYPQSLKHNPNGRFVVVCGDGEYIIYTALAWRNRSFGSALEFVWSSDGEHAVRESSTKIKIFSKNFQEKKTVRPTFSAEHIFGGTLLTMCSSDFICFYDWAECRLIRRIDVTVKNLYWADSGDLVAIASDTSFYILKFNRDIVSSYFDGGKQIDEEGIEDAFELLNETNERVRTGLWVGDCFIYTNSSWRLNYCVGGEVTTMYHLDRPMYLLGYLANQSRVYLIDKEFNVIGYTLLLSLIEYKTLVMRGDLEQANEVLPSIPKEHHNSVAHFLESRGMTEDALEVATDPDYRFELAIQLGRLAVAKDIAVEAQNESKWKQLGELAMSSGKLDMAEECMRHAMDLSGLLLLYSSLGDADGMMKLAALAKEQGKNNVAFLCLFMLGQVEDCLHLLVESNRIPEAALMARSYLPSKVSEIVALWRNDLTKISPKAAESLADPEEYPNLFEEWQVALSLENRAAETRGVHPPAGDYCSHADRDHTTLVDAFRIMQIEEEGRLEQGDVLDEVGEEGEDGEEEEEEDRQEESSDGRQQNVEEEAVVVDADSTDGAVLVNGNESEEQWVLTPPQE

SEQ ID NO: 105911 - protein, 842 aa, Arabidopsis thaliana
  peptide (1)..(842): Ceres Seq. ID no. 13618315
  misc_feature (241)..(700): Pfam Name: Coatomer WD associated region Pfam Description: Coatomer WD associated region
  misc_feature (1)..(746): Homolog of NCBI NO: 4758032 NR Description: coatomer protein complex, subunit beta 2 (beta
  misc_feature (1)..(746): Homolog of NCBI NO: 486784 NR Description: Golgi-associated particle 102K chain - human
  misc_feature (1)..(746): Homolog of NCBI NO: 27805865 NR Description: coatomer protein complex, subunit beta 2 (beta
  misc_feature (1)..(746): Homolog of NCBI NO: 27697187 NR Description: Similar to coatomer protein complex, subunit beta
  misc_feature (1)..(720): Homolog of NCBI NO: 31228182 NR Description: ENSANGP00000010744 [Anopheles gambiae]
  misc_feature (1)..(743): Homolog of NCBI NO: 24584107 NR Description: beta'-coatomer protein CG6699-PA [Drosophila
  misc_feature (1)..(743): Homolog of NCBI NO: 3204159 NR Description: coatomer, beta-prime subunit [Drosophila
  misc_feature (1)..(743): Homolog of NCBI NO: 17540286 NR Description: Coatomer (111.1 kD) [Caenorhabditis elegans]
  misc_feature (1)..(743): Homolog of NCBI NO: 3287963 NR Description: PROBABLE COATOMER BETA' SUBUNIT (BETA'-COAT
  misc_feature (1)..(793): Homolog of NCBI NO: 32414251 NR Description: hypothetical protein [Neurospora crassa]
MFIRVYNYNTMDKIKVFEAHADYIRCVAVHPTLPYVLSSSDDMLIKLWDWEKGWLCTQIFEGHSHYVMQVTFNPKDTNTFASASLDRTIKIWNLGSPDPNFTLDAHLKGVNCVDYFTGGDKPYLITGSDDHTAKVWDYQTKSCVQTLEGHTHNVSAVSFHPELPIIITGSEDGTVRIWHATTYRLENTLNYGLERVWAIGHIKGSRRVVIGYDEGSIMVKLGREIPVASMDNSGKIIWAKHNEIHTVNIKSVGADEVTDGERLPLAVKELGTCDLYPQSLKHNPNGRFVVVCGDGEYIIYTALAWRNRSFGSALEFVWSSDGEHAVRESSTKIKIFSKNFQEKKTVRPTFSAEHIFGGTLLTMCSSDFICFYDWAECRLIRRIDVTVKNLYWADSGDLVAIASDTSFYILKFNRDIVSSYFDGGKQIDEEGIEDAFELLNETNERVRTGLWVGDCFIYTNSSWRLNYCVGGEVTTMYHLDRPMYLLGYLANQSRVYLIDKEFNVIGYTLLLSLIEYKTLVMRGDLEQANEVLPSIPKEHHNSVAHFLESRGMTEDALEVATDPDYRFELAIQLGRLAVAKDIAVEAQNESKWKQLGELAMSSGKLDMAEECMRHAMDLSGLLLLYSSLGDADGMMKLAALAKEQGKNNVAFLCLFMLGQVEDCLHLLVESNRIPEAALMARSYLPSKVSEIVALWRNDLTKISPKAAESLADPEEYPNLFEEWQVALSLENRAAETRGVHPPAGDYCSHADRDHTTLVDAFRIMQIEEEGRLEQGDVLDEVGEEGEDGEEEEEEDRQEESSDGRQQNVEEEAVVVDADSTDGAVLVNGNESEEQWVLTPPQE

SEQ ID NO: 105912 - DNA, 1166 bp, Arabidopsis thaliana
  misc_feature (1)..(1166): Ceres Seq. ID no. 13618316
  misc_feature: MA Experiment ID: 108462 Result: Down-regulated in Transcription
  misc_feature: MA Experiment 108462 PARAMETER Experiment Name: At_Germinating_Seeds_cDNA_P Parameter: Age (day) Value: 2 vs. 0
  misc_feature: MA Experiment 108462 PARAMETER Experiment Name: At_Germinating_Seeds_cDNA_P Parameter: Tissue Value: Germinating Seeds
  misc_feature: MA Experiment ID: 108463 Result: Down-regulated in Transcription
  misc_feature: MA Experiment 108463 PARAMETER Experiment Name: At_Germinating_Seeds_cDNA_P Parameter: Age (day) Value: 3 vs. 0
  misc_feature: MA Experiment 108463 PARAMETER Experiment Name: At_Germinating_Seeds_cDNA_P Parameter: Tissue Value: Germinating Seeds
  misc_feature: MA Experiment ID: 108585 Result: Up-regulated in Transcription
  misc_feature: MA Experiment 108585 PARAMETER Experiment Name: At_5mM_NaNP_cDNA_P Parameter: Timepoint (hr) Value: 6
  misc_feature: MA Experiment 108585 PARAMETER Experiment Name: At_5mM_NaNP_cDNA_P Parameter: Tissue Value: Aerial
  misc_feature: MA Experiment 108585 PARAMETER Experiment Name: At_5mM_NaNP_cDNA_P Parameter: Treatment Value: null
  misc_feature: MA Experiment ID: 20000235 Result: Up-regulated in Transcription
  misc_feature: MA Experiment 20000235 PARAMETER Experiment Name: At_Siliques_P Parameter: Age (day) Value: 21
  misc_feature: MA Experiment 20000235 PARAMETER Experiment Name: At_Siliques_P Parameter: Organism Value: A. thaliana
  misc_feature: MA Experiment 20000235 PARAMETER Experiment Name: At_Siliques_P Parameter: Plant Line Value: WS
  misc_feature: MA Experiment 20000235 PARAMETER Experiment Name: At_Siliques_P Parameter: Tissue Value: 5-10mm Siliques vs. Whole Plant
  misc_feature: MA Experiment ID: 20001911 Result: Up-regulated in Transcription
  misc_feature: MA Experiment 20001911 PARAMETER Experiment Name: At_Drought_Reproduction_P Parameter: Age (day) Value: 40
  misc_feature: MA Experiment 20001911 PARAMETER Experiment Name: At_Drought_Reproduction_P Parameter: Organism Value: A. thaliana
  misc_feature: MA Experiment 20001911 PARAMETER Experiment Name: At_Drought_Reproduction_P Parameter: Plant Line Value: WS
  misc_feature: MA Experiment 20001911 PARAMETER Experiment Name: At_Drought_Reproduction_P Parameter: Timepoint (day) Value: 10
  misc_feature: MA Experiment 20001911 PARAMETER Experiment Name: At_Drought_Reproduction_P Parameter: Tissue Value: Flowers
  misc_feature: MA Experiment 20001911 PARAMETER Experiment Name: At_Drought_Reproduction_P Parameter: Treatment Value: Drought vs. No Drought
ggcctttaagataaagaaaaggaaacccaatcgaaaacctaaaacccgattagattttcttagatacgaaacctctcttacgacgctccttcctcaatctctctcgatcgtcggagattctttcttcaagagtcatcttcttcttcttctccttctccctaaaccctaatttatcgcgtttggatcgaatcagctgtcaattcttgttttggttttcacggccagggccatgtctgccgtatattgcggaaccaagagatcttacttcgacgataattcttctccgccctcttctaagaggttccgatgtttttcgccttccaattctccaatctggtcctctcctccttcctcatcgctcgatcagcttcactctgcgtttcctcatattgaactcacggttctcgtcaaggcactagaagataatggaagtgattttaatgctgctatgaagagcttatactctttcgcatcttctgaggagaagaaagctgaagaattggccgcaggaggtgctgctactcaggaaactgatgccgtttgtggtggaaaccccccgaccagtggtgatgactgggttgaattgttagtcagggaagtgttacaatcgtctggtacagatgatgcaaaagtacgtgcagcaagagtccttgaggccttagagaagatgttaagtgcacgtgctcgtgaagaagctggaaacaaattccaagaggagaaagtggcagtgcagcaacaggtggagaccttggtgaaggacaacacagtcctcaaacgtgctgttgctatccagcatgagcggcagaaggcattggaggatgcgaaccatcagctaggacttttgaagcaactggttcctcagtatcaggaaaagcttagaaatctggaggtgaacaattacgcgttgagaatgcagctgcagcaagtggaacatggcaactcaatgccagcaagattcaatccggacgtcttctaaagctctccaagaagacaaggacacttgcagaggaggagaaggcaataaacgaaagtagagggagagagagagagagagcgatatcaaactacaaaacaaaagtgcttttgcattgtaatactgtgtagtcaggacaaacaaacattctgtttcctttccttttttttttatatatttctttggtttgctg

SEQ ID NO: 105913 - protein, 248 aa, Arabidopsis thaliana; identical to SEQ ID NO: 23147
  peptide (1)..(248): Ceres Seq. ID no. 13618317
  misc_feature (1)..(248): Homolog of NCBI NO: 18412607 NR Description: expressed protein [Arabidopsis thaliana]
  misc_feature (1)..(248): Homolog of NCBI NO: 13877755 NR Description: unknown protein [Arabidopsis thaliana]
  misc_feature (1)..(248): Homolog of NCBI NO: 18421340 NR Description: expressed protein [Arabidopsis thaliana]
  misc_feature (82)..(248): Homolog of NCBI NO: 34015166 NR Description: hypothetical protein OSJNBa0017M13.20 [Oryza
  misc_feature (113)..(248): Homolog of NCBI NO: 15241851 NR Description: hypothetical protein [Arabidopsis thaliana]
  misc_feature (188)..(248): Homolog of NCBI NO: 35215036 NR Description: hypothetical protein [Oryza sativa (japonica group)] >gi|35215263|dbj|BAC92612.1| hypothetical protein [Oryza
  misc_feature (95)..(211): Homolog of NCBI NO: 35215036 NR Description: hypothetical protein [Oryza sativa (japonica group)] >gi|35215263|dbj|BAC92612.1| hypothetical protein [Oryza

SEQ ID NO: 105914 - protein, 175 aa, Arabidopsis thaliana; identical to SEQ ID NO: 23148
  peptide (1)..(175): Ceres Seq. ID no. 13618318
  misc_feature (1)..(175): Homolog of NCBI NO: 18412607 NR Description: expressed protein [Arabidopsis thaliana]
  misc_feature (1)..(175): Homolog of NCBI NO: 13877755 NR Description: unknown protein [Arabidopsis thaliana]
  misc_feature (1)..(175): Homolog of NCBI NO: 18421340 NR Description: expressed protein [Arabidopsis thaliana]
  misc_feature (9)..(175): Homolog of NCBI NO: 34015166 NR Description: hypothetical protein OSJNBa0017M13.20 [Oryza
  misc_feature (40)..(175): Homolog of NCBI NO: 15241851 NR Description: hypothetical protein [Arabidopsis thaliana]
  misc_feature (115)..(175): Homolog of NCBI NO: 35215036 NR Description: hypothetical protein [Oryza sativa (japonica group)] >gi|35215263|dbj|BAC92612.1| hypothetical protein [Oryza
  misc_feature (22)..(138): Homolog of NCBI NO: 35215036 NR Description: hypothetical protein [Oryza sativa (japonica group)] >gi|35215263|dbj|BAC92612.1| hypothetical protein [Oryza

SEQ ID NO: 105915 - DNA, 802 bp, Arabidopsis thaliana
  misc_feature (1)..(802): Ceres Seq. ID no. 13618319
  misc_feature: MA Experiment ID: 108473 Result: Up-regulated in Transcription
  misc_feature: MA Experiment 108473 PARAMETER Experiment Name: At_Drought_Flowers_cDNA_P Parameter: Timepoint (hr) Value: 7 d
  misc_feature: MA Experiment 108473 PARAMETER Experiment Name: At_Drought_Flowers_cDNA_P Parameter: Tissue Value: Flower
  misc_feature: MA Experiment 108473 PARAMETER Experiment Name: At_Drought_Flowers_cDNA_P Parameter: Treatment Value: Drought vs. No Drought
  misc_feature: MA Experiment ID: 108488 Result: Down-regulated in Transcription
  misc_feature: MA Experiment ID: 108489 Result: Up-regulated in Transcription
  misc_feature: MA Experiment ID: 108501 Result: Down-regulated in Transcription
  misc_feature: MA Experiment 108501 PARAMETER Experiment Name: At_ap2_floral_buds_cDNA_P Parameter: Plant Line Value: ap2 (Ler.)
  misc_feature: MA Experiment 108501 PARAMETER Experiment Name: At_ap2_floral_buds_cDNA_P Parameter: Tissue Value: Closed Flower
  misc_feature: MA Experiment ID: 108561 Result: Up-regulated in Transcription
  misc_feature: MA Experiment 108561 PARAMETER Experiment Name: At_100uM_ABA_cDNA_P Parameter: Timepoint (hr) Value: 6
  misc_feature: MA Experiment 108561 PARAMETER Experiment Name: At_100uM_ABA_cDNA_P Parameter: Tissue Value: Aerial
  misc_feature: MA Experiment 108561 PARAMETER Experiment Name: At_100uM_ABA_cDNA_P Parameter: Treatment Value: 100uM ABA vs. No Treatment
  misc_feature: MA Experiment ID: 108572 Result: Up-regulated in Transcription
  misc_feature: MA Experiment 108572 PARAMETER Experiment Name: At_Drought_cDNA_P Parameter: Timepoint (hr) Value: 1
  misc_feature: MA Experiment 108572 PARAMETER Experiment Name: At_Drought_cDNA_P Parameter: Tissue Value: Aerial
  misc_feature: MA Experiment 108572 PARAMETER Experiment Name: At_Drought_cDNA_P Parameter: Treatment Value: Drought vs. No Drought
  misc_feature: MA Experiment ID: 108573 Result: Up-regulated in Transcription
  misc_feature: MA Experiment 108573 PARAMETER Experiment Name: At_Drought_cDNA_P Parameter: Timepoint (hr) Value: 6
  misc_feature: MA Experiment 108573 PARAMETER Experiment Name: At_Drought_cDNA_P Parameter: Tissue Value: Aerial
  misc_feature: MA Experiment 108573 PARAMETER Experiment Name: At_Drought_cDNA_P Parameter: Treatment Value: Drought vs. No Drought
  misc_feature: MA Experiment ID: 108574 Result: Down-regulated in Transcription
  misc_feature: MA Experiment 108574 PARAMETER Experiment Name: At_Wounding__cDNA_P Parameter: Timepoint (hr) Value: 1
  misc_feature: MA Experiment 108574 PARAMETER Experiment Name: At_Wounding__cDNA_P Parameter: Tissue Value: Aerial
  misc_feature: MA Experiment 108574 PARAMETER Experiment Name: At_Wounding__cDNA_P Parameter: Treatment Value: Wounding vs. No Wounding
  misc_feature: MA Experiment ID: 108579 Result: Down-regulated in Transcription
  misc_feature: MA Experiment 108579 PARAMETER Experiment Name: At_4deg_Cold_cDNA_P Parameter: Temperature (deg C) Value: 4 vs. 22
  misc_feature: MA Experiment 108579 PARAMETER Experiment Name: At_4deg_Cold_cDNA_P Parameter: Timepoint (hr) Value: 6
  misc_feature: MA Experiment 108579 PARAMETER Experiment Name: At_4deg_Cold_cDNA_P Parameter: Tissue Value: Aerial
  misc_feature: MA Experiment ID: 108595 Result: Up-regulated in Transcription
  misc_feature: MA Experiment 108595 PARAMETER Experiment Name: At_Ler-pi_Ovule_cDNA_P Parameter: Plant Line Value: null
  misc_feature: MA Experiment ID: 108605 Result: Up-regulated in Transcription
  misc_feature: MA Experiment 108605 PARAMETER Experiment Name: At_100uM_ABA_cDNA_P Parameter: Timepoint (hr) Value: 6
  misc_feature: MA Experiment 108605 PARAMETER Experiment Name: At_100uM_ABA_cDNA_P Parameter: Tissue Value: Aerial
  misc_feature: MA Experiment 108605 PARAMETER Experiment Name: At_100uM_ABA_cDNA_P Parameter: Treatment Value: 100uM ABA vs. No Treatment
  misc_feature: MA Experiment ID: 108607 Result: Up-regulated in Transcription
  misc_feature: MA Experiment 108607 PARAMETER Experiment Name: At_100uM_ABA_cDNA_P Parameter: Timepoint (hr) Value: 4
  misc_feature: MA Experiment 108607 PARAMETER Experiment Name: At_100uM_ABA_cDNA_P Parameter: Tissue Value: Aerial
  misc_feature: MA Experiment 108607 PARAMETER Experiment Name: At_100uM_ABA_cDNA_P Parameter: Treatment Value: 100uM ABA vs. No Treatment
  misc_feature: MA Experiment ID: 108608 Result: Up-regulated in Transcription
  misc_feature: MA Experiment 108608 PARAMETER Experiment Name: At_100uM_ABA_cDNA_P Parameter: Timepoint (hr) Value: 1
  misc_feature: MA Experiment 108608 PARAMETER Experiment Name: At_100uM_ABA_cDNA_P Parameter: Tissue Value: Aerial
  misc_feature: MA Experiment 108608 PARAMETER Experiment Name: At_100uM_ABA_cDNA_P Parameter: Treatment Value: 100uM ABA vs. No Treatment
  misc_feature: MA Experiment ID: 108609 Result: Up-regulated in Transcription
  misc_feature: MA Experiment 108609 PARAMETER Experiment Name: At_100uM_ABA_cDNA_P Parameter: Timepoint (hr) Value: 24
  misc_feature: MA Experiment 108609 PARAMETER Experiment Name: At_100uM_ABA_cDNA_P Parameter: Tissue Value: Aerial
  misc_feature: MA Experiment 108609 PARAMETER Experiment Name: At_100uM_ABA_cDNA_P Parameter: Treatment Value: 100uM ABA vs. No Treatment
  misc_feature: MA Experiment ID: 108668 Result: Up-regulated in Transcription
  misc_feature: MA Experiment 108668 PARAMETER Experiment Name: At_2mM_SA_cDNA_P Parameter: Plant Line Value: WS
  misc_feature: MA Experiment 108668 PARAMETER Experiment Name: At_2mM_SA_cDNA_P Parameter: Timepoint (hr) Value: 6
  misc_feature: MA Experiment 108668 PARAMETER Experiment Name: At_2mM_SA_cDNA_P Parameter: Treatment Value: 2mM SA vs. No Treatment
  misc_feature: MA Experiment ID: 20000070 Result: Up-regulated in Transcription
  misc_feature: MA Experiment 20000070 PARAMETER Experiment Name: At_100uM_ABA_Mutants_cDNA_P Parameter: Plant Line Value: CS24
  misc_feature: MA Experiment 20000070 PARAMETER Experiment Name: At_100uM_ABA_Mutants_cDNA_P Parameter: Timepoint (hr) Value: 6
  misc_feature: MA Experiment 20000070 PARAMETER Experiment Name: At_100uM_ABA_Mutants_cDNA_P Parameter: Tissue Value: Aerial
  misc_feature: MA Experiment 20000070 PARAMETER Experiment Name: At_100uM_ABA_Mutants_cDNA_P Parameter: Treatment Value: 100uM ABA vs. No Treatment
  misc_feature: MA Experiment ID: 20000071 Result: Up-regulated in Transcription
  misc_feature: MA Experiment 20000071 PARAMETER Experiment Name: At_100uM_ABA_Mutants_cDNA_P Parameter: Plant Line Value: CS8104
  misc_feature: MA Experiment 20000071 PARAMETER Experiment Name: At_100uM_ABA_Mutants_cDNA_P Parameter: Timepoint (hr) Value: 6
  misc_feature: MA Experiment 20000071 PARAMETER Experiment Name: At_100uM_ABA_Mutants_cDNA_P Parameter: Tissue Value: Aerial
  misc_feature: MA Experiment 20000071 PARAMETER Experiment Name: At_100uM_ABA_Mutants_cDNA_P Parameter: Treatment Value: 100uM ABA vs. No Treatment
  misc_feature: MA Experiment ID: 20000072 Result: Up-regulated in Transcription
  misc_feature: MA Experiment 20000072 PARAMETER Experiment Name: At_100uM_ABA_Mutants_cDNA_P Parameter: Plant Line Value: CS8105
  misc_feature: MA Experiment 20000072 PARAMETER Experiment Name: At_100uM_ABA_Mutants_cDNA_P Parameter: Timepoint (hr) Value: 6
  misc_feature: MA Experiment 20000072 PARAMETER Experiment Name: At_100uM_ABA_Mutants_cDNA_P Parameter: Tissue Value: Aerial
  misc_feature: MA Experiment 20000072 PARAMETER Experiment Name: At_100uM_ABA_Mutants_cDNA_P Parameter: Treatment Value: 100uM ABA vs. No Treatment
  misc_feature: MA Experiment ID: 20000086 Result: Up-regulated in Transcription
  misc_feature: MA Experiment 20000086 PARAMETER Experiment Name: At_100uM_ABA_Mutants_cDNA_P Parameter: Plant Line Value: CS22
  misc_feature: MA Experiment 20000086 PARAMETER Experiment Name: At_100uM_ABA_Mutants_cDNA_P Parameter: Timepoint (hr) Value: 6
  misc_feature: MA Experiment 20000086 PARAMETER Experiment Name: At_100uM_ABA_Mutants_cDNA_P Parameter: Tissue Value: Aerial
  misc_feature: MA Experiment 20000086 PARAMETER Experiment Name: At_100uM_ABA_Mutants_cDNA_P Parameter: Treatment Value: 100uM ABA vs. No Treatment
  misc_feature: MA Experiment ID: 20000087 Result: Up-regulated in Transcription
  misc_feature: MA Experiment 20000087 PARAMETER Experiment Name: At_100uM_ABA_Mutants_cDNA_P Parameter: Plant Line Value: WS
  misc_feature: MA Experiment 20000087 PARAMETER Experiment Name: At_100uM_ABA_Mutants_cDNA_P Parameter: Timepoint (hr) Value: 6
  misc_feature: MA Experiment 20000087 PARAMETER Experiment Name: At_100uM_ABA_Mutants_cDNA_P Parameter: Tissue Value: Aerial
  misc_feature: MA Experiment 20000087 PARAMETER Experiment Name: At_100uM_ABA_Mutants_cDNA_P Parameter: Treatment Value: 100uM ABA vs. No Treatment
  misc_feature: MA Experiment ID: 20000088 Result: Up-regulated in Transcription
  misc_feature: MA Experiment 20000088 PARAMETER Experiment Name: At_100uM_ABA_Mutants_cDNA_P Parameter: Plant Line Value: Landsberg
  misc_feature: MA Experiment 20000088 PARAMETER Experiment Name: At_100uM_ABA_Mutants_cDNA_P Parameter: Timepoint (hr) Value: 6
  misc_feature: MA Experiment 20000088 PARAMETER Experiment Name: At_100uM_ABA_Mutants_cDNA_P Parameter: Tissue Value: Aerial
  misc_feature: MA Experiment 20000088 PARAMETER Experiment Name: At_100uM_ABA_Mutants_cDNA_P Parameter: Treatment Value: 100uM ABA vs. No Treatment
  misc_feature: MA Experiment ID: 20000112 Result: Up-regulated in Transcription
  misc_feature: MA Experiment 20000112 PARAMETER Experiment Name: At_42deg_Heat_cDNA_P Parameter: Temperature (deg C) Value: 42 vs. 22
  misc_feature: MA Experiment 20000112 PARAMETER Experiment Name: At_42deg_Heat_cDNA_P Parameter: Timepoint (hr) Value: 2
  misc_feature: MA Experiment 20000112 PARAMETER Experiment Name: At_42deg_Heat_cDNA_P Parameter: Tissue Value: Aerial
  misc_feature: MA Experiment ID: 20000117 Result: Up-regulated in Transcription
  misc_feature: MA Experiment 20000117 PARAMETER Experiment Name: At_100uM_ABA_Mutants_cDNA_P Parameter: Plant Line Value: Columbia
  misc_feature: MA Experiment 20000117 PARAMETER Experiment Name: At_100uM_ABA_Mutants_cDNA_P Parameter: Timepoint (hr) Value: 6
  misc_feature: MA Experiment 20000117 PARAMETER Experiment Name: At_100uM_ABA_Mutants_cDNA_P Parameter: Tissue Value: Aerial
  misc_feature: MA Experiment 20000117 PARAMETER Experiment Name: At_100uM_ABA_Mutants_cDNA_P Parameter: Treatment Value: 100uM ABA vs. No Treatment
  misc_feature: MA Experiment ID: 20000166 Result: Up-regulated in Transcription
  misc_feature: MA Experiment 20000166 PARAMETER Experiment Name: At_100uM_ABA_P Parameter: Age (day) Value: 14
  misc_feature: MA Experiment 20000166 PARAMETER Experiment Name: At_100uM_ABA_P Parameter: Organism Value: A. thaliana
  misc_feature: MA Experiment 20000166 PARAMETER Experiment Name: At_100uM_ABA_P Parameter: Plant Line Value: WS
  misc_feature: MA Experiment 20000166 PARAMETER Experiment Name: At_100uM_ABA_P Parameter: Timepoint (hr) Value: 1
  misc_feature: MA Experiment 20000166 PARAMETER Experiment Name: At_100uM_ABA_P Parameter: Tissue Value: Aerial
  misc_feature: MA Experiment 20000166 PARAMETER Experiment Name: At_100uM_ABA_P Parameter: Treatment Value: 100uM ABA vs. No Treatment
  misc_feature: MA Experiment ID: 20000169 Result: Up-regulated in Transcription
  misc_feature: MA Experiment 20000169 PARAMETER Experiment Name: At_100uM_ABA_P Parameter: Age (day) Value: 14
  misc_feature: MA Experiment 20000169 PARAMETER Experiment Name: At_100uM_ABA_P Parameter: Organism Value: A. thaliana
  misc_feature: MA Experiment 20000169 PARAMETER Experiment Name: At_100uM_ABA_P Parameter: Plant Line Value: WS
  misc_feature: MA Experiment 20000169 PARAMETER Experiment Name: At_100uM_ABA_P Parameter: Timepoint (hr) Value: 6
  misc_feature: MA Experiment 20000169 PARAMETER Experiment Name: At_100uM_ABA_P Parameter: Tissue Value: Aerial
  misc_feature: MA Experiment 20000169 PARAMETER Experiment Name: At_100uM_ABA_P Parameter: Treatment Value: 100uM ABA vs. No Treatment
  misc_feature: MA Experiment ID: 20000182 Result: Up-regulated in Transcription
  misc_feature: MA Experiment 20000182 PARAMETER Experiment Name: At_2mM_SA_P Parameter: Age (day) Value: 14
  misc_feature: MA Experiment 20000182 PARAMETER Experiment Name: At_2mM_SA_P Parameter: Organism Value: A. thaliana
  misc_feature: MA Experiment 20000182 PARAMETER Experiment Name: At_2mM_SA_P Parameter: Plant Line Value: WS
  misc_feature: MA Experiment 20000182 PARAMETER Experiment Name: At_2mM_SA_P Parameter: Timepoint (hr) Value: 6
  misc_feature: MA Experiment 20000182 PARAMETER Experiment Name: At_2mM_SA_P Parameter: Tissue Value: Aerial
  misc_feature: MA Experiment 20000182 PARAMETER Experiment Name: At_2mM_SA_P Parameter: Treatment Value: 2mM SA vs. No Treatment
  misc_feature: MA Experiment ID: 20000184 Result: Down-regulated in Transcription
  misc_feature: MA Experiment 20000184 PARAMETER Experiment Name: At_Shoots__P Parameter: Age (day) Value: 7
  misc_feature: MA Experiment 20000184 PARAMETER Experiment Name: At_Shoots__P Parameter: Tissue Value: Shoots vs. Whole Plant
  misc_feature: MA Experiment ID: 20000185 Result: Down-regulated in Transcription
  misc_feature: MA Experiment 20000185 PARAMETER Experiment Name: At_Roots__P Parameter: Age (day) Value: 7 vs. 21
  misc_feature: MA Experiment 20000185 PARAMETER Experiment Name: At_Roots__P Parameter: Organism Value: A. thaliana
  misc_feature: MA Experiment 20000185 PARAMETER Experiment Name: At_Roots__P Parameter: Tissue Value: Roots vs. Whole Plant
  misc_feature: MA Experiment ID: 20000234 Result: Down-regulated in Transcription
  misc_feature: MA Experiment 20000234 PARAMETER Experiment Name: At_Siliques_P Parameter: Age (day) Value: 21
  misc_feature: MA Experiment 20000234 PARAMETER Experiment Name: At_Siliques_P Parameter: Organism Value: A. thaliana
  misc_feature: MA Experiment 20000234 PARAMETER Experiment Name: At_Siliques_P Parameter: Plant Line Value: WS
  misc_feature: MA Experiment 20000234 PARAMETER Experiment Name: At_Siliques_P Parameter: Tissue Value: Less Than 5mm Siliques vs. Whole Plant
  misc_feature: MA Experiment ID: 20000265 Result: Down-regulated in Transcription
  misc_feature: MA Experiment 20000265 PARAMETER Experiment Name: At_Open_Flower_P Parameter: Age (day) Value: 21
  misc_feature: MA Experiment 20000265 PARAMETER Experiment Name: At_Open_Flower_P Parameter: Plant Line Value: WS
  misc_feature: MA Experiment 20000265 PARAMETER Experiment Name: At_Open_Flower_P Parameter: Tissue Value: Closed Flower vs. Whole Plant
  misc_feature: MA Experiment ID: 20000267 Result: Up-regulated in Transcription
  misc_feature: MA Experiment 20000267 PARAMETER Experiment Name: At_Drought_P Parameter: Age (day) Value: 7
  misc_feature: MA Experiment 20000267 PARAMETER Experiment Name: At_Drought_P Parameter: Organism Value: A. thaliana
  misc_feature: MA Experiment 20000267 PARAMETER Experiment Name: At_Drought_P Parameter: Plant Line Value: WS
  misc_feature: MA Experiment 20000267 PARAMETER Experiment Name: At_Drought_P Parameter: Timepoint (hr) Value: 6
  misc_feature: MA Experiment 20000267 PARAMETER Experiment Name: At_Drought_P Parameter: Tissue Value: Whole Plant
  misc_feature: MA Experiment 20000267 PARAMETER Experiment Name: At_Drought_P Parameter: Treatment Value: Drought vs. No Drought
  misc_feature: MA Experiment ID: 20000268 Result: Up-regulated in Transcription
  misc_feature: MA Experiment 20000268 PARAMETER Experiment Name: At_100mM_NaCl__P Parameter: Age (day) Value: 14
  misc_feature: MA Experiment 20000268 PARAMETER Experiment Name: At_100mM_NaCl__P Parameter: Organism Value: A. thaliana
  misc_feature: MA Experiment 20000268 PARAMETER Experiment Name: At_100mM_NaCl__P Parameter: Plant Line Value: WS
  misc_feature: MA Experiment 20000268 PARAMETER Experiment Name: At_100mM_NaCl__P Parameter: Timepoint (hr) Value: 6
  misc_feature: MA Experiment 20000268 PARAMETER Experiment Name: At_100mM_NaCl__P Parameter: Tissue Value: Whole Plant
  misc_feature: MA Experiment 20000268 PARAMETER Experiment Name: At_100mM_NaCl__P Parameter: Treatment Value: 100mM NaCl vs. No Treatment
  misc_feature: MA Experiment ID: 20000288 Result: Down-regulated in Transcription
  misc_feature: MA Experiment 20000288 PARAMETER Experiment Name: At_Drought_P Parameter: Age (day) Value: 7
  misc_feature: MA Experiment 20000288 PARAMETER Experiment Name: At_Drought_P Parameter: Organism Value: A. thaliana
  misc_feature: MA Experiment 20000288 PARAMETER Experiment Name: At_Drought_P Parameter: Plant Line Value: WS
  misc_feature: MA Experiment 20000288 PARAMETER Experiment Name: At_Drought_P Parameter: Timepoint (hr) Value: 1
  misc_feature: MA Experiment 20000288 PARAMETER Experiment Name: At_Drought_P Parameter: Tissue Value: Whole Plant
  misc_feature: MA Experiment 20000288 PARAMETER Experiment Name: At_Drought_P Parameter: Treatment Value: Drought vs. No Drought
  misc_feature: MA Experiment ID: 20000436 Result: Up-regulated in Transcription
  misc_feature: MA Experiment 20000436 PARAMETER Experiment Name: At_Drought_P Parameter: Age (day) Value: 7
  misc_feature: MA Experiment 20000436 PARAMETER Experiment Name: At_Drought_P Parameter: Organism Value: A. thaliana
  misc_feature: MA Experiment 20000436 PARAMETER Experiment Name: At_Drought_P Parameter: Plant Line Value: WS
  misc_feature: MA Experiment 20000436 PARAMETER Experiment Name: At_Drought_P Parameter: Timepoint (hr) Value: 12
  misc_feature: MA Experiment 20000436 PARAMETER Experiment Name: At_Drought_P Parameter: Tissue Value: Whole Plant
  misc_feature: MA Experiment 20000436 PARAMETER Experiment Name: At_Drought_P Parameter: Treatment Value: Drought vs. No Drought
  misc_feature: MA Experiment ID: 20000437 Result: Up-regulated in Transcription
  misc_feature: MA Experiment 20000437 PARAMETER Experiment Name: At_Drought_P Parameter: Age (day) Value: 8
  misc_feature: MA Experiment 20000437 PARAMETER Experiment Name: At_Drought_P Parameter: Organism Value: A. thaliana
  misc_feature: MA Experiment 20000437 PARAMETER Experiment Name: At_Drought_P Parameter: Plant Line Value: WS
  misc_feature: MA Experiment 20000437 PARAMETER Experiment Name: At_Drought_P Parameter: Timepoint (hr) Value: 24
  misc_feature: MA Experiment 20000437 PARAMETER Experiment Name: At_Drought_P Parameter: Tissue Value: Whole Plant
  misc_feature: MA Experiment 20000437 PARAMETER Experiment Name: At_Drought_P Parameter: Treatment Value: Drought vs. No Drought
  misc_feature: MA Experiment ID: 20000438 Result: Down-regulated in Transcription
  misc_feature: MA Experiment 20000438 PARAMETER Experiment Name: At_Shoots__P Parameter: Age (day) Value: 14
  misc_feature: MA Experiment 20000438 PARAMETER Experiment Name: At_Shoots__P Parameter: Tissue Value: Shoots vs. Whole Plant
  misc_feature: MA Experiment ID: 20000439 Result: Down-regulated in Transcription
  misc_feature: MA Experiment 20000439 PARAMETER Experiment Name: At_Roots__P Parameter: Age (day) Value: 14 vs. 21
  misc_feature: MA Experiment 20000439 PARAMETER Experiment Name: At_Roots__P Parameter: Organism Value: A. thaliana
  misc_feature: MA Experiment 20000439 PARAMETER Experiment Name: At_Roots__P Parameter: Tissue Value: Roots vs. Whole Plant
  misc_feature: MA Experiment ID: 20000453 Result: Up-regulated in Transcription
  misc_feature: MA Experiment 20000453 PARAMETER Experiment Name: At_100uM_ABA_P Parameter: Age (day) Value: 15
  misc_feature: MA Experiment 20000453 PARAMETER Experiment Name: At_100uM_ABA_P Parameter: Organism Value: A. thaliana
  misc_feature: MA Experiment 20000453 PARAMETER Experiment Name: At_100uM_ABA_P Parameter: Plant Line Value: WS
  misc_feature: MA Experiment 20000453 PARAMETER Experiment Name: At_100uM_ABA_P Parameter: Timepoint (hr) Value: 24
  misc_feature: MA Experiment 20000453 PARAMETER Experiment Name: At_100uM_ABA_P Parameter: Tissue Value: Aerial
  misc_feature: MA Experiment 20000453 PARAMETER Experiment Name: At_100uM_ABA_P Parameter: Treatment Value: 100uM ABA vs. No Treatment
  misc_feature: MA Experiment ID: 20000455 Result: Up-regulated in Transcription
  misc_feature: MA Experiment 20000455 PARAMETER Experiment Name: At_100uM_ABA_P Parameter: Age (day) Value: 16
  misc_feature: MA Experiment 20000455 PARAMETER Experiment Name: At_100uM_ABA_P Parameter: Organism Value: A. thaliana
  misc_feature: MA Experiment 20000455 PARAMETER Experiment Name: At_100uM_ABA_P Parameter: Plant Line Value: WS
  misc_feature: MA Experiment 20000455 PARAMETER Experiment Name: At_100uM_ABA_P Parameter: Timepoint (hr) Value: 48
  misc_feature: MA Experiment 20000455 PARAMETER Experiment Name: At_100uM_ABA_P Parameter: Tissue Value: Aerial
  misc_feature: MA Experiment 20000455 PARAMETER Experiment Name: At_100uM_ABA_P Parameter: Treatment Value: 100uM ABA vs. No Treatment
  misc_feature: MA Experiment ID: 20000573 Result: Up-regulated in Transcription
  misc_feature: MA Experiment 20000573 PARAMETER Experiment Name: At_100uM_ABA_Mutants__P Parameter: Organism Value: A. thaliana
  misc_feature: MA Experiment 20000573 PARAMETER Experiment Name: At_100uM_ABA_Mutants__P Parameter: Plant Line Value: CS22 vs. Ler wt
  misc_feature: MA Experiment 20000573 PARAMETER Experiment Name: At_100uM_ABA_Mutants__P Parameter: Timepoint (hr) Value: N/A
  misc_feature: MA Experiment 20000573 PARAMETER Experiment Name: At_100uM_ABA_Mutants__P Parameter: Tissue Value: Whole Plant
  misc_feature: MA Experiment 20000573 PARAMETER Experiment Name: At_100uM_ABA_Mutants__P Parameter: Treatment Value: None
  misc_feature: MA Experiment ID: 20000574 Result: Up-regulated in Transcription
  misc_feature: MA Experiment 20000574 PARAMETER Experiment Name: At_100uM_ABA_Mutants__P Parameter: Organism Value: A. thaliana
  misc_feature: MA Experiment 20000574 PARAMETER Experiment Name: At_100uM_ABA_Mutants__P Parameter: Plant Line Value: CS23 vs. Ler wt
  misc_feature: MA Experiment 20000574 PARAMETER Experiment Name: At_100uM_ABA_Mutants__P Parameter: Timepoint (hr) Value: N/A
  misc_feature: MA Experiment 20000574 PARAMETER Experiment Name: At_100uM_ABA_Mutants__P Parameter: Tissue Value: Whole Plant
  misc_feature: MA Experiment 20000574 PARAMETER Experiment Name: At_100uM_ABA_Mutants__P Parameter: Treatment Value: None
  misc_feature: MA Experiment ID: 20001248 Result: Up-regulated in Transcription
  misc_feature: MA Experiment 20001248 PARAMETER Experiment Name: At_Far-red-induction_P Parameter: Age (day) Value: 7
  misc_feature: MA Experiment 20001248 PARAMETER Experiment Name: At_Far-red-induction_P Parameter: Light Value: Far-red vs. White
  misc_feature: MA Experiment 20001248 PARAMETER Experiment Name: At_Far-red-induction_P Parameter: Organism Value: A. thaliana
  misc_feature: MA Experiment 20001248 PARAMETER Experiment Name: At_Far-red-induction_P Parameter: Plant Line Value: Columbia
  misc_feature: MA Experiment 20001248 PARAMETER Experiment Name: At_Far-red-induction_P Parameter: Timepoint (hr) Value: 4
  misc_feature: MA Experiment 20001248 PARAMETER Experiment Name: At_Far-red-induction_P Parameter: Tissue Value: Whole Plant
  misc_feature: MA Experiment ID: 20001450 Result: Up-regulated in Transcription
  misc_feature: MA Experiment 20001450 PARAMETER Experiment Name: At_Far-red-induction_P Parameter: Age (day) Value: 7
  misc_feature: MA Experiment 20001450 PARAMETER Experiment Name: At_Far-red-induction_P Parameter: Light Value: Far-red vs. White
  misc_feature: MA Experiment 20001450 PARAMETER Experiment Name: At_Far-red-induction_P Parameter: Organism Value: A. thaliana
  misc_feature: MA Experiment 20001450 PARAMETER Experiment Name: At_Far-red-induction_P Parameter: Plant Line Value: Columbia
  misc_feature: MA Experiment 20001450 PARAMETER Experiment Name: At_Far-red-induction_P Parameter: Timepoint (hr) Value: 8
  misc_feature: MA Experiment 20001450 PARAMETER Experiment Name: At_Far-red-induction_P Parameter: Tissue Value: Whole Plant
  misc_feature: MA Experiment ID: 20001451 Result: Up-regulated in Transcription
  misc_feature: MA Experiment 20001451 PARAMETER Experiment Name: At_Far-red-induction_P Parameter: Age (day) Value: 7
  misc_feature: MA Experiment 20001451 PARAMETER Experiment Name: At_Far-red-induction_P Parameter: Light Value: Far-red vs. White
  misc_feature: MA Experiment 20001451 PARAMETER Experiment Name: At_Far-red-induction_P Parameter: Organism Value: A. thaliana
  misc_feature: MA Experiment 20001451 PARAMETER Experiment Name: At_Far-red-induction_P Parameter: Plant Line Value: Columbia
  misc_feature: MA Experiment 20001451 PARAMETER Experiment Name: At_Far-red-induction_P Parameter: Timepoint (hr) Value: 24
  misc_feature: MA Experiment 20001451 PARAMETER Experiment Name: At_Far-red-induction_P Parameter: Tissue Value: Whole Plant
  misc_feature: MA Experiment ID: 20001554 Result: Up-regulated in Transcription
  misc_feature: MA Experiment 20001554 PARAMETER Experiment Name: At_Drought_Soil_Dry_P Parameter: Age (day) Value: 21
  misc_feature: MA Experiment 20001554 PARAMETER Experiment Name: At_Drought_Soil_Dry_P Parameter: Organism Value: A. thaliana
  misc_feature: MA Experiment 20001554 PARAMETER Experiment Name: At_Drought_Soil_Dry_P Parameter: Plant Line Value: WS
  misc_feature: MA Experiment 20001554 PARAMETER Experiment Name: At_Drought_Soil_Dry_P Parameter: Post Timepoint (hr) Value: None
  misc_feature: MA Experiment 20001554 PARAMETER Experiment Name: At_Drought_Soil_Dry_P Parameter: Post-Treatment Value: None
  misc_feature: MA Experiment 20001554 PARAMETER Experiment Name: At_Drought_Soil_Dry_P Parameter: Timepoint (day) Value: 7
  misc_feature: MA Experiment 20001554 PARAMETER Experiment Name: At_Drought_Soil_Dry_P Parameter: Treatment Value: Drought vs. No Drought
  misc_feature: MA Experiment ID: 20001555 Result: Up-regulated in Transcription
  misc_feature: MA Experiment 20001555 PARAMETER Experiment Name: At_Drought_Soil_Dry_P Parameter: Age (day) Value: 24
  misc_feature: MA Experiment 20001555 PARAMETER Experiment Name: At_Drought_Soil_Dry_P Parameter: Organism Value: A. thaliana
  misc_feature: MA Experiment 20001555 PARAMETER Experiment Name: At_Drought_Soil_Dry_P Parameter: Plant Line Value: WS
  misc_feature: MA Experiment 20001555 PARAMETER Experiment Name: At_Drought_Soil_Dry_P Parameter: Post Timepoint (hr) Value: None
  misc_feature: MA Experiment 20001555 PARAMETER Experiment Name: At_Drought_Soil_Dry_P Parameter: Post-Treatment Value: None
  misc_feature: MA Experiment 20001555 PARAMETER Experiment Name: At_Drought_Soil_Dry_P Parameter: Timepoint (day) Value: 10
  misc_feature: MA Experiment 20001555 PARAMETER Experiment Name: At_Drought_Soil_Dry_P Parameter: Treatment Value: Drought vs. No Drought
  misc_feature: MA Experiment ID: 20001556 Result: Up-regulated in Transcription
  misc_feature: MA Experiment 20001556 PARAMETER Experiment Name: At_Drought_Soil_Dry_P Parameter: Age (day) Value: 26
  misc_feature: MA Experiment 20001556 PARAMETER Experiment Name: At_Drought_Soil_Dry_P Parameter: Organism Value: A. thaliana
  misc_feature: MA Experiment 20001556 PARAMETER Experiment Name: At_Drought_Soil_Dry_P Parameter: Plant Line Value: WS
  misc_feature: MA Experiment 20001556 PARAMETER Experiment Name: At_Drought_Soil_Dry_P Parameter: Post Timepoint (hr) Value: None
  misc_feature: MA Experiment 20001556 PARAMETER Experiment Name: At_Drought_Soil_Dry_P Parameter: Post-Treatment Value: None
  misc_feature: MA Experiment 20001556 PARAMETER Experiment Name: At_Drought_Soil_Dry_P Parameter: Timepoint (day) Value: 12
  misc_feature: MA Experiment 20001556 PARAMETER Experiment Name: At_Drought_Soil_Dry_P Parameter: Treatment Value: Drought vs. No Drought
  misc_feature: MA Experiment ID: 20001557 Result: Up-regulated in Transcription
  misc_feature: MA Experiment 20001557 PARAMETER Experiment Name: At_Drought_Soil_Dry_P Parameter: Age (day) Value: 27
  misc_feature: MA Experiment 20001557 PARAMETER Experiment Name: At_Drought_Soil_Dry_P Parameter: Organism Value: A. thaliana
  misc_feature: MA Experiment 20001557 PARAMETER Experiment Name: At_Drought_Soil_Dry_P Parameter: Plant Line Value: WS
  misc_feature: MA Experiment 20001557 PARAMETER Experiment Name: At_Drought_Soil_Dry_P Parameter: Post Timepoint (hr) Value: 3
  misc_feature: MA Experiment 20001557 PARAMETER Experiment Name: At_Drought_Soil_Dry_P Parameter: Post-Treatment Value: Re-Water vs. No Drought
  misc_feature: MA Experiment 20001557 PARAMETER Experiment Name: At_Drought_Soil_Dry_P Parameter: Timepoint (day) Value: 13
  misc_feature: MA Experiment 20001557 PARAMETER Experiment Name: At_Drought_Soil_Dry_P Parameter: Treatment Value: Drought vs. No Drought
  misc_feature: MA Experiment ID: 20001558 Result: Up-regulated in Transcription
  misc_feature: MA Experiment 20001558 PARAMETER Experiment Name: At_Drought_Soil_Dry_P Parameter: Age (day) Value: 27
  misc_feature: MA Experiment 20001558 PARAMETER Experiment Name: At_Drought_Soil_Dry_P Parameter: Organism Value: A. thaliana
  misc_feature: MA Experiment 20001558 PARAMETER Experiment Name: At_Drought_Soil_Dry_P Parameter: Plant Line Value: WS
  misc_feature: MA Experiment 20001558 PARAMETER Experiment Name: At_Drought_Soil_Dry_P Parameter: Post Timepoint (hr) Value: 6
  misc_feature: MA Experiment 20001558 PARAMETER Experiment Name: At_Drought_Soil_Dry_P Parameter: Post-Treatment Value: Re-Water vs. No Drought
  misc_feature: MA Experiment 20001558 PARAMETER Experiment Name: At_Drought_Soil_Dry_P Parameter: Timepoint (day) Value: 13
  misc_feature: MA Experiment 20001558 PARAMETER Experiment Name: At_Drought_Soil_Dry_P Parameter: Treatment Value: Drought vs. No Drought
  misc_feature: MA Experiment ID: 20001560 Result: Up-regulated in Transcription
  misc_feature: MA Experiment 20001560 PARAMETER Experiment Name: At_Drought_Soil_Dry_P Parameter: Age (day) Value: 28
  misc_feature: MA Experiment 20001560 PARAMETER Experiment Name: At_Drought_Soil_Dry_P Parameter: Organism Value: A. thaliana
  misc_feature: MA Experiment 20001560 PARAMETER Experiment Name: At_Drought_Soil_Dry_P Parameter: Plant Line Value: WS
  misc_feature: MA Experiment 20001560 PARAMETER Experiment Name: At_Drought_Soil_Dry_P Parameter: Post Timepoint (hr) Value: None
  misc_feature: MA Experiment 20001560 PARAMETER Experiment Name: At_Drought_Soil_Dry_P Parameter: Post-Treatment Value: None
  misc_feature: MA Experiment 20001560 PARAMETER Experiment Name: At_Drought_Soil_Dry_P Parameter: Timepoint (day) Value: 14
  misc_feature: MA Experiment 20001560 PARAMETER Experiment Name: At_Drought_Soil_Dry_P Parameter: Treatment Value: Drought vs. No Drought
  misc_feature: MA Experiment ID: 20001906 Result: Up-regulated in Transcription
  misc_feature: MA Experiment 20001906 PARAMETER Experiment Name: At_Drought_Reproduction_P Parameter: Age (day) Value: 35
  misc_feature: MA Experiment 20001906 PARAMETER Experiment Name: At_Drought_Reproduction_P Parameter: Organism Value: A. thaliana
  misc_feature: MA Experiment 20001906 PARAMETER Experiment Name: At_Drought_Reproduction_P Parameter: Plant Line Value: WS
  misc_feature: MA Experiment 20001906 PARAMETER Experiment Name: At_Drought_Reproduction_P Parameter: Timepoint (day) Value: 5
  misc_feature: MA Experiment 20001906 PARAMETER Experiment Name: At_Drought_Reproduction_P Parameter: Tissue Value: Siliques
  misc_feature: MA Experiment 20001906 PARAMETER Experiment Name: At_Drought_Reproduction_P Parameter: Treatment Value: Drought vs. No Drought
  misc_feature: MA Experiment ID: 20001908 Result: Up-regulated in Transcription
  misc_feature: MA Experiment 20001908 PARAMETER Experiment Name: At_Drought_Reproduction_P Parameter: Age (day) Value: 40
  misc_feature: MA Experiment 20001908 PARAMETER Experiment Name: At_Drought_Reproduction_P Parameter: Organism Value: A. thaliana
  misc_feature: MA Experiment 20001908 PARAMETER Experiment Name: At_Drought_Reproduction_P Parameter: Plant Line Value: WS
  misc_feature: MA Experiment 20001908 PARAMETER Experiment Name: At_Drought_Reproduction_P Parameter: Timepoint (day) Value: 10
  misc_feature: MA Experiment 20001908 PARAMETER Experiment Name: At_Drought_Reproduction_P Parameter: Tissue Value: Siliques
  misc_feature: MA Experiment 20001908 PARAMETER Experiment Name: At_Drought_Reproduction_P Parameter: Treatment Value: Drought vs. No Drought
  misc_feature: MA Experiment ID: 20001911 Result: Up-regulated in Transcription
  misc_feature: MA Experiment 20001911 PARAMETER Experiment Name: At_Drought_Reproduction_P Parameter: Age (day) Value: 40
  misc_feature: MA Experiment 20001911 PARAMETER Experiment Name: At_Drought_Reproduction_P Parameter: Organism Value: A. thaliana
  misc_feature: MA Experiment 20001911 PARAMETER Experiment Name: At_Drought_Reproduction_P Parameter: Plant Line Value: WS
  misc_feature: MA Experiment 20001911 PARAMETER Experiment Name: At_Drought_Reproduction_P Parameter: Timepoint (day) Value: 10
  misc_feature: MA Experiment 20001911 PARAMETER Experiment Name: At_Drought_Reproduction_P Parameter: Tissue Value: Flowers
  misc_feature: MA Experiment 20001911 PARAMETER Experiment Name: At_Drought_Reproduction_P Parameter: Treatment Value: Drought vs. No Drought
attcattatataggcgtatatttcggaattctaagttttgttgctacgatcgagccagcgttctgtttctgtacgtctctctgggtaagaaagaaaaaatgaaggacgaaacgggaaaccctctgcatatcaagtctttgaatcacatctctcttctctgtcgatccgtcgaggaatccattagcttttaccaaaacgttttagggttcctccctattcgcagacctgactcttttgatttcgatggcgcgtggttgtttggacatggaattgggattcatcttcttcaatctcctgaacctgagaaattactcaagaaaacagagattaatcccaaggataatcacatttctttccagtgcgaaagcatggaagcagtggagaagaagctcaaggagatggagatagagtatgtgagagcagtggttgaagaaggtggcatccaagtggaccaactcttcttccacgaccctgatgccttcatgatcgagatatgcaactgcgatagcctccccgttatccctctcgctggagaaatggctcgttcatgctctcgacttaatatccgccagctcgttcagccaactcagatccacccctagttctctctgtcttccctaatttctgttttcgtaaataatttcaagtgtccatgtgattgtctctttgattgcgtgtgaatataattgcatgtaataaacagctagtggtaagttgatgtgattcctcaaccgggaaaatgaccatttgcttcacactctagtctctctctaccattatttgagataccaaactctctctc

SEQ ID NO: 105916 - protein, 199 aa, Arabidopsis thaliana
  peptide (1)..(199): Ceres Seq. ID no. 13618320
  misc_feature (1)..(199): Homolog of NCBI NO: 25406639 NR Description: hypothetical protein F18B13.24 [imported] - thaliana >gi|5902371|gb|AAD55473.1|AC009322_13 Hypothetical
  misc_feature (33)..(199): Homolog of NCBI NO: 18412683 NR Description: glyoxalase family protein (lactoylglutathione family protein) [Arabidopsis thaliana]
  misc_feature (33)..(198): Homolog of NCBI NO: 18394235 NR Description: glyoxalase family protein (lactoylglutathione
  misc_feature (38)..(182): Homolog of NCBI NO: 34910246 NR Description: OSJNBa0089K24.9 [Oryza sativa (japonica
  misc_feature (29)..(174): Homolog of NCBI NO: 15529260 NR Description: At2g28420/T1B3.6 [Arabidopsis thaliana]
  misc_feature (29)..(174): Homolog of NCBI NO: 18401734 NR Description: glyoxalase family protein (lactoylglutathione family protein) [Arabidopsis thaliana] >gi|25407983|pir||F84684
  misc_feature (43)..(181): Homolog of NCBI NO: 34395261 NR Description: glyoxalase family-like protein [Oryza sativa
  misc_feature (43)..(181): Homolog of NCBI NO: 34899038 NR Description: hypothetical protein~similar to Arabidopsis
  misc_feature (46)..(175): Homolog of NCBI NO: 21740426 NR Description: OSJNBa0091D06.24 [Oryza sativa (japonica
  misc_feature (46)..(164): Homolog of NCBI NO: 15616434 NR Description: BH3872~unknown conserved protein in others
SLYRRIFRNSKFCCYDRASVLFLYVSLGKKEKMKDETGNPLHIKSLNHISLLCRSVEESISFYQNVLGFLPIRRPDSFDFDGAWLFGHGIGIHLLQSPEPEKLLKKTEINPKDNHISFQCESMEAVEKKLKEMEIEYVRAVVEEGGIQVDQLFFHDPDAFMIEICNCDSLPVIPLAGEMARSCSRLNIRQLVQPTQIHP

SEQ ID NO: 105917 - protein, 167 aa, Arabidopsis thaliana; identical to SEQ ID NO: 35082
  peptide (1)..(167): Ceres Seq. ID no. 13618321
  misc_feature (1)..(167): Homolog of NCBI NO: 25406639 NR Description: hypothetical protein F18B13.24 [imported] - thaliana >gi|5902371|gb|AAD55473.1|AC009322_13 Hypothetical
  misc_feature (1)..(167): Homolog of NCBI NO: 18412683 NR Description: glyoxalase family protein (lactoylglutathione family protein) [Arabidopsis thaliana]
  misc_feature (1)..(166): Homolog of NCBI NO: 18394235 NR Description: glyoxalase family protein (lactoylglutathione
  misc_feature (6)..(150): Homolog of NCBI NO: 34910246 NR Description: OSJNBa0089K24.9 [Oryza sativa (japonica
  misc_feature (1)..(142): Homolog of NCBI NO: 15529260 NR Description: At2g28420/T1B3.6 [Arabidopsis thaliana]
  misc_feature (1)..(142): Homolog of NCBI NO: 18401734 NR Description: glyoxalase family protein (lactoylglutathione family protein) [Arabidopsis thaliana] >gi|25407983|pir||F84684
  misc_feature (11)..(149): Homolog of NCBI NO: 34395261 NR Description: glyoxalase family-like protein [Oryza sativa
  misc_feature (11)..(149): Homolog of NCBI NO: 34899038 NR Description: hypothetical protein~similar to Arabidopsis
  misc_feature (14)..(143): Homolog of NCBI NO: 21740426 NR Description: OSJNBa0091D06.24 [Oryza sativa (japonica
  misc_feature (14)..(132): Homolog of NCBI NO: 15616434 NR Description: BH3872~unknown conserved protein in others

SEQ ID NO: 105918 - DNA, 1280 bp, Arabidopsis thaliana
  misc_feature (1)..(1280): Ceres Seq. ID no. 13618330
  misc_feature: MA Experiment ID: 108434 Result: Down-regulated in Transcription
  misc_feature: MA Experiment 108434 PARAMETER Experiment Name: At_Root_Tips_cDNA_P Parameter: Tissue Value: Root Tips
  misc_feature: MA Experiment ID: 108488 Result: Up-regulated in Transcription
  misc_feature: MA Experiment ID: 108569 Result: Up-regulated in Transcription
  misc_feature: MA Experiment 108569 PARAMETER Experiment Name: At_0.001%_MeJA__cDNA_P Parameter: Timepoint (hr) Value: 6
  misc_feature: MA Experiment 108569 PARAMETER Experiment Name: At_0.001%_MeJA__cDNA_P Parameter: Tissue Value: Aerial
  misc_feature: MA Experiment 108569 PARAMETER Experiment Name: At_0.001%_MeJA__cDNA_P Parameter: Treatment Value: 0.001% MeJA vs. No Treatment
  misc_feature: MA Experiment ID: 108573 Result: Down-regulated in Transcription
  misc_feature: MA Experiment 108573 PARAMETER Experiment Name: At_Drought_cDNA_P Parameter: Timepoint (hr) Value: 6
  misc_feature: MA Experiment 108573 PARAMETER Experiment Name: At_Drought_cDNA_P Parameter: Tissue Value: Aerial
  misc_feature: MA Experiment 108573 PARAMETER Experiment Name: At_Drought_cDNA_P Parameter: Treatment Value: Drought vs. No Drought
  misc_feature: MA Experiment ID: 108576 Result: Down-regulated in Transcription
  misc_feature: MA Experiment 108576 PARAMETER Experiment Name: At_42deg_Heat_cDNA_P Parameter: Temperature (deg C) Value: 42 vs. 22
  misc_feature: MA Experiment 108576 PARAMETER Experiment Name: At_42deg_Heat_cDNA_P Parameter: Timepoint (hr) Value: 1
  misc_feature: MA Experiment 108576 PARAMETER Experiment Name: At_42deg_Heat_cDNA_P Parameter: Tissue Value: Aerial
  misc_feature: MA Experiment ID: 108577 Result: Down-regulated in Transcription
  misc_feature: MA Experiment 108577 PARAMETER Experiment Name: At_42deg_Heat_cDNA_P Parameter: Temperature (deg C) Value: 42 vs. 22
  misc_feature: MA Experiment 108577 PARAMETER Experiment Name: At_42deg_Heat_cDNA_P Parameter: Timepoint (hr) Value: 6
  misc_feature: MA Experiment 108577 PARAMETER Experiment Name: At_42deg_Heat_cDNA_P Parameter: Tissue Value: Aerial
  misc_feature: MA Experiment ID: 108585 Result: Down-regulated in Transcription
  misc_feature: MA Experiment 108585 PARAMETER Experiment Name: At_5mM_NaNP_cDNA_P Parameter: Timepoint (hr) Value: 6
  misc_feature: MA Experiment 108585 PARAMETER Experiment Name: At_5mM_NaNP_cDNA_P Parameter: Tissue Value: Aerial
  misc_feature: MA Experiment 108585 PARAMETER Experiment Name: At_5mM_NaNP_cDNA_P Parameter: Treatment Value: null
  misc_feature: MA Experiment ID: 108595 Result: Down-regulated in Transcription
  misc_feature: MA Experiment 108595 PARAMETER Experiment Name: At_Ler-pi_Ovule_cDNA_P Parameter: Plant Line Value: null
  misc_feature: MA Experiment ID: 108668 Result: Down-regulated in Transcription
  misc_feature: MA Experiment 108668 PARAMETER Experiment Name: At_2mM_SA_cDNA_P Parameter: Plant Line Value: WS
  misc_feature: MA Experiment 108668 PARAMETER Experiment Name: At_2mM_SA_cDNA_P Parameter: Timepoint (hr) Value: 6
  misc_feature: MA Experiment 108668 PARAMETER Experiment Name: At_2mM_SA_cDNA_P Parameter: Treatment Value: 2mM SA vs. No Treatment
  misc_feature: MA Experiment ID: 20000090 Result: Down-regulated in Transcription
  misc_feature: MA Experiment ID: 20000112 Result: Down-regulated in Transcription
  misc_feature: MA Experiment 20000112 PARAMETER Experiment Name: At_42deg_Heat_cDNA_P Parameter: Temperature (deg C) Value: 42 vs. 22
  misc_feature: MA Experiment 20000112 PARAMETER Experiment Name: At_42deg_Heat_cDNA_P Parameter: Timepoint (hr) Value: 2
  misc_feature: MA Experiment 20000112 PARAMETER Experiment Name: At_42deg_Heat_cDNA_P Parameter: Tissue Value: Aerial
  misc_feature: MA Experiment ID: 20000113 Result: Down-regulated in Transcription
  misc_feature: MA Experiment 20000113 PARAMETER Experiment Name: At_42deg_Heat_cDNA_P Parameter: Temperature (deg C) Value: 42 vs. 22
  misc_feature: MA Experiment 20000113 PARAMETER Experiment Name: At_42deg_Heat_cDNA_P Parameter: Timepoint (hr) Value: 8
  misc_feature: MA Experiment 20000113 PARAMETER Experiment Name: At_42deg_Heat_cDNA_P Parameter: Tissue Value: Aerial
  misc_feature: MA Experiment ID: 20000171 Result: Down-regulated in Transcription
  misc_feature: MA Experiment 20000171 PARAMETER Experiment Name: At_42deg_Heat_P Parameter: Age (day) Value: 14
  misc_feature: MA Experiment 20000171 PARAMETER Experiment Name: At_42deg_Heat_P Parameter: Organism Value: A. thaliana
  misc_feature: MA Experiment 20000171 PARAMETER Experiment Name: At_42deg_Heat_P Parameter: Plant Line Value: WS
  misc_feature: MA Experiment 20000171 PARAMETER Experiment Name: At_42deg_Heat_P Parameter: Temperature (deg C) Value: 42 vs. 22
  misc_feature: MA Experiment 20000171 PARAMETER Experiment Name: At_42deg_Heat_P Parameter: Timepoint (hr) Value: 1
  misc_feature: MA Experiment 20000171 PARAMETER Experiment Name: At_42deg_Heat_P Parameter: Tissue Value: Aerial
  misc_feature: MA Experiment ID: 20000173 Result: Down-regulated in Transcription
  misc_feature: MA Experiment 20000173 PARAMETER Experiment Name: At_42deg_Heat_P Parameter: Age (day) Value: 14
  misc_feature: MA Experiment 20000173 PARAMETER Experiment Name: At_42deg_Heat_P Parameter: Organism Value: A. thaliana
  misc_feature: MA Experiment 20000173 PARAMETER Experiment Name: At_42deg_Heat_P Parameter: Plant Line Value: WS
  misc_feature: MA Experiment 20000173 PARAMETER Experiment Name: At_42deg_Heat_P Parameter: Temperature (deg C) Value: 42 vs. 22
  misc_feature: MA Experiment 20000173 PARAMETER Experiment Name: At_42deg_Heat_P Parameter: Timepoint (hr) Value: 6
  misc_feature: MA Experiment 20000173 PARAMETER Experiment Name: At_42deg_Heat_P Parameter: Tissue Value: Aerial
  misc_feature: MA Experiment ID: 20000182 Result: Down-regulated in Transcription
  misc_feature: MA Experiment 20000182 PARAMETER Experiment Name: At_2mM_SA_P Parameter: Age (day) Value: 14
  misc_feature: MA Experiment 20000182 PARAMETER Experiment Name: At_2mM_SA_P Parameter: Organism Value: A. thaliana
  misc_feature: MA Experiment 20000182 PARAMETER Experiment Name: At_2mM_SA_P Parameter: Plant Line Value: WS
  misc_feature: MA Experiment 20000182 PARAMETER Experiment Name: At_2mM_SA_P Parameter: Timepoint (hr) Value: 6
  misc_feature: MA Experiment 20000182 PARAMETER Experiment Name: At_2mM_SA_P Parameter: Tissue Value: Aerial
  misc_feature: MA Experiment 20000182 PARAMETER Experiment Name: At_2mM_SA_P Parameter: Treatment Value: 2mM SA vs. No Treatment
  misc_feature: MA Experiment ID: 20000224 Result: Up-regulated in Transcription
  misc_feature: MA Experiment ID: 20000265 Result: Down-regulated in Transcription
  misc_feature: MA Experiment 20000265 PARAMETER Experiment Name: At_Open_Flower_P Parameter: Age (day) Value: 21
  misc_feature: MA Experiment 20000265 PARAMETER Experiment Name: At_Open_Flower_P Parameter: Plant Line Value: WS
  misc_feature: MA Experiment 20000265 PARAMETER Experiment Name: At_Open_Flower_P Parameter: Tissue Value: Closed Flower vs. Whole Plant
  misc_feature: MA Experiment ID: 20000437 Result: Down-regulated in Transcription
  misc_feature: MA Experiment 20000437 PARAMETER Experiment Name: At_Drought_P Parameter: Age (day) Value: 8
  misc_feature: MA Experiment 20000437 PARAMETER Experiment Name: At_Drought_P Parameter: Organism Value: A. thaliana
  misc_feature: MA Experiment 20000437 PARAMETER Experiment Name: At_Drought_P Parameter: Plant Line Value: WS
  misc_feature: MA Experiment 20000437 PARAMETER Experiment Name: At_Drought_P Parameter: Timepoint (hr) Value: 24
  misc_feature: MA Experiment 20000437 PARAMETER Experiment Name: At_Drought_P Parameter: Tissue Value: Whole Plant
  misc_feature: MA Experiment 20000437 PARAMETER Experiment Name: At_Drought_P Parameter: Treatment Value: Drought vs. No Drought
  misc_feature: MA Experiment ID: 20000495 Result: Up-regulated in Transcription
  misc_feature: MA Experiment 20000495 PARAMETER Experiment Name: At_Guard_Cells_P Parameter: Harvest Date Value: 8/2/2002
  misc_feature: MA Experiment 20000495 PARAMETER Experiment Name: At_Guard_Cells_P Parameter: Organism Value: A. thaliana
  misc_feature: MA Experiment 20000495 PARAMETER Experiment Name: At_Guard_Cells_P Parameter: Tissue Value: Guard Cells vs. Leaves
  misc_feature: MA Experiment ID: 20001247 Result: Down-regulated in Transcription
  misc_feature: MA Experiment 20001247 PARAMETER Experiment Name: At_Far-red-induction_P Parameter: Age (day) Value: 7
  misc_feature: MA Experiment 20001247 PARAMETER Experiment Name: At_Far-red-induction_P Parameter: Light Value: Far-red vs. White
  misc_feature: MA Experiment 20001247 PARAMETER Experiment Name: At_Far-red-induction_P Parameter: Organism Value: A. thaliana
  misc_feature: MA Experiment 20001247 PARAMETER Experiment Name: At_Far-red-induction_P Parameter: Plant Line Value: Columbia
  misc_feature: MA Experiment 20001247 PARAMETER Experiment Name: At_Far-red-induction_P Parameter: Timepoint (hr) Value: 1
  misc_feature: MA Experiment 20001247 PARAMETER Experiment Name: At_Far-red-induction_P Parameter: Tissue Value: Whole Plant
  misc_feature: MA Experiment ID: 20001248 Result: Down-regulated in Transcription
  misc_feature: MA Experiment 20001248 PARAMETER Experiment Name: At_Far-red-induction_P Parameter: Age (day) Value: 7
  misc_feature: MA Experiment 20001248 PARAMETER Experiment Name: At_Far-red-induction_P Parameter: Light Value: Far-red vs. White
  misc_feature: MA Experiment 20001248 PARAMETER Experiment Name: At_Far-red-induction_P Parameter: Organism Value: A. thaliana
  misc_feature: MA Experiment 20001248 PARAMETER Experiment Name: At_Far-red-induction_P Parameter: Plant Line Value: Columbia
  misc_feature: MA Experiment 20001248 PARAMETER Experiment Name: At_Far-red-induction_P Parameter: Timepoint (hr) Value: 4
  misc_feature: MA Experiment 20001248 PARAMETER Experiment Name: At_Far-red-induction_P Parameter: Tissue Value: Whole Plant
  misc_feature: MA Experiment ID: 20001450 Result: Down-regulated in Transcription
  misc_feature: MA Experiment 20001450 PARAMETER Experiment Name: At_Far-red-induction_P Parameter: Age (day) Value: 7
  misc_feature: MA Experiment 20001450 PARAMETER Experiment Name: At_Far-red-induction_P Parameter: Light Value: Far-red vs. White
  misc_feature: MA Experiment 20001450 PARAMETER Experiment Name: At_Far-red-induction_P Parameter: Organism Value: A. thaliana
  misc_feature: MA Experiment 20001450 PARAMETER Experiment Name: At_Far-red-induction_P Parameter: Plant Line Value: Columbia
  misc_feature: MA Experiment 20001450 PARAMETER Experiment Name: At_Far-red-induction_P Parameter: Timepoint (hr) Value: 8
  misc_feature: MA Experiment 20001450 PARAMETER Experiment Name: At_Far-red-induction_P Parameter: Tissue Value: Whole Plant
  misc_feature: MA Experiment ID: 20001451 Result: Down-regulated in Transcription
  misc_feature: MA Experiment 20001451 PARAMETER Experiment Name: At_Far-red-induction_P Parameter: Age (day) Value: 7
  misc_feature: MA Experiment 20001451 PARAMETER Experiment Name: At_Far-red-induction_P Parameter: Light Value: Far-red vs. White
  misc_feature: MA Experiment 20001451 PARAMETER Experiment Name: At_Far-red-induction_P Parameter: Organism Value: A. thaliana
  misc_feature: MA Experiment 20001451 PARAMETER Experiment Name: At_Far-red-induction_P Parameter: Plant Line Value: Columbia
  misc_feature: MA Experiment 20001451 PARAMETER Experiment Name: At_Far-red-induction_P Parameter: Timepoint (hr) Value: 24
  misc_feature: MA Experiment 20001451 PARAMETER Experiment Name: At_Far-red-induction_P Parameter: Tissue Value: Whole Plant
  misc_feature: MA Experiment ID: 20001457 Result: Down-regulated in Transcription
  misc_feature: MA Experiment 20001457 PARAMETER Experiment Name: At_50mM_NH4NO3_L-to-H_P Parameter: Age (day) Value: Undefined
  misc_feature: MA Experiment 20001457 PARAMETER Experiment Name: At_50mM_NH4NO3_L-to-H_P Parameter: Organism Value: Undefined
  misc_feature: MA Experiment 20001457 PARAMETER Experiment Name: At_50mM_NH4NO3_L-to-H_P Parameter: Plant Line Value: Undefined
  misc_feature: MA Experiment 20001457 PARAMETER Experiment Name: At_50mM_NH4NO3_L-to-H_P Parameter: Timepoint (hr) Value: 0.5
  misc_feature: MA Experiment 20001457 PARAMETER Experiment Name: At_50mM_NH4NO3_L-to-H_P Parameter: Tissue Value: Siliques
  misc_feature: MA Experiment 20001457 PARAMETER Experiment Name: At_50mM_NH4NO3_L-to-H_P Parameter: Treatment Value: 50mM NH4NO3 vs. 100mM Manitol
  misc_feature: MA Experiment ID: 20001905 Result: Down-regulated in Transcription
  misc_feature: MA Experiment 20001905 PARAMETER Experiment Name: At_Drought_Reproduction_P Parameter: Age (day) Value: 40
  misc_feature: MA Experiment 20001905 PARAMETER Experiment Name: At_Drought_Reproduction_P Parameter: Organism Value: A. thaliana
  misc_feature: MA Experiment 20001905 PARAMETER Experiment Name: At_Drought_Reproduction_P Parameter: Plant Line Value: WS
  misc_feature: MA Experiment 20001905 PARAMETER Experiment Name: At_Drought_Reproduction_P Parameter: Timepoint (day) Value: 10
  misc_feature: MA Experiment 20001905 PARAMETER Experiment Name: At_Drought_Reproduction_P Parameter: Tissue Value: Rosettes
  misc_feature: MA Experiment 20001905 PARAMETER Experiment Name: At_Drought_Reproduction_P Parameter: Treatment Value: Drought vs. No Drought
aaagccaatctgatctttgtccaaacacagaccatcatcactcatttcctacagaactcagcacaattctttcaaattctctttctaatcttcaatggaatcagaaaccctaaccgccaaggctacgatcacgaccacgaccctaccgagtcacgacgagaccaagacagaatcaacagagttcgagaaaaatcaaaaacggtatcaagacctcatctccacgtttcctcacgagaaaggctggagaccgaaagagcccctgatcgagtatggtggttactggtggctaccgtctctcctcgaaggttgtattcacgcgcaagagttctttcaagcacgacccagtgacttcctcgtctgtagctacccaaagacaggcaccacttggctcaaagccctgactttcgccatcgcaaatcgttcccgcttcgatgattcctccaaccctctcctgaaacgtaaccctcacgagtttgttccttacattgagatagatttccctttcttccctgaagttgatgttctcaaagacaaagggaacactctgttttcgactcatatcccatacgagttattacctgattcggttgtgaaatccggttgtaagatggtttacatatggagagaaccaaaggacactttcatctccatgtggactttccttcacaaggaaaggacagagcttggacctgtcagcaatcttgaggagtcttttgatatgttctgtcgtggtctgtctgggtatggtccttatcttaatcatatcctggcgtattggaaagcataccaagagaatccagataggatcttgttcctcaagtacgagacgatgagagctgatcctttaccgtacgtgaagagtctggctgagtttatgggtcatggattcacagccgaggaagaggagaaaggtgttgttgagaaagtggtgaatctttgcagcttcgagacgttgaagaatcttgaagctaacaaaggggagaaagacagagaggatcgtcctggtgtttacgcgaatagcgcgtatttcaggaaaggaaaggtgggagattggtcgaactatctgactccggagatggctgctcgtatagatgggttaatggaagagaaatttaagggcaccggcttgcttgaacatggtaaatgaatgactaactcttgttccgagcaatgactgatctttatatgctttgtttacaacataagtttgcttcttatgttagtatggctccaaaatgtattaagttatatagtggaagaataaatgttgcttgtgtttc

SEQ ID NO: 105919 - protein, 350 aa, Arabidopsis thaliana; identical to SEQ ID NO: 25619
  peptide (1)..(350): Ceres Seq. ID no. 13618331
  misc_feature (83)..(344): Pfam Name: Sulfotransferase domain Pfam Description: Sulfotransferase domain
  misc_feature (1)..(350): Homolog of NCBI NO: 15221130 NR Description: sulfotransferase family [Arabidopsis thaliana]
  misc_feature (1)..(350): Homolog of NCBI NO: 21593660 NR Description: putative flavonol sulfotransferase [Arabidopsis
  misc_feature (1)..(346): Homolog of NCBI NO: 15221820 NR Description: sulfotransferase family [Arabidopsis thaliana]
  misc_feature (26)..(348): Homolog of NCBI NO: 21593087 NR Description: putative flavonol sulfotransferase [Arabidopsis
  misc_feature (26)..(348): Homolog of NCBI NO: 15221131 NR Description: sulfotransferase family [Arabidopsis thaliana]
  misc_feature (24)..(346): Homolog of NCBI NO: 1706740 NR Description: FLAVONOL 4'-SULFOTRANSFERASE (F4-ST)
  misc_feature (24)..(346): Homolog of NCBI NO: 285286 NR Description: flavonol 4'-sulfotransferase - Flaveria
  misc_feature (38)..(346): Homolog of NCBI NO: 1706918 NR Description: FLAVONOL SULFOTRANSFERASE-LIKE
  misc_feature (38)..(346): Homolog of NCBI NO: 4321096 NR Description: flavonol 3-sulfotransferase [Flaveria
  misc_feature (40)..(345): Homolog of NCBI NO: 15230602 NR Description: sulfotransferase family [Arabidopsis thaliana]

SEQ ID NO: 105920 - protein, 179 aa, Arabidopsis thaliana; identical to SEQ ID NO: 25620
  peptide (1)..(179): Ceres Seq. ID no. 13618332
  misc_feature (1)..(173): Pfam Name: Sulfotransferase domain Pfam Description: Sulfotransferase domain
  misc_feature (1)..(179): Homolog of NCBI NO: 15221130 NR Description: sulfotransferase family [Arabidopsis thaliana]
  misc_feature (1)..(179): Homolog of NCBI NO: 21593660 NR Description: putative flavonol sulfotransferase [Arabidopsis
  misc_feature (1)..(175): Homolog of NCBI NO: 15221820 NR Description: sulfotransferase family [Arabidopsis thaliana]
  misc_feature (1)..(177): Homolog of NCBI NO: 21593087 NR Description: putative flavonol sulfotransferase [Arabidopsis
  misc_feature (1)..(177): Homolog of NCBI NO: 15221131 NR Description: sulfotransferase family [Arabidopsis thaliana]
  misc_feature (1)..(175): Homolog of NCBI NO: 1706740 NR Description: FLAVONOL 4'-SULFOTRANSFERASE (F4-ST)
  misc_feature (1)..(175): Homolog of NCBI NO: 285286 NR Description: flavonol 4'-sulfotransferase - Flaveria
  misc_feature (1)..(175): Homolog of NCBI NO: 1706918 NR Description: FLAVONOL SULFOTRANSFERASE-LIKE
  misc_feature (1)..(175): Homolog of NCBI NO: 4321096 NR Description: flavonol 3-sulfotransferase [Flaveria
  misc_feature (1)..(174): Homolog of NCBI NO: 15230602 NR Description: sulfotransferase family [Arabidopsis thaliana]

SEQ ID NO: 105921 - DNA, 1346 bp, Arabidopsis thaliana
  misc_feature (1)..(1346): Ceres Seq. ID no. 13618333
  misc_feature: MA Experiment ID: 108434 Result: Down-regulated in Transcription
  misc_feature: MA Experiment 108434 PARAMETER Experiment Name: At_Root_Tips_cDNA_P Parameter: Tissue Value: Root Tips
  misc_feature: MA Experiment ID: 108569 Result: Up-regulated in Transcription
  misc_feature: MA Experiment 108569 PARAMETER Experiment Name: At_0.001%_MeJA__cDNA_P Parameter: Timepoint (hr) Value: 6
  misc_feature: MA Experiment 108569 PARAMETER Experiment Name: At_0.001%_MeJA__cDNA_P Parameter: Tissue Value: Aerial
  misc_feature: MA Experiment 108569 PARAMETER Experiment Name: At_0.001%_MeJA__cDNA_P Parameter: Treatment Value: 0.001% MeJA vs. No Treatment
  misc_feature: MA Experiment ID: 108574 Result: Up-regulated in Transcription
  misc_feature: MA Experiment 108574 PARAMETER Experiment Name: At_Wounding__cDNA_P Parameter: Timepoint (hr) Value: 1
  misc_feature: MA Experiment 108574 PARAMETER Experiment Name: At_Wounding__cDNA_P Parameter: Tissue Value: Aerial
  misc_feature: MA Experiment 108574 PARAMETER Experiment Name: At_Wounding__cDNA_P Parameter: Treatment Value: Wounding vs. No Wounding
  misc_feature: MA Experiment ID: 108576 Result: Down-regulated in Transcription
  misc_feature: MA Experiment 108576 PARAMETER Experiment Name: At_42deg_Heat_cDNA_P Parameter: Temperature (deg C) Value: 42 vs. 22
  misc_feature: MA Experiment 108576 PARAMETER Experiment Name: At_42deg_Heat_cDNA_P Parameter: Timepoint (hr) Value: 1
  misc_feature: MA Experiment 108576 PARAMETER Experiment Name: At_42deg_Heat_cDNA_P Parameter: Tissue Value: Aerial
  misc_feature: MA Experiment ID: 108577 Result: Down-regulated in Transcription
  misc_feature: MA Experiment 108577 PARAMETER Experiment Name: At_42deg_Heat_cDNA_P Parameter: Temperature (deg C) Value: 42 vs. 22
  misc_feature: MA Experiment 108577 PARAMETER Experiment Name: At_42deg_Heat_cDNA_P Parameter: Timepoint (hr) Value: 6
  misc_feature: MA Experiment 108577 PARAMETER Experiment Name: At_42deg_Heat_cDNA_P Parameter: Tissue Value: Aerial
  misc_feature: MA Experiment ID: 20000093 Result: Down-regulated in Transcription
  misc_feature: MA Experiment 20000093 PARAMETER Experiment Name: At_42deg_Heat_cDNA_P Parameter: Temperature (deg C) Value: 42 vs. 22
  misc_feature: MA Experiment 20000093 PARAMETER Experiment Name: At_42deg_Heat_cDNA_P Parameter: Timepoint (hr) Value: 0.5
  misc_feature: MA Experiment 20000093 PARAMETER Experiment Name: At_42deg_Heat_cDNA_P Parameter: Tissue Value: Aerial
  misc_feature: MA Experiment ID: 20000112 Result: Down-regulated in Transcription
  misc_feature: MA Experiment 20000112 PARAMETER Experiment Name: At_42deg_Heat_cDNA_P Parameter: Temperature (deg C) Value: 42 vs. 22
  misc_feature: MA Experiment 20000112 PARAMETER Experiment Name: At_42deg_Heat_cDNA_P Parameter: Timepoint (hr) Value: 2
  misc_feature: MA Experiment 20000112 PARAMETER Experiment Name: At_42deg_Heat_cDNA_P Parameter: Tissue Value: Aerial
  misc_feature: MA Experiment ID: 20000113 Result: Down-regulated in Transcription
  misc_feature: MA Experiment 20000113 PARAMETER Experiment Name: At_42deg_Heat_cDNA_P Parameter: Temperature (deg C) Value: 42 vs. 22
  misc_feature: MA Experiment 20000113 PARAMETER Experiment Name: At_42deg_Heat_cDNA_P Parameter: Timepoint (hr) Value: 8
  misc_feature: MA Experiment 20000113 PARAMETER Experiment Name: At_42deg_Heat_cDNA_P Parameter: Tissue Value: Aerial
  misc_feature: MA Experiment ID: 20000144 Result: Down-regulated in Transcription
  misc_feature: MA Experiment 20000144 PARAMETER Experiment Name: At_42deg_Heat_cDNA_P Parameter: Temperature (deg C) Value: 42 vs. 22
  misc_feature: MA Experiment 20000144 PARAMETER Experiment Name: At_42deg_Heat_cDNA_P Parameter: Timepoint (hr) Value: 1
  misc_feature: MA Experiment 20000144 PARAMETER Experiment Name: At_42deg_Heat_cDNA_P Parameter: Tissue Value: Aerial
  misc_feature: MA Experiment ID: 20000173 Result: Down-regulated in Transcription
  misc_feature: MA Experiment 20000173 PARAMETER Experiment Name: At_42deg_Heat_P Parameter: Age (day) Value: 14
  misc_feature: MA Experiment 20000173 PARAMETER Experiment Name: At_42deg_Heat_P Parameter: Organism Value: A. thaliana
  misc_feature: MA Experiment 20000173 PARAMETER Experiment Name: At_42deg_Heat_P Parameter: Plant Line Value: WS
  misc_feature: MA Experiment 20000173 PARAMETER Experiment Name: At_42deg_Heat_P Parameter: Temperature (deg C) Value: 42 vs. 22
  misc_feature: MA Experiment 20000173 PARAMETER Experiment Name: At_42deg_Heat_P Parameter: Timepoint (hr) Value: 6
  misc_feature: MA Experiment 20000173 PARAMETER Experiment Name: At_42deg_Heat_P Parameter: Tissue Value: Aerial
  misc_feature: MA Experiment ID: 20000211 Result: Up-regulated in Transcription
  misc_feature: MA Experiment 20000211 PARAMETER Experiment Name: At_0.001percent_MeJA__P Parameter: Age (day) Value: 14
  misc_feature: MA Experiment 20000211 PARAMETER Experiment Name: At_0.001percent_MeJA__P Parameter: Organism Value: A. thaliana
  misc_feature: MA Experiment 20000211 PARAMETER Experiment Name: At_0.001percent_MeJA__P Parameter: Plant Line Value: WS
  misc_feature: MA Experiment 20000211 PARAMETER Experiment Name: At_0.001percent_MeJA__P Parameter: Timepoint (hr) Value: 1
  misc_feature: MA Experiment 20000211 PARAMETER Experiment Name: At_0.001percent_MeJA__P Parameter: Tissue Value: Aerial
  misc_feature: MA Experiment 20000211 PARAMETER Experiment Name: At_0.001percent_MeJA__P Parameter: Treatment Value: 0.001percent MeJA vs. No Treatment
  misc_feature: MA Experiment ID: 20000234 Result: Down-regulated in Transcription
  misc_feature: MA Experiment 20000234 PARAMETER Experiment Name: At_Siliques_P Parameter: Age (day) Value: 21
  misc_feature: MA Experiment 20000234 PARAMETER Experiment Name: At_Siliques_P Parameter: Organism Value: A. thaliana
  misc_feature: MA Experiment 20000234 PARAMETER Experiment Name: At_Siliques_P Parameter: Plant Line Value: WS
  misc_feature: MA Experiment 20000234 PARAMETER Experiment Name: At_Siliques_P Parameter: Tissue Value: Less Than 5mm Siliques vs. Whole Plant
  misc_feature: MA Experiment ID: 20000235 Result: Down-regulated in Transcription
  misc_feature: MA Experiment 20000235 PARAMETER Experiment Name: At_Siliques_P Parameter: Age (day) Value: 21
  misc_feature: MA Experiment 20000235 PARAMETER Experiment Name: At_Siliques_P Parameter: Organism Value: A. thaliana
  misc_feature: MA Experiment 20000235 PARAMETER Experiment Name: At_Siliques_P Parameter: Plant Line Value: WS
  misc_feature: MA Experiment 20000235 PARAMETER Experiment Name: At_Siliques_P Parameter: Tissue Value: 5-10mm Siliques vs. Whole Plant
  misc_feature: MA Experiment ID: 20000264 Result: Down-regulated in Transcription
  misc_feature: MA Experiment 20000264 PARAMETER Experiment Name: At_Open_Flower_P Parameter: Age (day) Value: 21
  misc_feature: MA Experiment 20000264 PARAMETER Experiment Name: At_Open_Flower_P Parameter: Plant Line Value: WS
  misc_feature: MA Experiment 20000264 PARAMETER Experiment Name: At_Open_Flower_P Parameter: Tissue Value: Open Flower vs. Whole Plant
  misc_feature: MA Experiment ID: 20000265 Result: Down-regulated in Transcription
  misc_feature: MA Experiment 20000265 PARAMETER Experiment Name: At_Open_Flower_P Parameter: Age (day) Value: 21
  misc_feature: MA Experiment 20000265 PARAMETER Experiment Name: At_Open_Flower_P Parameter: Plant Line Value: WS
  misc_feature: MA Experiment 20000265 PARAMETER Experiment Name: At_Open_Flower_P Parameter: Tissue Value: Closed Flower vs. Whole Plant
  misc_feature: MA Experiment ID: 20000286 Result: Down-regulated in Transcription
  misc_feature: MA Experiment 20000286 PARAMETER Experiment Name: At_Open_Flower_P Parameter: Age (day) Value: 21
  misc_feature: MA Experiment 20000286 PARAMETER Experiment Name: At_Open_Flower_P Parameter: Plant Line Value: WS
  misc_feature: MA Experiment 20000286 PARAMETER Experiment Name: At_Open_Flower_P Parameter: Tissue Value: Half Open vs. Whole Plant
  misc_feature: MA Experiment ID: 20000437 Result: Down-regulated in Transcription
  misc_feature: MA Experiment 20000437 PARAMETER Experiment Name: At_Drought_P Parameter: Age (day) Value: 8
  misc_feature: MA Experiment 20000437 PARAMETER Experiment Name: At_Drought_P Parameter: Organism Value: A. thaliana
  misc_feature: MA Experiment 20000437 PARAMETER Experiment Name: At_Drought_P Parameter: Plant Line Value: WS
  misc_feature: MA Experiment 20000437 PARAMETER Experiment Name: At_Drought_P Parameter: Timepoint (hr) Value: 24
  misc_feature: MA Experiment 20000437 PARAMETER Experiment Name: At_Drought_P Parameter: Tissue Value: Whole Plant
  misc_feature: MA Experiment 20000437 PARAMETER Experiment Name: At_Drought_P Parameter: Treatment Value: Drought vs. No Drought
  misc_feature: MA Experiment ID: 20000438 Result: Down-regulated in Transcription
  misc_feature: MA Experiment 20000438 PARAMETER Experiment Name: At_Shoots__P Parameter: Age (day) Value: 14
  misc_feature: MA Experiment 20000438 PARAMETER Experiment Name: At_Shoots__P Parameter: Tissue Value: Shoots vs. Whole Plant
  misc_feature: MA Experiment ID: 20000441 Result: Up-regulated in Transcription
  misc_feature: MA Experiment 20000441 PARAMETER Experiment Name: At_1uM_BR-BRZ__P Parameter: Tissue Value: Shoot Apices
  misc_feature: MA Experiment 20000441 PARAMETER Experiment Name: At_1uM_BR-BRZ__P Parameter: Treatment Value: 1uM BR vs. No Treatment
  misc_feature: MA Experiment ID: 20000496 Result: Down-regulated in Transcription
  misc_feature: MA Experiment 20000496 PARAMETER Experiment Name: At_Guard_Cells_P Parameter: Harvest Date Value: 7/19/2002
  misc_feature: MA Experiment 20000496 PARAMETER Experiment Name: At_Guard_Cells_P Parameter: Organism Value: Canola
  misc_feature: MA Experiment 20000496 PARAMETER Experiment Name: At_Guard_Cells_P Parameter: Tissue Value: Guard Cells vs. Leaves
  misc_feature: MA Experiment ID: 20000794 Result: Down-regulated in Transcription
  misc_feature: MA Experiment 20000794 PARAMETER Experiment Name: At_Petals_P Parameter: Age (day) Value: 23-25 days
  misc_feature: MA Experiment 20000794 PARAMETER Experiment Name: At_Petals_P Parameter: Plant Line Value: WS
  misc_feature: MA Experiment 20000794 PARAMETER Experiment Name: At_Petals_P Parameter: Tissue Value: Petals vs. Whole plant
  misc_feature: MA Experiment ID: 20001248 Result: Down-regulated in Transcription
  misc_feature: MA Experiment 20001248 PARAMETER Experiment Name: At_Far-red-induction_P Parameter: Age (day) Value: 7
  misc_feature: MA Experiment 20001248 PARAMETER Experiment Name: At_Far-red-induction_P Parameter: Light Value: Far-red vs. White
  misc_feature: MA Experiment 20001248 PARAMETER Experiment Name: At_Far-red-induction_P Parameter: Organism Value: A. thaliana
  misc_feature: MA Experiment 20001248 PARAMETER Experiment Name: At_Far-red-induction_P Parameter: Plant Line Value: Columbia
  misc_feature: MA Experiment 20001248 PARAMETER Experiment Name: At_Far-red-induction_P Parameter: Timepoint (hr) Value: 4
  misc_feature: MA Experiment 20001248 PARAMETER Experiment Name: At_Far-red-induction_P Parameter: Tissue Value: Whole Plant
  misc_feature: MA Experiment ID: 20001450 Result: Down-regulated in Transcription
  misc_feature: MA Experiment 20001450 PARAMETER Experiment Name: At_Far-red-induction_P Parameter: Age (day) Value: 7
  misc_feature: MA Experiment 20001450 PARAMETER Experiment Name: At_Far-red-induction_P Parameter: Light Value: Far-red vs. White
  misc_feature: MA Experiment 20001450 PARAMETER Experiment Name: At_Far-red-induction_P Parameter: Organism Value: A. thaliana
  misc_feature: MA Experiment 20001450 PARAMETER Experiment Name: At_Far-red-induction_P Parameter: Plant Line Value: Columbia
  misc_feature: MA Experiment 20001450 PARAMETER Experiment Name: At_Far-red-induction_P Parameter: Timepoint (hr) Value: 8
  misc_feature: MA Experiment 20001450 PARAMETER Experiment Name: At_Far-red-induction_P Parameter: Tissue Value: Whole Plant
  misc_feature: MA Experiment ID: 20001451 Result: Down-regulated in Transcription
  misc_feature: MA Experiment 20001451 PARAMETER Experiment Name: At_Far-red-induction_P Parameter: Age (day) Value: 7
  misc_feature: MA Experiment 20001451 PARAMETER Experiment Name: At_Far-red-induction_P Parameter: Light Value: Far-red vs. White
  misc_feature: MA Experiment 20001451 PARAMETER Experiment Name: At_Far-red-induction_P Parameter: Organism Value: A. thaliana
  misc_feature: MA Experiment 20001451 PARAMETER Experiment Name: At_Far-red-induction_P Parameter: Plant Line Value: Columbia
  misc_feature: MA Experiment 20001451 PARAMETER Experiment Name: At_Far-red-induction_P Parameter: Timepoint (hr) Value: 24
  misc_feature: MA Experiment 20001451 PARAMETER Experiment Name: At_Far-red-induction_P Parameter: Tissue Value: Whole Plant
  misc_feature: MA Experiment ID: 20001556 Result: Down-regulated in Transcription
  misc_feature: MA Experiment 20001556 PARAMETER Experiment Name: At_Drought_Soil_Dry_P Parameter: Age (day) Value: 26
  misc_feature: MA Experiment 20001556 PARAMETER Experiment Name: At_Drought_Soil_Dry_P Parameter: Organism Value: A. thaliana
  misc_feature: MA Experiment 20001556 PARAMETER Experiment Name: At_Drought_Soil_Dry_P Parameter: Plant Line Value: WS
  misc_feature: MA Experiment 20001556 PARAMETER Experiment Name: At_Drought_Soil_Dry_P Parameter: Post Timepoint (hr) Value: None
  misc_feature: MA Experiment 20001556 PARAMETER Experiment Name: At_Drought_Soil_Dry_P Parameter: Post-Treatment Value: None
  misc_feature: MA Experiment 20001556 PARAMETER Experiment Name: At_Drought_Soil_Dry_P Parameter: Timepoint (day) Value: 12
  misc_feature: MA Experiment 20001556 PARAMETER Experiment Name: At_Drought_Soil_Dry_P Parameter: Treatment Value: Drought vs. No Drought
  misc_feature: MA Experiment ID: 20001904 Result: Down-regulated in Transcription
  misc_feature: MA Experiment 20001904 PARAMETER Experiment Name: At_Drought_Reproduction_P Parameter: Age (day) Value: 37
  misc_feature: MA Experiment 20001904 PARAMETER Experiment Name: At_Drought_Reproduction_P Parameter: Organism Value: A. thaliana
  misc_feature: MA Experiment 20001904 PARAMETER Experiment Name: At_Drought_Reproduction_P Parameter: Plant Line Value: WS
  misc_feature: MA Experiment 20001904 PARAMETER Experiment Name: At_Drought_Reproduction_P Parameter: Timepoint (day) Value: 7
  misc_feature: MA Experiment 20001904 PARAMETER Experiment Name: At_Drought_Reproduction_P Parameter: Tissue Value: Rosettes
  misc_feature: MA Experiment 20001904 PARAMETER Experiment Name: At_Drought_Reproduction_P Parameter: Treatment Value: Drought vs. No Drought
  misc_feature: MA Experiment ID: 20001911 Result: Down-regulated in Transcription
  misc_feature: MA Experiment 20001911 PARAMETER Experiment Name: At_Drought_Reproduction_P Parameter: Age (day) Value: 40
  misc_feature: MA Experiment 20001911 PARAMETER Experiment Name: At_Drought_Reproduction_P Parameter: Organism Value: A. thaliana
  misc_feature: MA Experiment 20001911 PARAMETER Experiment Name: At_Drought_Reproduction_P Parameter: Plant Line Value: WS
  misc_feature: MA Experiment 20001911 PARAMETER Experiment Name: At_Drought_Reproduction_P Parameter: Timepoint (day) Value: 10
  misc_feature: MA Experiment 20001911 PARAMETER Experiment Name: At_Drought_Reproduction_P Parameter: Tissue Value: Flowers
  misc_feature: MA Experiment 20001911 PARAMETER Experiment Name: At_Drought_Reproduction_P Parameter: Treatment Value: Drought vs. No Drought
aataattttacattggtttgttcaactgatgcgacccttatcgagccatcatcatcacctacctaaatctttcttcctattataaaacccattttctcatctctcaagaatctcaatcccatcttccacaactctaacaaaccttcccgattcatcctctttgactcccttcactcgatctcatccgcaatggaatcaaagacaacccaaaacggatccgaagtcgtcgaactcacagagttcgagaaaacccagaagaagtatcaagatttcatcgctacacttccaaagagcaaaggctggagaccagatgagatcttaacccaatacggtggacactggtggcaagaatgtctcctcgaaggtctttttcacgctaaagaccatttcgaagcacgaccaactgatttcctcgtctgtagctacccaaaaaccggtacaacttggctcaaagcactaacttacgcaatcgtcaatcgttctcgttacgacgacgccgcaaacccactcctcaaacgaaaccctcacgagtttgtcccttacgttgagatcgacttcgcgttttaccccaccgttgatgttcttcaagacagaaagaacccacttttctctactcatatcccaaacgggttattacccgattcgattgtgaactctggttgtaagatggtgtacatatggagagacccgaaagatactttcatctccatgtggactttcttacacaaggagaagtctcaagaaggtcaattagcgagtcttgaggacagctttgatatgttttgtaaaggtttatctgtgtatggtccttatctggatcatgttttgggttattggaaagcttaccaagagaatccagataggattttgttccttaggtacgagaccatgagggccaatcctttgccttttgtgaagagattggctgagttcatgggttatggattcactgatgaggaagaggagaatggtgttgctgagaaagtggtgaagctttgtagctttgagacgttgaagaatcttgaagctaacaaaggtgataaagaaagagaggatcgtcctgctgtttatgcgaatagcgcgtattttaggaaaggaaaggttggagattgggctaattatttgactcctgagatggctgctcgtattgatggcttagtggaggagaaattcaaagatactggcttgcttcaacatgataactgaatgtgttttattctggtccttctgttatttggtgcggcgaaacagaggatgctctgttttgctttgtttggttctgtattctcattattgtctgtatcatcttatttacaacaagagaaagatatttcgatttatgatcc

SEQ ID NO: 105922 - protein, 338 aa, Arabidopsis thaliana; identical to SEQ ID NO: 23272
  peptide (1)..(338): Ceres Seq. ID no. 13618334
  misc_feature (71)..(332): Pfam Name: Sulfotransferase domain Pfam Description: Sulfotransferase domain
  misc_feature (1)..(338): Homolog of NCBI NO: 15221131 NR Description: sulfotransferase family [Arabidopsis thaliana]
  misc_feature (1)..(338): Homolog of NCBI NO: 21593087 NR Description: putative flavonol sulfotransferase [Arabidopsis
  misc_feature (14)..(336): Homolog of NCBI NO: 15221130 NR Description: sulfotransferase family [Arabidopsis thaliana]
  misc_feature (14)..(336): Homolog of NCBI NO: 21593660 NR Description: putative flavonol sulfotransferase [Arabidopsis
  misc_feature (1)..(334): Homolog of NCBI NO: 15221820 NR Description: sulfotransferase family [Arabidopsis thaliana]
  misc_feature (19)..(333): Homolog of NCBI NO: 15230602 NR Description: sulfotransferase family [Arabidopsis thaliana]
  misc_feature (17)..(334): Homolog of NCBI NO: 1706740 NR Description: FLAVONOL 4'-SULFOTRANSFERASE (F4-ST)
  misc_feature (17)..(334): Homolog of NCBI NO: 285286 NR Description: flavonol 4'-sulfotransferase - Flaveria
  misc_feature (26)..(334): Homolog of NCBI NO: 1706918 NR Description: FLAVONOL SULFOTRANSFERASE-LIKE
  misc_feature (26)..(334): Homolog of NCBI NO: 4321096 NR Description: flavonol 3-sulfotransferase [Flaveria

SEQ ID NO: 105923 - protein, 179 aa, Arabidopsis thaliana; identical to SEQ ID NO: 23273
  peptide (1)..(179): Ceres Seq. ID no. 13618335
  misc_feature (1)..(173): Pfam Name: Sulfotransferase domain Pfam Description: Sulfotransferase domain
  misc_feature (1)..(179): Homolog of NCBI NO: 15221131 NR Description: sulfotransferase family [Arabidopsis thaliana]
  misc_feature (1)..(179): Homolog of NCBI NO: 21593087 NR Description: putative flavonol sulfotransferase [Arabidopsis
  misc_feature (1)..(177): Homolog of NCBI NO: 15221130 NR Description: sulfotransferase family [Arabidopsis thaliana]
  misc_feature (1)..(177): Homolog of NCBI NO: 21593660 NR Description: putative flavonol sulfotransferase [Arabidopsis
  misc_feature (1)..(175): Homolog of NCBI NO: 15221820 NR Description: sulfotransferase family [Arabidopsis thaliana]
  misc_feature (1)..(174): Homolog of NCBI NO: 15230602 NR Description: sulfotransferase family [Arabidopsis thaliana]
  misc_feature (1)..(175): Homolog of NCBI NO: 1706740 NR Description: FLAVONOL 4'-SULFOTRANSFERASE (F4-ST)
  misc_feature (1)..(175): Homolog of NCBI NO: 285286 NR Description: flavonol 4'-sulfotransferase - Flaveria
  misc_feature (1)..(175): Homolog of NCBI NO: 1706918 NR Description: FLAVONOL SULFOTRANSFERASE-LIKE
  misc_feature (1)..(175): Homolog of NCBI NO: 4321096 NR Description: flavonol 3-sulfotransferase [Flaveria

SEQ ID NO: 105924 - DNA, 1352 bp, Arabidopsis thaliana
  misc_feature (1)..(1352): Ceres Seq. ID no. 13618340
  misc_feature: MA Experiment ID: 108461 Result: Up-regulated in Transcription
  misc_feature: MA Experiment 108461 PARAMETER Experiment Name: At_Germinating_Seeds_cDNA_P Parameter: Age (day) Value: 1 vs. 0
  misc_feature: MA Experiment 108461 PARAMETER Experiment Name: At_Germinating_Seeds_cDNA_P Parameter: Tissue Value: Germinating Seeds
  misc_feature: MA Experiment ID: 108462 Result: Up-regulated in Transcription
  misc_feature: MA Experiment 108462 PARAMETER Experiment Name: At_Germinating_Seeds_cDNA_P Parameter: Age (day) Value: 2 vs. 0
  misc_feature: MA Experiment 108462 PARAMETER Experiment Name: At_Germinating_Seeds_cDNA_P Parameter: Tissue Value: Germinating Seeds
  misc_feature: MA Experiment ID: 108464 Result: Up-regulated in Transcription
  misc_feature: MA Experiment 108464 PARAMETER Experiment Name: At_Germinating_Seeds_cDNA_P Parameter: Age (day) Value: 4 vs. 0
  misc_feature: MA Experiment 108464 PARAMETER Experiment Name: At_Germinating_Seeds_cDNA_P Parameter: Tissue Value: Germinating Seeds
  misc_feature: MA Experiment ID: 108488 Result: Down-regulated in Transcription
  misc_feature: MA Experiment ID: 108579 Result: Up-regulated in Transcription
  misc_feature: MA Experiment 108579 PARAMETER Experiment Name: At_4deg_Cold_cDNA_P Parameter: Temperature (deg C) Value: 4 vs. 22
  misc_feature: MA Experiment 108579 PARAMETER Experiment Name: At_4deg_Cold_cDNA_P Parameter: Timepoint (hr) Value: 6
  misc_feature: MA Experiment 108579 PARAMETER Experiment Name: At_4deg_Cold_cDNA_P Parameter: Tissue Value: Aerial
  misc_feature: MA Experiment ID: 108594 Result: Down-regulated in Transcription
  misc_feature: MA Experiment 108594 PARAMETER Experiment Name: At_Ler-rhl_Root_cDNA_P Parameter: Plant Line Value: null
  misc_feature: MA Experiment ID: 108668 Result: Up-regulated in Transcription
  misc_feature: MA Experiment 108668 PARAMETER Experiment Name: At_2mM_SA_cDNA_P Parameter: Plant Line Value: WS
  misc_feature: MA Experiment 108668 PARAMETER Experiment Name: At_2mM_SA_cDNA_P Parameter: Timepoint (hr) Value: 6
  misc_feature: MA Experiment 108668 PARAMETER Experiment Name: At_2mM_SA_cDNA_P Parameter: Treatment Value: 2mM SA vs. No Treatment
  misc_feature: MA Experiment ID: 20000111 Result: Down-regulated in Transcription
  misc_feature: MA Experiment 20000111 PARAMETER Experiment Name: At_42deg_Heat_cDNA_P Parameter: Temperature (deg C) Value: 42 vs. 22
  misc_feature: MA Experiment 20000111 PARAMETER Experiment Name: At_42deg_Heat_cDNA_P Parameter: Timepoint (hr) Value: 6
  misc_feature: MA Experiment 20000111 PARAMETER Experiment Name: At_42deg_Heat_cDNA_P Parameter: Tissue Value: Aerial
  misc_feature: MA Experiment ID: 20000112 Result: Down-regulated in Transcription
  misc_feature: MA Experiment 20000112 PARAMETER Experiment Name: At_42deg_Heat_cDNA_P Parameter: Temperature (deg C) Value: 42 vs. 22
  misc_feature: MA Experiment 20000112 PARAMETER Experiment Name: At_42deg_Heat_cDNA_P Parameter: Timepoint (hr) Value: 2
  misc_feature: MA Experiment 20000112 PARAMETER Experiment Name: At_42deg_Heat_cDNA_P Parameter: Tissue Value: Aerial
  misc_feature: MA Experiment ID: 20000113 Result: Down-regulated in Transcription
  misc_feature: MA Experiment 20000113 PARAMETER Experiment Name: At_42deg_Heat_cDNA_P Parameter: Temperature (deg C) Value: 42 vs. 22
  misc_feature: MA Experiment 20000113 PARAMETER Experiment Name: At_42deg_Heat_cDNA_P Parameter: Timepoint (hr) Value: 8
  misc_feature: MA Experiment 20000113 PARAMETER Experiment Name: At_42deg_Heat_cDNA_P Parameter: Tissue Value: Aerial
  misc_feature: MA Experiment ID: 20000180 Result: Up-regulated in Transcription
  misc_feature: MA Experiment 20000180 PARAMETER Experiment Name: At_Germinating_Seeds_P Parameter: Age (hr) Value: 24 vs. 0
  misc_feature: MA Experiment 20000180 PARAMETER Experiment Name: At_Germinating_Seeds_P Parameter: Tissue Value: Germinating Seeds
  misc_feature: MA Experiment ID: 20000185 Result: Up-regulated in Transcription
  misc_feature: MA Experiment 20000185 PARAMETER Experiment Name: At_Roots__P Parameter: Age (day) Value: 7 vs. 21
  misc_feature: MA Experiment 20000185 PARAMETER Experiment Name: At_Roots__P Parameter: Organism Value: A. thaliana
  misc_feature: MA Experiment 20000185 PARAMETER Experiment Name: At_Roots__P Parameter: Tissue Value: Roots vs. Whole Plant
  misc_feature: MA Experiment ID: 20000527 Result: Down-regulated in Transcription
  misc_feature: MA Experiment 20000527 PARAMETER Experiment Name: At_10percent_PEG_P Parameter: Age (day) Value: 20
  misc_feature: MA Experiment 20000527 PARAMETER Experiment Name: At_10percent_PEG_P Parameter: Organism Value: A. thaliana
  misc_feature: MA Experiment 20000527 PARAMETER Experiment Name: At_10percent_PEG_P Parameter: Plant Line Value: WS
  misc_feature: MA Experiment 20000527 PARAMETER Experiment Name: At_10percent_PEG_P Parameter: Timepoint (day) Value: 20
  misc_feature: MA Experiment 20000527 PARAMETER Experiment Name: At_10percent_PEG_P Parameter: Tissue Value: Whole Plant
  misc_feature: MA Experiment 20000527 PARAMETER Experiment Name: At_10percent_PEG_P Parameter: Treatment Value: 10percent PEG vs. No Treatment
ggacaagaactgatagagtgggataagagacaaataaggagaatcaaacaagcaatccgatcgatctaccagatcgccatgattcttacaagatgcttacccttgatatggctatctctacttactgtgtgtgctgctgggaggacattgcaccctctccctgttaaaggacccaaaactgtcaagcttcaacttcagacttcacgtccttataacatcgcacacagaggttccaatggagagatcccagaagaaactacagctgcatacttgaaagcaattgaagaaggcacagacttcatagaaacagatatcttatcatccaaagatggtgtgctcatatgtttccatgattgtattctcgacgaaacaaccaatgttgcgagccacaaggagtttgcagatcgtaaaaggacatatgatgtccaaggattcaacattactggctttttcacttttgattttacacttaaagaactaaagcaactacgtataaagcagcgatatgcttttcgggatcagcaatacaacggaatgtaccctatcattacatttgaggaatttcttaccattgctcgggatgctccaagagttgttggaatatatcctgagattaaaaatccagttttaatgaaccagcatgtcaaatggcctggtggtaagaaatttgaggataaagttgtggagacacttaagaagtatgggtatggaggctcgtatttgtccaagaagtggttgaaaaaaccactatttattcagtcatttgccccaacttcactcgtgtacatatcaaacttgacagactcgccgaaagtccttctaatagacgatgttaccatgccaacgcaagacactaaccagacatatgcagagatcacatcagatgcgtatttcgaatacatcaagcaatatgttgtgggtatcggaccatggaaggatacaattgttccggtaaacaacaactatgtgctagcccccacagatttggtcaaaagagctcacgcacacaatctgcaggtgcatccctatacgtacaggaatgaacacgaattcttacactataactttagccaagacccgtataaggagtacgactactggatcaatgagattggagttgatggactcttcactgatttcacaggcagcctccataactttcaagaatggacatctccattacctgatacctccaagtctccacgacagcttcttagtcaaattgcctcattggtcctcccttatgcaaaggcttgaagttccacataaacacctatcagtaatcctattgtttgcaattaattgtattgaataaagttacaatgattattctgaagaagaacacagttgtt

SEQ ID NO: 105925 - protein, 418 aa, Arabidopsis thaliana; identical to SEQ ID NO: 35618
  peptide (1)..(418): Ceres Seq. ID no. 13618341
  misc_feature (27)..(418): Homolog of NCBI NO: 15221164 NR Description: glycerophosphodiester phosphodiesterase -related
  misc_feature (33)..(395): Homolog of NCBI NO: 15241502 NR Description: glycerophosphodiester phosphodiesterase - like [Arabidopsis thaliana] >gi|11357308|pir||T45628
  misc_feature (38)..(415): Homolog of NCBI NO: 34909788 NR Description: putative glycerophosphoryl diester
  misc_feature (60)..(392): Homolog of NCBI NO: 34394918 NR Description: putative glycerophosphoryl diester
  misc_feature (61)..(380): Homolog of NCBI NO: 23126501 NR Description: hypothetical protein [Nostoc punctiforme]
  misc_feature (66)..(380): Homolog of NCBI NO: 16127502 NR Description: glycerophosphoryl diester phosphodiesterase crescentus CB15] >gi|25399885|pir||F87654 glycerophosphoryl
  misc_feature (70)..(379): Homolog of NCBI NO: 32141147 NR Description: putative glycerophosphoryl diester [Streptomyces coelicolor A3(2)] >gi|24419011|emb|CAD55283.1| glycerophosphoryl diester phosphodiesterase [Streptomyces
  misc_feature (56)..(379): Homolog of NCBI NO: 15595544 NR Description: glycerophosphoryl diester phosphodiesterase, [Pseudomonas aeruginosa PA01] >gi|11348632|pir||A83603
  misc_feature (70)..(379): Homolog of NCBI NO: 32997080 NR Description: glycerophosphoryl diester phosphodiesterase
  misc_feature (41)..(379): Homolog of NCBI NO: 23105793 NR Description: hypothetical protein [Azotobacter vinelandii]

SEQ ID NO: 105926 - protein, 392 aa, Arabidopsis thaliana; identical to SEQ ID NO: 35619
  peptide (1)..(392): Ceres Seq. ID no. 13618342
  misc_feature (1)..(392): Homolog of NCBI NO: 15221164 NR Description: glycerophosphodiester phosphodiesterase -related
  misc_feature (7)..(369): Homolog of NCBI NO: 15241502 NR Description: glycerophosphodiester phosphodiesterase - like [Arabidopsis thaliana] >gi|11357308|pir||T45628
  misc_feature (12)..(389): Homolog of NCBI NO: 34909788 NR Description: putative glycerophosphoryl diester
  misc_feature (34)..(366): Homolog of NCBI NO: 34394918 NR Description: putative glycerophosphoryl diester
  misc_feature (35)..(354): Homolog of NCBI NO: 23126501 NR Description: hypothetical protein [Nostoc punctiforme]
  misc_feature (40)..(354): Homolog of NCBI NO: 16127502 NR Description: glycerophosphoryl diester phosphodiesterase crescentus CB15] >gi|25399885|pir||F87654 glycerophosphoryl
  misc_feature (44)..(353): Homolog of NCBI NO: 32141147 NR Description: putative glycerophosphoryl diester [Streptomyces coelicolor A3(2)] >gi|24419011|emb|CAD55283.1| glycerophosphoryl diester phosphodiesterase [Streptomyces
  misc_feature (30)..(353): Homolog of NCBI NO: 15595544 NR Description: glycerophosphoryl diester phosphodiesterase, [Pseudomonas aeruginosa PA01] >gi|11348632|pir||A83603
  misc_feature (44)..(353): Homolog of NCBI NO: 32997080 NR Description: glycerophosphoryl diester phosphodiesterase
  misc_feature (15)..(353): Homolog of NCBI NO: 23105793 NR Description: hypothetical protein [Azotobacter vinelandii]

SEQ ID NO: 105927 - protein, 240 aa, Arabidopsis thaliana; identical to SEQ ID NO: 35620
  peptide (1)..(240): Ceres Seq. ID no. 13618343
  misc_feature (1)..(240): Homolog of NCBI NO: 15221164 NR Description: glycerophosphodiester phosphodiesterase -related
  misc_feature (1)..(217): Homolog of NCBI NO: 15241502 NR Description: glycerophosphodiester phosphodiesterase - like [Arabidopsis thaliana] >gi|11357308|pir||T45628
  misc_feature (1)..(237): Homolog of NCBI NO: 34909788 NR Description: putative glycerophosphoryl diester
  misc_feature (1)..(214): Homolog of NCBI NO: 34394918 NR Description: putative glycerophosphoryl diester
  misc_feature (1)..(202): Homolog of NCBI NO: 23126501 NR Description: hypothetical protein [Nostoc punctiforme]
  misc_feature (1)..(202): Homolog of NCBI NO: 16127502 NR Description: glycerophosphoryl diester phosphodiesterase crescentus CB15] >gi|25399885|pir||F87654 glycerophosphoryl
  misc_feature (1)..(201): Homolog of NCBI NO: 32141147 NR Description: putative glycerophosphoryl diester [Streptomyces coelicolor A3(2)] >gi|24419011|emb|CAD55283.1| glycerophosphoryl diester phosphodiesterase [Streptomyces
  misc_feature (1)..(201): Homolog of NCBI NO: 15595544 NR Description: glycerophosphoryl diester phosphodiesterase, [Pseudomonas aeruginosa PA01] >gi|11348632|pir||A83603
  misc_feature (1)..(201): Homolog of NCBI NO: 32997080 NR Description: glycerophosphoryl diester phosphodiesterase
  misc_feature (1)..(201): Homolog of NCBI NO: 23105793 NR Description: hypothetical protein [Azotobacter vinelandii]

SEQ ID NO: 105928 - DNA, 1313 bp, Arabidopsis thaliana
  misc_feature (1)..(1313): Ceres Seq. ID no. 13618344
  misc_feature: MA Experiment ID: 108573 Result: Up-regulated in Transcription
  misc_feature: MA Experiment 108573 PARAMETER Experiment Name: At_Drought_cDNA_P Parameter: Timepoint (hr) Value: 6
  misc_feature: MA Experiment 108573 PARAMETER Experiment Name: At_Drought_cDNA_P Parameter: Tissue Value: Aerial
  misc_feature: MA Experiment 108573 PARAMETER Experiment Name: At_Drought_cDNA_P Parameter: Treatment Value: Drought vs. No Drought
  misc_feature: MA Experiment ID: 108668 Result: Up-regulated in Transcription
  misc_feature: MA Experiment 108668 PARAMETER Experiment Name: At_2mM_SA_cDNA_P Parameter: Plant Line Value: WS
  misc_feature: MA Experiment 108668 PARAMETER Experiment Name: At_2mM_SA_cDNA_P Parameter: Timepoint (hr) Value: 6
  misc_feature: MA Experiment 108668 PARAMETER Experiment Name: At_2mM_SA_cDNA_P Parameter: Treatment Value: 2mM SA vs. No Treatment
  misc_feature: MA Experiment ID: 20000182 Result: Up-regulated in Transcription
  misc_feature: MA Experiment 20000182 PARAMETER Experiment Name: At_2mM_SA_P Parameter: Age (day) Value: 14
  misc_feature: MA Experiment 20000182 PARAMETER Experiment Name: At_2mM_SA_P Parameter: Organism Value: A. thaliana
  misc_feature: MA Experiment 20000182 PARAMETER Experiment Name: At_2mM_SA_P Parameter: Plant Line Value: WS
  misc_feature: MA Experiment 20000182 PARAMETER Experiment Name: At_2mM_SA_P Parameter: Timepoint (hr) Value: 6
  misc_feature: MA Experiment 20000182 PARAMETER Experiment Name: At_2mM_SA_P Parameter: Tissue Value: Aerial
  misc_feature: MA Experiment 20000182 PARAMETER Experiment Name: At_2mM_SA_P Parameter: Treatment Value: 2mM SA vs. No Treatment
tctctatgttgtagttcttgaacagttggctctcttttcaagaatcgtcgccgttgacctccgtgcctctccgatcaacttcccattcttttaaatgacgagagattcatcaaggaacagctcattaaagccatggcctcgaaaaaaatttctttttccttctgttgtgattgtcattgttgggataatcgtggcgtttacttatcagtccaagttgaaaccacctccgccgaagctatgtggctcctccggtggtccaccgatcacagcgccgcggataaagcttcaagatgggaggtatttggcttacaaagagcatggacttccaagagagaaagctaaccgcaaaatcgtcttcatccatggatccgattgttgtagacacgatgccgttttcgccactctgctttctccggatttagtagaggaactaggtgtatatatggtttcattcgacagaccgggctattgtgagagtgatccgcatccaagtcgtacaccgcgaagcttggtttcggatattgaagagctagctgatcagttgagtctaggatcgaaattttatgtgctcgggtactcgatgggaggacaagcagcatggggatgtcttaaatacattcctcataggttagccggagtaacactagttgctccagtggttaactattattggaagaacttacctttgaacgtttccactgaaggttttaactttcaacaaaagagagatcaattggcagttcgtgttgctcactatactccttggcttatctattggtggaacacacaaaaatggttccctggttcgagtattgcaaaccgagatcacagtctcttggcacagccggataaagatatcatttcgaagcttggttcttcgaggaaaccacattgggcagaggtaaggcagcaaggaatacatgagagtattaaccgtgacatgatcgttggttttgggaactgggaatttggtcctttagacctcgagaatccgtttttgaataaggaaggctctgtgcatttgtggcaaggagatgaggacatgttagtacctgcgaagctgcagcgttaccttgctcatcagcttccatgggttcactatcatgaggttccgagaagtggccacttcttccactacactaaaggtgtagttgatgacattgtaaagtcgctcttaacctccgatgtaagagcatctagagtttgtatttgatcatttgtagcttccaaaaactctgaaaaaaaatcccaaaaaaatacacggatacaatagagttatgtactagttacatttgtcagcatcgtagtttatt

SEQ ID NO: 105929 - protein, 372 aa, Arabidopsis thaliana; identical to SEQ ID NO: 41280
  peptide (1)..(372): Ceres Seq. ID no. 13618345
  misc_feature (115)..(359): Pfam Name: alpha/beta hydrolase fold Pfam Description: alpha/beta hydrolase fold
  misc_feature (1)..(372): Homolog of NCBI NO: 18410575 NR Description: hydrolase, alpha/beta fold family [Arabidopsis
  misc_feature (1)..(372): Homolog of NCBI NO: 21537089 NR Description: unknown [Arabidopsis thaliana]
  misc_feature (1)..(369): Homolog of NCBI NO: 15221193 NR Description: esterase/lipase/thioesterase family [Arabidopsis
  misc_feature (22)..(361): Homolog of NCBI NO: 21592662 NR Description: unknown [Arabidopsis thaliana]
  misc_feature (22)..(361): Homolog of NCBI NO: 18410582 NR Description: esterase/lipase/thioesterase family [Arabidopsis
  misc_feature (1)..(364): Homolog of NCBI NO: 28416665 NR Description: At2g36290 [Arabidopsis thaliana]
  misc_feature (25)..(364): Homolog of NCBI NO: 18404095 NR Description: hydrolase, alpha/beta fold family [Arabidopsis
  misc_feature (3)..(369): Homolog of NCBI NO: 15228377 NR Description: hydrolase, alpha/beta fold family [Arabidopsis
  misc_feature (24)..(364): Homolog of NCBI NO: 38346334 NR Description: OSJNBa0073L04.5 [Oryza sativa (japonica
  misc_feature (23)..(361): Homolog of NCBI NO: 37536164 NR Description: putative alpha/beta hydrolase [Oryza sativa

SEQ ID NO: 105930 - protein, 256 aa, Arabidopsis thaliana; identical to SEQ ID NO: 41281
  peptide (1)..(256): Ceres Seq. ID no. 13618346
  misc_feature (1)..(243): Pfam Name: alpha/beta hydrolase fold Pfam Description: alpha/beta hydrolase fold
  misc_feature (1)..(256): Homolog of NCBI NO: 18410575 NR Description: hydrolase, alpha/beta fold family [Arabidopsis
  misc_feature (1)..(256): Homolog of NCBI NO: 21537089 NR Description: unknown [Arabidopsis thaliana]
  misc_feature (1)..(253): Homolog of NCBI NO: 15221193 NR Description: esterase/lipase/thioesterase family [Arabidopsis
  misc_feature (1)..(245): Homolog of NCBI NO: 21592662 NR Description: unknown [Arabidopsis thaliana]
  misc_feature (1)..(245): Homolog of NCBI NO: 18410582 NR Description: esterase/lipase/thioesterase family [Arabidopsis
  misc_feature (1)..(248): Homolog of NCBI NO: 28416665 NR Description: At2g36290 [Arabidopsis thaliana]
  misc_feature (1)..(248): Homolog of NCBI NO: 18404095 NR Description: hydrolase, alpha/beta fold family [Arabidopsis
  misc_feature (1)..(253): Homolog of NCBI NO: 15228377 NR Description: hydrolase, alpha/beta fold family [Arabidopsis
  misc_feature (1)..(248): Homolog of NCBI NO: 38346334 NR Description: OSJNBa0073L04.5 [Oryza sativa (japonica
  misc_feature (1)..(245): Homolog of NCBI NO: 37536164 NR Description: putative alpha/beta hydrolase [Oryza sativa

SEQ ID NO: 105931 - protein, 210 aa, Arabidopsis thaliana; identical to SEQ ID NO: 41282
  peptide (1)..(210): Ceres Seq. ID no. 13618347
  misc_feature (1)..(197): Pfam Name: alpha/beta hydrolase fold Pfam Description: alpha/beta hydrolase fold
  misc_feature (1)..(210): Homolog of NCBI NO: 18410575 NR Description: hydrolase, alpha/beta fold family [Arabidopsis
  misc_feature (1)..(210): Homolog of NCBI NO: 21537089 NR Description: unknown [Arabidopsis thaliana]
  misc_feature (1)..(207): Homolog of NCBI NO: 15221193 NR Description: esterase/lipase/thioesterase family [Arabidopsis
  misc_feature (1)..(199): Homolog of NCBI NO: 21592662 NR Description: unknown [Arabidopsis thaliana]
  misc_feature (1)..(199): Homolog of NCBI NO: 18410582 NR Description: esterase/lipase/thioesterase family [Arabidopsis
  misc_feature (1)..(202): Homolog of NCBI NO: 28416665 NR Description: At2g36290 [Arabidopsis thaliana]
  misc_feature (1)..(202): Homolog of NCBI NO: 18404095 NR Description: hydrolase, alpha/beta fold family [Arabidopsis
  misc_feature (1)..(207): Homolog of NCBI NO: 15228377 NR Description: hydrolase, alpha/beta fold family [Arabidopsis
  misc_feature (1)..(202): Homolog of NCBI NO: 38346334 NR Description: OSJNBa0073L04.5 [Oryza sativa (japonica
  misc_feature (1)..(199): Homolog of NCBI NO: 37536164 NR Description: putative alpha/beta hydrolase [Oryza sativa

SEQ ID NO: 105932 - DNA, 1222 bp, Arabidopsis thaliana
  misc_feature (1)..(1222): Ceres Seq. ID no. 13618348
  misc_feature: MA Experiment ID: 108463 Result: Up-regulated in Transcription
  misc_feature: MA Experiment 108463 PARAMETER Experiment Name: At_Germinating_Seeds_cDNA_P Parameter: Age (day) Value: 3 vs. 0
  misc_feature: MA Experiment 108463 PARAMETER Experiment Name: At_Germinating_Seeds_cDNA_P Parameter: Tissue Value: Germinating Seeds
  misc_feature: MA Experiment ID: 108474 Result: Down-regulated in Transcription
  misc_feature: MA Experiment 108474 PARAMETER Experiment Name: At_Drought_Flowers_cDNA_P Parameter: Timepoint (hr) Value: null
  misc_feature: MA Experiment 108474 PARAMETER Experiment Name: At_Drought_Flowers_cDNA_P Parameter: Treatment Value: Drought vs. No Drought
  misc_feature: MA Experiment ID: 108576 Result: Up-regulated in Transcription
  misc_feature: MA Experiment 108576 PARAMETER Experiment Name: At_42deg_Heat_cDNA_P Parameter: Temperature (deg C) Value: 42 vs. 22
  misc_feature: MA Experiment 108576 PARAMETER Experiment Name: At_42deg_Heat_cDNA_P Parameter: Timepoint (hr) Value: 1
  misc_feature: MA Experiment 108576 PARAMETER Experiment Name: At_42deg_Heat_cDNA_P Parameter: Tissue Value: Aerial
  misc_feature: MA Experiment ID: 108577 Result: Up-regulated in Transcription
  misc_feature: MA Experiment 108577 PARAMETER Experiment Name: At_42deg_Heat_cDNA_P Parameter: Temperature (deg C) Value: 42 vs. 22
  misc_feature: MA Experiment 108577 PARAMETER Experiment Name: At_42deg_Heat_cDNA_P Parameter: Timepoint (hr) Value: 6
  misc_feature: MA Experiment 108577 PARAMETER Experiment Name: At_42deg_Heat_cDNA_P Parameter: Tissue Value: Aerial
  misc_feature: MA Experiment ID: 108668 Result: Up-regulated in Transcription
  misc_feature: MA Experiment 108668 PARAMETER Experiment Name: At_2mM_SA_cDNA_P Parameter: Plant Line Value: WS
  misc_feature: MA Experiment 108668 PARAMETER Experiment Name: At_2mM_SA_cDNA_P Parameter: Timepoint (hr) Value: 6
  misc_feature: MA Experiment 108668 PARAMETER Experiment Name: At_2mM_SA_cDNA_P Parameter: Treatment Value: 2mM SA vs. No Treatment
  misc_feature: MA Experiment ID: 20000093 Result: Up-regulated in Transcription
  misc_feature: MA Experiment 20000093 PARAMETER Experiment Name: At_42deg_Heat_cDNA_P Parameter: Temperature (deg C) Value: 42 vs. 22
  misc_feature: MA Experiment 20000093 PARAMETER Experiment Name: At_42deg_Heat_cDNA_P Parameter: Timepoint (hr) Value: 0.5
  misc_feature: MA Experiment 20000093 PARAMETER Experiment Name: At_42deg_Heat_cDNA_P Parameter: Tissue Value: Aerial
  misc_feature: MA Experiment ID: 20000111 Result: Up-regulated in Transcription
  misc_feature: MA Experiment 20000111 PARAMETER Experiment Name: At_42deg_Heat_cDNA_P Parameter: Temperature (deg C) Value: 42 vs. 22
  misc_feature: MA Experiment 20000111 PARAMETER Experiment Name: At_42deg_Heat_cDNA_P Parameter: Timepoint (hr) Value: 6
  misc_feature: MA Experiment 20000111 PARAMETER Experiment Name: At_42deg_Heat_cDNA_P Parameter: Tissue Value: Aerial
  misc_feature: MA Experiment ID: 20000182 Result: Up-regulated in Transcription
  misc_feature: MA Experiment 20000182 PARAMETER Experiment Name: At_2mM_SA_P Parameter: Age (day) Value: 14
  misc_feature: MA Experiment 20000182 PARAMETER Experiment Name: At_2mM_SA_P Parameter: Organism Value: A. thaliana
  misc_feature: MA Experiment 20000182 PARAMETER Experiment Name: At_2mM_SA_P Parameter: Plant Line Value: WS
  misc_feature: MA Experiment 20000182 PARAMETER Experiment Name: At_2mM_SA_P Parameter: Timepoint (hr) Value: 6
  misc_feature: MA Experiment 20000182 PARAMETER Experiment Name: At_2mM_SA_P Parameter: Tissue Value: Aerial
  misc_feature: MA Experiment 20000182 PARAMETER Experiment Name: At_2mM_SA_P Parameter: Treatment Value: 2mM SA vs. No Treatment
  misc_feature: MA Experiment ID: 20000184 Result: Down-regulated in Transcription
  misc_feature: MA Experiment 20000184 PARAMETER Experiment Name: At_Shoots__P Parameter: Age (day) Value: 7
  misc_feature: MA Experiment 20000184 PARAMETER Experiment Name: At_Shoots__P Parameter: Tissue Value: Shoots vs. Whole Plant
  misc_feature: MA Experiment ID: 20000264 Result: Up-regulated in Transcription
  misc_feature: MA Experiment 20000264 PARAMETER Experiment Name: At_Open_Flower_P Parameter: Age (day) Value: 21
  misc_feature: MA Experiment 20000264 PARAMETER Experiment Name: At_Open_Flower_P Parameter: Plant Line Value: WS
  misc_feature: MA Experiment 20000264 PARAMETER Experiment Name: At_Open_Flower_P Parameter: Tissue Value: Open Flower vs. Whole Plant
  misc_feature: MA Experiment ID: 20000286 Result: Up-regulated in Transcription
  misc_feature: MA Experiment 20000286 PARAMETER Experiment Name: At_Open_Flower_P Parameter: Age (day) Value: 21
  misc_feature: MA Experiment 20000286 PARAMETER Experiment Name: At_Open_Flower_P Parameter: Plant Line Value: WS
  misc_feature: MA Experiment 20000286 PARAMETER Experiment Name: At_Open_Flower_P Parameter: Tissue Value: Half Open vs. Whole Plant
  misc_feature: MA Experiment ID: 20000573 Result: Down-regulated in Transcription
  misc_feature: MA Experiment 20000573 PARAMETER Experiment Name: At_100uM_ABA_Mutants__P Parameter: Organism Value: A. thaliana
  misc_feature: MA Experiment 20000573 PARAMETER Experiment Name: At_100uM_ABA_Mutants__P Parameter: Plant Line Value: CS22 vs. Ler wt
  misc_feature: MA Experiment 20000573 PARAMETER Experiment Name: At_100uM_ABA_Mutants__P Parameter: Timepoint (hr) Value: N/A
  misc_feature: MA Experiment 20000573 PARAMETER Experiment Name: At_100uM_ABA_Mutants__P Parameter: Tissue Value: Whole Plant
  misc_feature: MA Experiment 20000573 PARAMETER Experiment Name: At_100uM_ABA_Mutants__P Parameter: Treatment Value: None
  misc_feature: MA Experiment ID: 20000574 Result: Down-regulated in Transcription
  misc_feature: MA Experiment 20000574 PARAMETER Experiment Name: At_100uM_ABA_Mutants__P Parameter: Organism Value: A. thaliana
  misc_feature: MA Experiment 20000574 PARAMETER Experiment Name: At_100uM_ABA_Mutants__P Parameter: Plant Line Value: CS23 vs. Ler wt
  misc_feature: MA Experiment 20000574 PARAMETER Experiment Name: At_100uM_ABA_Mutants__P Parameter: Timepoint (hr) Value: N/A
  misc_feature: MA Experiment 20000574 PARAMETER Experiment Name: At_100uM_ABA_Mutants__P Parameter: Tissue Value: Whole Plant
  misc_feature: MA Experiment 20000574 PARAMETER Experiment Name: At_100uM_ABA_Mutants__P Parameter: Treatment Value: None
  misc_feature: MA Experiment ID: 20000794 Result: Up-regulated in Transcription
  misc_feature: MA Experiment 20000794 PARAMETER Experiment Name: At_Petals_P Parameter: Age (day) Value: 23-25 days
  misc_feature: MA Experiment 20000794 PARAMETER Experiment Name: At_Petals_P Parameter: Plant Line Value: WS
  misc_feature: MA Experiment 20000794 PARAMETER Experiment Name: At_Petals_P Parameter: Tissue Value: Petals vs. Whole plant
  misc_feature: MA Experiment ID: 20001557 Result: Down-regulated in Transcription
  misc_feature: MA Experiment 20001557 PARAMETER Experiment Name: At_Drought_Soil_Dry_P Parameter: Age (day) Value: 27
  misc_feature: MA Experiment 20001557 PARAMETER Experiment Name: At_Drought_Soil_Dry_P Parameter: Organism Value: A. thaliana
  misc_feature: MA Experiment 20001557 PARAMETER Experiment Name: At_Drought_Soil_Dry_P Parameter: Plant Line Value: WS
  misc_feature: MA Experiment 20001557 PARAMETER Experiment Name: At_Drought_Soil_Dry_P Parameter: Post Timepoint (hr) Value: 3
  misc_feature: MA Experiment 20001557 PARAMETER Experiment Name: At_Drought_Soil_Dry_P Parameter: Post-Treatment Value: Re-Water vs. No Drought
  misc_feature: MA Experiment 20001557 PARAMETER Experiment Name: At_Drought_Soil_Dry_P Parameter: Timepoint (day) Value: 13
  misc_feature: MA Experiment 20001557 PARAMETER Experiment Name: At_Drought_Soil_Dry_P Parameter: Treatment Value: Drought vs. No Drought
  misc_feature: MA Experiment ID: 20001560 Result: Down-regulated in Transcription
  misc_feature: MA Experiment 20001560 PARAMETER Experiment Name: At_Drought_Soil_Dry_P Parameter: Age (day) Value: 28
  misc_feature: MA Experiment 20001560 PARAMETER Experiment Name: At_Drought_Soil_Dry_P Parameter: Organism Value: A. thaliana
  misc_feature: MA Experiment 20001560 PARAMETER Experiment Name: At_Drought_Soil_Dry_P Parameter: Plant Line Value: WS
  misc_feature: MA Experiment 20001560 PARAMETER Experiment Name: At_Drought_Soil_Dry_P Parameter: Post Timepoint (hr) Value: None
  misc_feature: MA Experiment 20001560 PARAMETER Experiment Name: At_Drought_Soil_Dry_P Parameter: Post-Treatment Value: None
  misc_feature: MA Experiment 20001560 PARAMETER Experiment Name: At_Drought_Soil_Dry_P Parameter: Timepoint (day) Value: 14
  misc_feature: MA Experiment 20001560 PARAMETER Experiment Name: At_Drought_Soil_Dry_P Parameter: Treatment Value: Drought vs. No Drought
taatataatttggtttctccccaaattctccacttgttcacttaatctttctcactacctgatcgtggaaatggcgattggaccatcaagtgtgatcattattgttgggataatcttggcgttgacttatcagtcaatcttgaaacctcctccaccgaatctatgtggctcccccggtggtccaccgatcacagcaccgcgtataaagctgcgagacgggagacatttggcatacaaggagtatggacttccaagagagaaagctaaacacaaaatagtcttcatccatggatccgatagttgtagacacgacgccgttttcgccactcttctttctccggatttagttcaagaacgaggcgtgtatatggtttcgtttgacaaaccgggttatggagagagtgatccggatccaatccgtacaccaaaaagcttggctttggatattgaagagctagctgatcaactgagtctaggatcaaagttctacgtgattgggaaatcaatgggaggacaagcggcgtggggatgccttaagtacacccctcaccggttagccggagtaacactagttgctcctgtggttaactactattggaggaacttacctttgaacatttccactgaaggatttaacttgcagcaaaagagagatcaatgggcggttcgtgttgctcactacgctccttggcttatttactggtggaacacacaaaactggttcccgggttcgagtgttgtgaaccgagatggcggtgtcttgtcacagcccgataaagatatcattttgaagctgggatcttcgaggaaaccgcatttggcagaagtaaggcagcaaggaatacatgagagtattaaccgtgatatgattgtgggttttggaaattgggaatttgatcctttagaactcgagaatccgtttttaaacagagaaggctctgttcatttgtggcaaggagacgaggacatgttagtgcctgtgacgctgcaacgttacattgcagataagcttccttggcttcactatcatgaggttgccggaggtggccacttcttccccctcgctaaaggtgtcgttgatgagattgttaagacagctcttaaccactgatgcgtagcattaagtaagataagatcccaaaggtatgaaaaaaccccaaaagattatgggacgtacaatggatttcttatgtaaaatgatttacatatacgaaaacataat

SEQ ID NO: 105933 - protein, 369 aa, Arabidopsis thaliana
  peptide (1)..(369): Ceres Seq. ID no. 13618349
  misc_feature (121)..(365): Pfam Name: alpha/beta hydrolase fold Pfam Description: alpha/beta hydrolase fold
  misc_feature (24)..(369): Homolog of NCBI NO: 18410582 NR Description: esterase/lipase/thioesterase family [Arabidopsis
  misc_feature (24)..(369): Homolog of NCBI NO: 21592662 NR Description: unknown [Arabidopsis thaliana]
  misc_feature (28)..(367): Homolog of NCBI NO: 21537089 NR Description: unknown [Arabidopsis thaliana]
  misc_feature (28)..(367): Homolog of NCBI NO: 18410575 NR Description: hydrolase, alpha/beta fold family [Arabidopsis
  misc_feature (28)..(367): Homolog of NCBI NO: 15221193 NR Description: esterase/lipase/thioesterase family [Arabidopsis
  misc_feature (31)..(369): Homolog of NCBI NO: 18404095 NR Description: hydrolase, alpha/beta fold family [Arabidopsis
  misc_feature (31)..(369): Homolog of NCBI NO: 28416665 NR Description: At2g36290 [Arabidopsis thaliana]
  misc_feature (31)..(367): Homolog of NCBI NO: 15228377 NR Description: hydrolase, alpha/beta fold family [Arabidopsis
  misc_feature (23)..(365): Homolog of NCBI NO: 37536162 NR Description: putative alpha/beta hydrolase [Oryza sativa
  misc_feature (29)..(367): Homolog of NCBI NO: 34908462 NR Description: P0683F02.22 [Oryza sativa (japonica
NIIWFLPKFSTCSLNLSHYLIVEMAIGPSSVIIIVGIILALTYQSILKPPPPNLCGSPGGPPITAPRIKLRDGRHLAYKEYGLPREKAKHKIVFIHGSDSCRHDAVFATLLSPDLVQERGVYMVSFDKPGYGESDPDPIRTPKSLALDIEELADQLSLGSKFYVIGKSMGGQAAWGCLKYTPHRLAGVTLVAPVVNYYWRNLPLNISTEGFNLQQKRDQWAVRVAHYAPWLIYWWNTQNWFPGSSVVNRDGGVLSQPDKDIILKLGSSRKPHLAEVRQQGIHESINRDMIVGFGNWEFDPLELENPFLNREGSVHLWQGDEDMLVPVTLQRYIADKLPWLHYHEVAGGGHFFPLAKGVVDEIVKTALNH

SEQ ID NO: 105934 - protein, 346 aa, Arabidopsis thaliana
  peptide (1)..(346): Ceres Seq. ID no. 13618350
  misc_feature (98)..(342): Pfam Name: alpha/beta hydrolase fold Pfam Description: alpha/beta hydrolase fold
  misc_feature (1)..(346): Homolog of NCBI NO: 18410582 NR Description: esterase/lipase/thioesterase family [Arabidopsis
  misc_feature (1)..(346): Homolog of NCBI NO: 21592662 NR Description: unknown [Arabidopsis thaliana]
  misc_feature (5)..(344): Homolog of NCBI NO: 21537089 NR Description: unknown [Arabidopsis thaliana]
  misc_feature (5)..(344): Homolog of NCBI NO: 18410575 NR Description: hydrolase, alpha/beta fold family [Arabidopsis
  misc_feature (5)..(344): Homolog of NCBI NO: 15221193 NR Description: esterase/lipase/thioesterase family [Arabidopsis
  misc_feature (8)..(346): Homolog of NCBI NO: 18404095 NR Description: hydrolase, alpha/beta fold family [Arabidopsis
  misc_feature (8)..(346): Homolog of NCBI NO: 28416665 NR Description: At2g36290 [Arabidopsis thaliana]
  misc_feature (8)..(344): Homolog of NCBI NO: 15228377 NR Description: hydrolase, alpha/beta fold family [Arabidopsis
  misc_feature (1)..(342): Homolog of NCBI NO: 37536162 NR Description: putative alpha/beta hydrolase [Oryza sativa
  misc_feature (6)..(344): Homolog of NCBI NO: 34908462 NR Description: P0683F02.22 [Oryza sativa (japonica
MAIGPSSVIIIVGIILALTYQSILKPPPPNLCGSPGGPPITAPRIKLRDGRHLAYKEYGLPREKAKHKIVFIHGSDSCRHDAVFATLLSPDLVQERGVYMVSFDKPGYGESDPDPIRTPKSLALDIEELADQLSLGSKFYVIGKSMGGQAAWGCLKYTPHRLAGVTLVAPVVNYYWRNLPLNISTEGFNLQQKRDQWAVRVAHYAPWLIYWWNTQNWFPGSSVVNRDGGVLSQPDKDIILKLGSSRKPHLAEVRQQGIHESINRDMIVGFGNWEFDPLELENPFLNREGSVHLWQGDEDMLVPVTLQRYIADKLPWLHYHEVAGGGHFFPLAKGVVDEIVKTALNH

SEQ ID NO: 105935 - protein, 247 aa, Arabidopsis thaliana; identical to SEQ ID NO: 21676
  peptide (1)..(247): Ceres Seq. ID no. 13618351
  misc_feature (1)..(243): Pfam Name: alpha/beta hydrolase fold Pfam Description: alpha/beta hydrolase fold
  misc_feature (1)..(247): Homolog of NCBI NO: 18410582 NR Description: esterase/lipase/thioesterase family [Arabidopsis
  misc_feature (1)..(247): Homolog of NCBI NO: 21592662 NR Description: unknown [Arabidopsis thaliana]
  misc_feature (1)..(245): Homolog of NCBI NO: 21537089 NR Description: unknown [Arabidopsis thaliana]
  misc_feature (1)..(245): Homolog of NCBI NO: 18410575 NR Description: hydrolase, alpha/beta fold family [Arabidopsis
  misc_feature (1)..(245): Homolog of NCBI NO: 15221193 NR Description: esterase/lipase/thioesterase family [Arabidopsis
  misc_feature (1)..(247): Homolog of NCBI NO: 18404095 NR Description: hydrolase, alpha/beta fold family [Arabidopsis
  misc_feature (1)..(247): Homolog of NCBI NO: 28416665 NR Description: At2g36290 [Arabidopsis thaliana]
  misc_feature (1)..(245): Homolog of NCBI NO: 15228377 NR Description: hydrolase, alpha/beta fold family [Arabidopsis
  misc_feature (1)..(243): Homolog of NCBI NO: 37536162 NR Description: putative alpha/beta hydrolase [Oryza sativa
  misc_feature (1)..(245): Homolog of NCBI NO: 34908462 NR Description: P0683F02.22 [Oryza sativa (japonica

SEQ ID NO: 105936 - DNA, 1062 bp, Arabidopsis thaliana
  misc_feature (1)..(1062): Ceres Seq. ID no. 13618352
  misc_feature: MA Experiment ID: 108434 Result: Down-regulated in Transcription
  misc_feature: MA Experiment 108434 PARAMETER Experiment Name: At_Root_Tips_cDNA_P Parameter: Tissue Value: Root Tips
  misc_feature: MA Experiment ID: 108461 Result: Down-regulated in Transcription
  misc_feature: MA Experiment 108461 PARAMETER Experiment Name: At_Germinating_Seeds_cDNA_P Parameter: Age (day) Value: 1 vs. 0
  misc_feature: MA Experiment 108461 PARAMETER Experiment Name: At_Germinating_Seeds_cDNA_P Parameter: Tissue Value: Germinating Seeds
  misc_feature: MA Experiment ID: 108573 Result: Up-regulated in Transcription
  misc_feature: MA Experiment 108573 PARAMETER Experiment Name: At_Drought_cDNA_P Parameter: Timepoint (hr) Value: 6
  misc_feature: MA Experiment 108573 PARAMETER Experiment Name: At_Drought_cDNA_P Parameter: Tissue Value: Aerial
  misc_feature: MA Experiment 108573 PARAMETER Experiment Name: At_Drought_cDNA_P Parameter: Treatment Value: Drought vs. No Drought
  misc_feature: MA Experiment ID: 20000071 Result: Up-regulated in Transcription
  misc_feature: MA Experiment 20000071 PARAMETER Experiment Name: At_100uM_ABA_Mutants_cDNA_P Parameter: Plant Line Value: CS8104
  misc_feature: MA Experiment 20000071 PARAMETER Experiment Name: At_100uM_ABA_Mutants_cDNA_P Parameter: Timepoint (hr) Value: 6
  misc_feature: MA Experiment 20000071 PARAMETER Experiment Name: At_100uM_ABA_Mutants_cDNA_P Parameter: Tissue Value: Aerial
  misc_feature: MA Experiment 20000071 PARAMETER Experiment Name: At_100uM_ABA_Mutants_cDNA_P Parameter: Treatment Value: 100uM ABA vs. No Treatment
  misc_feature: MA Experiment ID: 20000184 Result: Down-regulated in Transcription
  misc_feature: MA Experiment 20000184 PARAMETER Experiment Name: At_Shoots__P Parameter: Age (day) Value: 7
  misc_feature: MA Experiment 20000184 PARAMETER Experiment Name: At_Shoots__P Parameter: Tissue Value: Shoots vs. Whole Plant
  misc_feature: MA Experiment ID: 20000438 Result: Down-regulated in Transcription
  misc_feature: MA Experiment 20000438 PARAMETER Experiment Name: At_Shoots__P Parameter: Age (day) Value: 14
  misc_feature: MA Experiment 20000438 PARAMETER Experiment Name: At_Shoots__P Parameter: Tissue Value: Shoots vs. Whole Plant
  misc_feature: MA Experiment ID: 20001557 Result: Down-regulated in Transcription
  misc_feature: MA Experiment 20001557 PARAMETER Experiment Name: At_Drought_Soil_Dry_P Parameter: Age (day) Value: 27
  misc_feature: MA Experiment 20001557 PARAMETER Experiment Name: At_Drought_Soil_Dry_P Parameter: Organism Value: A. thaliana
  misc_feature: MA Experiment 20001557 PARAMETER Experiment Name: At_Drought_Soil_Dry_P Parameter: Plant Line Value: WS
  misc_feature: MA Experiment 20001557 PARAMETER Experiment Name: At_Drought_Soil_Dry_P Parameter: Post Timepoint (hr) Value: 3
  misc_feature: MA Experiment 20001557 PARAMETER Experiment Name: At_Drought_Soil_Dry_P Parameter: Post-Treatment Value: Re-Water vs. No Drought
  misc_feature: MA Experiment 20001557 PARAMETER Experiment Name: At_Drought_Soil_Dry_P Parameter: Timepoint (day) Value: 13
  misc_feature: MA Experiment 20001557 PARAMETER Experiment Name: At_Drought_Soil_Dry_P Parameter: Treatment Value: Drought vs. No Drought
  misc_feature: MA Experiment ID: 20001558 Result: Down-regulated in Transcription
  misc_feature: MA Experiment 20001558 PARAMETER Experiment Name: At_Drought_Soil_Dry_P Parameter: Age (day) Value: 27
  misc_feature: MA Experiment 20001558 PARAMETER Experiment Name: At_Drought_Soil_Dry_P Parameter: Organism Value: A. thaliana
  misc_feature: MA Experiment 20001558 PARAMETER Experiment Name: At_Drought_Soil_Dry_P Parameter: Plant Line Value: WS
  misc_feature: MA Experiment 20001558 PARAMETER Experiment Name: At_Drought_Soil_Dry_P Parameter: Post Timepoint (hr) Value: 6
  misc_feature: MA Experiment 20001558 PARAMETER Experiment Name: At_Drought_Soil_Dry_P Parameter: Post-Treatment Value: Re-Water vs. No Drought
  misc_feature: MA Experiment 20001558 PARAMETER Experiment Name: At_Drought_Soil_Dry_P Parameter: Timepoint (day) Value: 13
  misc_feature: MA Experiment 20001558 PARAMETER Experiment Name: At_Drought_Soil_Dry_P Parameter: Treatment Value: Drought vs. No Drought
  misc_feature: MA Experiment ID: 20001560 Result: Down-regulated in Transcription
  misc_feature: MA Experiment 20001560 PARAMETER Experiment Name: At_Drought_Soil_Dry_P Parameter: Age (day) Value: 28
  misc_feature: MA Experiment 20001560 PARAMETER Experiment Name: At_Drought_Soil_Dry_P Parameter: Organism Value: A. thaliana
  misc_feature: MA Experiment 20001560 PARAMETER Experiment Name: At_Drought_Soil_Dry_P Parameter: Plant Line Value: WS
  misc_feature: MA Experiment 20001560 PARAMETER Experiment Name: At_Drought_Soil_Dry_P Parameter: Post Timepoint (hr) Value: None
  misc_feature: MA Experiment 20001560 PARAMETER Experiment Name: At_Drought_Soil_Dry_P Parameter: Post-Treatment Value: None
  misc_feature: MA Experiment 20001560 PARAMETER Experiment Name: At_Drought_Soil_Dry_P Parameter: Timepoint (day) Value: 14
  misc_feature: MA Experiment 20001560 PARAMETER Experiment Name: At_Drought_Soil_Dry_P Parameter: Treatment Value: Drought vs. No Drought
  misc_feature: MA Experiment ID: 20001911 Result: Up-regulated in Transcription
  misc_feature: MA Experiment 20001911 PARAMETER Experiment Name: At_Drought_Reproduction_P Parameter: Age (day) Value: 40
  misc_feature: MA Experiment 20001911 PARAMETER Experiment Name: At_Drought_Reproduction_P Parameter: Organism Value: A. thaliana
  misc_feature: MA Experiment 20001911 PARAMETER Experiment Name: At_Drought_Reproduction_P Parameter: Plant Line Value: WS
  misc_feature: MA Experiment 20001911 PARAMETER Experiment Name: At_Drought_Reproduction_P Parameter: Timepoint (day) Value: 10
  misc_feature: MA Experiment 20001911 PARAMETER Experiment Name: At_Drought_Reproduction_P Parameter: Tissue Value: Flowers
  misc_feature: MA Experiment 20001911 PARAMETER Experiment Name: At_Drought_Reproduction_P Parameter: Treatment Value: Drought vs. No Drought
ccgtcttcgttgctttttcgagcggtgcctagtctcaacttccatggctgacatcttaccttcaaattttctcaaaccaaccaaaaagcttcttctccttttctaaaatttcatcaaaccctatagggttttctcaatacaattgattttttttttcttcttcttctctatggatacgaccctttctcccgccgtggaggcggaacaaatcgccgactcaacgatcgacactgtttctcgtttgatcgccggcgttttctccggcgcacttactggaatcttcgctatggctggagcttttactggagctgtaactggtgcggtggcaggaagagctgcacagtatggagttctccgtggggctgcacttggcgctgttgctggagctatcctctctgttgaagtgttggaggcttctcgtgcgtattggtatttagagctgtcaggatcaaggggtccatcatctatggcagattttgtagagcaactgtttcgtgggagactggtagatgaacaacttatgtcaacaatgataaattcacaccattggcagttaaggatttccgatgtaagttatgaagagcgggaggatgtttatggtgaactggaagctagaggcttatcgggtgactctttaaggaaactaccatgctatataatgtcaagtgaaatggtcaggaggcaggtcactcactgcacaatttgtctgcaggacatcaaaacaggggaaatcacacgaagcttaccgaaatgtgatcatacgtttcatctggtatgtgttgataaatggctcatcagacacgggtcatgccccatttgcagacaggcagttaaagattaaaacacgactgttgccgagctgtgtacatagcaaaaacacattatccttatatgttgttgtaacttgtaagtctaaaacccctttcttctgtatttttcctcatttcatttagagcaatctcagcttgagccataggtttcgacttttgaatgtatattgttgtagacatgaataagaatacctacagatgtattgaaaagaatatagaactcgatcaagtc

SEQ ID NO: 105937 - protein, 223 aa, Arabidopsis thaliana; identical to SEQ ID NO: 22725
  peptide (1)..(223): Ceres Seq. ID no. 13618353
  misc_feature (176)..(217): Pfam Name: Zinc finger, C3HC4 type (RING finger) Pfam Description: Zinc finger, C3HC4 type (RING finger)
  misc_feature (1)..(223): Homolog of NCBI NO: 18410608 NR Description: zinc finger (C3HC4-type RING finger) protein [Arabidopsis thaliana] >gi|15215808|gb|AAK91449.1| [Arabidopsis thaliana] >gi|20147407|gb|AAM10413.1|
  misc_feature (1)..(223): Homolog of NCBI NO: 21592935 NR Description: putative RING zinc finger protein [Arabidopsis
  misc_feature (118)..(223): Homolog of NCBI NO: 25406345 NR Description: probable RING zinc finger protein F1M20.9 - Arabidopsis thaliana >gi|12324823|gb|AAG52385.1|AC011765_37
  misc_feature (4)..(219): Homolog of NCBI NO: 15239242 NR Description: zinc finger (C3HC4-type RING finger) protein [Arabidopsis thaliana] >gi|10177122|dbj|BAB10412.1| contains to unknown protein~gb|AAF18680.1~gene_id:K2A18.15 [Arabidopsis
  misc_feature (12)..(221): Homolog of NCBI NO: 26452210 NR Description: unknown protein [Arabidopsis thaliana]
  misc_feature (12)..(221): Homolog of NCBI NO: 30680091 NR Description: expressed protein [Arabidopsis thaliana]
  misc_feature (7)..(219): Homolog of NCBI NO: 26451101 NR Description: unknown protein [Arabidopsis thaliana]
  misc_feature (12)..(216): Homolog of NCBI NO: 25411815 NR Description: hypothetical protein At2g17730 [imported] -
  misc_feature (7)..(219): Homolog of NCBI NO: 27524902 NR Description: NEP1-interacting protein [Arabidopsis thaliana]
  misc_feature (24)..(219): Homolog of NCBI NO: 18855037 NR Description: putative zinc finger protein [Oryza sativa]

SEQ ID NO: 105938 - protein, 184 aa, Arabidopsis thaliana; identical to SEQ ID NO: 22726
  peptide (1)..(184): Ceres Seq. ID no. 13618354
  misc_feature (137)..(178): Pfam Name: Zinc finger, C3HC4 type (RING finger) Pfam Description: Zinc finger, C3HC4 type (RING finger)
  misc_feature (1)..(184): Homolog of NCBI NO: 18410608 NR Description: zinc finger (C3HC4-type RING finger) protein [Arabidopsis thaliana] >gi|15215808|gb|AAK91449.1| [Arabidopsis thaliana] >gi|20147407|gb|AAM10413.1|
  misc_feature (1)..(184): Homolog of NCBI NO: 21592935 NR Description: putative RING zinc finger protein [Arabidopsis
  misc_feature (79)..(184): Homolog of NCBI NO: 25406345 NR Description: probable RING zinc finger protein F1M20.9 - Arabidopsis thaliana >gi|12324823|gb|AAG52385.1|AC011765_37
  misc_feature (1)..(180): Homolog of NCBI NO: 15239242 NR Description: zinc finger (C3HC4-type RING finger) protein [Arabidopsis thaliana] >gi|10177122|dbj|BAB10412.1| contains to unknown protein~gb|AAF18680.1~gene_id:K2A18.15 [Arabidopsis
  misc_feature (1)..(182): Homolog of NCBI NO: 26452210 NR Description: unknown protein [Arabidopsis thaliana]
  misc_feature (1)..(182): Homolog of NCBI NO: 30680091 NR Description: expressed protein [Arabidopsis thaliana]
  misc_feature (1)..(180): Homolog of NCBI NO: 26451101 NR Description: unknown protein [Arabidopsis thaliana]
  misc_feature (1)..(177): Homolog of NCBI NO: 25411815 NR Description: hypothetical protein At2g17730 [imported] -
  misc_feature (1)..(180): Homolog of NCBI NO: 27524902 NR Description: NEP1-interacting protein [Arabidopsis thaliana]
  misc_feature (1)..(180): Homolog of NCBI NO: 18855037 NR Description: putative zinc finger protein [Oryza sativa]

SEQ ID NO: 105939 - protein, 124 aa, Arabidopsis thaliana; identical to SEQ ID NO: 22727
  peptide (1)..(124): Ceres Seq. ID no. 13618355
  misc_feature (77)..(118): Pfam Name: Zinc finger, C3HC4 type (RING finger) Pfam Description: Zinc finger, C3HC4 type (RING finger)
  misc_feature (1)..(124): Homolog of NCBI NO: 18410608 NR Description: zinc finger (C3HC4-type RING finger) protein [Arabidopsis thaliana] >gi|15215808|gb|AAK91449.1| [Arabidopsis thaliana] >gi|20147407|gb|AAM10413.1|
  misc_feature (1)..(124): Homolog of NCBI NO: 21592935 NR Description: putative RING zinc finger protein [Arabidopsis
  misc_feature (19)..(124): Homolog of NCBI NO: 25406345 NR Description: probable RING zinc finger protein F1M20.9 - Arabidopsis thaliana >gi|12324823|gb|AAG52385.1|AC011765_37
  misc_feature (1)..(120): Homolog of NCBI NO: 15239242 NR Description: zinc finger (C3HC4-type RING finger) protein [Arabidopsis thaliana] >gi|10177122|dbj|BAB10412.1| contains to unknown protein~gb|AAF18680.1~gene_id:K2A18.15 [Arabidopsis
  misc_feature (1)..(122): Homolog of NCBI NO: 26452210 NR Description: unknown protein [Arabidopsis thaliana]
  misc_feature (1)..(122): Homolog of NCBI NO: 30680091 NR Description: expressed protein [Arabidopsis thaliana]
  misc_feature (1)..(120): Homolog of NCBI NO: 26451101 NR Description: unknown protein [Arabidopsis thaliana]
  misc_feature (1)..(117): Homolog of NCBI NO: 25411815 NR Description: hypothetical protein At2g17730 [imported] -
  misc_feature (1)..(120): Homolog of NCBI NO: 27524902 NR Description: NEP1-interacting protein [Arabidopsis thaliana]
  misc_feature (1)..(120): Homolog of NCBI NO: 18855037 NR Description: putative zinc finger protein [Oryza sativa]

SEQ ID NO: 105940 - DNA, 1313 bp, Arabidopsis thaliana
  misc_feature (1)..(1313): Ceres Seq. ID no. 13618356
  misc_feature: MA Experiment ID: 108434 Result: Down-regulated in Transcription
  misc_feature: MA Experiment 108434 PARAMETER Experiment Name: At_Root_Tips_cDNA_P Parameter: Tissue Value: Root Tips
  misc_feature: MA Experiment ID: 108435 Result: Up-regulated in Transcription
  misc_feature: MA Experiment 108435 PARAMETER Experiment Name: At_stm_Mutants_cDNA_P Parameter: Plant Line Value: wt Landsburg vs stm
  misc_feature: MA Experiment 108435 PARAMETER Experiment Name: At_stm_Mutants_cDNA_P Parameter: Tissue Value: Shoot Apical Meristem Region
  misc_feature: MA Experiment ID: 108462 Result: Up-regulated in Transcription
  misc_feature: MA Experiment 108462 PARAMETER Experiment Name: At_Germinating_Seeds_cDNA_P Parameter: Age (day) Value: 2 vs. 0
  misc_feature: MA Experiment 108462 PARAMETER Experiment Name: At_Germinating_Seeds_cDNA_P Parameter: Tissue Value: Germinating Seeds
  misc_feature: MA Experiment ID: 108463 Result: Up-regulated in Transcription
  misc_feature: MA Experiment 108463 PARAMETER Experiment Name: At_Germinating_Seeds_cDNA_P Parameter: Age (day) Value: 3 vs. 0
  misc_feature: MA Experiment 108463 PARAMETER Experiment Name: At_Germinating_Seeds_cDNA_P Parameter: Tissue Value: Germinating Seeds
  misc_feature: MA Experiment ID: 108464 Result: Up-regulated in Transcription
  misc_feature: MA Experiment 108464 PARAMETER Experiment Name: At_Germinating_Seeds_cDNA_P Parameter: Age (day) Value: 4 vs. 0
  misc_feature: MA Experiment 108464 PARAMETER Experiment Name: At_Germinating_Seeds_cDNA_P Parameter: Tissue Value: Germinating Seeds
  misc_feature: MA Experiment ID: 108501 Result: Down-regulated in Transcription
  misc_feature: MA Experiment 108501 PARAMETER Experiment Name: At_ap2_floral_buds_cDNA_P Parameter: Plant Line Value: ap2 (Ler.)
  misc_feature: MA Experiment 108501 PARAMETER Experiment Name: At_ap2_floral_buds_cDNA_P Parameter: Tissue Value: Closed Flower
  misc_feature: MA Experiment ID: 108594 Result: Down-regulated in Transcription
  misc_feature: MA Experiment 108594 PARAMETER Experiment Name: At_Ler-rhl_Root_cDNA_P Parameter: Plant Line Value: null
  misc_feature: MA Experiment ID: 20000184 Result: Up-regulated in Transcription
  misc_feature: MA Experiment 20000184 PARAMETER Experiment Name: At_Shoots__P Parameter: Age (day) Value: 7
  misc_feature: MA Experiment 20000184 PARAMETER Experiment Name: At_Shoots__P Parameter: Tissue Value: Shoots vs. Whole Plant
  misc_feature: MA Experiment ID: 20000185 Result: Up-regulated in Transcription
  misc_feature: MA Experiment 20000185 PARAMETER Experiment Name: At_Roots__P Parameter: Age (day) Value: 7 vs. 21
  misc_feature: MA Experiment 20000185 PARAMETER Experiment Name: At_Roots__P Parameter: Organism Value: A. thaliana
  misc_feature: MA Experiment 20000185 PARAMETER Experiment Name: At_Roots__P Parameter: Tissue Value: Roots vs. Whole Plant
  misc_feature: MA Experiment ID: 20000227 Result: Down-regulated in Transcription
  misc_feature: MA Experiment 20000227 PARAMETER Experiment Name: At_Root-Tips-vs-Tops_P Parameter: Tissue Value: Root Tips vs. Root Tops
  misc_feature: MA Experiment ID: 20000439 Result: Up-regulated in Transcription
  misc_feature: MA Experiment 20000439 PARAMETER Experiment Name: At_Roots__P Parameter: Age (day) Value: 14 vs. 21
  misc_feature: MA Experiment 20000439 PARAMETER Experiment Name: At_Roots__P Parameter: Organism Value: A. thaliana
  misc_feature: MA Experiment 20000439 PARAMETER Experiment Name: At_Roots__P Parameter: Tissue Value: Roots vs. Whole Plant
  misc_feature: MA Experiment ID: 20000460 Result: Down-regulated in Transcription
  misc_feature: MA Experiment 20000460 PARAMETER Experiment Name: At_10percent_PEG_P Parameter: Age (day) Value: 12
  misc_feature: MA Experiment 20000460 PARAMETER Experiment Name: At_10percent_PEG_P Parameter: Organism Value: A. thaliana
  misc_feature: MA Experiment 20000460 PARAMETER Experiment Name: At_10percent_PEG_P Parameter: Plant Line Value: WS
  misc_feature: MA Experiment 20000460 PARAMETER Experiment Name: At_10percent_PEG_P Parameter: Timepoint (day) Value: 12
  misc_feature: MA Experiment 20000460 PARAMETER Experiment Name: At_10percent_PEG_P Parameter: Tissue Value: Whole Plant
  misc_feature: MA Experiment 20000460 PARAMETER Experiment Name: At_10percent_PEG_P Parameter: Treatment Value: 10percent PEG vs. No Treatment
  misc_feature: MA Experiment ID: 20001248 Result: Down-regulated in Transcription
  misc_feature: MA Experiment 20001248 PARAMETER Experiment Name: At_Far-red-induction_P Parameter: Age (day) Value: 7
  misc_feature: MA Experiment 20001248 PARAMETER Experiment Name: At_Far-red-induction_P Parameter: Light Value: Far-red vs. White
  misc_feature: MA Experiment 20001248 PARAMETER Experiment Name: At_Far-red-induction_P Parameter: Organism Value: A. thaliana
  misc_feature: MA Experiment 20001248 PARAMETER Experiment Name: At_Far-red-induction_P Parameter: Plant Line Value: Columbia
  misc_feature: MA Experiment 20001248 PARAMETER Experiment Name: At_Far-red-induction_P Parameter: Timepoint (hr) Value: 4
  misc_feature: MA Experiment 20001248 PARAMETER Experiment Name: At_Far-red-induction_P Parameter: Tissue Value: Whole Plant
  misc_feature: MA Experiment ID: 20001761 Result: Down-regulated in Transcription
  misc_feature: MA Experiment 20001761 PARAMETER Experiment Name: At_50mM_NH4NO3_L-to-H_P Parameter: Timepoint (hr) Value: 4
  misc_feature: MA Experiment 20001761 PARAMETER Experiment Name: At_50mM_NH4NO3_L-to-H_P Parameter: Tissue Value: Siliques
  misc_feature: MA Experiment 20001761 PARAMETER Experiment Name: At_50mM_NH4NO3_L-to-H_P Parameter: Treatment Value: 50mM NH4NO3 vs 100mM Mannitol
  misc_feature: MA Experiment ID: 20001904 Result: Up-regulated in Transcription
  misc_feature: MA Experiment 20001904 PARAMETER Experiment Name: At_Drought_Reproduction_P Parameter: Age (day) Value: 37
  misc_feature: MA Experiment 20001904 PARAMETER Experiment Name: At_Drought_Reproduction_P Parameter: Organism Value: A. thaliana
  misc_feature: MA Experiment 20001904 PARAMETER Experiment Name: At_Drought_Reproduction_P Parameter: Plant Line Value: WS
  misc_feature: MA Experiment 20001904 PARAMETER Experiment Name: At_Drought_Reproduction_P Parameter: Timepoint (day) Value: 7
  misc_feature: MA Experiment 20001904 PARAMETER Experiment Name: At_Drought_Reproduction_P Parameter: Tissue Value: Rosettes
  misc_feature: MA Experiment 20001904 PARAMETER Experiment Name: At_Drought_Reproduction_P Parameter: Treatment Value: Drought vs. No Drought
  misc_feature: MA Experiment ID: 20001906 Result: Up-regulated in Transcription
  misc_feature: MA Experiment 20001906 PARAMETER Experiment Name: At_Drought_Reproduction_P Parameter: Age (day) Value: 35
  misc_feature: MA Experiment 20001906 PARAMETER Experiment Name: At_Drought_Reproduction_P Parameter: Organism Value: A. thaliana
  misc_feature: MA Experiment 20001906 PARAMETER Experiment Name: At_Drought_Reproduction_P Parameter: Plant Line Value: WS
  misc_feature: MA Experiment 20001906 PARAMETER Experiment Name: At_Drought_Reproduction_P Parameter: Timepoint (day) Value: 5
  misc_feature: MA Experiment 20001906 PARAMETER Experiment Name: At_Drought_Reproduction_P Parameter: Tissue Value: Siliques
  misc_feature: MA Experiment 20001906 PARAMETER Experiment Name: At_Drought_Reproduction_P Parameter: Treatment Value: Drought vs. No Drought
aacacacattcaaatttggcgacatgaagttctgcgcgatattcgtgttattcatcgttcttgcaatcaacggctacgattgcaagatagtccaatttatatttggagattcattgtctgatgtaggcaacaataagaatctacctaggagtttagcgacggcgaatctgcccttttacggtattgattttggcaatggtttgcctaatggaaggttcactaatggccgcactgtttcagacattataggtgataaaattggattgccaagaccagtagccttcttggatccatcaatgaatgaagatgtaatacttgaaaatggagtgaactatgcttcaggaggtggtggaatcttgaacgaaactggtggttatttcatccaaagattttcgctgtggaagcaaatagaattattccaagggacacaagatgtagttgtggcaaagatagggaaaaaagaagcagacaagttctttcaagatgctcgatacgtcgtcgctttaggcagcaatgacttcattaacaactatttgatgcctgtctatagcgactcttggaaatacaatgatcaaaccttcgtcgactacttaatggaaacacttgaatctcaactcaaggtgttacatagtttaggagcgaggaagctaatggtgtttggtttaggaccaatgggttgtatcccactgcaaagagctctaagcctggatggaaattgtcaaaacaaagcgagtaatcttgctaagagattcaacaaagctgccaccacaatgctcctagatctcgagaccaagctccctaacgcaagctacaggtttggtgaagcctatgacctcgtcaacgacgtcatcactaacccaaaaaaatacgggtttgataactcggattcgccgtgttgctcgttctacagaatccggcctgcgctaacgtgtattccagcgtcgacattgtgtaaagacagaagtaagtatgtgttttgggatgagtatcatcccaccgataaggctaacgaactcgtcgctaatatactcatcaaaagatttgacttcatgcgtgccgatgacggtatctcccatgctccatctcccgcgccggatatttctccttcttccgacaataactgatcggaattacagtcttaattatatataatacttccggtttctgtaaattgtgatcatgttgtggagagtttcgtttgtctttcattttgatcatgtcaaataatgtttgattttctgtaattgttcttcttttgttgtatctgttaattcgagaatttgtcttataatagtaaagatattatcatgttt

SEQ ID NO: 105941 - protein, 373 aa, Arabidopsis thaliana
  peptide (1)..(373): Ceres Seq. ID no. 13618357
  misc_feature (8)..(373): Homolog of NCBI NO: 15221260 NR Description: GDSL-motif lipase/hydrolase protein [Arabidopsis
  misc_feature (99)..(373): Homolog of NCBI NO: 27808542 NR Description: At1g74460 [Arabidopsis thaliana]
  misc_feature (29)..(364): Homolog of NCBI NO: 21537293 NR Description: GDSL-motif lipase/hydrolase-like protein
  misc_feature (29)..(364): Homolog of NCBI NO: 30693137 NR Description: lipase family [Arabidopsis thaliana]
  misc_feature (32)..(344): Homolog of NCBI NO: 15229742 NR Description: GDSL-motif lipase/hydrolase protein [Arabidopsis >gi|7630026|emb|CAB88323.1| putative protein [Arabidopsis >gi|26450386|dbj|BAC42308.1| unknown protein [Arabidopsis
  misc_feature (32)..(344): Homolog of NCBI NO: 15227849 NR Description: GDSL-motif lipase/hydrolase protein [Arabidopsis
  misc_feature (32)..(341): Homolog of NCBI NO: 18417760 NR Description: GDSL-motif lipase/hydrolase protein [Arabidopsis
  misc_feature (32)..(341): Homolog of NCBI NO: 11280578 NR Description: hypothetical protein F14F8_100 - Arabidopsis >gi|9755617|emb|CAC01771.1| putative protein [Arabidopsis
  misc_feature (32)..(353): Homolog of NCBI NO: 15241626 NR Description: GDSL-motif lipase/hydrolase protein [Arabidopsis
  misc_feature (32)..(344): Homolog of NCBI NO: 38345537 NR Description: OSJNBa0020J04.12 [Oryza sativa (japonica
HTFKFGDMKFCAIFVLFIVLAINGYDCKIVQFIFGDSLSDVGNNKNLPRSLATANLPFYGIDFGNGLPNGRFTNGRTVSDIIGDKIGLPRPVAFLDPSMNEDVILENGVNYASGGGGILNETGGYFIQRFSLWKQIELFQGTQDVVVAKIGKKEADKFFQDARYVVALGSNDFINNYLMPVYSDSWKYNDQTFVDYLMETLESQLKVLHSLGARKLMVFGLGPMGCIPLQRALSLDGNCQNKASNLAKRFNKAATTMLLDLETKLPNASYRFGEAYDLVNDVITNPKKYGFDNSDSPCCSFYRIRPALTCIPASTLCKDRSKYVFWDEYHPTDKANELVANILIKRFDFMRADDGISHAPSPAPDISPSSDNN

SEQ ID NO: 105942 - protein, 366 aa, Arabidopsis thaliana; identical to SEQ ID NO: 21452
  peptide (1)..(366): Ceres Seq. ID no. 13618358
  misc_feature (1)..(366): Homolog of NCBI NO: 15221260 NR Description: GDSL-motif lipase/hydrolase protein [Arabidopsis
  misc_feature (92)..(366): Homolog of NCBI NO: 27808542 NR Description: At1g74460 [Arabidopsis thaliana]
  misc_feature (22)..(357): Homolog of NCBI NO: 21537293 NR Description: GDSL-motif lipase/hydrolase-like protein
  misc_feature (22)..(357): Homolog of NCBI NO: 30693137 NR Description: lipase family [Arabidopsis thaliana]
  misc_feature (25)..(337): Homolog of NCBI NO: 15229742 NR Description: GDSL-motif lipase/hydrolase protein [Arabidopsis >gi|7630026|emb|CAB88323.1| putative protein [Arabidopsis >gi|26450386|dbj|BAC42308.1| unknown protein [Arabidopsis
  misc_feature (25)..(337): Homolog of NCBI NO: 15227849 NR Description: GDSL-motif lipase/hydrolase protein [Arabidopsis
  misc_feature (25)..(334): Homolog of NCBI NO: 18417760 NR Description: GDSL-motif lipase/hydrolase protein [Arabidopsis
  misc_feature (25)..(334): Homolog of NCBI NO: 11280578 NR Description: hypothetical protein F14F8_100 - Arabidopsis >gi|9755617|emb|CAC01771.1| putative protein [Arabidopsis
  misc_feature (25)..(346): Homolog of NCBI NO: 15241626 NR Description: GDSL-motif lipase/hydrolase protein [Arabidopsis
  misc_feature (25)..(337): Homolog of NCBI NO: 38345537 NR Description: OSJNBa0020J04.12 [Oryza sativa (japonica

SEQ ID NO: 105943 - protein, 275 aa, Arabidopsis thaliana; identical to SEQ ID NO: 21453
  peptide (1)..(275): Ceres Seq. ID no. 13618359
  misc_feature (1)..(275): Homolog of NCBI NO: 15221260 NR Description: GDSL-motif lipase/hydrolase protein [Arabidopsis
  misc_feature (1)..(275): Homolog of NCBI NO: 27808542 NR Description: At1g74460 [Arabidopsis thaliana]
  misc_feature (1)..(266): Homolog of NCBI NO: 21537293 NR Description: GDSL-motif lipase/hydrolase-like protein
  misc_feature (1)..(266): Homolog of NCBI NO: 30693137 NR Description: lipase family [Arabidopsis thaliana]
  misc_feature (1)..(246): Homolog of NCBI NO: 15229742 NR Description: GDSL-motif lipase/hydrolase protein [Arabidopsis >gi|7630026|emb|CAB88323.1| putative protein [Arabidopsis >gi|26450386|dbj|BAC42308.1| unknown protein [Arabidopsis
  misc_feature (1)..(246): Homolog of NCBI NO: 15227849 NR Description: GDSL-motif lipase/hydrolase protein [Arabidopsis
  misc_feature (1)..(243): Homolog of NCBI NO: 18417760 NR Description: GDSL-motif lipase/hydrolase protein [Arabidopsis
  misc_feature (1)..(243): Homolog of NCBI NO: 11280578 NR Description: hypothetical protein F14F8_100 - Arabidopsis >gi|9755617|emb|CAC01771.1| putative protein [Arabidopsis
  misc_feature (1)..(255): Homolog of NCBI NO: 15241626 NR Description: GDSL-motif lipase/hydrolase protein [Arabidopsis
  misc_feature (1)..(246): Homolog of NCBI NO: 38345537 NR Description: OSJNBa0020J04.12 [Oryza sativa (japonica

SEQ ID NO: 105944 - DNA, 1741 bp, Arabidopsis thaliana
  misc_feature (1)..(1741): Ceres Seq. ID no. 13618364
  misc_feature: MA Experiment ID: 108462 Result: Down-regulated in Transcription
  misc_feature: MA Experiment 108462 PARAMETER Experiment Name: At_Germinating_Seeds_cDNA_P Parameter: Age (day) Value: 2 vs. 0
  misc_feature: MA Experiment 108462 PARAMETER Experiment Name: At_Germinating_Seeds_cDNA_P Parameter: Tissue Value: Germinating Seeds
  misc_feature: MA Experiment ID: 108473 Result: Down-regulated in Transcription
  misc_feature: MA Experiment 108473 PARAMETER Experiment Name: At_Drought_Flowers_cDNA_P Parameter: Timepoint (hr) Value: 7 d
  misc_feature: MA Experiment 108473 PARAMETER Experiment Name: At_Drought_Flowers_cDNA_P Parameter: Tissue Value: Flower
  misc_feature: MA Experiment 108473 PARAMETER Experiment Name: At_Drought_Flowers_cDNA_P Parameter: Treatment Value: Drought vs. No Drought
  misc_feature: MA Experiment ID: 108474 Result: Up-regulated in Transcription
  misc_feature: MA Experiment 108474 PARAMETER Experiment Name: At_Drought_Flowers_cDNA_P Parameter: Timepoint (hr) Value: null
  misc_feature: MA Experiment 108474 PARAMETER Experiment Name: At_Drought_Flowers_cDNA_P Parameter: Treatment Value: Drought vs. No Drought
  misc_feature: MA Experiment ID: 108501 Result: Down-regulated in Transcription
  misc_feature: MA Experiment 108501 PARAMETER Experiment Name: At_ap2_floral_buds_cDNA_P Parameter: Plant Line Value: ap2 (Ler.)
  misc_feature: MA Experiment 108501 PARAMETER Experiment Name: At_ap2_floral_buds_cDNA_P Parameter: Tissue Value: Closed Flower
  misc_feature: MA Experiment ID: 20000234 Result: Down-regulated in Transcription
  misc_feature: MA Experiment 20000234 PARAMETER Experiment Name: At_Siliques_P Parameter: Age (day) Value: 21
  misc_feature: MA Experiment 20000234 PARAMETER Experiment Name: At_Siliques_P Parameter: Organism Value: A. thaliana
  misc_feature: MA Experiment 20000234 PARAMETER Experiment Name: At_Siliques_P Parameter: Plant Line Value: WS
  misc_feature: MA Experiment 20000234 PARAMETER Experiment Name: At_Siliques_P Parameter: Tissue Value: Less Than 5mm Siliques vs. Whole Plant
  misc_feature: MA Experiment ID: 20000265 Result: Up-regulated in Transcription
  misc_feature: MA Experiment 20000265 PARAMETER Experiment Name: At_Open_Flower_P Parameter: Age (day) Value: 21
  misc_feature: MA Experiment 20000265 PARAMETER Experiment Name: At_Open_Flower_P Parameter: Plant Line Value: WS
  misc_feature: MA Experiment 20000265 PARAMETER Experiment Name: At_Open_Flower_P Parameter: Tissue Value: Closed Flower vs. Whole Plant
  misc_feature: MA Experiment ID: 20000286 Result: Up-regulated in Transcription
  misc_feature: MA Experiment 20000286 PARAMETER Experiment Name: At_Open_Flower_P Parameter: Age (day) Value: 21
  misc_feature: MA Experiment 20000286 PARAMETER Experiment Name: At_Open_Flower_P Parameter: Plant Line Value: WS
  misc_feature: MA Experiment 20000286 PARAMETER Experiment Name: At_Open_Flower_P Parameter: Tissue Value: Half Open vs. Whole Plant
  misc_feature: MA Experiment ID: 20001451 Result: Up-regulated in Transcription
  misc_feature: MA Experiment 20001451 PARAMETER Experiment Name: At_Far-red-induction_P Parameter: Age (day) Value: 7
  misc_feature: MA Experiment 20001451 PARAMETER Experiment Name: At_Far-red-induction_P Parameter: Light Value: Far-red vs. White
  misc_feature: MA Experiment 20001451 PARAMETER Experiment Name: At_Far-red-induction_P Parameter: Organism Value: A. thaliana
  misc_feature: MA Experiment 20001451 PARAMETER Experiment Name: At_Far-red-induction_P Parameter: Plant Line Value: Columbia
  misc_feature: MA Experiment 20001451 PARAMETER Experiment Name: At_Far-red-induction_P Parameter: Timepoint (hr) Value: 24
  misc_feature: MA Experiment 20001451 PARAMETER Experiment Name: At_Far-red-induction_P Parameter: Tissue Value: Whole Plant
  misc_feature: MA Experiment ID: 20001910 Result: Down-regulated in Transcription
  misc_feature: MA Experiment 20001910 PARAMETER Experiment Name: At_Drought_Reproduction_P Parameter: Age (day) Value: 37
  misc_feature: MA Experiment 20001910 PARAMETER Experiment Name: At_Drought_Reproduction_P Parameter: Organism Value: A. thaliana
  misc_feature: MA Experiment 20001910 PARAMETER Experiment Name: At_Drought_Reproduction_P Parameter: Plant Line Value: WS
  misc_feature: MA Experiment 20001910 PARAMETER Experiment Name: At_Drought_Reproduction_P Parameter: Timepoint (day) Value: 7
  misc_feature: MA Experiment 20001910 PARAMETER Experiment Name: At_Drought_Reproduction_P Parameter: Tissue Value: Flowers
  misc_feature: MA Experiment 20001910 PARAMETER Experiment Name: At_Drought_Reproduction_P Parameter: Treatment Value: Drought vs. No Drought
aatgtacatcaaacttacatcaataactgttgtttcacatcgtcgaagcaaaaatgattatatatctaatttcattactccctatcatcgtcgccaccctcatgctttatcaacgatggtggagatccaacataccgccgggaccaaaaccaaagtttctgcttggaaaccttcatcaaatgaaaccactttggacgcattctttctcggagtggtcagagacttatggtcctatcatatcggtgtggatagggtcacagctcactgtcgtggtctcgagctctgatctagccagacaagtgttgagagacaaagaccatcagttgtctaaccgacacaggatcgcaaggatgactcagaccggtactgatcttgtttggtccgattacagtccacattatgtgaaactgaggaaactctgtacactcgagctcttctctctgaaaagcatcgaaaatttcaggtccttgagagagatggaagcaagatcgatggttgtgtcgattctgaaggacttaatgagcaattcaggggatgatcaggagcgaaaaccggtgattgtgaggaagtacctagctgcggttgttttgaataccatctcaaggttaatgatagggaaagagttcgggtctgaggaaggaaaagagtttaaagccatcgttgagaaagaacatcttctcagtggctcagggacgattcttgatcacgtctggtggctcaaatgggtttcttcttggttctttagtgataaggaattcttagcgcacaaggatcggagaacaaagtggtttagaggagctattatggtggaagaagatatagaaatagaggatcacaggggatttgttcggaaattgttggtgttaaaagagcagaaagagctgagcgaagagacggttgggggactagtctggaacatgttaaccgcgggtgctgacacaactgcagttgttatcgaatgggctatggcagagatgatcaaatgcccgaccgtgcaagaaaaggcgcaacaggagcttgattctgtggttggatccgaaaggttaatgactgaatcagatatccccatactgccatatctgcaatgtgtggttaaagaagctctccggcttcacccgtcaacaccattaatgcttccacacaaagcaagtgaaactgtttgggtaggtgggtacaaggttcctaagggagccacagtttatgtcaatgtgcaggcgattgggcgggaccctgcaaactggataaacccatatgagttcagaccagagcggttccttcaggaagaaaccgatgttaaaggtcgagactttagggttcttccatttggatcaggaagacggatgtgtccagcggcacagctcagcatgaacttgatgacattggtgatgggaaatttgttgcattgcttctcatggagttcccctgttcctggagagaggattgacatgagcgagaatcctggattgctttgtaacatgaggactccattgcaggctctagctttgccgagagctgccgcaagagcaatacctttacctttagattaaaatagataaacaatcagacacataagataagataatcaaaatccatataccatgaagactctcataatggacacgaagatgtagctatgtaaaacccaagaggcattgcaagatttgagacatggttgagtatagtttcatacaataacatgtagctattatatatggaaataaaagagtcaatatttacatgg

SEQ ID NO: 105945 - protein, 497 aa, Arabidopsis thaliana
  peptide (1)..(497): Ceres Seq. ID no. 13618365
  misc_feature (1)..(497): Homolog of NCBI NO: 15221294 NR Description: cytochrome P450, putative [Arabidopsis thaliana]
  misc_feature (1)..(497): Homolog of NCBI NO: 21595281 NR Description: putative cytochrome P450 [Arabidopsis thaliana]
  misc_feature (1)..(486): Homolog of NCBI NO: 15221296 NR Description: cytochrome P450, putative [Arabidopsis thaliana]
  misc_feature (2)..(486): Homolog of NCBI NO: 22651521 NR Description: p-coumaroyl shikimate 3'-hydroxylase isoform 2
  misc_feature (4)..(486): Homolog of NCBI NO: 30688445 NR Description: cytochrome P450 98A3 [Arabidopsis thaliana]
  misc_feature (3)..(486): Homolog of NCBI NO: 22651519 NR Description: p-coumaroyl shikimate 3'-hydroxylase isoform 1
MIIYLISLLPIIVATLMLYQRWWRSNIPPGPKPKFLLGNLHQMKPLWTHSFSEWSETYGPIISVWIGSQLTVVVSSSDLARQVLRDKDHQLSNRHRIARMTQTGTDLVWSDYSPHYVKLRKLCTLELFSLKSIENFRSLREMEARSMVVSILKDLMSNSGDDQERKPVIVRKYLAAVVLNTISRLMIGKEFGSEEGKEFKAIVEKEHLLSGSGTILDHVWWLKWVSSWFFSDKEFLAHKDRRTKWFRGAIMVEEDIEIEDHRGFVRKLLVLKEQKELSEETVGGLVWNMLTAGADTTAVVIEWAMAEMIKCPTVQEKAQQELDSVVGSERLMTESDIPILPYLQCVVKEALRLHPSTPLMLPHKASETVWVGGYKVPKGATVYVNVQAIGRDPANWINPYEFRPERFLQEETDVKGRDFRVLPFGSGRRMCPAAQLSMNLMTLVMGNLLHCFSWSSPVPGERIDMSENPGLLCNMRTPLQALALPRAAARAIPLPLD

SEQ ID NO: 105946 - protein, 481 aa, Arabidopsis thaliana
  peptide (1)..(481): Ceres Seq. ID no. 13618366
  misc_feature (1)..(481): Homolog of NCBI NO: 15221294 NR Description: cytochrome P450, putative [Arabidopsis thaliana]
  misc_feature (1)..(481): Homolog of NCBI NO: 21595281 NR Description: putative cytochrome P450 [Arabidopsis thaliana]
  misc_feature (1)..(470): Homolog of NCBI NO: 15221296 NR Description: cytochrome P450, putative [Arabidopsis thaliana]
  misc_feature (1)..(470): Homolog of NCBI NO: 22651521 NR Description: p-coumaroyl shikimate 3'-hydroxylase isoform 2
  misc_feature (1)..(470): Homolog of NCBI NO: 30688445 NR Description: cytochrome P450 98A3 [Arabidopsis thaliana]
  misc_feature (1)..(470): Homolog of NCBI NO: 22651519 NR Description: p-coumaroyl shikimate 3'-hydroxylase isoform 1
MLYQRWWRSNIPPGPKPKFLLGNLHQMKPLWTHSFSEWSETYGPIISVWIGSQLTVVVSSSDLARQVLRDKDHQLSNRHRIARMTQTGTDLVWSDYSPHYVKLRKLCTLELFSLKSIENFRSLREMEARSMVVSILKDLMSNSGDDQERKPVIVRKYLAAVVLNTISRLMIGKEFGSEEGKEFKAIVEKEHLLSGSGTILDHVWWLKWVSSWFFSDKEFLAHKDRRTKWFRGAIMVEEDIEIEDHRGFVRKLLVLKEQKELSEETVGGLVWNMLTAGADTTAVVIEWAMAEMIKCPTVQEKAQQELDSVVGSERLMTESDIPILPYLQCVVKEALRLHPSTPLMLPHKASETVWVGGYKVPKGATVYVNVQAIGRDPANWINPYEFRPERFLQEETDVKGRDFRVLPFGSGRRMCPAAQLSMNLMTLVMGNLLHCFSWSSPVPGERIDMSENPGLLCNMRTPLQALALPRAAARAIPLPLD

SEQ ID NO: 105947 - protein, 455 aa, Arabidopsis thaliana
  peptide (1)..(455): Ceres Seq. ID no. 13618367
  misc_feature (1)..(455): Homolog of NCBI NO: 15221294 NR Description: cytochrome P450, putative [Arabidopsis thaliana]
  misc_feature (1)..(455): Homolog of NCBI NO: 21595281 NR Description: putative cytochrome P450 [Arabidopsis thaliana]
  misc_feature (1)..(444): Homolog of NCBI NO: 15221296 NR Description: cytochrome P450, putative [Arabidopsis thaliana]
  misc_feature (1)..(444): Homolog of NCBI NO: 22651521 NR Description: p-coumaroyl shikimate 3'-hydroxylase isoform 2
  misc_feature (1)..(444): Homolog of NCBI NO: 30688445 NR Description: cytochrome P450 98A3 [Arabidopsis thaliana]
  misc_feature (1)..(444): Homolog of NCBI NO: 22651519 NR Description: p-coumaroyl shikimate 3'-hydroxylase isoform 1
MKPLWTHSFSEWSETYGPIISVWIGSQLTVVVSSSDLARQVLRDKDHQLSNRHRIARMTQTGTDLVWSDYSPHYVKLRKLCTLELFSLKSIENFRSLREMEARSMVVSILKDLMSNSGDDQERKPVIVRKYLAAVVLNTISRLMIGKEFGSEEGKEFKAIVEKEHLLSGSGTILDHVWWLKWVSSWFFSDKEFLAHKDRRTKWFRGAIMVEEDIEIEDHRGFVRKLLVLKEQKELSEETVGGLVWNMLTAGADTTAVVIEWAMAEMIKCPTVQEKAQQELDSVVGSERLMTESDIPILPYLQCVVKEALRLHPSTPLMLPHKASETVWVGGYKVPKGATVYVNVQAIGRDPANWINPYEFRPERFLQEETDVKGRDFRVLPFGSGRRMCPAAQLSMNLMTLVMGNLLHCFSWSSPVPGERIDMSENPGLLCNMRTPLQALALPRAAARAIPLPLD

SEQ ID NO: 105948 - DNA, 1805 bp, Arabidopsis thaliana
  misc_feature (1)..(1805): Ceres Seq. ID no. 13618387
  misc_feature: MA Experiment ID: 108579 Result: Down-regulated in Transcription
  misc_feature: MA Experiment 108579 PARAMETER Experiment Name: At_4deg_Cold_cDNA_P Parameter: Temperature (deg C) Value: 4 vs. 22
  misc_feature: MA Experiment 108579 PARAMETER Experiment Name: At_4deg_Cold_cDNA_P Parameter: Timepoint (hr) Value: 6
  misc_feature: MA Experiment 108579 PARAMETER Experiment Name: At_4deg_Cold_cDNA_P Parameter: Tissue Value: Aerial
  misc_feature: MA Experiment ID: 108595 Result: Down-regulated in Transcription
  misc_feature: MA Experiment 108595 PARAMETER Experiment Name: At_Ler-pi_Ovule_cDNA_P Parameter: Plant Line Value: null
  misc_feature: MA Experiment ID: 20000180 Result: Up-regulated in Transcription
  misc_feature: MA Experiment 20000180 PARAMETER Experiment Name: At_Germinating_Seeds_P Parameter: Age (hr) Value: 24 vs. 0
  misc_feature: MA Experiment 20000180 PARAMETER Experiment Name: At_Germinating_Seeds_P Parameter: Tissue Value: Germinating Seeds
  misc_feature: MA Experiment ID: 20000185 Result: Down-regulated in Transcription
  misc_feature: MA Experiment 20000185 PARAMETER Experiment Name: At_Roots__P Parameter: Age (day) Value: 7 vs. 21
  misc_feature: MA Experiment 20000185 PARAMETER Experiment Name: At_Roots__P Parameter: Organism Value: A. thaliana
  misc_feature: MA Experiment 20000185 PARAMETER Experiment Name: At_Roots__P Parameter: Tissue Value: Roots vs. Whole Plant
  misc_feature: MA Experiment ID: 20000286 Result: Down-regulated in Transcription
  misc_feature: MA Experiment 20000286 PARAMETER Experiment Name: At_Open_Flower_P Parameter: Age (day) Value: 21
  misc_feature: MA Experiment 20000286 PARAMETER Experiment Name: At_Open_Flower_P Parameter: Plant Line Value: WS
  misc_feature: MA Experiment 20000286 PARAMETER Experiment Name: At_Open_Flower_P Parameter: Tissue Value: Half Open vs. Whole Plant
  misc_feature: MA Experiment ID: 20000439 Result: Down-regulated in Transcription
  misc_feature: MA Experiment 20000439 PARAMETER Experiment Name: At_Roots__P Parameter: Age (day) Value: 14 vs. 21
  misc_feature: MA Experiment 20000439 PARAMETER Experiment Name: At_Roots__P Parameter: Organism Value: A. thaliana
  misc_feature: MA Experiment 20000439 PARAMETER Experiment Name: At_Roots__P Parameter: Tissue Value: Roots vs. Whole Plant
  misc_feature: MA Experiment ID: 20000573 Result: Up-regulated in Transcription
  misc_feature: MA Experiment 20000573 PARAMETER Experiment Name: At_100uM_ABA_Mutants__P Parameter: Organism Value: A. thaliana
  misc_feature: MA Experiment 20000573 PARAMETER Experiment Name: At_100uM_ABA_Mutants__P Parameter: Plant Line Value: CS22 vs. Ler wt
  misc_feature: MA Experiment 20000573 PARAMETER Experiment Name: At_100uM_ABA_Mutants__P Parameter: Timepoint (hr) Value: N/A
  misc_feature: MA Experiment 20000573 PARAMETER Experiment Name: At_100uM_ABA_Mutants__P Parameter: Tissue Value: Whole Plant
  misc_feature: MA Experiment 20000573 PARAMETER Experiment Name: At_100uM_ABA_Mutants__P Parameter: Treatment Value: None
  misc_feature: MA Experiment ID: 20001247 Result: Up-regulated in Transcription
  misc_feature: MA Experiment 20001247 PARAMETER Experiment Name: At_Far-red-induction_P Parameter: Age (day) Value: 7
  misc_feature: MA Experiment 20001247 PARAMETER Experiment Name: At_Far-red-induction_P Parameter: Light Value: Far-red vs. White
  misc_feature: MA Experiment 20001247 PARAMETER Experiment Name: At_Far-red-induction_P Parameter: Organism Value: A. thaliana
  misc_feature: MA Experiment 20001247 PARAMETER Experiment Name: At_Far-red-induction_P Parameter: Plant Line Value: Columbia
  misc_feature: MA Experiment 20001247 PARAMETER Experiment Name: At_Far-red-induction_P Parameter: Timepoint (hr) Value: 1
  misc_feature: MA Experiment 20001247 PARAMETER Experiment Name: At_Far-red-induction_P Parameter: Tissue Value: Whole Plant
  misc_feature: MA Experiment ID: 20001248 Result: Up-regulated in Transcription
  misc_feature: MA Experiment 20001248 PARAMETER Experiment Name: At_Far-red-induction_P Parameter: Age (day) Value: 7
  misc_feature: MA Experiment 20001248 PARAMETER Experiment Name: At_Far-red-induction_P Parameter: Light Value: Far-red vs. White
  misc_feature: MA Experiment 20001248 PARAMETER Experiment Name: At_Far-red-induction_P Parameter: Organism Value: A. thaliana
  misc_feature: MA Experiment 20001248 PARAMETER Experiment Name: At_Far-red-induction_P Parameter: Plant Line Value: Columbia
  misc_feature: MA Experiment 20001248 PARAMETER Experiment Name: At_Far-red-induction_P Parameter: Timepoint (hr) Value: 4
  misc_feature: MA Experiment 20001248 PARAMETER Experiment Name: At_Far-red-induction_P Parameter: Tissue Value: Whole Plant
  misc_feature: MA Experiment ID: 20001450 Result: Up-regulated in Transcription
  misc_feature: MA Experiment 20001450 PARAMETER Experiment Name: At_Far-red-induction_P Parameter: Age (day) Value: 7
  misc_feature: MA Experiment 20001450 PARAMETER Experiment Name: At_Far-red-induction_P Parameter: Light Value: Far-red vs. White
  misc_feature: MA Experiment 20001450 PARAMETER Experiment Name: At_Far-red-induction_P Parameter: Organism Value: A. thaliana
  misc_feature: MA Experiment 20001450 PARAMETER Experiment Name: At_Far-red-induction_P Parameter: Plant Line Value: Columbia
  misc_feature: MA Experiment 20001450 PARAMETER Experiment Name: At_Far-red-induction_P Parameter: Timepoint (hr) Value: 8
  misc_feature: MA Experiment 20001450 PARAMETER Experiment Name: At_Far-red-induction_P Parameter: Tissue Value: Whole Plant
  misc_feature: MA Experiment ID: 20001556 Result: Down-regulated in Transcription
  misc_feature: MA Experiment 20001556 PARAMETER Experiment Name: At_Drought_Soil_Dry_P Parameter: Age (day) Value: 26
  misc_feature: MA Experiment 20001556 PARAMETER Experiment Name: At_Drought_Soil_Dry_P Parameter: Organism Value: A. thaliana
  misc_feature: MA Experiment 20001556 PARAMETER Experiment Name: At_Drought_Soil_Dry_P Parameter: Plant Line Value: WS
  misc_feature: MA Experiment 20001556 PARAMETER Experiment Name: At_Drought_Soil_Dry_P Parameter: Post Timepoint (hr) Value: None
  misc_feature: MA Experiment 20001556 PARAMETER Experiment Name: At_Drought_Soil_Dry_P Parameter: Post-Treatment Value: None
  misc_feature: MA Experiment 20001556 PARAMETER Experiment Name: At_Drought_Soil_Dry_P Parameter: Timepoint (day) Value: 12
  misc_feature: MA Experiment 20001556 PARAMETER Experiment Name: At_Drought_Soil_Dry_P Parameter: Treatment Value: Drought vs. No Drought
  misc_feature: MA Experiment ID: 20001904 Result: Down-regulated in Transcription
  misc_feature: MA Experiment 20001904 PARAMETER Experiment Name: At_Drought_Reproduction_P Parameter: Age (day) Value: 37
  misc_feature: MA Experiment 20001904 PARAMETER Experiment Name: At_Drought_Reproduction_P Parameter: Organism Value: A. thaliana
  misc_feature: MA Experiment 20001904 PARAMETER Experiment Name: At_Drought_Reproduction_P Parameter: Plant Line Value: WS
  misc_feature: MA Experiment 20001904 PARAMETER Experiment Name: At_Drought_Reproduction_P Parameter: Timepoint (day) Value: 7
  misc_feature: MA Experiment 20001904 PARAMETER Experiment Name: At_Drought_Reproduction_P Parameter: Tissue Value: Rosettes
  misc_feature: MA Experiment 20001904 PARAMETER Experiment Name: At_Drought_Reproduction_P Parameter: Treatment Value: Drought vs. No Drought
  misc_feature: MA Experiment ID: 20001905 Result: Down-regulated in Transcription
  misc_feature: MA Experiment 20001905 PARAMETER Experiment Name: At_Drought_Reproduction_P Parameter: Age (day) Value: 40
  misc_feature: MA Experiment 20001905 PARAMETER Experiment Name: At_Drought_Reproduction_P Parameter: Organism Value: A. thaliana
  misc_feature: MA Experiment 20001905 PARAMETER Experiment Name: At_Drought_Reproduction_P Parameter: Plant Line Value: WS
  misc_feature: MA Experiment 20001905 PARAMETER Experiment Name: At_Drought_Reproduction_P Parameter: Timepoint (day) Value: 10
  misc_feature: MA Experiment 20001905 PARAMETER Experiment Name: At_Drought_Reproduction_P Parameter: Tissue Value: Rosettes
  misc_feature: MA Experiment 20001905 PARAMETER Experiment Name: At_Drought_Reproduction_P Parameter: Treatment Value: Drought vs. No Drought
  misc_feature: MA Experiment ID: 20001906 Result: Down-regulated in Transcription
  misc_feature: MA Experiment 20001906 PARAMETER Experiment Name: At_Drought_Reproduction_P Parameter: Age (day) Value: 35
  misc_feature: MA Experiment 20001906 PARAMETER Experiment Name: At_Drought_Reproduction_P Parameter: Organism Value: A. thaliana
  misc_feature: MA Experiment 20001906 PARAMETER Experiment Name: At_Drought_Reproduction_P Parameter: Plant Line Value: WS
  misc_feature: MA Experiment 20001906 PARAMETER Experiment Name: At_Drought_Reproduction_P Parameter: Timepoint (day) Value: 5
  misc_feature: MA Experiment 20001906 PARAMETER Experiment Name: At_Drought_Reproduction_P Parameter: Tissue Value: Siliques
  misc_feature: MA Experiment 20001906 PARAMETER Experiment Name: At_Drought_Reproduction_P Parameter: Treatment Value: Drought vs. No Drought
  misc_feature: MA Experiment ID: 20001911 Result: Down-regulated in Transcription
  misc_feature: MA Experiment 20001911 PARAMETER Experiment Name: At_Drought_Reproduction_P Parameter: Age (day) Value: 40
  misc_feature: MA Experiment 20001911 PARAMETER Experiment Name: At_Drought_Reproduction_P Parameter: Organism Value: A. thaliana
  misc_feature: MA Experiment 20001911 PARAMETER Experiment Name: At_Drought_Reproduction_P Parameter: Plant Line Value: WS
  misc_feature: MA Experiment 20001911 PARAMETER Experiment Name: At_Drought_Reproduction_P Parameter: Timepoint (day) Value: 10
  misc_feature: MA Experiment 20001911 PARAMETER Experiment Name: At_Drought_Reproduction_P Parameter: Tissue Value: Flowers
  misc_feature: MA Experiment 20001911 PARAMETER Experiment Name: At_Drought_Reproduction_P Parameter: Treatment Value: Drought vs. No Drought
aggtaaagacgagaggtctcgcgcttatccttaaaggactgtggtgaatggtgagtgtgacttggagggaccccatcaccgcaacaatacagcttcttagatctcgataaccacaactaacctgtcacagtttcgattagatcttctcaaaaacttcacctttttttgtttttccagtttctcagaggagatcttccttcaaagctcaaatccttttgtctgaattgtgatactgctgtccccatttttctgcaagttgggaaatttctgtcaaagttttgtgggtctgttaaaaagatctgagctttgaacatggggagctcaatggaggagaaagtggtggctgtgatcatggtcggtggtccaaccaaaggcactcgatttcggccattgtcgctgaatattccaaagcctctgtttcctattgcgggacaaccaatggtgcatcatccaatttcagcttgtaaaagaattccaaatttagctcaaatatatcttgttggcttctatgaggaaagggaatttgcactttatgtttcagccatctctaatgaacttaaagttcctgttagatatctgcgagaagacaaaccacatggttcagctggtgggctgtatcactttagaaatcttattatggaagatagtccgtctcatatcttcctgcttaactgtgatgtttgctgcagtttccccttgcccaaaatgctcgaggctcacaggggatatggtggaattggaactcttcttgtgatcaaggtctctcctgaatcagccagccaatttggagaattggttgcagatccagttactaatgagctgcttcattacaccgagaaacccgaaacttttgtcagtgatcgaattaactgtggtgtttatgtatttacacctgaaatttttaatgccataggagatgtttctactcagaggaaagatagagcaactctaaaacgtgtttccagcttcgaagctcttcaaccggcaacaaggatcccgacagattttgtaagactggatcaagacatcctttcacctctagctgggaagaaacggctatatacttatgagactatggatttctgggagcaaatcaaatctcctgggatgtcgttgaggtgttcaggactctatctttcccaattccgcttgacatctccccaactgttggctagtggtgatggaacaaggagtgccattgtgattggtgatgtttacatacatccttctgcaaaagttcacccaactgcaaagattggtcccaacgtctcaatctctgcaaatgctcgtgttggaccgggcgtcaggcttatgagctgcatcatccttgacgatgttgagatcatggaaaatgcagtggtgactaacgcaattgttgggtggaaatcttctatcgggagatggtcccgcgtccaggctgagggagtctacaattcgaaactcggagttacaattctcggagactcggttgcagttgaagacgaggttgtggtgaccagcagtattgttcttccaaacaagacactgaacgtcagtgttcaagacgagatcattttgtaactgaaaaacggaagttgaaaaatggaaccaacccagtggggagcagccacactatctccctctgattcaatatctactggagaaccacataagcaaatatttgggaactaattcacatgtatcatttatttacaccaagaattttccaacattgtatcaattccattttctatactcacaacacagctactgtaaaaggcactgaatttttgcccagaataataaagcacttgtgtagttttggc

SEQ ID NO: 105949 - protein, 415 aa, Arabidopsis thaliana; identical to SEQ ID NO: 38942
  peptide (1)..(415): Ceres Seq. ID no. 13618388
  misc_feature (10)..(246): Pfam Name: Nucleotidyl transferase Pfam Description: Nucleotidyl transferase
  misc_feature (1)..(415): Homolog of NCBI NO: 15222037 NR Description: ADP-glucose pyrophosphorylase family [Arabidopsis
  misc_feature (5)..(415): Homolog of NCBI NO: 5882732 NR Description: Similar to gb|AF135422 GDP-mannose A (GMPPA) from Homo sapiens. ESTs gb|AA712990, gb|N65247, gb|T04179, gb|Z38092, gb|T76473, gb|N96403, gb|AA394551 and
  misc_feature (1)..(369): Homolog of NCBI NO: 30699056 NR Description: ADP-glucose pyrophosphorylase family [Arabidopsis
  misc_feature (6)..(415): Homolog of NCBI NO: 22325477 NR Description: ADP-glucose pyrophosphorylase family [Arabidopsis
  misc_feature (6)..(415): Homolog of NCBI NO: 17064890 NR Description: putative GDP-mannose pyrophosphorylase
  misc_feature (6)..(394): Homolog of NCBI NO: 25411099 NR Description: probable GDP-mannose pyrophosphorylase [imported]
  misc_feature (3)..(394): Homolog of NCBI NO: 26006499 NR Description: Putative GDP-mannose pyrophosphorylase [Oryza
  misc_feature (11)..(415): Homolog of NCBI NO: 33416563 NR Description: Unknown (protein for MGC:66135) [Danio rerio]
  misc_feature (11)..(415): Homolog of NCBI NO: 28830182 NR Description: similar to Homo sapiens (Human). GDP-mannose
  misc_feature (11)..(415): Homolog of NCBI NO: 19526884 NR Description: RIKEN cDNA 1810012N01 [Mus musculus]

SEQ ID NO: 105950 - protein, 411 aa, Arabidopsis thaliana; identical to SEQ ID NO: 38943
  peptide (1)..(411): Ceres Seq. ID no. 13618389
  misc_feature (6)..(242): Pfam Name: Nucleotidyl transferase Pfam Description: Nucleotidyl transferase
  misc_feature (1)..(411): Homolog of NCBI NO: 15222037 NR Description: ADP-glucose pyrophosphorylase family [Arabidopsis
  misc_feature (1)..(411): Homolog of NCBI NO: 5882732 NR Description: Similar to gb|AF135422 GDP-mannose A (GMPPA) from Homo sapiens. ESTs gb|AA712990, gb|N65247, gb|T04179, gb|Z38092, gb|T76473, gb|N96403, gb|AA394551 and
  misc_feature (1)..(365): Homolog of NCBI NO: 30699056 NR Description: ADP-glucose pyrophosphorylase family [Arabidopsis
  misc_feature (2)..(411): Homolog of NCBI NO: 22325477 NR Description: ADP-glucose pyrophosphorylase family [Arabidopsis
  misc_feature (2)..(411): Homolog of NCBI NO: 17064890 NR Description: putative GDP-mannose pyrophosphorylase
  misc_feature (2)..(390): Homolog of NCBI NO: 25411099 NR Description: probable GDP-mannose pyrophosphorylase [imported]
  misc_feature (1)..(390): Homolog of NCBI NO: 26006499 NR Description: Putative GDP-mannose pyrophosphorylase [Oryza
  misc_feature (7)..(411): Homolog of NCBI NO: 33416563 NR Description: Unknown (protein for MGC:66135) [Danio rerio]
  misc_feature (7)..(411): Homolog of NCBI NO: 28830182 NR Description: similar to Homo sapiens (Human). GDP-mannose
  misc_feature (7)..(411): Homolog of NCBI NO: 19526884 NR Description: RIKEN cDNA 1810012N01 [Mus musculus]

SEQ ID NO: 105951 - protein, 402 aa, Arabidopsis thaliana; identical to SEQ ID NO: 38944
  peptide (1)..(402): Ceres Seq. ID no. 13618390
  misc_feature (1)..(233): Pfam Name: Nucleotidyl transferase Pfam Description: Nucleotidyl transferase
  misc_feature (1)..(402): Homolog of NCBI NO: 15222037 NR Description: ADP-glucose pyrophosphorylase family [Arabidopsis
  misc_feature (1)..(402): Homolog of NCBI NO: 5882732 NR Description: Similar to gb|AF135422 GDP-mannose A (GMPPA) from Homo sapiens. ESTs gb|AA712990, gb|N65247, gb|T04179, gb|Z38092, gb|T76473, gb|N96403, gb|AA394551 and
  misc_feature (1)..(356): Homolog of NCBI NO: 30699056 NR Description: ADP-glucose pyrophosphorylase family [Arabidopsis
  misc_feature (1)..(402): Homolog of NCBI NO: 22325477 NR Description: ADP-glucose pyrophosphorylase family [Arabidopsis
  misc_feature (1)..(402): Homolog of NCBI NO: 17064890 NR Description: putative GDP-mannose pyrophosphorylase
  misc_feature (1)..(381): Homolog of NCBI NO: 25411099 NR Description: probable GDP-mannose pyrophosphorylase [imported]
  misc_feature (1)..(381): Homolog of NCBI NO: 26006499 NR Description: Putative GDP-mannose pyrophosphorylase [Oryza
  misc_feature (1)..(402): Homolog of NCBI NO: 33416563 NR Description: Unknown (protein for MGC:66135) [Danio rerio]
  misc_feature (1)..(402): Homolog of NCBI NO: 28830182 NR Description: similar to Homo sapiens (Human). GDP-mannose
  misc_feature (1)..(402): Homolog of NCBI NO: 19526884 NR Description: RIKEN cDNA 1810012N01 [Mus musculus]

SEQ ID NO: 105952 - DNA, 917 bp, Arabidopsis thaliana
  misc_feature (1)..(917): Ceres Seq. ID no. 13618391
  misc_feature: MA Experiment ID: 20000171 Result: Down-regulated in Transcription
  misc_feature: MA Experiment 20000171 PARAMETER Experiment Name: At_42deg_Heat_P Parameter: Age (day) Value: 14
  misc_feature: MA Experiment 20000171 PARAMETER Experiment Name: At_42deg_Heat_P Parameter: Organism Value: A. thaliana
  misc_feature: MA Experiment 20000171 PARAMETER Experiment Name: At_42deg_Heat_P Parameter: Plant Line Value: WS
  misc_feature: MA Experiment 20000171 PARAMETER Experiment Name: At_42deg_Heat_P Parameter: Temperature (deg C) Value: 42 vs. 22
  misc_feature: MA Experiment 20000171 PARAMETER Experiment Name: At_42deg_Heat_P Parameter: Timepoint (hr) Value: 1
  misc_feature: MA Experiment 20000171 PARAMETER Experiment Name: At_42deg_Heat_P Parameter: Tissue Value: Aerial
  misc_feature: MA Experiment ID: 20000184 Result: Down-regulated in Transcription
  misc_feature: MA Experiment 20000184 PARAMETER Experiment Name: At_Shoots__P Parameter: Age (day) Value: 7
  misc_feature: MA Experiment 20000184 PARAMETER Experiment Name: At_Shoots__P Parameter: Tissue Value: Shoots vs. Whole Plant
  misc_feature: MA Experiment ID: 20000234 Result: Down-regulated in Transcription
  misc_feature: MA Experiment 20000234 PARAMETER Experiment Name: At_Siliques_P Parameter: Age (day) Value: 21
  misc_feature: MA Experiment 20000234 PARAMETER Experiment Name: At_Siliques_P Parameter: Organism Value: A. thaliana
  misc_feature: MA Experiment 20000234 PARAMETER Experiment Name: At_Siliques_P Parameter: Plant Line Value: WS
  misc_feature: MA Experiment 20000234 PARAMETER Experiment Name: At_Siliques_P Parameter: Tissue Value: Less Than 5mm Siliques vs. Whole Plant
  misc_feature: MA Experiment ID: 20000235 Result: Down-regulated in Transcription
  misc_feature: MA Experiment 20000235 PARAMETER Experiment Name: At_Siliques_P Parameter: Age (day) Value: 21
  misc_feature: MA Experiment 20000235 PARAMETER Experiment Name: At_Siliques_P Parameter: Organism Value: A. thaliana
  misc_feature: MA Experiment 20000235 PARAMETER Experiment Name: At_Siliques_P Parameter: Plant Line Value: WS
  misc_feature: MA Experiment 20000235 PARAMETER Experiment Name: At_Siliques_P Parameter: Tissue Value: 5-10mm Siliques vs. Whole Plant
  misc_feature: MA Experiment ID: 20000264 Result: Down-regulated in Transcription
  misc_feature: MA Experiment 20000264 PARAMETER Experiment Name: At_Open_Flower_P Parameter: Age (day) Value: 21
  misc_feature: MA Experiment 20000264 PARAMETER Experiment Name: At_Open_Flower_P Parameter: Plant Line Value: WS
  misc_feature: MA Experiment 20000264 PARAMETER Experiment Name: At_Open_Flower_P Parameter: Tissue Value: Open Flower vs. Whole Plant
  misc_feature: MA Experiment ID: 20000265 Result: Down-regulated in Transcription
  misc_feature: MA Experiment 20000265 PARAMETER Experiment Name: At_Open_Flower_P Parameter: Age (day) Value: 21
  misc_feature: MA Experiment 20000265 PARAMETER Experiment Name: At_Open_Flower_P Parameter: Plant Line Value: WS
  misc_feature: MA Experiment 20000265 PARAMETER Experiment Name: At_Open_Flower_P Parameter: Tissue Value: Closed Flower vs. Whole Plant
  misc_feature: MA Experiment ID: 20000286 Result: Down-regulated in Transcription
  misc_feature: MA Experiment 20000286 PARAMETER Experiment Name: At_Open_Flower_P Parameter: Age (day) Value: 21
  misc_feature: MA Experiment 20000286 PARAMETER Experiment Name: At_Open_Flower_P Parameter: Plant Line Value: WS
  misc_feature: MA Experiment 20000286 PARAMETER Experiment Name: At_Open_Flower_P Parameter: Tissue Value: Half Open vs. Whole Plant
  misc_feature: MA Experiment ID: 20000438 Result: Down-regulated in Transcription
  misc_feature: MA Experiment 20000438 PARAMETER Experiment Name: At_Shoots__P Parameter: Age (day) Value: 14
  misc_feature: MA Experiment 20000438 PARAMETER Experiment Name: At_Shoots__P Parameter: Tissue Value: Shoots vs. Whole Plant
  misc_feature: MA Experiment ID: 20000441 Result: Up-regulated in Transcription
  misc_feature: MA Experiment 20000441 PARAMETER Experiment Name: At_1uM_BR-BRZ__P Parameter: Tissue Value: Shoot Apices
  misc_feature: MA Experiment 20000441 PARAMETER Experiment Name: At_1uM_BR-BRZ__P Parameter: Treatment Value: 1uM BR vs. No Treatment
  misc_feature: MA Experiment ID: 20000443 Result: Up-regulated in Transcription
  misc_feature: MA Experiment 20000443 PARAMETER Experiment Name: At_1uM_BR-BRZ__P Parameter: Tissue Value: Shoot Apices
  misc_feature: MA Experiment 20000443 PARAMETER Experiment Name: At_1uM_BR-BRZ__P Parameter: Treatment Value: 1uM BRZ vs. No Treatment
  misc_feature: MA Experiment ID: 20000444 Result: Down-regulated in Transcription
  misc_feature: MA Experiment 20000444 PARAMETER Experiment Name: At_100uM_NAA__P Parameter: Age (day) Value: 14
  misc_feature: MA Experiment 20000444 PARAMETER Experiment Name: At_100uM_NAA__P Parameter: Organism Value: A. thaliana
  misc_feature: MA Experiment 20000444 PARAMETER Experiment Name: At_100uM_NAA__P Parameter: Plant Line Value: WS
  misc_feature: MA Experiment 20000444 PARAMETER Experiment Name: At_100uM_NAA__P Parameter: Timepoint (hr) Value: 1
  misc_feature: MA Experiment 20000444 PARAMETER Experiment Name: At_100uM_NAA__P Parameter: Tissue Value: Aerial
  misc_feature: MA Experiment 20000444 PARAMETER Experiment Name: At_100uM_NAA__P Parameter: Treatment Value: 100uM NAA vs. No Treatment
  misc_feature: MA Experiment ID: 20000456 Result: Down-regulated in Transcription
  misc_feature: MA Experiment 20000456 PARAMETER Experiment Name: At_100uM_BA_P Parameter: Age (day) Value: 14
  misc_feature: MA Experiment 20000456 PARAMETER Experiment Name: At_100uM_BA_P Parameter: Organism Value: A. thaliana
  misc_feature: MA Experiment 20000456 PARAMETER Experiment Name: At_100uM_BA_P Parameter: Plant Line Value: WS
  misc_feature: MA Experiment 20000456 PARAMETER Experiment Name: At_100uM_BA_P Parameter: Timepoint (hr) Value: 6
  misc_feature: MA Experiment 20000456 PARAMETER Experiment Name: At_100uM_BA_P Parameter: Tissue Value: Aerial
  misc_feature: MA Experiment 20000456 PARAMETER Experiment Name: At_100uM_BA_P Parameter: Treatment Value: 100uM BA vs. No Treatment
  misc_feature: MA Experiment ID: 20000460 Result: Up-regulated in Transcription
  misc_feature: MA Experiment 20000460 PARAMETER Experiment Name: At_10percent_PEG_P Parameter: Age (day) Value: 12
  misc_feature: MA Experiment 20000460 PARAMETER Experiment Name: At_10percent_PEG_P Parameter: Organism Value: A. thaliana
  misc_feature: MA Experiment 20000460 PARAMETER Experiment Name: At_10percent_PEG_P Parameter: Plant Line Value: WS
  misc_feature: MA Experiment 20000460 PARAMETER Experiment Name: At_10percent_PEG_P Parameter: Timepoint (day) Value: 12
  misc_feature: MA Experiment 20000460 PARAMETER Experiment Name: At_10percent_PEG_P Parameter: Tissue Value: Whole Plant
  misc_feature: MA Experiment 20000460 PARAMETER Experiment Name: At_10percent_PEG_P Parameter: Treatment Value: 10percent PEG vs. No Treatment
  misc_feature: MA Experiment ID: 20000495 Result: Down-regulated in Transcription
  misc_feature: MA Experiment 20000495 PARAMETER Experiment Name: At_Guard_Cells_P Parameter: Harvest Date Value: 8/2/2002
  misc_feature: MA Experiment 20000495 PARAMETER Experiment Name: At_Guard_Cells_P Parameter: Organism Value: A. thaliana
  misc_feature: MA Experiment 20000495 PARAMETER Experiment Name: At_Guard_Cells_P Parameter: Tissue Value: Guard Cells vs. Leaves
  misc_feature: MA Experiment ID: 20000506 Result: Down-regulated in Transcription
  misc_feature: MA Experiment 20000506 PARAMETER Experiment Name: At_Wounding_P Parameter: Organism Value: A. thaliana
  misc_feature: MA Experiment 20000506 PARAMETER Experiment Name: At_Wounding_P Parameter: Plant Line Value: WS
  misc_feature: MA Experiment 20000506 PARAMETER Experiment Name: At_Wounding_P Parameter: Timepoint (hr) Value: 6
  misc_feature: MA Experiment 20000506 PARAMETER Experiment Name: At_Wounding_P Parameter: Tissue Value: Aerial
  misc_feature: MA Experiment 20000506 PARAMETER Experiment Name: At_Wounding_P Parameter: Treatment Value: Wounding vs. No Wounding
  misc_feature: MA Experiment ID: 20000527 Result: Up-regulated in Transcription
  misc_feature: MA Experiment 20000527 PARAMETER Experiment Name: At_10percent_PEG_P Parameter: Age (day) Value: 20
  misc_feature: MA Experiment 20000527 PARAMETER Experiment Name: At_10percent_PEG_P Parameter: Organism Value: A. thaliana
  misc_feature: MA Experiment 20000527 PARAMETER Experiment Name: At_10percent_PEG_P Parameter: Plant Line Value: WS
  misc_feature: MA Experiment 20000527 PARAMETER Experiment Name: At_10percent_PEG_P Parameter: Timepoint (day) Value: 20
  misc_feature: MA Experiment 20000527 PARAMETER Experiment Name: At_10percent_PEG_P Parameter: Tissue Value: Whole Plant
  misc_feature: MA Experiment 20000527 PARAMETER Experiment Name: At_10percent_PEG_P Parameter: Treatment Value: 10percent PEG vs. No Treatment
  misc_feature: MA Experiment ID: 20000573 Result: Down-regulated in Transcription
  misc_feature: MA Experiment 20000573 PARAMETER Experiment Name: At_100uM_ABA_Mutants__P Parameter: Organism Value: A. thaliana
  misc_feature: MA Experiment 20000573 PARAMETER Experiment Name: At_100uM_ABA_Mutants__P Parameter: Plant Line Value: CS22 vs. Ler wt
  misc_feature: MA Experiment 20000573 PARAMETER Experiment Name: At_100uM_ABA_Mutants__P Parameter: Timepoint (hr) Value: N/A
  misc_feature: MA Experiment 20000573 PARAMETER Experiment Name: At_100uM_ABA_Mutants__P Parameter: Tissue Value: Whole Plant
  misc_feature: MA Experiment 20000573 PARAMETER Experiment Name: At_100uM_ABA_Mutants__P Parameter: Treatment Value: None
  misc_feature: MA Experiment ID: 20000574 Result: Down-regulated in Transcription
  misc_feature: MA Experiment 20000574 PARAMETER Experiment Name: At_100uM_ABA_Mutants__P Parameter: Organism Value: A. thaliana
  misc_feature: MA Experiment 20000574 PARAMETER Experiment Name: At_100uM_ABA_Mutants__P Parameter: Plant Line Value: CS23 vs. Ler wt
  misc_feature: MA Experiment 20000574 PARAMETER Experiment Name: At_100uM_ABA_Mutants__P Parameter: Timepoint (hr) Value: N/A
  misc_feature: MA Experiment 20000574 PARAMETER Experiment Name: At_100uM_ABA_Mutants__P Parameter: Tissue Value: Whole Plant
  misc_feature: MA Experiment 20000574 PARAMETER Experiment Name: At_100uM_ABA_Mutants__P Parameter: Treatment Value: None
  misc_feature: MA Experiment ID: 20000794 Result: Down-regulated in Transcription
  misc_feature: MA Experiment 20000794 PARAMETER Experiment Name: At_Petals_P Parameter: Age (day) Value: 23-25 days
  misc_feature: MA Experiment 20000794 PARAMETER Experiment Name: At_Petals_P Parameter: Plant Line Value: WS
  misc_feature: MA Experiment 20000794 PARAMETER Experiment Name: At_Petals_P Parameter: Tissue Value: Petals vs. Whole plant
  misc_feature: MA Experiment ID: 20001757 Result: Down-regulated in Transcription
  misc_feature: MA Experiment 20001757 PARAMETER Experiment Name: At_50mM_NH4NO3_L-to-H_P Parameter: Timepoint (hr) Value: 6
  misc_feature: MA Experiment 20001757 PARAMETER Experiment Name: At_50mM_NH4NO3_L-to-H_P Parameter: Tissue Value: Leaf
  misc_feature: MA Experiment 20001757 PARAMETER Experiment Name: At_50mM_NH4NO3_L-to-H_P Parameter: Treatment Value: 50mM NH4NO3 vs 100mM Mannitol
  misc_feature: MA Experiment ID: 20001760 Result: Down-regulated in Transcription
  misc_feature: MA Experiment 20001760 PARAMETER Experiment Name: At_50mM_NH4NO3_L-to-H_P Parameter: Timepoint (hr) Value: 2
  misc_feature: MA Experiment 20001760 PARAMETER Experiment Name: At_50mM_NH4NO3_L-to-H_P Parameter: Tissue Value: Siliques
  misc_feature: MA Experiment 20001760 PARAMETER Experiment Name: At_50mM_NH4NO3_L-to-H_P Parameter: Treatment Value: 50mM NH4NO3 vs 100mM Mannitol
  misc_feature: MA Experiment ID: 20001773 Result: Down-regulated in Transcription
  misc_feature: MA Experiment 20001773 PARAMETER Experiment Name: At_Far-red-enriched-adult_P Parameter: Age (day) Value: 30
  misc_feature: MA Experiment 20001773 PARAMETER Experiment Name: At_Far-red-enriched-adult_P Parameter: Light Value: Far-red enriched vs. White
  misc_feature: MA Experiment 20001773 PARAMETER Experiment Name: At_Far-red-enriched-adult_P Parameter: Organism Value: A. thaliana
  misc_feature: MA Experiment 20001773 PARAMETER Experiment Name: At_Far-red-enriched-adult_P Parameter: Plant Line Value: Columbia
  misc_feature: MA Experiment 20001773 PARAMETER Experiment Name: At_Far-red-enriched-adult_P Parameter: Timepoint (hr) Value: 48
  misc_feature: MA Experiment 20001773 PARAMETER Experiment Name: At_Far-red-enriched-adult_P Parameter: Tissue Value: Aerial
  misc_feature: MA Experiment ID: 20001904 Result: Down-regulated in Transcription
  misc_feature: MA Experiment 20001904 PARAMETER Experiment Name: At_Drought_Reproduction_P Parameter: Age (day) Value: 37
  misc_feature: MA Experiment 20001904 PARAMETER Experiment Name: At_Drought_Reproduction_P Parameter: Organism Value: A. thaliana
  misc_feature: MA Experiment 20001904 PARAMETER Experiment Name: At_Drought_Reproduction_P Parameter: Plant Line Value: WS
  misc_feature: MA Experiment 20001904 PARAMETER Experiment Name: At_Drought_Reproduction_P Parameter: Timepoint (day) Value: 7
  misc_feature: MA Experiment 20001904 PARAMETER Experiment Name: At_Drought_Reproduction_P Parameter: Tissue Value: Rosettes
  misc_feature: MA Experiment 20001904 PARAMETER Experiment Name: At_Drought_Reproduction_P Parameter: Treatment Value: Drought vs. No Drought
  misc_feature: MA Experiment ID: 20001905 Result: Up-regulated in Transcription
  misc_feature: MA Experiment 20001905 PARAMETER Experiment Name: At_Drought_Reproduction_P Parameter: Age (day) Value: 40
  misc_feature: MA Experiment 20001905 PARAMETER Experiment Name: At_Drought_Reproduction_P Parameter: Organism Value: A. thaliana
  misc_feature: MA Experiment 20001905 PARAMETER Experiment Name: At_Drought_Reproduction_P Parameter: Plant Line Value: WS
  misc_feature: MA Experiment 20001905 PARAMETER Experiment Name: At_Drought_Reproduction_P Parameter: Timepoint (day) Value: 10
  misc_feature: MA Experiment 20001905 PARAMETER Experiment Name: At_Drought_Reproduction_P Parameter: Tissue Value: Rosettes
  misc_feature: MA Experiment 20001905 PARAMETER Experiment Name: At_Drought_Reproduction_P Parameter: Treatment Value: Drought vs. No Drought
aaccagatataacagaattaacctacacaactgaaactcgagttaagaaccggaaacagaatccaattcaaccaaaccgaatcgaaccgaaccggagtttttatccaatggtgaagcaagcgatgaaggaagaggagaagaagagaaacacggcgatgcagtcaaagtacaaaggagtgaggaagaggaaatggggaaaatgggtatcggagatcagacttccacacagcagagaacgaatttggttaggctcttacgacactcccgagaaggcggcgcgtgctttcgacgccgctcaattttgtctccgcggcggcgatgctaatttcaatttccctaataatccaccgtcgatctccgtagaaaagtcgttgacgcctccggagattcaggaagctgctgctagattcgctaacacattccaagacattgtcaagggagaagaagaatcgggtttagtacccggatccgagatccgaccagagtctccttctacatctgcatctgttgctacatcgacggtggattatgatttttcgtttttggatttgcttccgatgaatttcgggtttgattccttctccgacgacttctctggcttctccggtggtgatcgatttacagagattttacccatcgaagattacggaggagagagtttattagatgaatctttgattctttgggatttttgaattcccaaacataatatttttttagagcgaactgtgagattttccttggagtcatggagaaatctggagattttttgtaacacggagctccaatgacccgggaatttctttcgtttcggatccgaatttgatgtggatcatattcacacctatattttttcatttttttgttgtaaagaaaaatcggataagattctagtaataaatgttaaaagtccattt

SEQ ID NO: 105953 - protein, 230 aa, Arabidopsis thaliana
  peptide (1)..(230): Ceres Seq. ID no. 13618392
  misc_feature (53)..(117): Pfam Name: AP2 domain Pfam Description: AP2 domain
  misc_feature (36)..(230): Homolog of NCBI NO: 15222040 NR Description: AP2 domain transcription factor, putative
  misc_feature (49)..(230): Homolog of NCBI NO: 29893536 NR Description: putative AP2 domain transcription factor
  misc_feature (52)..(230): Homolog of NCBI NO: 22329667 NR Description: AP2 domain transcription factor, putative
  misc_feature (55)..(137): Homolog of NCBI NO: 22326940 NR Description: AP2 domain transcription factor, putative thaliana] >gi|13374855|emb|CAC34489.1| putative protein thaliana] >gi|29294061|gb|AAO73898.1| AP2 domain transcription
  misc_feature (44)..(157): Homolog of NCBI NO: 18378818 NR Description: AP2 domain transcription factor, putative
  misc_feature (44)..(157): Homolog of NCBI NO: 25406719 NR Description: protein Similar to transcription factor TINY - Arabidopsis thaliana >gi|9665142|gb|AAF97326.1|AC023628_7
  misc_feature (44)..(157): Homolog of NCBI NO: 21554403 NR Description: transcription factor TINY, putative [Arabidopsis
  misc_feature (55)..(177): Homolog of NCBI NO: 15224024 NR Description: AP2 domain transcription factor, putative
  misc_feature (35)..(173): Homolog of NCBI NO: 18417729 NR Description: AP2 domain transcription factor, putative
  misc_feature (17)..(230): Homolog of NCBI NO: 15219139 NR Description: transcription factor TINY family [Arabidopsis
PDITELTYTTETRVKNRKQNPIQPNRIEPNRSFYPMVKQAMKEEEKKRNTAMQSKYKGVRKRKWGKWVSEIRLPHSRERIWLGSYDTPEKAARAFDAAQFCLRGGDANFNFPNNPPSISVEKSLTPPEIQEAAARFANTFQDIVKGEEESGLVPGSEIRPESPSTSASVATSTVDYDFSFLDLLPMNFGFDSFSDDFSGFSGGDRFTEILPIEDYGGESLLDESLILWDF

SEQ ID NO: 105954 - protein, 195 aa, Arabidopsis thaliana
  peptide (1)..(195): Ceres Seq. ID no. 13618393
  misc_feature (18)..(82): Pfam Name: AP2 domain Pfam Description: AP2 domain
  misc_feature (1)..(195): Homolog of NCBI NO: 15222040 NR Description: AP2 domain transcription factor, putative
  misc_feature (14)..(195): Homolog of NCBI NO: 29893536 NR Description: putative AP2 domain transcription factor
  misc_feature (17)..(195): Homolog of NCBI NO: 22329667 NR Description: AP2 domain transcription factor, putative
  misc_feature (20)..(102): Homolog of NCBI NO: 22326940 NR Description: AP2 domain transcription factor, putative thaliana] >gi|13374855|emb|CAC34489.1| putative protein thaliana] >gi|29294061|gb|AAO73898.1| AP2 domain transcription
  misc_feature (9)..(122): Homolog of NCBI NO: 18378818 NR Description: AP2 domain transcription factor, putative
  misc_feature (9)..(122): Homolog of NCBI NO: 25406719 NR Description: protein Similar to transcription factor TINY - Arabidopsis thaliana >gi|9665142|gb|AAF97326.1|AC023628_7
  misc_feature (9)..(122): Homolog of NCBI NO: 21554403 NR Description: transcription factor TINY, putative [Arabidopsis
  misc_feature (20)..(142): Homolog of NCBI NO: 15224024 NR Description: AP2 domain transcription factor, putative
  misc_feature (1)..(138): Homolog of NCBI NO: 18417729 NR Description: AP2 domain transcription factor, putative
  misc_feature (1)..(195): Homolog of NCBI NO: 15219139 NR Description: transcription factor TINY family [Arabidopsis
MVKQAMKEEEKKRNTAMQSKYKGVRKRKWGKWVSEIRLPHSRERIWLGSYDTPEKAARAFDAAQFCLRGGDANFNFPNNPPSISVEKSLTPPEIQEAAARFANTFQDIVKGEEESGLVPGSEIRPESPSTSASVATSTVDYDFSFLDLLPMNFGFDSFSDDFSGFSGGDRFTEILPIEDYGGESLLDESLILWDF

SEQ ID NO: 105955 - protein, 190 aa, Arabidopsis thaliana
  peptide (1)..(190): Ceres Seq. ID no. 13618394
  misc_feature (13)..(77): Pfam Name: AP2 domain Pfam Description: AP2 domain
  misc_feature (1)..(190): Homolog of NCBI NO: 15222040 NR Description: AP2 domain transcription factor, putative
  misc_feature (9)..(190): Homolog of NCBI NO: 29893536 NR Description: putative AP2 domain transcription factor
  misc_feature (12)..(190): Homolog of NCBI NO: 22329667 NR Description: AP2 domain transcription factor, putative
  misc_feature (15)..(97): Homolog of NCBI NO: 22326940 NR Description: AP2 domain transcription factor, putative thaliana] >gi|13374855|emb|CAC34489.1| putative protein thaliana] >gi|29294061|gb|AAO73898.1| AP2 domain transcription
  misc_feature (4)..(117): Homolog of NCBI NO: 18378818 NR Description: AP2 domain transcription factor, putative
  misc_feature (4)..(117): Homolog of NCBI NO: 25406719 NR Description: protein Similar to transcription factor TINY - Arabidopsis thaliana >gi|9665142|gb|AAF97326.1|AC023628_7
  misc_feature (4)..(117): Homolog of NCBI NO: 21554403 NR Description: transcription factor TINY, putative [Arabidopsis
  misc_feature (15)..(137): Homolog of NCBI NO: 15224024 NR Description: AP2 domain transcription factor, putative
  misc_feature (1)..(133): Homolog of NCBI NO: 18417729 NR Description: AP2 domain transcription factor, putative
  misc_feature (1)..(190): Homolog of NCBI NO: 15219139 NR Description: transcription factor TINY family [Arabidopsis
MKEEEKKRNTAMQSKYKGVRKRKWGKWVSEIRLPHSRERIWLGSYDTPEKAARAFDAAQFCLRGGDANFNFPNNPPSISVEKSLTPPEIQEAAARFANTFQDIVKGEEESGLVPGSEIRPESPSTSASVATSTVDYDFSFLDLLPMNFGFDSFSDDFSGFSGGDRFTEILPIEDYGGESLLDESLILWDF

SEQ ID NO: 105956 - DNA, 608 bp, Arabidopsis thaliana
  misc_feature (1)..(608): Ceres Seq. ID no. 13618399
  misc_feature: MA Experiment ID: 108595 Result: Up-regulated in Transcription
  misc_feature: MA Experiment 108595 PARAMETER Experiment Name: At_Ler-pi_Ovule_cDNA_P Parameter: Plant Line Value: null
accgactcttctaatctctgcgatcgtacatcagaaacctctatctcatcgccgaggaaaaaagatcttacaatggctattaacaccatcacgaacgaagaagatgatgcatcaaacaactttggatgcaatatctgtcttgaattggcaagagaaccgatcgtgactctatgtggtcatttgttctgttggccttgtctctacaagtggctccattaccattctaaatcaaatcattgtcctgtttgtaaagctttggttaaggaagatactttggttcctttgtatggaatgggtaagccatcttctgatccgagatcgaaactcaatagtggtgttactgtccctaatcgaccagctgcgactaggactgaaacagctcgacctcgtcttgaacaaagacatcatgggtctagtttctttggtgggcattcaagttttgctgccatgccaactggtttacggttttcaaatttcttgttgtaatggaaagtatcttttgatgaatctgagtctgtttttttgacaatgtttttgaaactattattatacattgtctacgatttttgttattttgacaattaatgtttagagctacttttacattc

SEQ ID NO: 105957 - protein, 161 aa, Arabidopsis thaliana
  peptide (1)..(161): Ceres Seq. ID no. 13618400
  misc_feature (43)..(83): Pfam Name: Zinc finger, C3HC4 type (RING finger) Pfam Description: Zinc finger, C3HC4 type (RING finger)
  misc_feature (25)..(161): Homolog of NCBI NO: 15222064 NR Description: zinc finger (C3HC4-type RING finger) protein [Arabidopsis thaliana] >gi|25406402|pir||G96779 probable RING
  misc_feature (31)..(161): Homolog of NCBI NO: 18394721 NR Description: zinc finger (C3HC4-type RING finger) protein
  misc_feature (32)..(159): Homolog of NCBI NO: 15224062 NR Description: zinc finger (C3HC4-type RING finger) protein [Arabidopsis thaliana] >gi|7486265|pir||T02413 probable RING zinc
  misc_feature (32)..(159): Homolog of NCBI NO: 21553849 NR Description: putative RING zinc finger protein [Arabidopsis
  misc_feature (38)..(159): Homolog of NCBI NO: 34909840 NR Description: P0403C05.28 [Oryza sativa (japonica
  misc_feature (35)..(158): Homolog of NCBI NO: 29150403 NR Description: unknown protein [Oryza sativa (japonica
  misc_feature (11)..(133): Homolog of NCBI NO: 34905296 NR Description: P0577B11.19 [Oryza sativa (japonica
  misc_feature (24)..(161): Homolog of NCBI NO: 31215747 NR Description: ENSANGP00000012621 [Anopheles gambiae]
  misc_feature (26)..(121): Homolog of NCBI NO: 22795037 NR Description: putative RING protein [Populus x canescens]
  misc_feature (31)..(145): Homolog of NCBI NO: 21912604 NR Description: putative ubiquitin ligase [Taenia solium]
TDSSNLCDRTSETSISSPRKKDLTMAINTITNEEDDASNNFGCNICLELAREPIVTLCGHLFCWPCLYKWLHYHSKSNHCPVCKALVKEDTLVPLYGMGKPSSDPRSKLNSGVTVPNRPAATRTETARPRLEQRHHGSSFFGGHSSFAAMPTGLRFSNFLL

SEQ ID NO: 105958 - protein, 137 aa, Arabidopsis thaliana; identical to SEQ ID NO: 38333
  peptide (1)..(137): Ceres Seq. ID no. 13618401
  misc_feature (19)..(59): Pfam Name: Zinc finger, C3HC4 type (RING finger) Pfam Description: Zinc finger, C3HC4 type (RING finger)
  misc_feature (1)..(137): Homolog of NCBI NO: 15222064 NR Description: zinc finger (C3HC4-type RING finger) protein [Arabidopsis thaliana] >gi|25406402|pir||G96779 probable RING
  misc_feature (7)..(137): Homolog of NCBI NO: 18394721 NR Description: zinc finger (C3HC4-type RING finger) protein
  misc_feature (8)..(135): Homolog of NCBI NO: 15224062 NR Description: zinc finger (C3HC4-type RING finger) protein [Arabidopsis thaliana] >gi|7486265|pir||T02413 probable RING zinc
  misc_feature (8)..(135): Homolog of NCBI NO: 21553849 NR Description: putative RING zinc finger protein [Arabidopsis
  misc_feature (14)..(135): Homolog of NCBI NO: 34909840 NR Description: P0403C05.28 [Oryza sativa (japonica
  misc_feature (11)..(134): Homolog of NCBI NO: 29150403 NR Description: unknown protein [Oryza sativa (japonica
  misc_feature (1)..(109): Homolog of NCBI NO: 34905296 NR Description: P0577B11.19 [Oryza sativa (japonica
  misc_feature (1)..(137): Homolog of NCBI NO: 31215747 NR Description: ENSANGP00000012621 [Anopheles gambiae]
  misc_feature (2)..(97): Homolog of NCBI NO: 22795037 NR Description: putative RING protein [Populus x canescens]
  misc_feature (7)..(121): Homolog of NCBI NO: 21912604 NR Description: putative ubiquitin ligase [Taenia solium]

SEQ ID NO: 105959 - DNA, 941 bp, Arabidopsis thaliana
  misc_feature (1)..(941): Ceres Seq. ID no. 13618402
  misc_feature: MA Experiment ID: 108464 Result: Up-regulated in Transcription
  misc_feature: MA Experiment 108464 PARAMETER Experiment Name: At_Germinating_Seeds_cDNA_P Parameter: Age (day) Value: 4 vs. 0
  misc_feature: MA Experiment 108464 PARAMETER Experiment Name: At_Germinating_Seeds_cDNA_P Parameter: Tissue Value: Germinating Seeds
  misc_feature: MA Experiment ID: 20000348 Result: Up-regulated in Transcription
  misc_feature: MA Experiment 20000348 PARAMETER Experiment Name: At_100uM_ABA_Sub_P Parameter: Age (day) Value: 14
  misc_feature: MA Experiment 20000348 PARAMETER Experiment Name: At_100uM_ABA_Sub_P Parameter: Organism Value: A. thaliana
  misc_feature: MA Experiment 20000348 PARAMETER Experiment Name: At_100uM_ABA_Sub_P Parameter: Plant Line Value: WS
  misc_feature: MA Experiment 20000348 PARAMETER Experiment Name: At_100uM_ABA_Sub_P Parameter: Timepoint (hr) Value: 1
  misc_feature: MA Experiment 20000348 PARAMETER Experiment Name: At_100uM_ABA_Sub_P Parameter: Tissue Value: Aerial
  misc_feature: MA Experiment 20000348 PARAMETER Experiment Name: At_100uM_ABA_Sub_P Parameter: Treatment Value: 100uM ABA vs. No Treatment
  misc_feature: MA Experiment ID: 20000355 Result: Up-regulated in Transcription
  misc_feature: MA Experiment 20000355 PARAMETER Experiment Name: At_Siliques_Sub_P Parameter: Age (day) Value: 21
  misc_feature: MA Experiment 20000355 PARAMETER Experiment Name: At_Siliques_Sub_P Parameter: Organism Value: A. thaliana
  misc_feature: MA Experiment 20000355 PARAMETER Experiment Name: At_Siliques_Sub_P Parameter: Plant Line Value: WS
  misc_feature: MA Experiment 20000355 PARAMETER Experiment Name: At_Siliques_Sub_P Parameter: Tissue Value: Less Than 5mm Siliques vs. Whole Plant
  misc_feature: MA Experiment ID: 20000440 Result: Up-regulated in Transcription
  misc_feature: MA Experiment 20000440 PARAMETER Experiment Name: At_Closed-Flower__Sub_P Parameter: Tissue Value: Closed Flower vs. Whole Plant
atacactctgctttttcctctttcttctctcactcttactctgtctttcttcatcagaccaaaaacaaaccctaatttctcagctcgatttctctcttactccatttctcaatccttcacaaaatgcaccaacttccatttccgagatcgtaaaaaagcttgtggtactttctgataatagagagggaaaaaacgagagagagagaaaacacaaaatgctggaagctccggtgaacaagtcaagcatcctcaatggaggaggaggaggattctctcagctacagagttgcttcggcgattgcagtagcgaagaagaattgtcagtgttgccacgtcataccaaagttgtcgttactggaaacaaccgtaccaaatctgttctcgtcggtcttcaaggcgtcgttaagaaagccgtcggactcggtggttggcattggctggttttgactaatggaattgaagtgaagttgcagaggaatgcgcttagtgttcttgaacatcctacagggaacgaagaagacaatgatcttgaagtcgaccattctacacagtggaatcatccctccgatatgacaactgaggacactttgaagcctcataagtcgaagaagagaggacacagatcatcgcggttatctcaaaaggctttgtacagggaagtttcttgtgactcacactcaaaaatctcgagtattactcctcgtctgaacatggttgatcttaccaagttggatatggctgcattactgagatattggcgacattttaacctcgtggatgctcttccgaatcccacaaaggagcaactaattgacattattcagagacacttcatgtctcagcaaatggatgagcttcaggttattgtgggattcgttcaggctgcaacaggaatgaagaaggcttgccaagtggaagaccaaagaagccagaaacactga

SEQ ID NO: 105960 - protein, 312 aa, Arabidopsis thaliana
  peptide (1)..(312): Ceres Seq. ID no. 13618403
  misc_feature (72)..(312): Homolog of NCBI NO: 15222092 NR Description: hypothetical protein [Arabidopsis thaliana]
  misc_feature (72)..(310): Homolog of NCBI NO: 25372870 NR Description: protein F18O14.5 [imported] - Arabidopsis >gi|8778446|gb|AAF79454.1|AC025808_36 F18O14.5 [Arabidopsis
  misc_feature (72)..(310): Homolog of NCBI NO: 18394724 NR Description: expressed protein [Arabidopsis thaliana]
  misc_feature (103)..(289): Homolog of NCBI NO: 18767383 NR Description: Hypothetical protein [Oryza sativa]
  misc_feature (103)..(289): Homolog of NCBI NO: 37533376 NR Description: hypothetical protein [Oryza sativa (japonica group)] >gi|18057114|gb|AAL58137.1| hypothetical protein [Oryza
  misc_feature (101)..(299): Homolog of NCBI NO: 38346468 NR Description: OSJNBa0019G23.16 [Oryza sativa (japonica
  misc_feature (101)..(173): Homolog of NCBI NO: 38567956 NR Description: OSJNBb0115I21.12 [Oryza sativa (japonica
TLCFFLFLLSLLLCLSSSDQKQTLISQLDFSLTPFLNPSQNAPTSISEIVKKLVVLSDNREGKNERERKHKMLEAPVNKSSILNGGGGGFSQLQSCFGDCSSEEELSVLPRHTKVVVTGNNRTKSVLVGLQGVVKKAVGLGGWHWLVLTNGIEVKLQRNALSVLEHPTGNEEDNDLEVDHSTQWNHPSDMTTEDTLKPHKSKKRGHRSSRLSQKALYREVSCDSHSKISSITPRLNMVDLTKLDMAALLRYWRHFNLVDALPNPTKEQLIDIIQRHFMSQQMDELQVIVGFVQAATGMKKACQVEDQRSQKH

SEQ ID NO: 105961 - protein, 241 aa, Arabidopsis thaliana
  peptide (1)..(241): Ceres Seq. ID no. 13618404
  misc_feature (1)..(241): Homolog of NCBI NO: 15222092 NR Description: hypothetical protein [Arabidopsis thaliana]
  misc_feature (1)..(239): Homolog of NCBI NO: 25372870 NR Description: protein F18O14.5 [imported] - Arabidopsis >gi|8778446|gb|AAF79454.1|AC025808_36 F18O14.5 [Arabidopsis
  misc_feature (1)..(239): Homolog of NCBI NO: 18394724 NR Description: expressed protein [Arabidopsis thaliana]
  misc_feature (32)..(218): Homolog of NCBI NO: 18767383 NR Description: Hypothetical protein [Oryza sativa]
  misc_feature (32)..(218): Homolog of NCBI NO: 37533376 NR Description: hypothetical protein [Oryza sativa (japonica group)] >gi|18057114|gb|AAL58137.1| hypothetical protein [Oryza
  misc_feature (30)..(228): Homolog of NCBI NO: 38346468 NR Description: OSJNBa0019G23.16 [Oryza sativa (japonica
  misc_feature (30)..(102): Homolog of NCBI NO: 38567956 NR Description: OSJNBb0115I21.12 [Oryza sativa (japonica
MLEAPVNKSSILNGGGGGFSQLQSCFGDCSSEEELSVLPRHTKVVVTGNNRTKSVLVGLQGVVKKAVGLGGWHWLVLTNGIEVKLQRNALSVLEHPTGNEEDNDLEVDHSTQWNHPSDMTTEDTLKPHKSKKRGHRSSRLSQKALYREVSCDSHSKISSITPRLNMVDLTKLDMAALLRYWRHFNLVDALPNPTKEQLIDIIQRHFMSQQMDELQVIVGFVQAATGMKKACQVEDQRSQKH

SEQ ID NO: 105962 - DNA, 1520 bp, Arabidopsis thaliana
  misc_feature (1)..(1520): Ceres Seq. ID no. 13618405
  misc_feature: MA Experiment ID: 108576 Result: Up-regulated in Transcription
  misc_feature: MA Experiment 108576 PARAMETER Experiment Name: At_42deg_Heat_cDNA_P Parameter: Temperature (deg C) Value: 42 vs. 22
  misc_feature: MA Experiment 108576 PARAMETER Experiment Name: At_42deg_Heat_cDNA_P Parameter: Timepoint (hr) Value: 1
  misc_feature: MA Experiment 108576 PARAMETER Experiment Name: At_42deg_Heat_cDNA_P Parameter: Tissue Value: Aerial
  misc_feature: MA Experiment ID: 108595 Result: Up-regulated in Transcription
  misc_feature: MA Experiment 108595 PARAMETER Experiment Name: At_Ler-pi_Ovule_cDNA_P Parameter: Plant Line Value: null
  misc_feature: MA Experiment ID: 20000437 Result: Down-regulated in Transcription
  misc_feature: MA Experiment 20000437 PARAMETER Experiment Name: At_Drought_P Parameter: Age (day) Value: 8
  misc_feature: MA Experiment 20000437 PARAMETER Experiment Name: At_Drought_P Parameter: Organism Value: A. thaliana
  misc_feature: MA Experiment 20000437 PARAMETER Experiment Name: At_Drought_P Parameter: Plant Line Value: WS
  misc_feature: MA Experiment 20000437 PARAMETER Experiment Name: At_Drought_P Parameter: Timepoint (hr) Value: 24
  misc_feature: MA Experiment 20000437 PARAMETER Experiment Name: At_Drought_P Parameter: Tissue Value: Whole Plant
  misc_feature: MA Experiment 20000437 PARAMETER Experiment Name: At_Drought_P Parameter: Treatment Value: Drought vs. No Drought
  misc_feature: MA Experiment ID: 20001247 Result: Up-regulated in Transcription
  misc_feature: MA Experiment 20001247 PARAMETER Experiment Name: At_Far-red-induction_P Parameter: Age (day) Value: 7
  misc_feature: MA Experiment 20001247 PARAMETER Experiment Name: At_Far-red-induction_P Parameter: Light Value: Far-red vs. White
  misc_feature: MA Experiment 20001247 PARAMETER Experiment Name: At_Far-red-induction_P Parameter: Organism Value: A. thaliana
  misc_feature: MA Experiment 20001247 PARAMETER Experiment Name: At_Far-red-induction_P Parameter: Plant Line Value: Columbia
  misc_feature: MA Experiment 20001247 PARAMETER Experiment Name: At_Far-red-induction_P Parameter: Timepoint (hr) Value: 1
  misc_feature: MA Experiment 20001247 PARAMETER Experiment Name: At_Far-red-induction_P Parameter: Tissue Value: Whole Plant
  misc_feature: MA Experiment ID: 20001248 Result: Up-regulated in Transcription
  misc_feature: MA Experiment 20001248 PARAMETER Experiment Name: At_Far-red-induction_P Parameter: Age (day) Value: 7
  misc_feature: MA Experiment 20001248 PARAMETER Experiment Name: At_Far-red-induction_P Parameter: Light Value: Far-red vs. White
  misc_feature: MA Experiment 20001248 PARAMETER Experiment Name: At_Far-red-induction_P Parameter: Organism Value: A. thaliana
  misc_feature: MA Experiment 20001248 PARAMETER Experiment Name: At_Far-red-induction_P Parameter: Plant Line Value: Columbia
  misc_feature: MA Experiment 20001248 PARAMETER Experiment Name: At_Far-red-induction_P Parameter: Timepoint (hr) Value: 4
  misc_feature: MA Experiment 20001248 PARAMETER Experiment Name: At_Far-red-induction_P Parameter: Tissue Value: Whole Plant
  misc_feature: MA Experiment ID: 20001451 Result: Up-regulated in Transcription
  misc_feature: MA Experiment 20001451 PARAMETER Experiment Name: At_Far-red-induction_P Parameter: Age (day) Value: 7
  misc_feature: MA Experiment 20001451 PARAMETER Experiment Name: At_Far-red-induction_P Parameter: Light Value: Far-red vs. White
  misc_feature: MA Experiment 20001451 PARAMETER Experiment Name: At_Far-red-induction_P Parameter: Organism Value: A. thaliana
  misc_feature: MA Experiment 20001451 PARAMETER Experiment Name: At_Far-red-induction_P Parameter: Plant Line Value: Columbia
  misc_feature: MA Experiment 20001451 PARAMETER Experiment Name: At_Far-red-induction_P Parameter: Timepoint (hr) Value: 24
  misc_feature: MA Experiment 20001451 PARAMETER Experiment Name: At_Far-red-induction_P Parameter: Tissue Value: Whole Plant
  misc_feature: MA Experiment ID: 20001757 Result: Down-regulated in Transcription
  misc_feature: MA Experiment 20001757 PARAMETER Experiment Name: At_50mM_NH4NO3_L-to-H_P Parameter: Timepoint (hr) Value: 6
  misc_feature: MA Experiment 20001757 PARAMETER Experiment Name: At_50mM_NH4NO3_L-to-H_P Parameter: Tissue Value: Leaf
  misc_feature: MA Experiment 20001757 PARAMETER Experiment Name: At_50mM_NH4NO3_L-to-H_P Parameter: Treatment Value: 50mM NH4NO3 vs 100mM Mannitol
agatgaaaaaaatattattatttgttggagaagaaagagagattcttcttcttcgattccagcgaaggaaaagcgtattcctcgtgagcactaacttctcactcctctcttcttcttcttcatcagtctacgttcacacaatctttcacccacctattcaaagctctctccggaagtttcgaggggttggttgttggttttcccgatgacttcggatggagctacgtcgacatcagcagctgcagctgcggcggcggcagcagcggcgaggaggaagccgtcgtggagagaaagggagaataatcggaggagagaaagacggagaagagctgtagctgcgaagatatacactgggcttagagctcaaggtgattataatttgcctaaacattgtgataataatgaagtccttaaagctctttgtgttgaagctggttgggttgttgaagaagatggtactacttatcgcaagggatgcaagcctttacctggtgagatagctgggacttcatctcgagtaactccatattcatcacagaaccagagccctctttcatcagcctttcaaagtcccatcccatcttaccaagttagcccgtcttcttcatcattcccgagtccttctcgcggtgaaccaaataacaacatgtcctctacattcttccctttcctcagaaatggtggcattccttcttctcttccttccctcagaatctcaaacagttgtccagttaccccaccggtctcatcgccgacttctaagaacccgaaaccgttgcctaactgggaatctatcgctaagcaatccatggccattgctaaacaatcaatggcgtcttttaattatcctttctatgcggtttctgcacctgctagtccgacacatcgccaccagtttcataccccggctactatacctgaatgtgatgagtctgactcttccactgttgattctggtcattggataagctttcagaagtttgcacaacaacagccattctctgcctctatggtgccaacctctcctaccttcaatcttgtgaaacctgcgcctcagcagatgtctccaaatactgctgccttccaagagattggtcaaagctctgagtttaaatttgagaatagccaagttaaaccctgggaaggagagaggatacatgatgtgggtatggaggatcttgagcttacacttggaaatgggaaggctcgtggttgacataaacaactaggcaaacccaaatggcatgtcattggaatatgagaaactaatcctcttgagtattttcttcttcgtccaggtatttggatctttatggaatctcatatgttcttcacttattatccaaatatgctgcccaaagccttctccatggaagcattggagtgttagagtggttattcaattcatgaatttggtttcaaaagcattatttgtagataaaaaaatcttaagatgtatgattctgtttccttacatatgttacattaattagtggcttgaaactgtcttgtgtcttgtc

SEQ ID NO: 105963 - protein, 336 aa, Arabidopsis thaliana
  peptide (1)..(336): Ceres Seq. ID no. 13618406
  misc_feature (1)..(336): Homolog of NCBI NO: 18410764 NR Description: expressed protein [Arabidopsis thaliana] BZR1 protein [Arabidopsis thaliana] >gi|21592862|gb|AAM64812.1|
  misc_feature (1)..(336): Homolog of NCBI NO: 18086461 NR Description: At1g75080/F9E10_7 [Arabidopsis thaliana]
  misc_feature (1)..(336): Homolog of NCBI NO: 25352558 NR Description: unknown protein F9E10.7 [imported] - Arabidopsis
  misc_feature (1)..(334): Homolog of NCBI NO: 18394728 NR Description: expressed protein [Arabidopsis thaliana]
  misc_feature (1)..(334): Homolog of NCBI NO: 6651069 NR Description: 107 protein [Arabidopsis thaliana]
  misc_feature (1)..(334): Homolog of NCBI NO: 21592457 NR Description: unknown [Arabidopsis thaliana]
  misc_feature (5)..(281): Homolog of NCBI NO: 14626761 NR Description: mature anther-specific protein LAT61
  misc_feature (10)..(335): Homolog of NCBI NO: 15215731 NR Description: AT4g36780/C7A10_580 [Arabidopsis thaliana]
  misc_feature (16)..(274): Homolog of NCBI NO: 33146833 NR Description: putative mature anther-specific protein LAT61
  misc_feature (201)..(334): Homolog of NCBI NO: 13937167 NR Description: At1g19350/F18O14_4 [Arabidopsis thaliana]
MTSDGATSTSAAAAAAAAAAARRKPSWRERENNRRRERRRRAVAAKIYTGLRAQGDYNLPKHCDNNEVLKALCVEAGWVVEEDGTTYRKGCKPLPGEIAGTSSRVTPYSSQNQSPLSSAFQSPIPSYQVSPSSSSFPSPSRGEPNNNMSSTFFPFLRNGGIPSSLPSLRISNSCPVTPPVSSPTSKNPKPLPNWESIAKQSMAIAKQSMASFNYPFYAVSAPASPTHRHQFHTPATIPECDESDSSTVDSGHWISFQKFAQQQPFSASMVPTSPTFNLVKPAPQQMSPNTAAFQEIGQSSEFKFENSQVKPWEGERIHDVGMEDLELTLGNGKARG

SEQ ID NO: 105964 - protein, 189 aa, Arabidopsis thaliana
  peptide (1)..(189): Ceres Seq. ID no. 13618407
  misc_feature (1)..(189): Homolog of NCBI NO: 18410764 NR Description: expressed protein [Arabidopsis thaliana] BZR1 protein [Arabidopsis thaliana] >gi|21592862|gb|AAM64812.1|
  misc_feature (1)..(189): Homolog of NCBI NO: 18086461 NR Description: At1g75080/F9E10_7 [Arabidopsis thaliana]
  misc_feature (1)..(189): Homolog of NCBI NO: 25352558 NR Description: unknown protein F9E10.7 [imported] - Arabidopsis
  misc_feature (1)..(187): Homolog of NCBI NO: 18394728 NR Description: expressed protein [Arabidopsis thaliana]
  misc_feature (1)..(187): Homolog of NCBI NO: 6651069 NR Description: 107 protein [Arabidopsis thaliana]
  misc_feature (1)..(187): Homolog of NCBI NO: 21592457 NR Description: unknown [Arabidopsis thaliana]
  misc_feature (1)..(134): Homolog of NCBI NO: 14626761 NR Description: mature anther-specific protein LAT61
  misc_feature (1)..(188): Homolog of NCBI NO: 15215731 NR Description: AT4g36780/C7A10_580 [Arabidopsis thaliana]
  misc_feature (1)..(127): Homolog of NCBI NO: 33146833 NR Description: putative mature anther-specific protein LAT61
  misc_feature (54)..(187): Homolog of NCBI NO: 13937167 NR Description: At1g19350/F18O14_4 [Arabidopsis thaliana]
MSSTFFPFLRNGGIPSSLPSLRISNSCPVTPPVSSPTSKNPKPLPNWESIAKQSMAIAKQSMASFNYPFYAVSAPASPTHRHQFHTPATIPECDESDSSTVDSGHWISFQKFAQQQPFSASMVPTSPTFNLVKPAPQQMSPNTAAFQEIGQSSEFKFENSQVKPWEGERIHDVGMEDLELTLGNGKARG

SEQ ID NO: 105965 - DNA, 1640 bp, Arabidopsis thaliana
  misc_feature (1)..(1640): Ceres Seq. ID no. 13618427
  misc_feature: MA Experiment ID: 108569 Result: Up-regulated in Transcription
  misc_feature: MA Experiment 108569 PARAMETER Experiment Name: At_0.001%_MeJA__cDNA_P Parameter: Timepoint (hr) Value: 6
  misc_feature: MA Experiment 108569 PARAMETER Experiment Name: At_0.001%_MeJA__cDNA_P Parameter: Tissue Value: Aerial
  misc_feature: MA Experiment 108569 PARAMETER Experiment Name: At_0.001%_MeJA__cDNA_P Parameter: Treatment Value: 0.001% MeJA vs. No Treatment
  misc_feature: MA Experiment ID: 108574 Result: Up-regulated in Transcription
  misc_feature: MA Experiment 108574 PARAMETER Experiment Name: At_Wounding__cDNA_P Parameter: Timepoint (hr) Value: 1
  misc_feature: MA Experiment 108574 PARAMETER Experiment Name: At_Wounding__cDNA_P Parameter: Tissue Value: Aerial
  misc_feature: MA Experiment 108574 PARAMETER Experiment Name: At_Wounding__cDNA_P Parameter: Treatment Value: Wounding vs. No Wounding
  misc_feature: MA Experiment ID: 108576 Result: Down-regulated in Transcription
  misc_feature: MA Experiment 108576 PARAMETER Experiment Name: At_42deg_Heat_cDNA_P Parameter: Temperature (deg C) Value: 42 vs. 22
  misc_feature: MA Experiment 108576 PARAMETER Experiment Name: At_42deg_Heat_cDNA_P Parameter: Timepoint (hr) Value: 1
  misc_feature: MA Experiment 108576 PARAMETER Experiment Name: At_42deg_Heat_cDNA_P Parameter: Tissue Value: Aerial
  misc_feature: MA Experiment ID: 108577 Result: Down-regulated in Transcription
  misc_feature: MA Experiment 108577 PARAMETER Experiment Name: At_42deg_Heat_cDNA_P Parameter: Temperature (deg C) Value: 42 vs. 22
  misc_feature: MA Experiment 108577 PARAMETER Experiment Name: At_42deg_Heat_cDNA_P Parameter: Timepoint (hr) Value: 6
  misc_feature: MA Experiment 108577 PARAMETER Experiment Name: At_42deg_Heat_cDNA_P Parameter: Tissue Value: Aerial
  misc_feature: MA Experiment ID: 108579 Result: Up-regulated in Transcription
  misc_feature: MA Experiment 108579 PARAMETER Experiment Name: At_4deg_Cold_cDNA_P Parameter: Temperature (deg C) Value: 4 vs. 22
  misc_feature: MA Experiment 108579 PARAMETER Experiment Name: At_4deg_Cold_cDNA_P Parameter: Timepoint (hr) Value: 6
  misc_feature: MA Experiment 108579 PARAMETER Experiment Name: At_4deg_Cold_cDNA_P Parameter: Tissue Value: Aerial
  misc_feature: MA Experiment ID: 20000071 Result: Up-regulated in Transcription
  misc_feature: MA Experiment 20000071 PARAMETER Experiment Name: At_100uM_ABA_Mutants_cDNA_P Parameter: Plant Line Value: CS8104
  misc_feature: MA Experiment 20000071 PARAMETER Experiment Name: At_100uM_ABA_Mutants_cDNA_P Parameter: Timepoint (hr) Value: 6
  misc_feature: MA Experiment 20000071 PARAMETER Experiment Name: At_100uM_ABA_Mutants_cDNA_P Parameter: Tissue Value: Aerial
  misc_feature: MA Experiment 20000071 PARAMETER Experiment Name: At_100uM_ABA_Mutants_cDNA_P Parameter: Treatment Value: 100uM ABA vs. No Treatment
  misc_feature: MA Experiment ID: 20000088 Result: Up-regulated in Transcription
  misc_feature: MA Experiment 20000088 PARAMETER Experiment Name: At_100uM_ABA_Mutants_cDNA_P Parameter: Plant Line Value: Landsberg
  misc_feature: MA Experiment 20000088 PARAMETER Experiment Name: At_100uM_ABA_Mutants_cDNA_P Parameter: Timepoint (hr) Value: 6
  misc_feature: MA Experiment 20000088 PARAMETER Experiment Name: At_100uM_ABA_Mutants_cDNA_P Parameter: Tissue Value: Aerial
  misc_feature: MA Experiment 20000088 PARAMETER Experiment Name: At_100uM_ABA_Mutants_cDNA_P Parameter: Treatment Value: 100uM ABA vs. No Treatment
  misc_feature: MA Experiment ID: 20000166 Result: Up-regulated in Transcription
  misc_feature: MA Experiment 20000166 PARAMETER Experiment Name: At_100uM_ABA_P Parameter: Age (day) Value: 14
  misc_feature: MA Experiment 20000166 PARAMETER Experiment Name: At_100uM_ABA_P Parameter: Organism Value: A. thaliana
  misc_feature: MA Experiment 20000166 PARAMETER Experiment Name: At_100uM_ABA_P Parameter: Plant Line Value: WS
  misc_feature: MA Experiment 20000166 PARAMETER Experiment Name: At_100uM_ABA_P Parameter: Timepoint (hr) Value: 1
  misc_feature: MA Experiment 20000166 PARAMETER Experiment Name: At_100uM_ABA_P Parameter: Tissue Value: Aerial
  misc_feature: MA Experiment 20000166 PARAMETER Experiment Name: At_100uM_ABA_P Parameter: Treatment Value: 100uM ABA vs. No Treatment
  misc_feature: MA Experiment ID: 20000171 Result: Down-regulated in Transcription
  misc_feature: MA Experiment 20000171 PARAMETER Experiment Name: At_42deg_Heat_P Parameter: Age (day) Value: 14
  misc_feature: MA Experiment 20000171 PARAMETER Experiment Name: At_42deg_Heat_P Parameter: Organism Value: A. thaliana
  misc_feature: MA Experiment 20000171 PARAMETER Experiment Name: At_42deg_Heat_P Parameter: Plant Line Value: WS
  misc_feature: MA Experiment 20000171 PARAMETER Experiment Name: At_42deg_Heat_P Parameter: Temperature (deg C) Value: 42 vs. 22
  misc_feature: MA Experiment 20000171 PARAMETER Experiment Name: At_42deg_Heat_P Parameter: Timepoint (hr) Value: 1
  misc_feature: MA Experiment 20000171 PARAMETER Experiment Name: At_42deg_Heat_P Parameter: Tissue Value: Aerial
  misc_feature: MA Experiment ID: 20000180 Result: Up-regulated in Transcription
  misc_feature: MA Experiment 20000180 PARAMETER Experiment Name: At_Germinating_Seeds_P Parameter: Age (hr) Value: 24 vs. 0
  misc_feature: MA Experiment 20000180 PARAMETER Experiment Name: At_Germinating_Seeds_P Parameter: Tissue Value: Germinating Seeds
  misc_feature: MA Experiment ID: 20000184 Result: Down-regulated in Transcription
  misc_feature: MA Experiment 20000184 PARAMETER Experiment Name: At_Shoots__P Parameter: Age (day) Value: 7
  misc_feature: MA Experiment 20000184 PARAMETER Experiment Name: At_Shoots__P Parameter: Tissue Value: Shoots vs. Whole Plant
  misc_feature: MA Experiment ID: 20000185 Result: Down-regulated in Transcription
  misc_feature: MA Experiment 20000185 PARAMETER Experiment Name: At_Roots__P Parameter: Age (day) Value: 7 vs. 21
  misc_feature: MA Experiment 20000185 PARAMETER Experiment Name: At_Roots__P Parameter: Organism Value: A. thaliana
  misc_feature: MA Experiment 20000185 PARAMETER Experiment Name: At_Roots__P Parameter: Tissue Value: Roots vs. Whole Plant
  misc_feature: MA Experiment ID: 20000211 Result: Up-regulated in Transcription
  misc_feature: MA Experiment 20000211 PARAMETER Experiment Name: At_0.001percent_MeJA__P Parameter: Age (day) Value: 14
  misc_feature: MA Experiment 20000211 PARAMETER Experiment Name: At_0.001percent_MeJA__P Parameter: Organism Value: A. thaliana
  misc_feature: MA Experiment 20000211 PARAMETER Experiment Name: At_0.001percent_MeJA__P Parameter: Plant Line Value: WS
  misc_feature: MA Experiment 20000211 PARAMETER Experiment Name: At_0.001percent_MeJA__P Parameter: Timepoint (hr) Value: 1
  misc_feature: MA Experiment 20000211 PARAMETER Experiment Name: At_0.001percent_MeJA__P Parameter: Tissue Value: Aerial
  misc_feature: MA Experiment 20000211 PARAMETER Experiment Name: At_0.001percent_MeJA__P Parameter: Treatment Value: 0.001percent MeJA vs. No Treatment
  misc_feature: MA Experiment ID: 20000227 Result: Down-regulated in Transcription
  misc_feature: MA Experiment 20000227 PARAMETER Experiment Name: At_Root-Tips-vs-Tops_P Parameter: Tissue Value: Root Tips vs. Root Tops
  misc_feature: MA Experiment ID: 20000234 Result: Up-regulated in Transcription
  misc_feature: MA Experiment 20000234 PARAMETER Experiment Name: At_Siliques_P Parameter: Age (day) Value: 21
  misc_feature: MA Experiment 20000234 PARAMETER Experiment Name: At_Siliques_P Parameter: Organism Value: A. thaliana
  misc_feature: MA Experiment 20000234 PARAMETER Experiment Name: At_Siliques_P Parameter: Plant Line Value: WS
  misc_feature: MA Experiment 20000234 PARAMETER Experiment Name: At_Siliques_P Parameter: Tissue Value: Less Than 5mm Siliques vs. Whole Plant
  misc_feature: MA Experiment ID: 20000264 Result: Up-regulated in Transcription
  misc_feature: MA Experiment 20000264 PARAMETER Experiment Name: At_Open_Flower_P Parameter: Age (day) Value: 21
  misc_feature: MA Experiment 20000264 PARAMETER Experiment Name: At_Open_Flower_P Parameter: Plant Line Value: WS
  misc_feature: MA Experiment 20000264 PARAMETER Experiment Name: At_Open_Flower_P Parameter: Tissue Value: Open Flower vs. Whole Plant
  misc_feature: MA Experiment ID: 20000265 Result: Up-regulated in Transcription
  misc_feature: MA Experiment 20000265 PARAMETER Experiment Name: At_Open_Flower_P Parameter: Age (day) Value: 21
  misc_feature: MA Experiment 20000265 PARAMETER Experiment Name: At_Open_Flower_P Parameter: Plant Line Value: WS
  misc_feature: MA Experiment 20000265 PARAMETER Experiment Name: At_Open_Flower_P Parameter: Tissue Value: Closed Flower vs. Whole Plant
  misc_feature: MA Experiment ID: 20000268 Result: Up-regulated in Transcription
  misc_feature: MA Experiment 20000268 PARAMETER Experiment Name: At_100mM_NaCl__P Parameter: Age (day) Value: 14
  misc_feature: MA Experiment 20000268 PARAMETER Experiment Name: At_100mM_NaCl__P Parameter: Organism Value: A. thaliana
  misc_feature: MA Experiment 20000268 PARAMETER Experiment Name: At_100mM_NaCl__P Parameter: Plant Line Value: WS
  misc_feature: MA Experiment 20000268 PARAMETER Experiment Name: At_100mM_NaCl__P Parameter: Timepoint (hr) Value: 6
  misc_feature: MA Experiment 20000268 PARAMETER Experiment Name: At_100mM_NaCl__P Parameter: Tissue Value: Whole Plant
  misc_feature: MA Experiment 20000268 PARAMETER Experiment Name: At_100mM_NaCl__P Parameter: Treatment Value: 100mM NaCl vs. No Treatment
  misc_feature: MA Experiment ID: 20000286 Result: Up-regulated in Transcription
  misc_feature: MA Experiment 20000286 PARAMETER Experiment Name: At_Open_Flower_P Parameter: Age (day) Value: 21
  misc_feature: MA Experiment 20000286 PARAMETER Experiment Name: At_Open_Flower_P Parameter: Plant Line Value: WS
  misc_feature: MA Experiment 20000286 PARAMETER Experiment Name: At_Open_Flower_P Parameter: Tissue Value: Half Open vs. Whole Plant
  misc_feature: MA Experiment ID: 20000308 Result: Up-regulated in Transcription
  misc_feature: MA Experiment 20000308 PARAMETER Experiment Name: At_100mM_NaCl__P Parameter: Age (day) Value: 17
  misc_feature: MA Experiment 20000308 PARAMETER Experiment Name: At_100mM_NaCl__P Parameter: Organism Value: A. thaliana
  misc_feature: MA Experiment 20000308 PARAMETER Experiment Name: At_100mM_NaCl__P Parameter: Plant Line Value: WS
  misc_feature: MA Experiment 20000308 PARAMETER Experiment Name: At_100mM_NaCl__P Parameter: Timepoint (hr) Value: 72
  misc_feature: MA Experiment 20000308 PARAMETER Experiment Name: At_100mM_NaCl__P Parameter: Tissue Value: Whole Plant
  misc_feature: MA Experiment 20000308 PARAMETER Experiment Name: At_100mM_NaCl__P Parameter: Treatment Value: 100mM NaCl vs. No Treatment
  misc_feature: MA Experiment ID: 20000438 Result: Down-regulated in Transcription
  misc_feature: MA Experiment 20000438 PARAMETER Experiment Name: At_Shoots__P Parameter: Age (day) Value: 14
  misc_feature: MA Experiment 20000438 PARAMETER Experiment Name: At_Shoots__P Parameter: Tissue Value: Shoots vs. Whole Plant
  misc_feature: MA Experiment ID: 20000451 Result: Up-regulated in Transcription
  misc_feature: MA Experiment 20000451 PARAMETER Experiment Name: At_CS6879_Shoots-Roots_P Parameter: Age (day) Value: 14
  misc_feature: MA Experiment 20000451 PARAMETER Experiment Name: At_CS6879_Shoots-Roots_P Parameter: Organism Value: A. thaliana
  misc_feature: MA Experiment 20000451 PARAMETER Experiment Name: At_CS6879_Shoots-Roots_P Parameter: Plant Line Value: CS6879 vs. WS
  misc_feature: MA Experiment 20000451 PARAMETER Experiment Name: At_CS6879_Shoots-Roots_P Parameter: Tissue Value: Roots
  misc_feature: MA Experiment ID: 20000495 Result: Down-regulated in Transcription
  misc_feature: MA Experiment 20000495 PARAMETER Experiment Name: At_Guard_Cells_P Parameter: Harvest Date Value: 8/2/2002
  misc_feature: MA Experiment 20000495 PARAMETER Experiment Name: At_Guard_Cells_P Parameter: Organism Value: A. thaliana
  misc_feature: MA Experiment 20000495 PARAMETER Experiment Name: At_Guard_Cells_P Parameter: Tissue Value: Guard Cells vs. Leaves
  misc_feature: MA Experiment ID: 20000527 Result: Down-regulated in Transcription
  misc_feature: MA Experiment 20000527 PARAMETER Experiment Name: At_10percent_PEG_P Parameter: Age (day) Value: 20
  misc_feature: MA Experiment 20000527 PARAMETER Experiment Name: At_10percent_PEG_P Parameter: Organism Value: A. thaliana
  misc_feature: MA Experiment 20000527 PARAMETER Experiment Name: At_10percent_PEG_P Parameter: Plant Line Value: WS
  misc_feature: MA Experiment 20000527 PARAMETER Experiment Name: At_10percent_PEG_P Parameter: Timepoint (day) Value: 20
  misc_feature: MA Experiment 20000527 PARAMETER Experiment Name: At_10percent_PEG_P Parameter: Tissue Value: Whole Plant
  misc_feature: MA Experiment 20000527 PARAMETER Experiment Name: At_10percent_PEG_P Parameter: Treatment Value: 10percent PEG vs. No Treatment
  misc_feature: MA Experiment ID: 20000573 Result: Down-regulated in Transcription
  misc_feature: MA Experiment 20000573 PARAMETER Experiment Name: At_100uM_ABA_Mutants__P Parameter: Organism Value: A. thaliana
  misc_feature: MA Experiment 20000573 PARAMETER Experiment Name: At_100uM_ABA_Mutants__P Parameter: Plant Line Value: CS22 vs. Ler wt
  misc_feature: MA Experiment 20000573 PARAMETER Experiment Name: At_100uM_ABA_Mutants__P Parameter: Timepoint (hr) Value: N/A
  misc_feature: MA Experiment 20000573 PARAMETER Experiment Name: At_100uM_ABA_Mutants__P Parameter: Tissue Value: Whole Plant
  misc_feature: MA Experiment 20000573 PARAMETER Experiment Name: At_100uM_ABA_Mutants__P Parameter: Treatment Value: None
  misc_feature: MA Experiment ID: 20000574 Result: Down-regulated in Transcription
  misc_feature: MA Experiment 20000574 PARAMETER Experiment Name: At_100uM_ABA_Mutants__P Parameter: Organism Value: A. thaliana
  misc_feature: MA Experiment 20000574 PARAMETER Experiment Name: At_100uM_ABA_Mutants__P Parameter: Plant Line Value: CS23 vs. Ler wt
  misc_feature: MA Experiment 20000574 PARAMETER Experiment Name: At_100uM_ABA_Mutants__P Parameter: Timepoint (hr) Value: N/A
  misc_feature: MA Experiment 20000574 PARAMETER Experiment Name: At_100uM_ABA_Mutants__P Parameter: Tissue Value: Whole Plant
  misc_feature: MA Experiment 20000574 PARAMETER Experiment Name: At_100uM_ABA_Mutants__P Parameter: Treatment Value: None
  misc_feature: MA Experiment ID: 20001248 Result: Down-regulated in Transcription
  misc_feature: MA Experiment 20001248 PARAMETER Experiment Name: At_Far-red-induction_P Parameter: Age (day) Value: 7
  misc_feature: MA Experiment 20001248 PARAMETER Experiment Name: At_Far-red-induction_P Parameter: Light Value: Far-red vs. White
  misc_feature: MA Experiment 20001248 PARAMETER Experiment Name: At_Far-red-induction_P Parameter: Organism Value: A. thaliana
  misc_feature: MA Experiment 20001248 PARAMETER Experiment Name: At_Far-red-induction_P Parameter: Plant Line Value: Columbia
  misc_feature: MA Experiment 20001248 PARAMETER Experiment Name: At_Far-red-induction_P Parameter: Timepoint (hr) Value: 4
  misc_feature: MA Experiment 20001248 PARAMETER Experiment Name: At_Far-red-induction_P Parameter: Tissue Value: Whole Plant
  misc_feature: MA Experiment ID: 20001450 Result: Down-regulated in Transcription
  misc_feature: MA Experiment 20001450 PARAMETER Experiment Name: At_Far-red-induction_P Parameter: Age (day) Value: 7
  misc_feature: MA Experiment 20001450 PARAMETER Experiment Name: At_Far-red-induction_P Parameter: Light Value: Far-red vs. White
  misc_feature: MA Experiment 20001450 PARAMETER Experiment Name: At_Far-red-induction_P Parameter: Organism Value: A. thaliana
  misc_feature: MA Experiment 20001450 PARAMETER Experiment Name: At_Far-red-induction_P Parameter: Plant Line Value: Columbia
  misc_feature: MA Experiment 20001450 PARAMETER Experiment Name: At_Far-red-induction_P Parameter: Timepoint (hr) Value: 8
  misc_feature: MA Experiment 20001450 PARAMETER Experiment Name: At_Far-red-induction_P Parameter: Tissue Value: Whole Plant
  misc_feature: MA Experiment ID: 20001451 Result: Down-regulated in Transcription
  misc_feature: MA Experiment 20001451 PARAMETER Experiment Name: At_Far-red-induction_P Parameter: Age (day) Value: 7
  misc_feature: MA Experiment 20001451 PARAMETER Experiment Name: At_Far-red-induction_P Parameter: Light Value: Far-red vs. White
  misc_feature: MA Experiment 20001451 PARAMETER Experiment Name: At_Far-red-induction_P Parameter: Organism Value: A. thaliana
  misc_feature: MA Experiment 20001451 PARAMETER Experiment Name: At_Far-red-induction_P Parameter: Plant Line Value: Columbia
  misc_feature: MA Experiment 20001451 PARAMETER Experiment Name: At_Far-red-induction_P Parameter: Timepoint (hr) Value: 24
  misc_feature: MA Experiment 20001451 PARAMETER Experiment Name: At_Far-red-induction_P Parameter: Tissue Value: Whole Plant
  misc_feature: MA Experiment ID: 20001503 Result: Up-regulated in Transcription
  misc_feature: MA Experiment 20001503 PARAMETER Experiment Name: At_Far-red-enriched_P Parameter: Age (day) Value: 7
  misc_feature: MA Experiment 20001503 PARAMETER Experiment Name: At_Far-red-enriched_P Parameter: Light Value: Far-red enriched vs. White
  misc_feature: MA Experiment 20001503 PARAMETER Experiment Name: At_Far-red-enriched_P Parameter: Organism Value: A. thaliana
  misc_feature: MA Experiment 20001503 PARAMETER Experiment Name: At_Far-red-enriched_P Parameter: Plant Line Value: Columbia
  misc_feature: MA Experiment 20001503 PARAMETER Experiment Name: At_Far-red-enriched_P Parameter: Timepoint (day) Value: 3
  misc_feature: MA Experiment 20001503 PARAMETER Experiment Name: At_Far-red-enriched_P Parameter: Tissue Value: Whole Plant
  misc_feature: MA Experiment ID: 20001557 Result: Up-regulated in Transcription
  misc_feature: MA Experiment 20001557 PARAMETER Experiment Name: At_Drought_Soil_Dry_P Parameter: Age (day) Value: 27
  misc_feature: MA Experiment 20001557 PARAMETER Experiment Name: At_Drought_Soil_Dry_P Parameter: Organism Value: A. thaliana
  misc_feature: MA Experiment 20001557 PARAMETER Experiment Name: At_Drought_Soil_Dry_P Parameter: Plant Line Value: WS
  misc_feature: MA Experiment 20001557 PARAMETER Experiment Name: At_Drought_Soil_Dry_P Parameter: Post Timepoint (hr) Value: 3
  misc_feature: MA Experiment 20001557 PARAMETER Experiment Name: At_Drought_Soil_Dry_P Parameter: Post-Treatment Value: Re-Water vs. No Drought
  misc_feature: MA Experiment 20001557 PARAMETER Experiment Name: At_Drought_Soil_Dry_P Parameter: Timepoint (day) Value: 13
  misc_feature: MA Experiment 20001557 PARAMETER Experiment Name: At_Drought_Soil_Dry_P Parameter: Treatment Value: Drought vs. No Drought
  misc_feature: MA Experiment ID: 20001559 Result: Up-regulated in Transcription
  misc_feature: MA Experiment 20001559 PARAMETER Experiment Name: At_Drought_Soil_Dry_P Parameter: Age (day) Value: 28
  misc_feature: MA Experiment 20001559 PARAMETER Experiment Name: At_Drought_Soil_Dry_P Parameter: Organism Value: A. thaliana
  misc_feature: MA Experiment 20001559 PARAMETER Experiment Name: At_Drought_Soil_Dry_P Parameter: Plant Line Value: WS
  misc_feature: MA Experiment 20001559 PARAMETER Experiment Name: At_Drought_Soil_Dry_P Parameter: Post Timepoint (hr) Value: 29
  misc_feature: MA Experiment 20001559 PARAMETER Experiment Name: At_Drought_Soil_Dry_P Parameter: Post-Treatment Value: Re-Water vs. No Drought
  misc_feature: MA Experiment 20001559 PARAMETER Experiment Name: At_Drought_Soil_Dry_P Parameter: Timepoint (day) Value: 14
  misc_feature: MA Experiment 20001559 PARAMETER Experiment Name: At_Drought_Soil_Dry_P Parameter: Treatment Value: Drought vs. No Drought
aaagcataatagagatacaaagaaacaagaaaacgaaaggaaaaaatacagaaatgggtggtttgaagtttcatgtacttatgtatccatggttcgcaacaggccatatgaccccgttcctttttcttgccaacaaattggctgagaaaggtcatacggtcacttttttgattcccaagaaagctctgaaacagttggaaaatctcaatctgtttccacacaacattgtctttcgctctgtcaccgtccctcatgtggatggtctccccgttggcacagagacagtctctgagatccccgtgacatcagctgatctcttgatgtctgctatggatctcacacgtgatcaagttgaaggtgtggtccgagccgtggaaccggacctgatcttctttgacttcgctcattggattccagaggtagctagagactttggccttaagactgtaaagtacgtcgtggtatctgcatcgactatagctagtatgcttgttccaggtggtgagttaggtgttcctccgccgggatatccttcatcgaaggtgctgcttcgtaaacaagatgcttacaccatgaagaatctggagtctacaaatacaatcaatgtcggaccaaacttattggaaagagtcactacaagtcttatgaactctgatgtcattgcgataaggacagccagagaaatcgaaggaaacttttgcgactatatcgaaaaacattgcaggaaaaaggttctcttgacaggtccggtgttccctgagccagacaagactagagagctagaggaacgatgggttaagtggctaagtgggtatgaaccagactcagtggtgttttgtgcgttgggctcacaagtcattttagagaaagatcaattccaagaactctgcttaggaatggagctaacaggttcaccgtttcttgtagcggttaagccacctagaggctcatcaacgattcaagaagcacttcctgaaggattcgaggagagggttaaaggaagaggagttgtttggggagaatgggttcaacaaccattgctattgtctcatccatcagtcgggtgctttgtgagccattgtgggtttggatcaatgtgggagtctttgctgagtgattgtcagatagtcttggtaccacagttgggtgatcaggtcctcaacacaagattgctgagtgacgaactcaaggtttcggttgaagtggcaagagaggaaacaggatggttctcgaaagagagcttgttcgatgctatcaatagtgtgatgaaaagggacagtgagatcgggaatctggtgaagaagaatcacaccaagtggagggagacactaactagtcctggacttgtgaccggttatgtcgataatttcatagagtcattgcaggatcttgtctctgggaccaaccatgtttcgaagtagaagggagtgatcaataaggttggtacaaaccaaactatatatcttgaagtgcttctgtttccaagtgtgtttttgtttgtttgtatcatgtttctaagtagcagtaggggatttataaggttttataaaccaaaccttacttgaagtacctctgttttccctagttggctttataataatgtgtttcgtagttgtaagggcaagacaataaaatctctt

SEQ ID NO: 105966 - protein, 472 aa, Arabidopsis thaliana
  peptide (1)..(472): Ceres Seq. ID no. 13618428
  misc_feature (18)..(472): Homolog of NCBI NO: 15234195 NR Description: glycosyltransferase family [Arabidopsis thaliana]
  misc_feature (18)..(459): Homolog of NCBI NO: 15982889 NR Description: AT4g27560/T29A15_50 [Arabidopsis thaliana]
  misc_feature (27)..(472): Homolog of NCBI NO: 21593514 NR Description: UDP rhamnose-anthocyanidin-3-glucoside
  misc_feature (18)..(469): Homolog of NCBI NO: 15234196 NR Description: glycosyltransferase family [Arabidopsis thaliana]
  misc_feature (20)..(468): Homolog of NCBI NO: 15239523 NR Description: glycosyltransferase family [Arabidopsis thaliana]
  misc_feature (20)..(471): Homolog of NCBI NO: 15217796 NR Description: glycosyltransferase family [Arabidopsis thaliana]
  misc_feature (20)..(467): Homolog of NCBI NO: 15217773 NR Description: glycosyltransferase family [Arabidopsis thaliana]
  misc_feature (22)..(462): Homolog of NCBI NO: 15233903 NR Description: glycosyltransferase family [Arabidopsis thaliana]
  misc_feature (20)..(468): Homolog of NCBI NO: 15239525 NR Description: glycosyltransferase family [Arabidopsis thaliana]
  misc_feature (23)..(462): Homolog of NCBI NO: 15227766 NR Description: glycosyltransferase family [Arabidopsis thaliana]
SIIEIQRNKKTKGKNTEMGGLKFHVLMYPWFATGHMTPFLFLANKLAEKGHTVTFLIPKKALKQLENLNLFPHNIVFRSVTVPHVDGLPVGTETVSEIPVTSADLLMSAMDLTRDQVEGVVRAVEPDLIFFDFAHWIPEVARDFGLKTVKYVVVSASTIASMLVPGGELGVPPPGYPSSKVLLRKQDAYTMKNLESTNTINVGPNLLERVTTSLMNSDVIAIRTAREIEGNFCDYIEKHCRKKVLLTGPVFPEPDKTRELEERWVKWLSGYEPDSVVFCALGSQVILEKDQFQELCLGMELTGSPFLVAVKPPRGSSTIQEALPEGFEERVKGRGVVWGEWVQQPLLLSHPSVGCFVSHCGFGSMWESLLSDCQIVLVPQLGDQVLNTRLLSDELKVSVEVAREETGWFSKESLFDAINSVMKRDSEIGNLVKKNHTKWRETLTSPGLVTGYVDNFIESLQDLVSGTNHVSK

SEQ ID NO: 105967 - protein, 455 aa, Arabidopsis thaliana; identical to SEQ ID NO: 25045
  peptide (1)..(455): Ceres Seq. ID no. 13618429
  misc_feature (1)..(455): Homolog of NCBI NO: 15234195 NR Description: glycosyltransferase family [Arabidopsis thaliana]
  misc_feature (1)..(442): Homolog of NCBI NO: 15982889 NR Description: AT4g27560/T29A15_50 [Arabidopsis thaliana]
  misc_feature (10)..(455): Homolog of NCBI NO: 21593514 NR Description: UDP rhamnose-anthocyanidin-3-glucoside
  misc_feature (1)..(452): Homolog of NCBI NO: 15234196 NR Description: glycosyltransferase family [Arabidopsis thaliana]
  misc_feature (3)..(451): Homolog of NCBI NO: 15239523 NR Description: glycosyltransferase family [Arabidopsis thaliana]
  misc_feature (3)..(454): Homolog of NCBI NO: 15217796 NR Description: glycosyltransferase family [Arabidopsis thaliana]
  misc_feature (3)..(450): Homolog of NCBI NO: 15217773 NR Description: glycosyltransferase family [Arabidopsis thaliana]
  misc_feature (5)..(445): Homolog of NCBI NO: 15233903 NR Description: glycosyltransferase family [Arabidopsis thaliana]
  misc_feature (3)..(451): Homolog of NCBI NO: 15239525 NR Description: glycosyltransferase family [Arabidopsis thaliana]
  misc_feature (6)..(445): Homolog of NCBI NO: 15227766 NR Description: glycosyltransferase family [Arabidopsis thaliana]

SEQ ID NO: 105968 - protein, 446 aa, Arabidopsis thaliana; identical to SEQ ID NO: 25046
  peptide (1)..(446): Ceres Seq. ID no. 13618430
  misc_feature (1)..(446): Homolog of NCBI NO: 15234195 NR Description: glycosyltransferase family [Arabidopsis thaliana]
  misc_feature (1)..(433): Homolog of NCBI NO: 15982889 NR Description: AT4g27560/T29A15_50 [Arabidopsis thaliana]
  misc_feature (1)..(446): Homolog of NCBI NO: 21593514 NR Description: UDP rhamnose-anthocyanidin-3-glucoside
  misc_feature (1)..(443): Homolog of NCBI NO: 15234196 NR Description: glycosyltransferase family [Arabidopsis thaliana]
  misc_feature (1)..(442): Homolog of NCBI NO: 15239523 NR Description: glycosyltransferase family [Arabidopsis thaliana]
  misc_feature (1)..(445): Homolog of NCBI NO: 15217796 NR Description: glycosyltransferase family [Arabidopsis thaliana]
  misc_feature (1)..(441): Homolog of NCBI NO: 15217773 NR Description: glycosyltransferase family [Arabidopsis thaliana]
  misc_feature (1)..(436): Homolog of NCBI NO: 15233903 NR Description: glycosyltransferase family [Arabidopsis thaliana]
  misc_feature (1)..(442): Homolog of NCBI NO: 15239525 NR Description: glycosyltransferase family [Arabidopsis thaliana]
  misc_feature (1)..(436): Homolog of NCBI NO: 15227766 NR Description: glycosyltransferase family [Arabidopsis thaliana]

SEQ ID NO: 105969 - DNA, 1090 bp, Arabidopsis thaliana
  misc_feature (1)..(1090): Ceres Seq. ID no. 13618451
  misc_feature: MA Experiment ID: 108561 Result: Up-regulated in Transcription
  misc_feature: MA Experiment 108561 PARAMETER Experiment Name: At_100uM_ABA_cDNA_P Parameter: Timepoint (hr) Value: 6
  misc_feature: MA Experiment 108561 PARAMETER Experiment Name: At_100uM_ABA_cDNA_P Parameter: Tissue Value: Aerial
  misc_feature: MA Experiment 108561 PARAMETER Experiment Name: At_100uM_ABA_cDNA_P Parameter: Treatment Value: 100uM ABA vs. No Treatment
  misc_feature: MA Experiment ID: 20000185 Result: Down-regulated in Transcription
  misc_feature: MA Experiment 20000185 PARAMETER Experiment Name: At_Roots__P Parameter: Age (day) Value: 7 vs. 21
  misc_feature: MA Experiment 20000185 PARAMETER Experiment Name: At_Roots__P Parameter: Organism Value: A. thaliana
  misc_feature: MA Experiment 20000185 PARAMETER Experiment Name: At_Roots__P Parameter: Tissue Value: Roots vs. Whole Plant
  misc_feature: MA Experiment ID: 20000264 Result: Up-regulated in Transcription
  misc_feature: MA Experiment 20000264 PARAMETER Experiment Name: At_Open_Flower_P Parameter: Age (day) Value: 21
  misc_feature: MA Experiment 20000264 PARAMETER Experiment Name: At_Open_Flower_P Parameter: Plant Line Value: WS
  misc_feature: MA Experiment 20000264 PARAMETER Experiment Name: At_Open_Flower_P Parameter: Tissue Value: Open Flower vs. Whole Plant
  misc_feature: MA Experiment ID: 20000286 Result: Up-regulated in Transcription
  misc_feature: MA Experiment 20000286 PARAMETER Experiment Name: At_Open_Flower_P Parameter: Age (day) Value: 21
  misc_feature: MA Experiment 20000286 PARAMETER Experiment Name: At_Open_Flower_P Parameter: Plant Line Value: WS
  misc_feature: MA Experiment 20000286 PARAMETER Experiment Name: At_Open_Flower_P Parameter: Tissue Value: Half Open vs. Whole Plant
  misc_feature: MA Experiment ID: 20000438 Result: Down-regulated in Transcription
  misc_feature: MA Experiment 20000438 PARAMETER Experiment Name: At_Shoots__P Parameter: Age (day) Value: 14
  misc_feature: MA Experiment 20000438 PARAMETER Experiment Name: At_Shoots__P Parameter: Tissue Value: Shoots vs. Whole Plant
  misc_feature: MA Experiment ID: 20000439 Result: Down-regulated in Transcription
  misc_feature: MA Experiment 20000439 PARAMETER Experiment Name: At_Roots__P Parameter: Age (day) Value: 14 vs. 21
  misc_feature: MA Experiment 20000439 PARAMETER Experiment Name: At_Roots__P Parameter: Organism Value: A. thaliana
  misc_feature: MA Experiment 20000439 PARAMETER Experiment Name: At_Roots__P Parameter: Tissue Value: Roots vs. Whole Plant
  misc_feature: MA Experiment ID: 20000573 Result: Up-regulated in Transcription
  misc_feature: MA Experiment 20000573 PARAMETER Experiment Name: At_100uM_ABA_Mutants__P Parameter: Organism Value: A. thaliana
  misc_feature: MA Experiment 20000573 PARAMETER Experiment Name: At_100uM_ABA_Mutants__P Parameter: Plant Line Value: CS22 vs. Ler wt
  misc_feature: MA Experiment 20000573 PARAMETER Experiment Name: At_100uM_ABA_Mutants__P Parameter: Timepoint (hr) Value: N/A
  misc_feature: MA Experiment 20000573 PARAMETER Experiment Name: At_100uM_ABA_Mutants__P Parameter: Tissue Value: Whole Plant
  misc_feature: MA Experiment 20000573 PARAMETER Experiment Name: At_100uM_ABA_Mutants__P Parameter: Treatment Value: None
  misc_feature: MA Experiment ID: 20000574 Result: Up-regulated in Transcription
  misc_feature: MA Experiment 20000574 PARAMETER Experiment Name: At_100uM_ABA_Mutants__P Parameter: Organism Value: A. thaliana
  misc_feature: MA Experiment 20000574 PARAMETER Experiment Name: At_100uM_ABA_Mutants__P Parameter: Plant Line Value: CS23 vs. Ler wt
  misc_feature: MA Experiment 20000574 PARAMETER Experiment Name: At_100uM_ABA_Mutants__P Parameter: Timepoint (hr) Value: N/A
  misc_feature: MA Experiment 20000574 PARAMETER Experiment Name: At_100uM_ABA_Mutants__P Parameter: Tissue Value: Whole Plant
  misc_feature: MA Experiment 20000574 PARAMETER Experiment Name: At_100uM_ABA_Mutants__P Parameter: Treatment Value: None
  misc_feature: MA Experiment ID: 20000794 Result: Up-regulated in Transcription
  misc_feature: MA Experiment 20000794 PARAMETER Experiment Name: At_Petals_P Parameter: Age (day) Value: 23-25 days
  misc_feature: MA Experiment 20000794 PARAMETER Experiment Name: At_Petals_P Parameter: Plant Line Value: WS
  misc_feature: MA Experiment 20000794 PARAMETER Experiment Name: At_Petals_P Parameter: Tissue Value: Petals vs. Whole plant
  misc_feature: MA Experiment ID: 20001451 Result: Up-regulated in Transcription
  misc_feature: MA Experiment 20001451 PARAMETER Experiment Name: At_Far-red-induction_P Parameter: Age (day) Value: 7
  misc_feature: MA Experiment 20001451 PARAMETER Experiment Name: At_Far-red-induction_P Parameter: Light Value: Far-red vs. White
  misc_feature: MA Experiment 20001451 PARAMETER Experiment Name: At_Far-red-induction_P Parameter: Organism Value: A. thaliana
  misc_feature: MA Experiment 20001451 PARAMETER Experiment Name: At_Far-red-induction_P Parameter: Plant Line Value: Columbia
  misc_feature: MA Experiment 20001451 PARAMETER Experiment Name: At_Far-red-induction_P Parameter: Timepoint (hr) Value: 24
  misc_feature: MA Experiment 20001451 PARAMETER Experiment Name: At_Far-red-induction_P Parameter: Tissue Value: Whole Plant
  misc_feature: MA Experiment ID: 20001910 Result: Up-regulated in Transcription
  misc_feature: MA Experiment 20001910 PARAMETER Experiment Name: At_Drought_Reproduction_P Parameter: Age (day) Value: 37
  misc_feature: MA Experiment 20001910 PARAMETER Experiment Name: At_Drought_Reproduction_P Parameter: Organism Value: A. thaliana
  misc_feature: MA Experiment 20001910 PARAMETER Experiment Name: At_Drought_Reproduction_P Parameter: Plant Line Value: WS
  misc_feature: MA Experiment 20001910 PARAMETER Experiment Name: At_Drought_Reproduction_P Parameter: Timepoint (day) Value: 7
  misc_feature: MA Experiment 20001910 PARAMETER Experiment Name: At_Drought_Reproduction_P Parameter: Tissue Value: Flowers
  misc_feature: MA Experiment 20001910 PARAMETER Experiment Name: At_Drought_Reproduction_P Parameter: Treatment Value: Drought vs. No Drought
aaaaagaaaaaagactacatttctacaaggacgttggttcttttagtcgtcgtcggtcgtcgaagaaagatcttctccttctttcttcgccgtacgatcgtcgtctaatgggagaatcatcaaatccaatggctacaagttcttcttcctcctcctcctcaattcctccttcgtctccaacaccctctccgacgtccacaaccactccgccacgtcaacatcctctcctccagccaccatcttcaaaaaagaagaaaaacagaacaaacgttttcagagtcttacgcaccgtgtttcgatctttcccaatctttacaacaccatccgtagcatgcaaaatcccggttatacatcccggtttaggcttaccggatccacatcacaacacgtcaagaatcaccggaacgttattcggataccgtaaaggccgagtaagtctttccattcaagaaaaccctaaatgtttaccttctttagtcgtggagctcgccatgcaaaccacaacgcttcaaaaagagctaagcacgggaatggtgagaatagctctcgagactgagaaacagcctcgagctgataataacaattctaaaaccgagaagaagacagatattttggaagaaccgttatggacaatgtattgtaaaggagagaaaacgggttacggtgtgaaacgagaagcgaccgaagaagatcttaacgtgatggagttgttacgtccggtgtctatgggcgccggagttttgccgggaaactcggagtcggaaggacccgacggcgaaatggcgtatatgagagcttattttgagagagttattgggtctaaagattcagagactttttatatgttgagtcctgaagggaataatggacccgaacttagctttttctttgtgagagtttgacttattttgttatggttcaaattaatgtaacgtgtatgtaaatgaccggaaacggcggtggtcgtcgacgttatatactattgtttaggataattgtaagaattttttgttgttctttcgttgttaatctctcgatctttataaaaagattgaattgtaagtgtgtgtatatacacacttcttcgtcc

SEQ ID NO: 105970 - protein, 299 aa, Arabidopsis thaliana
  peptide (1)..(299): Ceres Seq. ID no. 13618452
  misc_feature (131)..(299): Pfam Name: Protein of unknown function, DUF617 Pfam Description: Protein of unknown function, DUF617
  misc_feature (36)..(299): Homolog of NCBI NO: 15235158 NR Description: expressed protein [Arabidopsis thaliana]
  misc_feature (43)..(299): Homolog of NCBI NO: 21618123 NR Description: unknown [Arabidopsis thaliana]
  misc_feature (36)..(299): Homolog of NCBI NO: 15227126 NR Description: hypothetical protein [Arabidopsis thaliana]
  misc_feature (43)..(299): Homolog of NCBI NO: 15240220 NR Description: hypothetical protein [Arabidopsis thaliana] gb|AAD20416.1~gene_id:MOJ9.16~similar to unknown protein
  misc_feature (42)..(299): Homolog of NCBI NO: 34909066 NR Description: P0702B09.30 [Oryza sativa (japonica
  misc_feature (42)..(299): Homolog of NCBI NO: 32129319 NR Description: hypothetical protein [Oryza sativa (japonica
  misc_feature (131)..(299): Homolog of NCBI NO: 40253867 NR Description: unknown protein [Oryza sativa (japonica
  misc_feature (131)..(299): Homolog of NCBI NO: 21741231 NR Description: OSJNBb0034I13.25 [Oryza sativa (japonica
  misc_feature (51)..(298): Homolog of NCBI NO: 34903148 NR Description: unnamed protein product [Oryza sativa (japonica group)] >gi|6630701|dbj|BAA88547.1| unnamed protein product
  misc_feature (80)..(298): Homolog of NCBI NO: 15239035 NR Description: expressed protein [Arabidopsis thaliana] gene_id:MJB21.5~pir||T09377~similar to unknown protein
KEKRLHFYKDVGSFSRRRSSKKDLLLLSSPYDRRLMGESSNPMATSSSSSSSSIPPSSPTPSPTSTTTPPRQHPLLQPPSSKKKKNRTNVFRVLRTVFRSFPIFTTPSVACKIPVIHPGLGLPDPHHNTSRITGTLFGYRKGRVSLSIQENPKCLPSLVVELAMQTTTLQKELSTGMVRIALETEKQPRADNNNSKTEKKTDILEEPLWTMYCKGEKTGYGVKREATEEDLNVMELLRPVSMGAGVLPGNSESEGPDGEMAYMRAYFERVIGSKDSETFYMLSPEGNNGPELSFFFVRV

SEQ ID NO: 105971 - protein, 264 aa, Arabidopsis thaliana; identical to SEQ ID NO: 38461
  peptide (1)..(264): Ceres Seq. ID no. 13618453
  misc_feature (96)..(264): Pfam Name: Protein of unknown function, DUF617 Pfam Description: Protein of unknown function, DUF617
  misc_feature (1)..(264): Homolog of NCBI NO: 15235158 NR Description: expressed protein [Arabidopsis thaliana]
  misc_feature (8)..(264): Homolog of NCBI NO: 21618123 NR Description: unknown [Arabidopsis thaliana]
  misc_feature (1)..(264): Homolog of NCBI NO: 15227126 NR Description: hypothetical protein [Arabidopsis thaliana]
  misc_feature (8)..(264): Homolog of NCBI NO: 15240220 NR Description: hypothetical protein [Arabidopsis thaliana] gb|AAD20416.1~gene_id:MOJ9.16~similar to unknown protein
  misc_feature (7)..(264): Homolog of NCBI NO: 34909066 NR Description: P0702B09.30 [Oryza sativa (japonica
  misc_feature (7)..(264): Homolog of NCBI NO: 32129319 NR Description: hypothetical protein [Oryza sativa (japonica
  misc_feature (96)..(264): Homolog of NCBI NO: 40253867 NR Description: unknown protein [Oryza sativa (japonica
  misc_feature (96)..(264): Homolog of NCBI NO: 21741231 NR Description: OSJNBb0034I13.25 [Oryza sativa (japonica
  misc_feature (16)..(263): Homolog of NCBI NO: 34903148 NR Description: unnamed protein product [Oryza sativa (japonica group)] >gi|6630701|dbj|BAA88547.1| unnamed protein product
  misc_feature (45)..(263): Homolog of NCBI NO: 15239035 NR Description: expressed protein [Arabidopsis thaliana] gene_id:MJB21.5~pir||T09377~similar to unknown protein

SEQ ID NO: 105972 - protein, 257 aa, Arabidopsis thaliana; identical to SEQ ID NO: 38462
  peptide (1)..(257): Ceres Seq. ID no. 13618454
  misc_feature (89)..(257): Pfam Name: Protein of unknown function, DUF617 Pfam Description: Protein of unknown function, DUF617
  misc_feature (1)..(257): Homolog of NCBI NO: 15235158 NR Description: expressed protein [Arabidopsis thaliana]
  misc_feature (1)..(257): Homolog of NCBI NO: 21618123 NR Description: unknown [Arabidopsis thaliana]
  misc_feature (1)..(257): Homolog of NCBI NO: 15227126 NR Description: hypothetical protein [Arabidopsis thaliana]
  misc_feature (1)..(257): Homolog of NCBI NO: 15240220 NR Description: hypothetical protein [Arabidopsis thaliana] gb|AAD20416.1~gene_id:MOJ9.16~similar to unknown protein
  misc_feature (1)..(257): Homolog of NCBI NO: 34909066 NR Description: P0702B09.30 [Oryza sativa (japonica
  misc_feature (1)..(257): Homolog of NCBI NO: 32129319 NR Description: hypothetical protein [Oryza sativa (japonica
  misc_feature (89)..(257): Homolog of NCBI NO: 40253867 NR Description: unknown protein [Oryza sativa (japonica
  misc_feature (89)..(257): Homolog of NCBI NO: 21741231 NR Description: OSJNBb0034I13.25 [Oryza sativa (japonica
  misc_feature (9)..(256): Homolog of NCBI NO: 34903148 NR Description: unnamed protein product [Oryza sativa (japonica group)] >gi|6630701|dbj|BAA88547.1| unnamed protein product
  misc_feature (38)..(256): Homolog of NCBI NO: 15239035 NR Description: expressed protein [Arabidopsis thaliana] gene_id:MJB21.5~pir||T09377~similar to unknown protein

SEQ ID NO: 105973 - DNA, 781 bp, Arabidopsis thaliana
  misc_feature (1)..(781): Ceres Seq. ID no. 13618459
  misc_feature: MA Experiment ID: 108434 Result: Down-regulated in Transcription
  misc_feature: MA Experiment 108434 PARAMETER Experiment Name: At_Root_Tips_cDNA_P Parameter: Tissue Value: Root Tips
  misc_feature: MA Experiment ID: 108561 Result: Down-regulated in Transcription
  misc_feature: MA Experiment 108561 PARAMETER Experiment Name: At_100uM_ABA_cDNA_P Parameter: Timepoint (hr) Value: 6
  misc_feature: MA Experiment 108561 PARAMETER Experiment Name: At_100uM_ABA_cDNA_P Parameter: Tissue Value: Aerial
  misc_feature: MA Experiment 108561 PARAMETER Experiment Name: At_100uM_ABA_cDNA_P Parameter: Treatment Value: 100uM ABA vs. No Treatment
  misc_feature: MA Experiment ID: 20000030 Result: Down-regulated in Transcription
  misc_feature: MA Experiment 20000030 PARAMETER Experiment Name: At_CS6630_Roots_cDNA_P Parameter: Plant Line Value: CS6630 vs. WS
  misc_feature: MA Experiment 20000030 PARAMETER Experiment Name: At_CS6630_Roots_cDNA_P Parameter: Tissue Value: Roots
  misc_feature: MA Experiment ID: 20000227 Result: Down-regulated in Transcription
  misc_feature: MA Experiment 20000227 PARAMETER Experiment Name: At_Root-Tips-vs-Tops_P Parameter: Tissue Value: Root Tips vs. Root Tops
  misc_feature: MA Experiment ID: 20000451 Result: Down-regulated in Transcription
  misc_feature: MA Experiment 20000451 PARAMETER Experiment Name: At_CS6879_Shoots-Roots_P Parameter: Age (day) Value: 14
  misc_feature: MA Experiment 20000451 PARAMETER Experiment Name: At_CS6879_Shoots-Roots_P Parameter: Organism Value: A. thaliana
  misc_feature: MA Experiment 20000451 PARAMETER Experiment Name: At_CS6879_Shoots-Roots_P Parameter: Plant Line Value: CS6879 vs. WS
  misc_feature: MA Experiment 20000451 PARAMETER Experiment Name: At_CS6879_Shoots-Roots_P Parameter: Tissue Value: Roots
  misc_feature: MA Experiment ID: 20000460 Result: Down-regulated in Transcription
  misc_feature: MA Experiment 20000460 PARAMETER Experiment Name: At_10percent_PEG_P Parameter: Age (day) Value: 12
  misc_feature: MA Experiment 20000460 PARAMETER Experiment Name: At_10percent_PEG_P Parameter: Organism Value: A. thaliana
  misc_feature: MA Experiment 20000460 PARAMETER Experiment Name: At_10percent_PEG_P Parameter: Plant Line Value: WS
  misc_feature: MA Experiment 20000460 PARAMETER Experiment Name: At_10percent_PEG_P Parameter: Timepoint (day) Value: 12
  misc_feature: MA Experiment 20000460 PARAMETER Experiment Name: At_10percent_PEG_P Parameter: Tissue Value: Whole Plant
  misc_feature: MA Experiment 20000460 PARAMETER Experiment Name: At_10percent_PEG_P Parameter: Treatment Value: 10percent PEG vs. No Treatment
  misc_feature: MA Experiment ID: 20000527 Result: Down-regulated in Transcription
  misc_feature: MA Experiment 20000527 PARAMETER Experiment Name: At_10percent_PEG_P Parameter: Age (day) Value: 20
  misc_feature: MA Experiment 20000527 PARAMETER Experiment Name: At_10percent_PEG_P Parameter: Organism Value: A. thaliana
  misc_feature: MA Experiment 20000527 PARAMETER Experiment Name: At_10percent_PEG_P Parameter: Plant Line Value: WS
  misc_feature: MA Experiment 20000527 PARAMETER Experiment Name: At_10percent_PEG_P Parameter: Timepoint (day) Value: 20
  misc_feature: MA Experiment 20000527 PARAMETER Experiment Name: At_10percent_PEG_P Parameter: Tissue Value: Whole Plant
  misc_feature: MA Experiment 20000527 PARAMETER Experiment Name: At_10percent_PEG_P Parameter: Treatment Value: 10percent PEG vs. No Treatment
  misc_feature: MA Experiment ID: 20000576 Result: Down-regulated in Transcription
  misc_feature: MA Experiment 20000576 PARAMETER Experiment Name: At_100uM_ABA_Mutants__P Parameter: Organism Value: A. thaliana
  misc_feature: MA Experiment 20000576 PARAMETER Experiment Name: At_100uM_ABA_Mutants__P Parameter: Plant Line Value: CS23
  misc_feature: MA Experiment 20000576 PARAMETER Experiment Name: At_100uM_ABA_Mutants__P Parameter: Timepoint (hr) Value: 6
  misc_feature: MA Experiment 20000576 PARAMETER Experiment Name: At_100uM_ABA_Mutants__P Parameter: Tissue Value: Whole Plant
  misc_feature: MA Experiment 20000576 PARAMETER Experiment Name: At_100uM_ABA_Mutants__P Parameter: Treatment Value: 1uM ABA vs. No Treatment
  misc_feature: MA Experiment ID: 20000606 Result: Down-regulated in Transcription
  misc_feature: MA Experiment 20000606 PARAMETER Experiment Name: At_CS8548_Mutant_P Parameter: Age (day) Value: 14
  misc_feature: MA Experiment 20000606 PARAMETER Experiment Name: At_CS8548_Mutant_P Parameter: Plant Line Value: CS8548 vs. wt
  misc_feature: MA Experiment 20000606 PARAMETER Experiment Name: At_CS8548_Mutant_P Parameter: Tissue Value: Whole Plant
  misc_feature: MA Experiment ID: 20001247 Result: Down-regulated in Transcription
  misc_feature: MA Experiment 20001247 PARAMETER Experiment Name: At_Far-red-induction_P Parameter: Age (day) Value: 7
  misc_feature: MA Experiment 20001247 PARAMETER Experiment Name: At_Far-red-induction_P Parameter: Light Value: Far-red vs. White
  misc_feature: MA Experiment 20001247 PARAMETER Experiment Name: At_Far-red-induction_P Parameter: Organism Value: A. thaliana
  misc_feature: MA Experiment 20001247 PARAMETER Experiment Name: At_Far-red-induction_P Parameter: Plant Line Value: Columbia
  misc_feature: MA Experiment 20001247 PARAMETER Experiment Name: At_Far-red-induction_P Parameter: Timepoint (hr) Value: 1
  misc_feature: MA Experiment 20001247 PARAMETER Experiment Name: At_Far-red-induction_P Parameter: Tissue Value: Whole Plant
  misc_feature: MA Experiment ID: 20001450 Result: Down-regulated in Transcription
  misc_feature: MA Experiment 20001450 PARAMETER Experiment Name: At_Far-red-induction_P Parameter: Age (day) Value: 7
  misc_feature: MA Experiment 20001450 PARAMETER Experiment Name: At_Far-red-induction_P Parameter: Light Value: Far-red vs. White
  misc_feature: MA Experiment 20001450 PARAMETER Experiment Name: At_Far-red-induction_P Parameter: Organism Value: A. thaliana
  misc_feature: MA Experiment 20001450 PARAMETER Experiment Name: At_Far-red-induction_P Parameter: Plant Line Value: Columbia
  misc_feature: MA Experiment 20001450 PARAMETER Experiment Name: At_Far-red-induction_P Parameter: Timepoint (hr) Value: 8
  misc_feature: MA Experiment 20001450 PARAMETER Experiment Name: At_Far-red-induction_P Parameter: Tissue Value: Whole Plant
atatatataacgtgttcaatcctcacttcaaaaacccacaaaaactttagaacgaaaaaagatgaaaatctttaactcatctcaaaacctattcttggccataacctttttccttgttctcatagttcatctaaaagcccaagacagtcctcaagactttttggcagttcacaaccgagcacgagccgaggttggggtgggacccttaagatgggacgagaaggtggctgcttatgcccgtaactatgctaaccagcgtaaaggtgactgcgctatgaaacactcgagcgggtcctatggagagaacatcgcttggagcagcggtagcatgacaggcgtagcagcagttgacatgtgggtggacgagcaatttgactacgattatgattccaatacatgtgcatgggacaaacagtgtggccactatactcaggttgtgtggagaaactcggagaggttgggatgtgcaaaagtgagatgcaacaatggtcaaacctttatcacttgcaactacgatcctcccggtaactgggttggcgagtggccttactaaaagaaaactccatttaaatgttttcgaatatatgttatccacatgtatatatgtattgtttccatgttgttcagttataccaatcatctatcgtcagctaataaagattggtttgtgtggtcctggtccggtccggtcttcttttgtaccacatgtataatgtatgcgtggatttttataatggaataagaaaaatgcaatgctacggcttgcacttgctttgtttgc

SEQ ID NO: 105974 - protein, 163 aa, Arabidopsis thaliana; identical to SEQ ID NO: 27203
  peptide (1)..(163): Ceres Seq. ID no. 13618460
  misc_feature (34)..(150): Pfam Name: SCP-like extracellular protein Pfam Description: SCP-like extracellular protein
  misc_feature (1)..(163): Homolog of NCBI NO: 15235056 NR Description: pathogenesis-related protein, putative
  misc_feature (1)..(163): Homolog of NCBI NO: 1228950 NR Description: pathogenesis-related protein 1 [Arabidopsis
  misc_feature (1)..(163): Homolog of NCBI NO: 15225965 NR Description: pathogenesis-related protein, putative
  misc_feature (3)..(163): Homolog of NCBI NO: 15239598 NR Description: pathogenesis-related protein, putative
  misc_feature (3)..(163): Homolog of NCBI NO: 100370 NR Description: pathogenesis-related protein 1 - common tobacco
  misc_feature (11)..(163): Homolog of NCBI NO: 15225974 NR Description: pathogenesis-related protein 1 (PR-1)
  misc_feature (9)..(163): Homolog of NCBI NO: 13560653 NR Description: pathogenesis-related protein PR-1 precursor
  misc_feature (7)..(163): Homolog of NCBI NO: 282959 NR Description: pathogenesis-related protein 1b - common tobacco
  misc_feature (3)..(163): Homolog of NCBI NO: 130828 NR Description: Pathogenesis-related protein 1C precursor (PR-1C)
  misc_feature (3)..(163): Homolog of NCBI NO: 130826 NR Description: Pathogenesis-related protein 1A precursor (PR-1A)

SEQ ID NO: 105975 - protein, 92 aa, Arabidopsis thaliana; identical to SEQ ID NO: 27204
  peptide (1)..(92): Ceres Seq. ID no. 13618461
  misc_feature (1)..(79): Pfam Name: SCP-like extracellular protein Pfam Description: SCP-like extracellular protein
  misc_feature (1)..(92): Homolog of NCBI NO: 15235056 NR Description: pathogenesis-related protein, putative
  misc_feature (1)..(92): Homolog of NCBI NO: 1228950 NR Description: pathogenesis-related protein 1 [Arabidopsis
  misc_feature (1)..(92): Homolog of NCBI NO: 15225965 NR Description: pathogenesis-related protein, putative
  misc_feature (1)..(92): Homolog of NCBI NO: 15239598 NR Description: pathogenesis-related protein, putative
  misc_feature (1)..(92): Homolog of NCBI NO: 100370 NR Description: pathogenesis-related protein 1 - common tobacco
  misc_feature (1)..(92): Homolog of NCBI NO: 15225974 NR Description: pathogenesis-related protein 1 (PR-1)
  misc_feature (1)..(92): Homolog of NCBI NO: 13560653 NR Description: pathogenesis-related protein PR-1 precursor
  misc_feature (1)..(92): Homolog of NCBI NO: 282959 NR Description: pathogenesis-related protein 1b - common tobacco
  misc_feature (1)..(92): Homolog of NCBI NO: 130828 NR Description: Pathogenesis-related protein 1C precursor (PR-1C)
  misc_feature (1)..(92): Homolog of NCBI NO: 130826 NR Description: Pathogenesis-related protein 1A precursor (PR-1A)

SEQ ID NO: 105976 - DNA, 1974 bp, Arabidopsis thaliana
  misc_feature (1)..(1974): Ceres Seq. ID no. 13618486
  misc_feature: MA Experiment ID: 108434 Result: Up-regulated in Transcription
  misc_feature: MA Experiment 108434 PARAMETER Experiment Name: At_Root_Tips_cDNA_P Parameter: Tissue Value: Root Tips
  misc_feature: MA Experiment ID: 108461 Result: Up-regulated in Transcription
  misc_feature: MA Experiment 108461 PARAMETER Experiment Name: At_Germinating_Seeds_cDNA_P Parameter: Age (day) Value: 1 vs. 0
  misc_feature: MA Experiment 108461 PARAMETER Experiment Name: At_Germinating_Seeds_cDNA_P Parameter: Tissue Value: Germinating Seeds
  misc_feature: MA Experiment ID: 108462 Result: Up-regulated in Transcription
  misc_feature: MA Experiment 108462 PARAMETER Experiment Name: At_Germinating_Seeds_cDNA_P Parameter: Age (day) Value: 2 vs. 0
  misc_feature: MA Experiment 108462 PARAMETER Experiment Name: At_Germinating_Seeds_cDNA_P Parameter: Tissue Value: Germinating Seeds
  misc_feature: MA Experiment ID: 108463 Result: Up-regulated in Transcription
  misc_feature: MA Experiment 108463 PARAMETER Experiment Name: At_Germinating_Seeds_cDNA_P Parameter: Age (day) Value: 3 vs. 0
  misc_feature: MA Experiment 108463 PARAMETER Experiment Name: At_Germinating_Seeds_cDNA_P Parameter: Tissue Value: Germinating Seeds
  misc_feature: MA Experiment ID: 108464 Result: Up-regulated in Transcription
  misc_feature: MA Experiment 108464 PARAMETER Experiment Name: At_Germinating_Seeds_cDNA_P Parameter: Age (day) Value: 4 vs. 0
  misc_feature: MA Experiment 108464 PARAMETER Experiment Name: At_Germinating_Seeds_cDNA_P Parameter: Tissue Value: Germinating Seeds
  misc_feature: MA Experiment ID: 108577 Result: Up-regulated in Transcription
  misc_feature: MA Experiment 108577 PARAMETER Experiment Name: At_42deg_Heat_cDNA_P Parameter: Temperature (deg C) Value: 42 vs. 22
  misc_feature: MA Experiment 108577 PARAMETER Experiment Name: At_42deg_Heat_cDNA_P Parameter: Timepoint (hr) Value: 6
  misc_feature: MA Experiment 108577 PARAMETER Experiment Name: At_42deg_Heat_cDNA_P Parameter: Tissue Value: Aerial
  misc_feature: MA Experiment ID: 108579 Result: Up-regulated in Transcription
  misc_feature: MA Experiment 108579 PARAMETER Experiment Name: At_4deg_Cold_cDNA_P Parameter: Temperature (deg C) Value: 4 vs. 22
  misc_feature: MA Experiment 108579 PARAMETER Experiment Name: At_4deg_Cold_cDNA_P Parameter: Timepoint (hr) Value: 6
  misc_feature: MA Experiment 108579 PARAMETER Experiment Name: At_4deg_Cold_cDNA_P Parameter: Tissue Value: Aerial
  misc_feature: MA Experiment ID: 108595 Result: Down-regulated in Transcription
  misc_feature: MA Experiment 108595 PARAMETER Experiment Name: At_Ler-pi_Ovule_cDNA_P Parameter: Plant Line Value: null
  misc_feature: MA Experiment ID: 20000112 Result: Up-regulated in Transcription
  misc_feature: MA Experiment 20000112 PARAMETER Experiment Name: At_42deg_Heat_cDNA_P Parameter: Temperature (deg C) Value: 42 vs. 22
  misc_feature: MA Experiment 20000112 PARAMETER Experiment Name: At_42deg_Heat_cDNA_P Parameter: Timepoint (hr) Value: 2
  misc_feature: MA Experiment 20000112 PARAMETER Experiment Name: At_42deg_Heat_cDNA_P Parameter: Tissue Value: Aerial
  misc_feature: MA Experiment ID: 20000794 Result: Up-regulated in Transcription
  misc_feature: MA Experiment 20000794 PARAMETER Experiment Name: At_Petals_P Parameter: Age (day) Value: 23-25 days
  misc_feature: MA Experiment 20000794 PARAMETER Experiment Name: At_Petals_P Parameter: Plant Line Value: WS
  misc_feature: MA Experiment 20000794 PARAMETER Experiment Name: At_Petals_P Parameter: Tissue Value: Petals vs. Whole plant
  misc_feature: MA Experiment ID: 20001248 Result: Down-regulated in Transcription
  misc_feature: MA Experiment 20001248 PARAMETER Experiment Name: At_Far-red-induction_P Parameter: Age (day) Value: 7
  misc_feature: MA Experiment 20001248 PARAMETER Experiment Name: At_Far-red-induction_P Parameter: Light Value: Far-red vs. White
  misc_feature: MA Experiment 20001248 PARAMETER Experiment Name: At_Far-red-induction_P Parameter: Organism Value: A. thaliana
  misc_feature: MA Experiment 20001248 PARAMETER Experiment Name: At_Far-red-induction_P Parameter: Plant Line Value: Columbia
  misc_feature: MA Experiment 20001248 PARAMETER Experiment Name: At_Far-red-induction_P Parameter: Timepoint (hr) Value: 4
  misc_feature: MA Experiment 20001248 PARAMETER Experiment Name: At_Far-red-induction_P Parameter: Tissue Value: Whole Plant
gtctcttctacacgtcttctcttccgaccacacccttcattcaattcaacgtctcctctctggctctctctctcaaatatataaacaccaataatgtctccaatttgagatttttaactgaacccaagtcatgacgaagcttctagagattaatcatattcaaaccctttgttttgccaagggtttttctcctgccagattaaatgttgcaacttcaccttttcggatatctcgtcgtggtggtggtggatattgcagcaatgcttgtatcccttatcggttgaaatttacttgttatgcaacactatctgctgtggtaaaggagcaagcatcagactttagtggaaaagaagcagctttgcttgtagatgagctcagaagcaacttcaactctggcagaacgaagagctacgagtggagaatttctcagcttcaaaacattgctaggatgattgatgagaaggagaaatgcatcaccgaagctttgtatcaagatctttctaagcctgagcttgaagcttttctagctgagatttcgaatacaaaatcatcctgtatgcttgcaatcaaagagttaaagaactggatggctccagaaacggtcaaaacttctgtgacaacatttccctcgtctgcacaaatagtctcagaaccgcttggagttgttttggttatttcagcctggaatttccctttcttattgtctgtcgagccagtcattggagctattgcagctggtaatgcggttgtgctaaaaccttctgaaattgctccagcagcatcttctcttttagcaaagttgtttagtgaatacttggacaatacaacaatcagagttatcgagggaggagtccctgaaacaacggcactactggatcaaaaatgggacaagatctttttcactggtggagcaagagttgctcgcattataatggctgcggctgcgagaaatcttactccagtggttctcgaacttggtgggaagtgcccagctcttgttgattcagatgttaatctacaagtggctgctaggaggatcattgcagggaaatgggcttgtaacagtggacaggcttgcattggtgttgattacgtgatcacaacaaaggattttgcatcaaaattgatagatgctctgaagactgaactggagacattttttgggcaaaacgcattagaatcaaaggacctgtcgcggattgtgaactctttccacttcaaaaggttggaaagtatgttaaaagagaatggagtagccaacaaaattgttcatggtggccgaataaccgaagataaacttaaaatatcaccaacaatactactggatgtgcctgaagcatcttccatgatgcaggaagagatatttggacctttacttcccataattacggtacaaaagattgaagatggctttcaggttatacgttcaaagccaaagcctttagcagcgtatctcttcacaaacaacaaagagttggagaaacaattcgtgcaggacgtatcagcaggaggaattaccatcaatgacactgtcttacacgtgactgtaaaagatctgccatttggtggggttggggagagtgggatcggtgcttaccatgggaaattctcgtatgagacgtttagccataagaaaggagttctttaccggagcttttcaggggacgcggatcttagatatcctccttacacaccaaaaaagaagatggtgcttaaggctttgctctcttcaaacatatttgctgccattttggctttctttgggttctctaaagactcatgatcacatgttataatcactgaacttgctggaatagtacaactgagaaagttgaatatttccatagagaaactaagatcaataaaactatagcctcccctatatatgtaaacagtgaataattttagttacttgaataacaattttacatagttactaggacagctaattatatattggaaattccttctgct

SEQ ID NO: 105977 - protein, 550 aa, Arabidopsis thaliana
  peptide (1)..(550): Ceres Seq. ID no. 13618487
  misc_feature (70)..(508): Pfam Name: Aldehyde dehydrogenase family Pfam Description: Aldehyde dehydrogenase family
  misc_feature (1)..(550): Homolog of NCBI NO: 18418408 NR Description: aldehyde dehydrogenase, putative (ALDH) thaliana] >gi|15451106|gb|AAK96824.1| putative aldehyde [Arabidopsis thaliana] >gi|20148407|gb|AAM10094.1| putative
  misc_feature (1)..(550): Homolog of NCBI NO: 17065876 NR Description: aldehyde dehydrogenase [Arabidopsis thaliana]
  misc_feature (190)..(550): Homolog of NCBI NO: 7484798 NR Description: aldehyde dehydrogenase (NAD+) homolog F10M10.10 - thaliana >gi|4455169|emb|CAB36701.1| putative aldehyde [Arabidopsis thaliana] >gi|7270374|emb|CAB80141.1| putative
  misc_feature (70)..(547): Homolog of NCBI NO: 15219358 NR Description: aldehyde dehydrogenase, putative (ALDH) thaliana] >gi|30693800|ref|NP_849770.1| aldehyde dehydrogenase,
  misc_feature (70)..(547): Homolog of NCBI NO: 21536879 NR Description: aldehyde dehydrogenase, putative [Arabidopsis
  misc_feature (74)..(547): Homolog of NCBI NO: 17065918 NR Description: aldehyde dehydrogenase [Craterostigma
  misc_feature (72)..(548): Homolog of NCBI NO: 33317836 NR Description: aldehyde dehydrogenase [Oryza sativa (indica group)] >gi|38344982|emb|CAE02788.2| OSJNBa0011L07.12 [Oryza
  misc_feature (79)..(524): Homolog of NCBI NO: 2392056 NR Description: Chain A, Class 3 Aldehyde Dehydrogenase Complex
  misc_feature (79)..(524): Homolog of NCBI NO: 14010869 NR Description: aldehyde dehydrogenase family 3, member A1;
  misc_feature (78)..(532): Homolog of NCBI NO: 17231164 NR Description: aldehyde dehydrogenase [Nostoc sp. PCC 7120]
MTKLLEINHIQTLCFAKGFSPARLNVATSPFRISRRGGGGYCSNACIPYRLKFTCYATLSAVVKEQASDFSGKEAALLVDELRSNFNSGRTKSYEWRISQLQNIARMIDEKEKCITEALYQDLSKPELEAFLAEISNTKSSCMLAIKELKNWMAPETVKTSVTTFPSSAQIVSEPLGVVLVISAWNFPFLLSVEPVIGAIAAGNAVVLKPSEIAPAASSLLAKLFSEYLDNTTIRVIEGGVPETTALLDQKWDKIFFTGGARVARIIMAAAARNLTPVVLELGGKCPALVDSDVNLQVAARRIIAGKWACNSGQACIGVDYVITTKDFASKLIDALKTELETFFGQNALESKDLSRIVNSFHFKRLESMLKENGVANKIVHGGRITEDKLKISPTILLDVPEASSMMQEEIFGPLLPIITVQKIEDGFQVIRSKPKPLAAYLFTNNKELEKQFVQDVSAGGITINDTVLHVTVKDLPFGGVGESGIGAYHGKFSYETFSHKKGVLYRSFSGDADLRYPPYTPKKKMVLKALLSSNIFAAILAFFGFSKDS

SEQ ID NO: 105978 - protein, 444 aa, Arabidopsis thaliana; identical to SEQ ID NO: 42150
  peptide (1)..(444): Ceres Seq. ID no. 13618488
  misc_feature (1)..(402): Pfam Name: Aldehyde dehydrogenase family Pfam Description: Aldehyde dehydrogenase family
  misc_feature (1)..(444): Homolog of NCBI NO: 18418408 NR Description: aldehyde dehydrogenase, putative (ALDH) thaliana] >gi|15451106|gb|AAK96824.1| putative aldehyde [Arabidopsis thaliana] >gi|20148407|gb|AAM10094.1| putative
  misc_feature (1)..(444): Homolog of NCBI NO: 17065876 NR Description: aldehyde dehydrogenase [Arabidopsis thaliana]
  misc_feature (84)..(444): Homolog of NCBI NO: 7484798 NR Description: aldehyde dehydrogenase (NAD+) homolog F10M10.10 - thaliana >gi|4455169|emb|CAB36701.1| putative aldehyde [Arabidopsis thaliana] >gi|7270374|emb|CAB80141.1| putative
  misc_feature (1)..(441): Homolog of NCBI NO: 15219358 NR Description: aldehyde dehydrogenase, putative (ALDH) thaliana] >gi|30693800|ref|NP_849770.1| aldehyde dehydrogenase,
  misc_feature (1)..(441): Homolog of NCBI NO: 21536879 NR Description: aldehyde dehydrogenase, putative [Arabidopsis
  misc_feature (1)..(441): Homolog of NCBI NO: 17065918 NR Description: aldehyde dehydrogenase [Craterostigma
  misc_feature (1)..(442): Homolog of NCBI NO: 33317836 NR Description: aldehyde dehydrogenase [Oryza sativa (indica group)] >gi|38344982|emb|CAE02788.2| OSJNBa0011L07.12 [Oryza
  misc_feature (1)..(418): Homolog of NCBI NO: 2392056 NR Description: Chain A, Class 3 Aldehyde Dehydrogenase Complex
  misc_feature (1)..(418): Homolog of NCBI NO: 14010869 NR Description: aldehyde dehydrogenase family 3, member A1;
  misc_feature (1)..(426): Homolog of NCBI NO: 17231164 NR Description: aldehyde dehydrogenase [Nostoc sp. PCC 7120]

SEQ ID NO: 105979 - protein, 408 aa, Arabidopsis thaliana; identical to SEQ ID NO: 42151
  peptide (1)..(408): Ceres Seq. ID no. 13618489
  misc_feature (1)..(366): Pfam Name: Aldehyde dehydrogenase family Pfam Description: Aldehyde dehydrogenase family
  misc_feature (1)..(408): Homolog of NCBI NO: 18418408 NR Description: aldehyde dehydrogenase, putative (ALDH) thaliana] >gi|15451106|gb|AAK96824.1| putative aldehyde [Arabidopsis thaliana] >gi|20148407|gb|AAM10094.1| putative
  misc_feature (1)..(408): Homolog of NCBI NO: 17065876 NR Description: aldehyde dehydrogenase [Arabidopsis thaliana]
  misc_feature (48)..(408): Homolog of NCBI NO: 7484798 NR Description: aldehyde dehydrogenase (NAD+) homolog F10M10.10 - thaliana >gi|4455169|emb|CAB36701.1| putative aldehyde [Arabidopsis thaliana] >gi|7270374|emb|CAB80141.1| putative
  misc_feature (1)..(405): Homolog of NCBI NO: 15219358 NR Description: aldehyde dehydrogenase, putative (ALDH) thaliana] >gi|30693800|ref|NP_849770.1| aldehyde dehydrogenase,
  misc_feature (1)..(405): Homolog of NCBI NO: 21536879 NR Description: aldehyde dehydrogenase, putative [Arabidopsis
  misc_feature (1)..(405): Homolog of NCBI NO: 17065918 NR Description: aldehyde dehydrogenase [Craterostigma
  misc_feature (1)..(406): Homolog of NCBI NO: 33317836 NR Description: aldehyde dehydrogenase [Oryza sativa (indica group)] >gi|38344982|emb|CAE02788.2| OSJNBa0011L07.12 [Oryza
  misc_feature (1)..(382): Homolog of NCBI NO: 2392056 NR Description: Chain A, Class 3 Aldehyde Dehydrogenase Complex
  misc_feature (1)..(382): Homolog of NCBI NO: 14010869 NR Description: aldehyde dehydrogenase family 3, member A1;
  misc_feature (1)..(390): Homolog of NCBI NO: 17231164 NR Description: aldehyde dehydrogenase [Nostoc sp. PCC 7120]

SEQ ID NO: 105980 - DNA, 900 bp, Arabidopsis thaliana
  misc_feature (1)..(900): Ceres Seq. ID no. 13618490
  misc_feature: MA Experiment ID: 20000224 Result: Up-regulated in Transcription
tgccaatattagccggcgattcagatggagacggtggtcgataaagatgttctgaagtcttccggggctgagcttcttcccgacggacgtcgaggtttacgcatccatgactgggagatcgaaaccctccgcggcacgattctcacttctctcgctgtcgaagagtgggaaaaaaagcttaagacatctcacttacctgaaatggtttttggcgagaatgcattagtccttaaacacttaggtagcaacactaagattcattttaatgcgtttgacgcactagctggttggaagcaggaagggcttccacctgttgaagttcctgctgcagcacaatggaaattcaggagcaagccgtctcagcaggtgatactagattatgattacacgtttacaacgccatactgtggaagtgaagtagttgagaaagacaaagaaacgcaggttgaggcaaaagctaatccaaagggggaagctactcttcagtgggagaactgtgaagatcagattgatttggctgctctctcacttaaagaacctattctcttctatgatgaggtagttttgtatgaagatgaactggctgacaatggagtgtcacttctgactgtgaaagtgagagtcatgccaagctcatggttcctcctcttgcgattttggctgagagttgatggtgtgcttatgagattgagagagacgagaatgcattataggtttggcgaagatgaggcaccaactgttcttcgtgaaaactgttggagagaagcaacatttcagtctctatctgcgaaagggtatccagttgacttagcagtctggagcgacccgagctccatcagtcagaggcttccagtgattaagcatacgacacagaaactgaagatccctagtaaagtttaa

SEQ ID NO: 105981 - protein, 291 aa, Arabidopsis thaliana; identical to SEQ ID NO: 97876
  peptide (1)..(291): Ceres Seq. ID no. 13618491
  misc_feature (60)..(255): Pfam Name: TIP41-like family Pfam Description: TIP41-like family
  misc_feature (1)..(291): Homolog of NCBI NO: 22329154 NR Description: expressed protein [Arabidopsis thaliana] unknown protein [Arabidopsis thaliana]
  misc_feature (60)..(291): Homolog of NCBI NO: 7485322 NR Description: hypothetical protein F10M10.40 - Arabidopsis >gi|4455172|emb|CAB36704.1| putative protein [Arabidopsis >gi|7270377|emb|CAB80144.1| putative protein [Arabidopsis
  misc_feature (10)..(289): Homolog of NCBI NO: 14488361 NR Description: unknown protein [Oryza sativa (japonica
  misc_feature (30)..(291): Homolog of NCBI NO: 23097250 NR Description: similar to CG9578 gene product; yeast YPR037W and
  misc_feature (30)..(291): Homolog of NCBI NO: 21704010 NR Description: similar to CG9578 gene product [Mus musculus] similar to CG9578 gene product [Mus musculus]
  misc_feature (30)..(291): Homolog of NCBI NO: 34880821 NR Description: similar to CG9578-like [Rattus norvegicus]
  misc_feature (30)..(288): Homolog of NCBI NO: 34784442 NR Description: Unknown (protein for MGC:66327) [Danio rerio]
  misc_feature (133)..(285): Homolog of NCBI NO: 40739133 NR Description: hypothetical protein AN5814.2 [Aspergillus
  misc_feature (15)..(117): Homolog of NCBI NO: 40739133 NR Description: hypothetical protein AN5814.2 [Aspergillus
  misc_feature (32)..(285): Homolog of NCBI NO: 32403164 NR Description: hypothetical protein [Neurospora crassa]

SEQ ID NO: 105982 - protein, 232 aa, Arabidopsis thaliana; identical to SEQ ID NO: 97877
  peptide (1)..(232): Ceres Seq. ID no. 13618492
  misc_feature (1)..(196): Pfam Name: TIP41-like family Pfam Description: TIP41-like family
  misc_feature (1)..(232): Homolog of NCBI NO: 22329154 NR Description: expressed protein [Arabidopsis thaliana] unknown protein [Arabidopsis thaliana]
  misc_feature (1)..(232): Homolog of NCBI NO: 7485322 NR Description: hypothetical protein F10M10.40 - Arabidopsis >gi|4455172|emb|CAB36704.1| putative protein [Arabidopsis >gi|7270377|emb|CAB80144.1| putative protein [Arabidopsis
  misc_feature (1)..(230): Homolog of NCBI NO: 14488361 NR Description: unknown protein [Oryza sativa (japonica
  misc_feature (1)..(232): Homolog of NCBI NO: 23097250 NR Description: similar to CG9578 gene product; yeast YPR037W and
  misc_feature (1)..(232): Homolog of NCBI NO: 21704010 NR Description: similar to CG9578 gene product [Mus musculus] similar to CG9578 gene product [Mus musculus]
  misc_feature (1)..(232): Homolog of NCBI NO: 34880821 NR Description: similar to CG9578-like [Rattus norvegicus]
  misc_feature (1)..(229): Homolog of NCBI NO: 34784442 NR Description: Unknown (protein for MGC:66327) [Danio rerio]
  misc_feature (74)..(226): Homolog of NCBI NO: 40739133 NR Description: hypothetical protein AN5814.2 [Aspergillus
  misc_feature (1)..(58): Homolog of NCBI NO: 40739133 NR Description: hypothetical protein AN5814.2 [Aspergillus
  misc_feature (1)..(226): Homolog of NCBI NO: 32403164 NR Description: hypothetical protein [Neurospora crassa]

SEQ ID NO: 105983 - DNA, 748 bp, Arabidopsis thaliana
  misc_feature (1)..(748): Ceres Seq. ID no. 13618493
  misc_feature: MA Experiment ID: 108434 Result: Up-regulated in Transcription
  misc_feature: MA Experiment 108434 PARAMETER Experiment Name: At_Root_Tips_cDNA_P Parameter: Tissue Value: Root Tips
  misc_feature: MA Experiment ID: 108462 Result: Down-regulated in Transcription
  misc_feature: MA Experiment 108462 PARAMETER Experiment Name: At_Germinating_Seeds_cDNA_P Parameter: Age (day) Value: 2 vs. 0
  misc_feature: MA Experiment 108462 PARAMETER Experiment Name: At_Germinating_Seeds_cDNA_P Parameter: Tissue Value: Germinating Seeds
  misc_feature: MA Experiment ID: 108463 Result: Down-regulated in Transcription
  misc_feature: MA Experiment 108463 PARAMETER Experiment Name: At_Germinating_Seeds_cDNA_P Parameter: Age (day) Value: 3 vs. 0
  misc_feature: MA Experiment 108463 PARAMETER Experiment Name: At_Germinating_Seeds_cDNA_P Parameter: Tissue Value: Germinating Seeds
  misc_feature: MA Experiment ID: 108464 Result: Down-regulated in Transcription
  misc_feature: MA Experiment 108464 PARAMETER Experiment Name: At_Germinating_Seeds_cDNA_P Parameter: Age (day) Value: 4 vs. 0
  misc_feature: MA Experiment 108464 PARAMETER Experiment Name: At_Germinating_Seeds_cDNA_P Parameter: Tissue Value: Germinating Seeds
  misc_feature: MA Experiment ID: 108488 Result: Up-regulated in Transcription
  misc_feature: MA Experiment ID: 108561 Result: Down-regulated in Transcription
  misc_feature: MA Experiment 108561 PARAMETER Experiment Name: At_100uM_ABA_cDNA_P Parameter: Timepoint (hr) Value: 6
  misc_feature: MA Experiment 108561 PARAMETER Experiment Name: At_100uM_ABA_cDNA_P Parameter: Tissue Value: Aerial
  misc_feature: MA Experiment 108561 PARAMETER Experiment Name: At_100uM_ABA_cDNA_P Parameter: Treatment Value: 100uM ABA vs. No Treatment
  misc_feature: MA Experiment ID: 108579 Result: Up-regulated in Transcription
  misc_feature: MA Experiment 108579 PARAMETER Experiment Name: At_4deg_Cold_cDNA_P Parameter: Temperature (deg C) Value: 4 vs. 22
  misc_feature: MA Experiment 108579 PARAMETER Experiment Name: At_4deg_Cold_cDNA_P Parameter: Timepoint (hr) Value: 6
  misc_feature: MA Experiment 108579 PARAMETER Experiment Name: At_4deg_Cold_cDNA_P Parameter: Tissue Value: Aerial
  misc_feature: MA Experiment ID: 108585 Result: Down-regulated in Transcription
  misc_feature: MA Experiment 108585 PARAMETER Experiment Name: At_5mM_NaNP_cDNA_P Parameter: Timepoint (hr) Value: 6
  misc_feature: MA Experiment 108585 PARAMETER Experiment Name: At_5mM_NaNP_cDNA_P Parameter: Tissue Value: Aerial
  misc_feature: MA Experiment 108585 PARAMETER Experiment Name: At_5mM_NaNP_cDNA_P Parameter: Treatment Value: null
  misc_feature: MA Experiment ID: 108595 Result: Down-regulated in Transcription
  misc_feature: MA Experiment 108595 PARAMETER Experiment Name: At_Ler-pi_Ovule_cDNA_P Parameter: Plant Line Value: null
  misc_feature: MA Experiment ID: 108605 Result: Down-regulated in Transcription
  misc_feature: MA Experiment 108605 PARAMETER Experiment Name: At_100uM_ABA_cDNA_P Parameter: Timepoint (hr) Value: 6
  misc_feature: MA Experiment 108605 PARAMETER Experiment Name: At_100uM_ABA_cDNA_P Parameter: Tissue Value: Aerial
  misc_feature: MA Experiment 108605 PARAMETER Experiment Name: At_100uM_ABA_cDNA_P Parameter: Treatment Value: 100uM ABA vs. No Treatment
  misc_feature: MA Experiment ID: 108607 Result: Down-regulated in Transcription
  misc_feature: MA Experiment 108607 PARAMETER Experiment Name: At_100uM_ABA_cDNA_P Parameter: Timepoint (hr) Value: 4
  misc_feature: MA Experiment 108607 PARAMETER Experiment Name: At_100uM_ABA_cDNA_P Parameter: Tissue Value: Aerial
  misc_feature: MA Experiment 108607 PARAMETER Experiment Name: At_100uM_ABA_cDNA_P Parameter: Treatment Value: 100uM ABA vs. No Treatment
  misc_feature: MA Experiment ID: 108668 Result: Down-regulated in Transcription
  misc_feature: MA Experiment 108668 PARAMETER Experiment Name: At_2mM_SA_cDNA_P Parameter: Plant Line Value: WS
  misc_feature: MA Experiment 108668 PARAMETER Experiment Name: At_2mM_SA_cDNA_P Parameter: Timepoint (hr) Value: 6
  misc_feature: MA Experiment 108668 PARAMETER Experiment Name: At_2mM_SA_cDNA_P Parameter: Treatment Value: 2mM SA vs. No Treatment
  misc_feature: MA Experiment ID: 20000069 Result: Down-regulated in Transcription
  misc_feature: MA Experiment 20000069 PARAMETER Experiment Name: At_100uM_ABA_Mutants_cDNA_P Parameter: Plant Line Value: CS23
  misc_feature: MA Experiment 20000069 PARAMETER Experiment Name: At_100uM_ABA_Mutants_cDNA_P Parameter: Timepoint (hr) Value: 6
  misc_feature: MA Experiment 20000069 PARAMETER Experiment Name: At_100uM_ABA_Mutants_cDNA_P Parameter: Tissue Value: Aerial
  misc_feature: MA Experiment 20000069 PARAMETER Experiment Name: At_100uM_ABA_Mutants_cDNA_P Parameter: Treatment Value: 100uM ABA vs. No Treatment
  misc_feature: MA Experiment ID: 20000070 Result: Down-regulated in Transcription
  misc_feature: MA Experiment 20000070 PARAMETER Experiment Name: At_100uM_ABA_Mutants_cDNA_P Parameter: Plant Line Value: CS24
  misc_feature: MA Experiment 20000070 PARAMETER Experiment Name: At_100uM_ABA_Mutants_cDNA_P Parameter: Timepoint (hr) Value: 6
  misc_feature: MA Experiment 20000070 PARAMETER Experiment Name: At_100uM_ABA_Mutants_cDNA_P Parameter: Tissue Value: Aerial
  misc_feature: MA Experiment 20000070 PARAMETER Experiment Name: At_100uM_ABA_Mutants_cDNA_P Parameter: Treatment Value: 100uM ABA vs. No Treatment
  misc_feature: MA Experiment ID: 20000071 Result: Down-regulated in Transcription
  misc_feature: MA Experiment 20000071 PARAMETER Experiment Name: At_100uM_ABA_Mutants_cDNA_P Parameter: Plant Line Value: CS8104
  misc_feature: MA Experiment 20000071 PARAMETER Experiment Name: At_100uM_ABA_Mutants_cDNA_P Parameter: Timepoint (hr) Value: 6
  misc_feature: MA Experiment 20000071 PARAMETER Experiment Name: At_100uM_ABA_Mutants_cDNA_P Parameter: Tissue Value: Aerial
  misc_feature: MA Experiment 20000071 PARAMETER Experiment Name: At_100uM_ABA_Mutants_cDNA_P Parameter: Treatment Value: 100uM ABA vs. No Treatment
  misc_feature: MA Experiment ID: 20000072 Result: Down-regulated in Transcription
  misc_feature: MA Experiment 20000072 PARAMETER Experiment Name: At_100uM_ABA_Mutants_cDNA_P Parameter: Plant Line Value: CS8105
  misc_feature: MA Experiment 20000072 PARAMETER Experiment Name: At_100uM_ABA_Mutants_cDNA_P Parameter: Timepoint (hr) Value: 6
  misc_feature: MA Experiment 20000072 PARAMETER Experiment Name: At_100uM_ABA_Mutants_cDNA_P Parameter: Tissue Value: Aerial
  misc_feature: MA Experiment 20000072 PARAMETER Experiment Name: At_100uM_ABA_Mutants_cDNA_P Parameter: Treatment Value: 100uM ABA vs. No Treatment
  misc_feature: MA Experiment ID: 20000087 Result: Down-regulated in Transcription
  misc_feature: MA Experiment 20000087 PARAMETER Experiment Name: At_100uM_ABA_Mutants_cDNA_P Parameter: Plant Line Value: WS
  misc_feature: MA Experiment 20000087 PARAMETER Experiment Name: At_100uM_ABA_Mutants_cDNA_P Parameter: Timepoint (hr) Value: 6
  misc_feature: MA Experiment 20000087 PARAMETER Experiment Name: At_100uM_ABA_Mutants_cDNA_P Parameter: Tissue Value: Aerial
  misc_feature: MA Experiment 20000087 PARAMETER Experiment Name: At_100uM_ABA_Mutants_cDNA_P Parameter: Treatment Value: 100uM ABA vs. No Treatment
  misc_feature: MA Experiment ID: 20000113 Result: Up-regulated in Transcription
  misc_feature: MA Experiment 20000113 PARAMETER Experiment Name: At_42deg_Heat_cDNA_P Parameter: Temperature (deg C) Value: 42 vs. 22
  misc_feature: MA Experiment 20000113 PARAMETER Experiment Name: At_42deg_Heat_cDNA_P Parameter: Timepoint (hr) Value: 8
  misc_feature: MA Experiment 20000113 PARAMETER Experiment Name: At_42deg_Heat_cDNA_P Parameter: Tissue Value: Aerial
  misc_feature: MA Experiment ID: 20000117 Result: Down-regulated in Transcription
  misc_feature: MA Experiment 20000117 PARAMETER Experiment Name: At_100uM_ABA_Mutants_cDNA_P Parameter: Plant Line Value: Columbia
  misc_feature: MA Experiment 20000117 PARAMETER Experiment Name: At_100uM_ABA_Mutants_cDNA_P Parameter: Timepoint (hr) Value: 6
  misc_feature: MA Experiment 20000117 PARAMETER Experiment Name: At_100uM_ABA_Mutants_cDNA_P Parameter: Tissue Value: Aerial
  misc_feature: MA Experiment 20000117 PARAMETER Experiment Name: At_100uM_ABA_Mutants_cDNA_P Parameter: Treatment Value: 100uM ABA vs. No Treatment
  misc_feature: MA Experiment ID: 20000179 Result: Down-regulated in Transcription
  misc_feature: MA Experiment 20000179 PARAMETER Experiment Name: At_Germinating_Seeds_P Parameter: Age (hr) Value: 6 vs. 0
  misc_feature: MA Experiment 20000179 PARAMETER Experiment Name: At_Germinating_Seeds_P Parameter: Tissue Value: Germinating Seeds
  misc_feature: MA Experiment ID: 20000182 Result: Down-regulated in Transcription
  misc_feature: MA Experiment 20000182 PARAMETER Experiment Name: At_2mM_SA_P Parameter: Age (day) Value: 14
  misc_feature: MA Experiment 20000182 PARAMETER Experiment Name: At_2mM_SA_P Parameter: Organism Value: A. thaliana
  misc_feature: MA Experiment 20000182 PARAMETER Experiment Name: At_2mM_SA_P Parameter: Plant Line Value: WS
  misc_feature: MA Experiment 20000182 PARAMETER Experiment Name: At_2mM_SA_P Parameter: Timepoint (hr) Value: 6
  misc_feature: MA Experiment 20000182 PARAMETER Experiment Name: At_2mM_SA_P Parameter: Tissue Value: Aerial
  misc_feature: MA Experiment 20000182 PARAMETER Experiment Name: At_2mM_SA_P Parameter: Treatment Value: 2mM SA vs. No Treatment
  misc_feature: MA Experiment ID: 20000184 Result: Up-regulated in Transcription
  misc_feature: MA Experiment 20000184 PARAMETER Experiment Name: At_Shoots__P Parameter: Age (day) Value: 7
  misc_feature: MA Experiment 20000184 PARAMETER Experiment Name: At_Shoots__P Parameter: Tissue Value: Shoots vs. Whole Plant
  misc_feature: MA Experiment ID: 20000185 Result: Down-regulated in Transcription
  misc_feature: MA Experiment 20000185 PARAMETER Experiment Name: At_Roots__P Parameter: Age (day) Value: 7 vs. 21
  misc_feature: MA Experiment 20000185 PARAMETER Experiment Name: At_Roots__P Parameter: Organism Value: A. thaliana
  misc_feature: MA Experiment 20000185 PARAMETER Experiment Name: At_Roots__P Parameter: Tissue Value: Roots vs. Whole Plant
  misc_feature: MA Experiment ID: 20000234 Result: Up-regulated in Transcription
  misc_feature: MA Experiment 20000234 PARAMETER Experiment Name: At_Siliques_P Parameter: Age (day) Value: 21
  misc_feature: MA Experiment 20000234 PARAMETER Experiment Name: At_Siliques_P Parameter: Organism Value: A. thaliana
  misc_feature: MA Experiment 20000234 PARAMETER Experiment Name: At_Siliques_P Parameter: Plant Line Value: WS
  misc_feature: MA Experiment 20000234 PARAMETER Experiment Name: At_Siliques_P Parameter: Tissue Value: Less Than 5mm Siliques vs. Whole Plant
  misc_feature: MA Experiment ID: 20000264 Result: Up-regulated in Transcription
  misc_feature: MA Experiment 20000264 PARAMETER Experiment Name: At_Open_Flower_P Parameter: Age (day) Value: 21
  misc_feature: MA Experiment 20000264 PARAMETER Experiment Name: At_Open_Flower_P Parameter: Plant Line Value: WS
  misc_feature: MA Experiment 20000264 PARAMETER Experiment Name: At_Open_Flower_P Parameter: Tissue Value: Open Flower vs. Whole Plant
  misc_feature: MA Experiment ID: 20000436 Result: Down-regulated in Transcription
  misc_feature: MA Experiment 20000436 PARAMETER Experiment Name: At_Drought_P Parameter: Age (day) Value: 7
  misc_feature: MA Experiment 20000436 PARAMETER Experiment Name: At_Drought_P Parameter: Organism Value: A. thaliana
  misc_feature: MA Experiment 20000436 PARAMETER Experiment Name: At_Drought_P Parameter: Plant Line Value: WS
  misc_feature: MA Experiment 20000436 PARAMETER Experiment Name: At_Drought_P Parameter: Timepoint (hr) Value: 12
  misc_feature: MA Experiment 20000436 PARAMETER Experiment Name: At_Drought_P Parameter: Tissue Value: Whole Plant
  misc_feature: MA Experiment 20000436 PARAMETER Experiment Name: At_Drought_P Parameter: Treatment Value: Drought vs. No Drought
  misc_feature: MA Experiment ID: 20000437 Result: Down-regulated in Transcription
  misc_feature: MA Experiment 20000437 PARAMETER Experiment Name: At_Drought_P Parameter: Age (day) Value: 8
  misc_feature: MA Experiment 20000437 PARAMETER Experiment Name: At_Drought_P Parameter: Organism Value: A. thaliana
  misc_feature: MA Experiment 20000437 PARAMETER Experiment Name: At_Drought_P Parameter: Plant Line Value: WS
  misc_feature: MA Experiment 20000437 PARAMETER Experiment Name: At_Drought_P Parameter: Timepoint (hr) Value: 24
  misc_feature: MA Experiment 20000437 PARAMETER Experiment Name: At_Drought_P Parameter: Tissue Value: Whole Plant
  misc_feature: MA Experiment 20000437 PARAMETER Experiment Name: At_Drought_P Parameter: Treatment Value: Drought vs. No Drought
  misc_feature: MA Experiment ID: 20000439 Result: Down-regulated in Transcription
  misc_feature: MA Experiment 20000439 PARAMETER Experiment Name: At_Roots__P Parameter: Age (day) Value: 14 vs. 21
  misc_feature: MA Experiment 20000439 PARAMETER Experiment Name: At_Roots__P Parameter: Organism Value: A. thaliana
  misc_feature: MA Experiment 20000439 PARAMETER Experiment Name: At_Roots__P Parameter: Tissue Value: Roots vs. Whole Plant
  misc_feature: MA Experiment ID: 20000445 Result: Down-regulated in Transcription
  misc_feature: MA Experiment 20000445 PARAMETER Experiment Name: At_100uM_NAA__P Parameter: Age (day) Value: 14
  misc_feature: MA Experiment 20000445 PARAMETER Experiment Name: At_100uM_NAA__P Parameter: Organism Value: A. thaliana
  misc_feature: MA Experiment 20000445 PARAMETER Experiment Name: At_100uM_NAA__P Parameter: Plant Line Value: WS
  misc_feature: MA Experiment 20000445 PARAMETER Experiment Name: At_100uM_NAA__P Parameter: Timepoint (hr) Value: 6
  misc_feature: MA Experiment 20000445 PARAMETER Experiment Name: At_100uM_NAA__P Parameter: Tissue Value: Aerial
  misc_feature: MA Experiment 20000445 PARAMETER Experiment Name: At_100uM_NAA__P Parameter: Treatment Value: 100uM NAA vs. No Treatment
  misc_feature: MA Experiment ID: 20000453 Result: Down-regulated in Transcription
  misc_feature: MA Experiment 20000453 PARAMETER Experiment Name: At_100uM_ABA_P Parameter: Age (day) Value: 15
  misc_feature: MA Experiment 20000453 PARAMETER Experiment Name: At_100uM_ABA_P Parameter: Organism Value: A. thaliana
  misc_feature: MA Experiment 20000453 PARAMETER Experiment Name: At_100uM_ABA_P Parameter: Plant Line Value: WS
  misc_feature: MA Experiment 20000453 PARAMETER Experiment Name: At_100uM_ABA_P Parameter: Timepoint (hr) Value: 24
  misc_feature: MA Experiment 20000453 PARAMETER Experiment Name: At_100uM_ABA_P Parameter: Tissue Value: Aerial
  misc_feature: MA Experiment 20000453 PARAMETER Experiment Name: At_100uM_ABA_P Parameter: Treatment Value: 100uM ABA vs. No Treatment
  misc_feature: MA Experiment ID: 20000794 Result: Down-regulated in Transcription
  misc_feature: MA Experiment 20000794 PARAMETER Experiment Name: At_Petals_P Parameter: Age (day) Value: 23-25 days
  misc_feature: MA Experiment 20000794 PARAMETER Experiment Name: At_Petals_P Parameter: Plant Line Value: WS
  misc_feature: MA Experiment 20000794 PARAMETER Experiment Name: At_Petals_P Parameter: Tissue Value: Petals vs. Whole plant
  misc_feature: MA Experiment ID: 20001248 Result: Down-regulated in Transcription
  misc_feature: MA Experiment 20001248 PARAMETER Experiment Name: At_Far-red-induction_P Parameter: Age (day) Value: 7
  misc_feature: MA Experiment 20001248 PARAMETER Experiment Name: At_Far-red-induction_P Parameter: Light Value: Far-red vs. White
  misc_feature: MA Experiment 20001248 PARAMETER Experiment Name: At_Far-red-induction_P Parameter: Organism Value: A. thaliana
  misc_feature: MA Experiment 20001248 PARAMETER Experiment Name: At_Far-red-induction_P Parameter: Plant Line Value: Columbia
  misc_feature: MA Experiment 20001248 PARAMETER Experiment Name: At_Far-red-induction_P Parameter: Timepoint (hr) Value: 4
  misc_feature: MA Experiment 20001248 PARAMETER Experiment Name: At_Far-red-induction_P Parameter: Tissue Value: Whole Plant
  misc_feature: MA Experiment ID: 20001450 Result: Down-regulated in Transcription
  misc_feature: MA Experiment 20001450 PARAMETER Experiment Name: At_Far-red-induction_P Parameter: Age (day) Value: 7
  misc_feature: MA Experiment 20001450 PARAMETER Experiment Name: At_Far-red-induction_P Parameter: Light Value: Far-red vs. White
  misc_feature: MA Experiment 20001450 PARAMETER Experiment Name: At_Far-red-induction_P Parameter: Organism Value: A. thaliana
  misc_feature: MA Experiment 20001450 PARAMETER Experiment Name: At_Far-red-induction_P Parameter: Plant Line Value: Columbia
  misc_feature: MA Experiment 20001450 PARAMETER Experiment Name: At_Far-red-induction_P Parameter: Timepoint (hr) Value: 8
  misc_feature: MA Experiment 20001450 PARAMETER Experiment Name: At_Far-red-induction_P Parameter: Tissue Value: Whole Plant
  misc_feature: MA Experiment ID: 20001556 Result: Up-regulated in Transcription
  misc_feature: MA Experiment 20001556 PARAMETER Experiment Name: At_Drought_Soil_Dry_P Parameter: Age (day) Value: 26
  misc_feature: MA Experiment 20001556 PARAMETER Experiment Name: At_Drought_Soil_Dry_P Parameter: Organism Value: A. thaliana
  misc_feature: MA Experiment 20001556 PARAMETER Experiment Name: At_Drought_Soil_Dry_P Parameter: Plant Line Value: WS
  misc_feature: MA Experiment 20001556 PARAMETER Experiment Name: At_Drought_Soil_Dry_P Parameter: Post Timepoint (hr) Value: None
  misc_feature: MA Experiment 20001556 PARAMETER Experiment Name: At_Drought_Soil_Dry_P Parameter: Post-Treatment Value: None
  misc_feature: MA Experiment 20001556 PARAMETER Experiment Name: At_Drought_Soil_Dry_P Parameter: Timepoint (day) Value: 12
  misc_feature: MA Experiment 20001556 PARAMETER Experiment Name: At_Drought_Soil_Dry_P Parameter: Treatment Value: Drought vs. No Drought
  misc_feature: MA Experiment ID: 20001558 Result: Up-regulated in Transcription
  misc_feature: MA Experiment 20001558 PARAMETER Experiment Name: At_Drought_Soil_Dry_P Parameter: Age (day) Value: 27
  misc_feature: MA Experiment 20001558 PARAMETER Experiment Name: At_Drought_Soil_Dry_P Parameter: Organism Value: A. thaliana
  misc_feature: MA Experiment 20001558 PARAMETER Experiment Name: At_Drought_Soil_Dry_P Parameter: Plant Line Value: WS
  misc_feature: MA Experiment 20001558 PARAMETER Experiment Name: At_Drought_Soil_Dry_P Parameter: Post Timepoint (hr) Value: 6
  misc_feature: MA Experiment 20001558 PARAMETER Experiment Name: At_Drought_Soil_Dry_P Parameter: Post-Treatment Value: Re-Water vs. No Drought
  misc_feature: MA Experiment 20001558 PARAMETER Experiment Name: At_Drought_Soil_Dry_P Parameter: Timepoint (day) Value: 13
  misc_feature: MA Experiment 20001558 PARAMETER Experiment Name: At_Drought_Soil_Dry_P Parameter: Treatment Value: Drought vs. No Drought
  misc_feature: MA Experiment ID: 20001757 Result: Up-regulated in Transcription
  misc_feature: MA Experiment 20001757 PARAMETER Experiment Name: At_50mM_NH4NO3_L-to-H_P Parameter: Timepoint (hr) Value: 6
  misc_feature: MA Experiment 20001757 PARAMETER Experiment Name: At_50mM_NH4NO3_L-to-H_P Parameter: Tissue Value: Leaf
  misc_feature: MA Experiment 20001757 PARAMETER Experiment Name: At_50mM_NH4NO3_L-to-H_P Parameter: Treatment Value: 50mM NH4NO3 vs 100mM Mannitol
aacacaaaacctctcgtcttctcaaatccactctcatacacagtcacaacaatggctctttcttctggaatcttctctactacttttctctgcgtcgatacggcgccgttgcgcagctcaatgttgtctccatcttcgctccgtttgtcccctaatcatccgactaacctgcgcatggttcgagctgtaacttccgcggcggcggcttcctccgacccgacaaccacgaccaagactcgggagccacgtggcatcatgaagcctcgtccagtgtcccaggcgatgcaggatgtcgttggcgttcctgaaatccctcgtactcaagctctcaaacgcatttgggcttacatcaaggaacatgaccttcaagacccacaaaacaagagggatatactctgcgacgagaagctgaagaagatatttgaaggcaaagaacgtgttgggttcttggagattgcaaaactcattggtcctcactttctctgaatgaattttggctgagagaagacaatcattggcctatgttttgctgagctactaaaggccatgaaagatcagattacatattagtaaatttagggtttaagaagtttttatgcaaccaagtagtttataagcctttggaggatatcttatgtcggttatgtgctcatttgctttcccattgcagttaaaatattcctctcttttttttttttttttgtcttaggacttgaaatctctctaatgcatgaagtaatgcttttat

SEQ ID NO: 105984 - protein, 161 aa, Arabidopsis thaliana; identical to SEQ ID NO: 30485
  peptide (1)..(161): Ceres Seq. ID no. 13618494
  misc_feature (85)..(161): Pfam Name: SWIB/MDM2 domain Pfam Description: SWIB/MDM2 domain
  misc_feature (18)..(161): Homolog of NCBI NO: 15235320 NR Description: expressed protein [Arabidopsis thaliana]
  misc_feature (18)..(161): Homolog of NCBI NO: 14423526 NR Description: putative protein [Arabidopsis thaliana]
  misc_feature (18)..(161): Homolog of NCBI NO: 21553903 NR Description: unknown [Arabidopsis thaliana]
  misc_feature (18)..(161): Homolog of NCBI NO: 18397658 NR Description: expressed protein [Arabidopsis thaliana]
  misc_feature (18)..(161): Homolog of NCBI NO: 19698859 NR Description: unknown protein [Arabidopsis thaliana]
  misc_feature (18)..(161): Homolog of NCBI NO: 21593713 NR Description: unknown [Arabidopsis thaliana]
  misc_feature (39)..(161): Homolog of NCBI NO: 14488372 NR Description: hypothetical protein [Oryza sativa (japonica
  misc_feature (45)..(160): Homolog of NCBI NO: 33667910 NR Description: SWIb domain-containing protein [Solanum chacoense]
  misc_feature (35)..(161): Homolog of NCBI NO: 21593643 NR Description: unknown [Arabidopsis thaliana]
  misc_feature (39)..(161): Homolog of NCBI NO: 18396594 NR Description: expressed protein [Arabidopsis thaliana] hypothetical protein [Arabidopsis thaliana] unknown protein [Arabidopsis thaliana]

SEQ ID NO: 105985 - protein, 144 aa, Arabidopsis thaliana; identical to SEQ ID NO: 30486
  peptide (1)..(144): Ceres Seq. ID no. 13618495
  misc_feature (68)..(144): Pfam Name: SWIB/MDM2 domain Pfam Description: SWIB/MDM2 domain
  misc_feature (1)..(144): Homolog of NCBI NO: 15235320 NR Description: expressed protein [Arabidopsis thaliana]
  misc_feature (1)..(144): Homolog of NCBI NO: 14423526 NR Description: putative protein [Arabidopsis thaliana]
  misc_feature (1)..(144): Homolog of NCBI NO: 21553903 NR Description: unknown [Arabidopsis thaliana]
  misc_feature (1)..(144): Homolog of NCBI NO: 18397658 NR Description: expressed protein [Arabidopsis thaliana]
  misc_feature (1)..(144): Homolog of NCBI NO: 19698859 NR Description: unknown protein [Arabidopsis thaliana]
  misc_feature (1)..(144): Homolog of NCBI NO: 21593713 NR Description: unknown [Arabidopsis thaliana]
  misc_feature (22)..(144): Homolog of NCBI NO: 14488372 NR Description: hypothetical protein [Oryza sativa (japonica
  misc_feature (28)..(143): Homolog of NCBI NO: 33667910 NR Description: SWIb domain-containing protein [Solanum chacoense]
  misc_feature (18)..(144): Homolog of NCBI NO: 21593643 NR Description: unknown [Arabidopsis thaliana]
  misc_feature (22)..(144): Homolog of NCBI NO: 18396594 NR Description: expressed protein [Arabidopsis thaliana] hypothetical protein [Arabidopsis thaliana] unknown protein [Arabidopsis thaliana]

SEQ ID NO: 105986 - protein, 121 aa, Arabidopsis thaliana; identical to SEQ ID NO: 30487
  peptide (1)..(121): Ceres Seq. ID no. 13618496
  misc_feature (45)..(121): Pfam Name: SWIB/MDM2 domain Pfam Description: SWIB/MDM2 domain
  misc_feature (1)..(121): Homolog of NCBI NO: 15235320 NR Description: expressed protein [Arabidopsis thaliana]
  misc_feature (1)..(121): Homolog of NCBI NO: 14423526 NR Description: putative protein [Arabidopsis thaliana]
  misc_feature (1)..(121): Homolog of NCBI NO: 21553903 NR Description: unknown [Arabidopsis thaliana]
  misc_feature (1)..(121): Homolog of NCBI NO: 18397658 NR Description: expressed protein [Arabidopsis thaliana]
  misc_feature (1)..(121): Homolog of NCBI NO: 19698859 NR Description: unknown protein [Arabidopsis thaliana]
  misc_feature (1)..(121): Homolog of NCBI NO: 21593713 NR Description: unknown [Arabidopsis thaliana]
  misc_feature (1)..(121): Homolog of NCBI NO: 14488372 NR Description: hypothetical protein [Oryza sativa (japonica
  misc_feature (5)..(120): Homolog of NCBI NO: 33667910 NR Description: SWIb domain-containing protein [Solanum chacoense]
  misc_feature (1)..(121): Homolog of NCBI NO: 21593643 NR Description: unknown [Arabidopsis thaliana]
  misc_feature (1)..(121): Homolog of NCBI NO: 18396594 NR Description: expressed protein [Arabidopsis thaliana] hypothetical protein [Arabidopsis thaliana] unknown protein [Arabidopsis thaliana]

SEQ ID NO: 105987 - DNA, 1369 bp, Arabidopsis thaliana
  misc_feature (1)..(1369): Ceres Seq. ID no. 13618505
  misc_feature: MA Experiment ID: 108469 Result: Up-regulated in Transcription
  misc_feature: MA Experiment ID: 108561 Result: Up-regulated in Transcription
  misc_feature: MA Experiment 108561 PARAMETER Experiment Name: At_100uM_ABA_cDNA_P Parameter: Timepoint (hr) Value: 6
  misc_feature: MA Experiment 108561 PARAMETER Experiment Name: At_100uM_ABA_cDNA_P Parameter: Tissue Value: Aerial
  misc_feature: MA Experiment 108561 PARAMETER Experiment Name: At_100uM_ABA_cDNA_P Parameter: Treatment Value: 100uM ABA vs. No Treatment
  misc_feature: MA Experiment ID: 108573 Result: Up-regulated in Transcription
  misc_feature: MA Experiment 108573 PARAMETER Experiment Name: At_Drought_cDNA_P Parameter: Timepoint (hr) Value: 6
  misc_feature: MA Experiment 108573 PARAMETER Experiment Name: At_Drought_cDNA_P Parameter: Tissue Value: Aerial
  misc_feature: MA Experiment 108573 PARAMETER Experiment Name: At_Drought_cDNA_P Parameter: Treatment Value: Drought vs. No Drought
  misc_feature: MA Experiment ID: 108585 Result: Up-regulated in Transcription
  misc_feature: MA Experiment 108585 PARAMETER Experiment Name: At_5mM_NaNP_cDNA_P Parameter: Timepoint (hr) Value: 6
  misc_feature: MA Experiment 108585 PARAMETER Experiment Name: At_5mM_NaNP_cDNA_P Parameter: Tissue Value: Aerial
  misc_feature: MA Experiment 108585 PARAMETER Experiment Name: At_5mM_NaNP_cDNA_P Parameter: Treatment Value: null
  misc_feature: MA Experiment ID: 108595 Result: Up-regulated in Transcription
  misc_feature: MA Experiment 108595 PARAMETER Experiment Name: At_Ler-pi_Ovule_cDNA_P Parameter: Plant Line Value: null
  misc_feature: MA Experiment ID: 108609 Result: Up-regulated in Transcription
  misc_feature: MA Experiment 108609 PARAMETER Experiment Name: At_100uM_ABA_cDNA_P Parameter: Timepoint (hr) Value: 24
  misc_feature: MA Experiment 108609 PARAMETER Experiment Name: At_100uM_ABA_cDNA_P Parameter: Tissue Value: Aerial
  misc_feature: MA Experiment 108609 PARAMETER Experiment Name: At_100uM_ABA_cDNA_P Parameter: Treatment Value: 100uM ABA vs. No Treatment
  misc_feature: MA Experiment ID: 20000087 Result: Down-regulated in Transcription
  misc_feature: MA Experiment 20000087 PARAMETER Experiment Name: At_100uM_ABA_Mutants_cDNA_P Parameter: Plant Line Value: WS
  misc_feature: MA Experiment 20000087 PARAMETER Experiment Name: At_100uM_ABA_Mutants_cDNA_P Parameter: Timepoint (hr) Value: 6
  misc_feature: MA Experiment 20000087 PARAMETER Experiment Name: At_100uM_ABA_Mutants_cDNA_P Parameter: Tissue Value: Aerial
  misc_feature: MA Experiment 20000087 PARAMETER Experiment Name: At_100uM_ABA_Mutants_cDNA_P Parameter: Treatment Value: 100uM ABA vs. No Treatment
  misc_feature: MA Experiment ID: 20000112 Result: Up-regulated in Transcription
  misc_feature: MA Experiment 20000112 PARAMETER Experiment Name: At_42deg_Heat_cDNA_P Parameter: Temperature (deg C) Value: 42 vs. 22
  misc_feature: MA Experiment 20000112 PARAMETER Experiment Name: At_42deg_Heat_cDNA_P Parameter: Timepoint (hr) Value: 2
  misc_feature: MA Experiment 20000112 PARAMETER Experiment Name: At_42deg_Heat_cDNA_P Parameter: Tissue Value: Aerial
  misc_feature: MA Experiment ID: 20000117 Result: Up-regulated in Transcription
  misc_feature: MA Experiment 20000117 PARAMETER Experiment Name: At_100uM_ABA_Mutants_cDNA_P Parameter: Plant Line Value: Columbia
  misc_feature: MA Experiment 20000117 PARAMETER Experiment Name: At_100uM_ABA_Mutants_cDNA_P Parameter: Timepoint (hr) Value: 6
  misc_feature: MA Experiment 20000117 PARAMETER Experiment Name: At_100uM_ABA_Mutants_cDNA_P Parameter: Tissue Value: Aerial
  misc_feature: MA Experiment 20000117 PARAMETER Experiment Name: At_100uM_ABA_Mutants_cDNA_P Parameter: Treatment Value: 100uM ABA vs. No Treatment
  misc_feature: MA Experiment ID: 20000185 Result: Down-regulated in Transcription
  misc_feature: MA Experiment 20000185 PARAMETER Experiment Name: At_Roots__P Parameter: Age (day) Value: 7 vs. 21
  misc_feature: MA Experiment 20000185 PARAMETER Experiment Name: At_Roots__P Parameter: Organism Value: A. thaliana
  misc_feature: MA Experiment 20000185 PARAMETER Experiment Name: At_Roots__P Parameter: Tissue Value: Roots vs. Whole Plant
  misc_feature: MA Experiment ID: 20000495 Result: Down-regulated in Transcription
  misc_feature: MA Experiment 20000495 PARAMETER Experiment Name: At_Guard_Cells_P Parameter: Harvest Date Value: 8/2/2002
  misc_feature: MA Experiment 20000495 PARAMETER Experiment Name: At_Guard_Cells_P Parameter: Organism Value: A. thaliana
  misc_feature: MA Experiment 20000495 PARAMETER Experiment Name: At_Guard_Cells_P Parameter: Tissue Value: Guard Cells vs. Leaves
  misc_feature: MA Experiment ID: 20001451 Result: Up-regulated in Transcription
  misc_feature: MA Experiment 20001451 PARAMETER Experiment Name: At_Far-red-induction_P Parameter: Age (day) Value: 7
  misc_feature: MA Experiment 20001451 PARAMETER Experiment Name: At_Far-red-induction_P Parameter: Light Value: Far-red vs. White
  misc_feature: MA Experiment 20001451 PARAMETER Experiment Name: At_Far-red-induction_P Parameter: Organism Value: A. thaliana
  misc_feature: MA Experiment 20001451 PARAMETER Experiment Name: At_Far-red-induction_P Parameter: Plant Line Value: Columbia
  misc_feature: MA Experiment 20001451 PARAMETER Experiment Name: At_Far-red-induction_P Parameter: Timepoint (hr) Value: 24
  misc_feature: MA Experiment 20001451 PARAMETER Experiment Name: At_Far-red-induction_P Parameter: Tissue Value: Whole Plant
accatcaatggctctctccatctccatctatttcctcctcatcttcctctctcacttcccatcctcacatgcagagcctttcatcggagttaactacggccaagtcgccgacaatctccctccgccttcagaaaccgtcaagctcctccaatccacttcaattcagaaagttcgactttacggcgccgatcccgccatcatcaaagctttggccggaacaggggtcggtatcgtcatcggcgctgctaacggcgacgttccttctcttgcctccgatcctaacgccgctactcaatggatcaactccaatgtccttcctttttatcccgcctccaaaatcatgctcatcaccgtcggcaacgagattctgatgtcgaacgatccaaatctggtgaaccagctacttccggcgatgcaaaatgtccaaaaagcccttgaggcggtgtctctcggcgggaaaatcaaggtctcgacggtgaactcgatgacggtgctcggtagttcagacccgccatcgagcggttcatttgcggccggttatcaaaccggtttaaagggaattttgcaatttctaagcgacactggttcgccttttgctattaacccgtacccgttcttcgcgtaccaaagtgacccgagacccgaaacgctggcgttttgtctctttgagcctaacgccggacgagtcgactccaaaaccggaatcaaatacacgaacatgttcgatgctcaggttgatgcggttcactcggctttgaaatcgatgggattcgagaaggtggagattgtggtggcggaaacaggttgggcgtcaagaggggacgctaacgaggttggagcaagcgtggataacgccaaagcgtacaacggaaacctaatagctcatctaaggtctatggttggcacacctctcatgcctggaaaacctgttgacacttacattttcgcactgtatgatgagaatctaaagcctggaccatcttcagaacgggctttcgggcttttcaaaactgatctttccatggtctatgatgttggccttgccaagagtagcagcagtagtcagacaccatcaggaaaagtgacatcgtcggggtggtgtgtaccaaagaagggtgcaacgaatgaggagttacaagcgagcttggattgggcgtgcggacatggaatagactgtggtgcgatacaaccaggaggggcttgtttcgagccgaacaatgtggtctctcacgcagcatatgccatgaatatgtattttcagaaatctcctaagcagcctacagactgcgatttctctaaaaccgcaacagtcacttcccaaaaccctagtaagatttctctccccgttactttcacaccctaccaatag

SEQ ID NO: 105988 - protein, 455 aa, Arabidopsis thaliana
  peptide (1)..(455): Ceres Seq. ID no. 13618506
  misc_feature (28)..(347): Pfam Name: Glycosyl hydrolases family 17 Pfam Description: Glycosyl hydrolases family 17
  misc_feature (5)..(454): Homolog of NCBI NO: 15226720 NR Description: glycosyl hydrolase family 17 [Arabidopsis
  misc_feature (3)..(355): Homolog of NCBI NO: 30690053 NR Description: glycosyl hydrolase family 17 [Arabidopsis
  misc_feature (24)..(355): Homolog of NCBI NO: 7447982 NR Description: hypothetical protein T4L20.60 - Arabidopsis (fragment) >gi|3641838|emb|CAA18827.1| putative protein
  misc_feature (8)..(443): Homolog of NCBI NO: 14279169 NR Description: beta-1,3-glucanase-like protein [Olea europaea]
  misc_feature (3)..(443): Homolog of NCBI NO: 31126737 NR Description: putative beta 1,3-glucanase [Oryza sativa
  misc_feature (3)..(377): Homolog of NCBI NO: 22327528 NR Description: glycosyl hydrolase family 17 [Arabidopsis
  misc_feature (3)..(385): Homolog of NCBI NO: 10177275 NR Description: beta-1,3-glucanase-like protein [Arabidopsis
  misc_feature (24)..(414): Homolog of NCBI NO: 34902328 NR Description: Putative glycosyl hydrolase [Oryza sativa
  misc_feature (20)..(443): Homolog of NCBI NO: 1706551 NR Description: GLUCAN ENDO-1,3-BETA-GLUCOSIDASE PRECURSOR
  misc_feature (5)..(443): Homolog of NCBI NO: 11279328 NR Description: glucan endo-1,3-beta-D-glucosidase (EC 3.2.1.39)
PSMALSISIYFLLIFLSHFPSSHAEPFIGVNYGQVADNLPPPSETVKLLQSTSIQKVRLYGADPAIIKALAGTGVGIVIGAANGDVPSLASDPNAATQWINSNVLPFYPASKIMLITVGNEILMSNDPNLVNQLLPAMQNVQKALEAVSLGGKIKVSTVNSMTVLGSSDPPSSGSFAAGYQTGLKGILQFLSDTGSPFAINPYPFFAYQSDPRPETLAFCLFEPNAGRVDSKTGIKYTNMFDAQVDAVHSALKSMGFEKVEIVVAETGWASRGDANEVGASVDNAKAYNGNLIAHLRSMVGTPLMPGKPVDTYIFALYDENLKPGPSSERAFGLFKTDLSMVYDVGLAKSSSSSQTPSGKVTSSGWCVPKKGATNEELQASLDWACGHGIDCGAIQPGGACFEPNNVVSHAAYAMNMYFQKSPKQPTDCDFSKTATVTSQNPSKISLPVTFTPYQ

SEQ ID NO: 105989 - protein, 453 aa, Arabidopsis thaliana
  peptide (1)..(453): Ceres Seq. ID no. 13618507
  misc_feature (26)..(345): Pfam Name: Glycosyl hydrolases family 17 Pfam Description: Glycosyl hydrolases family 17
  misc_feature (3)..(452): Homolog of NCBI NO: 15226720 NR Description: glycosyl hydrolase family 17 [Arabidopsis
  misc_feature (1)..(353): Homolog of NCBI NO: 30690053 NR Description: glycosyl hydrolase family 17 [Arabidopsis
  misc_feature (22)..(353): Homolog of NCBI NO: 7447982 NR Description: hypothetical protein T4L20.60 - Arabidopsis (fragment) >gi|3641838|emb|CAA18827.1| putative protein
  misc_feature (6)..(441): Homolog of NCBI NO: 14279169 NR Description: beta-1,3-glucanase-like protein [Olea europaea]
  misc_feature (1)..(441): Homolog of NCBI NO: 31126737 NR Description: putative beta 1,3-glucanase [Oryza sativa
  misc_feature (1)..(375): Homolog of NCBI NO: 22327528 NR Description: glycosyl hydrolase family 17 [Arabidopsis
  misc_feature (1)..(383): Homolog of NCBI NO: 10177275 NR Description: beta-1,3-glucanase-like protein [Arabidopsis
  misc_feature (22)..(412): Homolog of NCBI NO: 34902328 NR Description: Putative glycosyl hydrolase [Oryza sativa
  misc_feature (18)..(441): Homolog of NCBI NO: 1706551 NR Description: GLUCAN ENDO-1,3-BETA-GLUCOSIDASE PRECURSOR
  misc_feature (3)..(441): Homolog of NCBI NO: 11279328 NR Description: glucan endo-1,3-beta-D-glucosidase (EC 3.2.1.39)
MALSISIYFLLIFLSHFPSSHAEPFIGVNYGQVADNLPPPSETVKLLQSTSIQKVRLYGADPAIIKALAGTGVGIVIGAANGDVPSLASDPNAATQWINSNVLPFYPASKIMLITVGNEILMSNDPNLVNQLLPAMQNVQKALEAVSLGGKIKVSTVNSMTVLGSSDPPSSGSFAAGYQTGLKGILQFLSDTGSPFAINPYPFFAYQSDPRPETLAFCLFEPNAGRVDSKTGIKYTNMFDAQVDAVHSALKSMGFEKVEIVVAETGWASRGDANEVGASVDNAKAYNGNLIAHLRSMVGTPLMPGKPVDTYIFALYDENLKPGPSSERAFGLFKTDLSMVYDVGLAKSSSSSQTPSGKVTSSGWCVPKKGATNEELQASLDWACGHGIDCGAIQPGGACFEPNNVVSHAAYAMNMYFQKSPKQPTDCDFSKTATVTSQNPSKISLPVTFTPYQ

SEQ ID NO: 105990 - protein, 342 aa, Arabidopsis thaliana
  peptide (1)..(342): Ceres Seq. ID no. 13618508
  misc_feature (1)..(234): Pfam Name: Glycosyl hydrolases family 17 Pfam Description: Glycosyl hydrolases family 17
  misc_feature (1)..(341): Homolog of NCBI NO: 15226720 NR Description: glycosyl hydrolase family 17 [Arabidopsis
  misc_feature (1)..(242): Homolog of NCBI NO: 30690053 NR Description: glycosyl hydrolase family 17 [Arabidopsis
  misc_feature (1)..(242): Homolog of NCBI NO: 7447982 NR Description: hypothetical protein T4L20.60 - Arabidopsis (fragment) >gi|3641838|emb|CAA18827.1| putative protein
  misc_feature (1)..(330): Homolog of NCBI NO: 14279169 NR Description: beta-1,3-glucanase-like protein [Olea europaea]
  misc_feature (1)..(330): Homolog of NCBI NO: 31126737 NR Description: putative beta 1,3-glucanase [Oryza sativa
  misc_feature (1)..(264): Homolog of NCBI NO: 22327528 NR Description: glycosyl hydrolase family 17 [Arabidopsis
  misc_feature (1)..(272): Homolog of NCBI NO: 10177275 NR Description: beta-1,3-glucanase-like protein [Arabidopsis
  misc_feature (1)..(301): Homolog of NCBI NO: 34902328 NR Description: Putative glycosyl hydrolase [Oryza sativa
  misc_feature (1)..(330): Homolog of NCBI NO: 1706551 NR Description: GLUCAN ENDO-1,3-BETA-GLUCOSIDASE PRECURSOR
  misc_feature (1)..(330): Homolog of NCBI NO: 11279328 NR Description: glucan endo-1,3-beta-D-glucosidase (EC 3.2.1.39)
MLITVGNEILMSNDPNLVNQLLPAMQNVQKALEAVSLGGKIKVSTVNSMTVLGSSDPPSSGSFAAGYQTGLKGILQFLSDTGSPFAINPYPFFAYQSDPRPETLAFCLFEPNAGRVDSKTGIKYTNMFDAQVDAVHSALKSMGFEKVEIVVAETGWASRGDANEVGASVDNAKAYNGNLIAHLRSMVGTPLMPGKPVDTYIFALYDENLKPGPSSERAFGLFKTDLSMVYDVGLAKSSSSSQTPSGKVTSSGWCVPKKGATNEELQASLDWACGHGIDCGAIQPGGACFEPNNVVSHAAYAMNMYFQKSPKQPTDCDFSKTATVTSQNPSKISLPVTFTPYQ

SEQ ID NO: 105991 - DNA, 1693 bp, Arabidopsis thaliana
  misc_feature (1)..(1693): Ceres Seq. ID no. 13618509
  misc_feature: MA Experiment ID: 108434 Result: Up-regulated in Transcription
  misc_feature: MA Experiment 108434 PARAMETER Experiment Name: At_Root_Tips_cDNA_P Parameter: Tissue Value: Root Tips
  misc_feature: MA Experiment ID: 108461 Result: Up-regulated in Transcription
  misc_feature: MA Experiment 108461 PARAMETER Experiment Name: At_Germinating_Seeds_cDNA_P Parameter: Age (day) Value: 1 vs. 0
  misc_feature: MA Experiment 108461 PARAMETER Experiment Name: At_Germinating_Seeds_cDNA_P Parameter: Tissue Value: Germinating Seeds
  misc_feature: MA Experiment ID: 108462 Result: Up-regulated in Transcription
  misc_feature: MA Experiment 108462 PARAMETER Experiment Name: At_Germinating_Seeds_cDNA_P Parameter: Age (day) Value: 2 vs. 0
  misc_feature: MA Experiment 108462 PARAMETER Experiment Name: At_Germinating_Seeds_cDNA_P Parameter: Tissue Value: Germinating Seeds
  misc_feature: MA Experiment ID: 20000087 Result: Down-regulated in Transcription
  misc_feature: MA Experiment 20000087 PARAMETER Experiment Name: At_100uM_ABA_Mutants_cDNA_P Parameter: Plant Line Value: WS
  misc_feature: MA Experiment 20000087 PARAMETER Experiment Name: At_100uM_ABA_Mutants_cDNA_P Parameter: Timepoint (hr) Value: 6
  misc_feature: MA Experiment 20000087 PARAMETER Experiment Name: At_100uM_ABA_Mutants_cDNA_P Parameter: Tissue Value: Aerial
  misc_feature: MA Experiment 20000087 PARAMETER Experiment Name: At_100uM_ABA_Mutants_cDNA_P Parameter: Treatment Value: 100uM ABA vs. No Treatment
  misc_feature: MA Experiment ID: 20000173 Result: Down-regulated in Transcription
  misc_feature: MA Experiment 20000173 PARAMETER Experiment Name: At_42deg_Heat_P Parameter: Age (day) Value: 14
  misc_feature: MA Experiment 20000173 PARAMETER Experiment Name: At_42deg_Heat_P Parameter: Organism Value: A. thaliana
  misc_feature: MA Experiment 20000173 PARAMETER Experiment Name: At_42deg_Heat_P Parameter: Plant Line Value: WS
  misc_feature: MA Experiment 20000173 PARAMETER Experiment Name: At_42deg_Heat_P Parameter: Temperature (deg C) Value: 42 vs. 22
  misc_feature: MA Experiment 20000173 PARAMETER Experiment Name: At_42deg_Heat_P Parameter: Timepoint (hr) Value: 6
  misc_feature: MA Experiment 20000173 PARAMETER Experiment Name: At_42deg_Heat_P Parameter: Tissue Value: Aerial
  misc_feature: MA Experiment ID: 20000179 Result: Up-regulated in Transcription
  misc_feature: MA Experiment 20000179 PARAMETER Experiment Name: At_Germinating_Seeds_P Parameter: Age (hr) Value: 6 vs. 0
  misc_feature: MA Experiment 20000179 PARAMETER Experiment Name: At_Germinating_Seeds_P Parameter: Tissue Value: Germinating Seeds
  misc_feature: MA Experiment ID: 20000180 Result: Up-regulated in Transcription
  misc_feature: MA Experiment 20000180 PARAMETER Experiment Name: At_Germinating_Seeds_P Parameter: Age (hr) Value: 24 vs. 0
  misc_feature: MA Experiment 20000180 PARAMETER Experiment Name: At_Germinating_Seeds_P Parameter: Tissue Value: Germinating Seeds
  misc_feature: MA Experiment ID: 20001911 Result: Down-regulated in Transcription
  misc_feature: MA Experiment 20001911 PARAMETER Experiment Name: At_Drought_Reproduction_P Parameter: Age (day) Value: 40
  misc_feature: MA Experiment 20001911 PARAMETER Experiment Name: At_Drought_Reproduction_P Parameter: Organism Value: A. thaliana
  misc_feature: MA Experiment 20001911 PARAMETER Experiment Name: At_Drought_Reproduction_P Parameter: Plant Line Value: WS
  misc_feature: MA Experiment 20001911 PARAMETER Experiment Name: At_Drought_Reproduction_P Parameter: Timepoint (day) Value: 10
  misc_feature: MA Experiment 20001911 PARAMETER Experiment Name: At_Drought_Reproduction_P Parameter: Tissue Value: Flowers
  misc_feature: MA Experiment 20001911 PARAMETER Experiment Name: At_Drought_Reproduction_P Parameter: Treatment Value: Drought vs. No Drought
aaaaaagaaagaaaaaaaattcagaagcctttgttttcatcgatgaataaattaacaaacaaaactaaaaaataggatattcgctggccgaatcgcgtcgatccacatcgcaggtgagggttcctgcaatttatccctcgtggtctctgaatctcagatcgtcgtcaacgaatcctccattttctgaatcaaaattttctggaaacaatggggagcttggggacgatgctgagatatccggatgacatatatccgctcctgaagatgaaacgagcgattgagaaagcggagaagcagatccctcctgagccacactggggtttctgctattcgatgctccacaaggtttctcgaagcttttctctcgttattcagcaactcaacaccgagctccgtaacgccgtgtgtgtgttctacttggttctccgagctcttgatactgttgaggatgatactagcataccaactgatgaaaaggttcccatcctgatagcttttcaccggcacatatacgatactgattggcattattcatgtggtacgaaggagtacaagattctaatggaccaatttcaccatgtttctgcagcttttttggaacttgaaaaagggtatcaagaggctatcgaggaaattactagaagaatgggtgcagggatggccaagtttatctgccaagaggtagaaactgttgatgactacgatgaatactgccactatgttgctgggcttgttggtttaggtttgtcgaaactcttcctcgctgcaggatcagaggttttgacaccagattgggaggcgatttccaattcaatgggtttatttctgcagaaaacaaacattatcagagattatcttgaggacattaatgagataccaaaatcccgcatgttttggcctcgcgagatttggggcaaatatgctgacaagcttgaggatttaaaatacgaggagaacacaaacaaatccgtacagtgcttaaatgaaatggttaccaatgcgttgatgcatattgaagattgcctgaaatacatggtttccttgcgtgatccttccatatttcggttctgtgccatccctcagatcatggcgattggaacacttgcattatgctataacaatgaacaagtattcagaggcgttgtgaaactgaggcgaggtcttactgctaaagtcattgatcgtacaaagacaatggctgatgtctatggtgctttctatgatttttcctgcatgctgaagacaaaggttgacaagaacgatccaaatgccagtaagacactaaaccgacttgaagccgttcagaaactctgcagagacgctggagttcttcaaaacagaaaatcttatgttaatgacaaaggacaaccaaacagtgtctttattataatggttgtgattctactggccatagtctttgcatatctcagagcaaactgagtgatccatgtaagcgagtctgattgtatcaccatcattcaagatgttcagagcaaatttgagtgatgaagtaatctaggttgattcttattcacgccactgaatcctaagcaagattgtttccagaacaaacagagtttaagcatggtttagtctaaaaccatggattctattttagttactaccttcgttatctaaacgtgcatttgttcatctatttttattccttgtgtttaaagttctttctttgttt

SEQ ID NO: 105992 - protein, 410 aa, Arabidopsis thaliana; identical to SEQ ID NO: 21105
  peptide (1)..(410): Ceres Seq. ID no. 13618510
  misc_feature (44)..(333): Pfam Name: Squalene/phytoene synthase Pfam Description: Squalene/phytoene synthase
  misc_feature (1)..(410): Homolog of NCBI NO: 15236168 NR Description: farnesyl-diphosphate farnesyltransferase
  misc_feature (1)..(410): Homolog of NCBI NO: 11258828 NR Description: farnesyl-diphosphate farnesyltransferase (EC

SEQ ID NO: 105993 - protein, 404 aa, Arabidopsis thaliana; identical to SEQ ID NO: 21106
  peptide (1)..(404): Ceres Seq. ID no. 13618511
  misc_feature (38)..(327): Pfam Name: Squalene/phytoene synthase Pfam Description: Squalene/phytoene synthase
  misc_feature (1)..(404): Homolog of NCBI NO: 15236168 NR Description: farnesyl-diphosphate farnesyltransferase
  misc_feature (1)..(404): Homolog of NCBI NO: 11258828 NR Description: farnesyl-diphosphate farnesyltransferase (EC

SEQ ID NO: 105994 - protein, 391 aa, Arabidopsis thaliana; identical to SEQ ID NO: 21107
  peptide (1)..(391): Ceres Seq. ID no. 13618512
  misc_feature (25)..(314): Pfam Name: Squalene/phytoene synthase Pfam Description: Squalene/phytoene synthase
  misc_feature (1)..(391): Homolog of NCBI NO: 15236168 NR Description: farnesyl-diphosphate farnesyltransferase
  misc_feature (1)..(391): Homolog of NCBI NO: 11258828 NR Description: farnesyl-diphosphate farnesyltransferase (EC

SEQ ID NO: 105995 - DNA, 1494 bp, Arabidopsis thaliana
  misc_feature (1)..(1494): Ceres Seq. ID no. 13618517
  misc_feature: MA Experiment ID: 20000070 Result: Down-regulated in Transcription
  misc_feature: MA Experiment 20000070 PARAMETER Experiment Name: At_100uM_ABA_Mutants_cDNA_P Parameter: Plant Line Value: CS24
  misc_feature: MA Experiment 20000070 PARAMETER Experiment Name: At_100uM_ABA_Mutants_cDNA_P Parameter: Timepoint (hr) Value: 6
  misc_feature: MA Experiment 20000070 PARAMETER Experiment Name: At_100uM_ABA_Mutants_cDNA_P Parameter: Tissue Value: Aerial
  misc_feature: MA Experiment 20000070 PARAMETER Experiment Name: At_100uM_ABA_Mutants_cDNA_P Parameter: Treatment Value: 100uM ABA vs. No Treatment
  misc_feature: MA Experiment ID: 20000184 Result: Up-regulated in Transcription
  misc_feature: MA Experiment 20000184 PARAMETER Experiment Name: At_Shoots__P Parameter: Age (day) Value: 7
  misc_feature: MA Experiment 20000184 PARAMETER Experiment Name: At_Shoots__P Parameter: Tissue Value: Shoots vs. Whole Plant
  misc_feature: MA Experiment ID: 20000185 Result: Up-regulated in Transcription
  misc_feature: MA Experiment 20000185 PARAMETER Experiment Name: At_Roots__P Parameter: Age (day) Value: 7 vs. 21
  misc_feature: MA Experiment 20000185 PARAMETER Experiment Name: At_Roots__P Parameter: Organism Value: A. thaliana
  misc_feature: MA Experiment 20000185 PARAMETER Experiment Name: At_Roots__P Parameter: Tissue Value: Roots vs. Whole Plant
  misc_feature: MA Experiment ID: 20000227 Result: Up-regulated in Transcription
  misc_feature: MA Experiment 20000227 PARAMETER Experiment Name: At_Root-Tips-vs-Tops_P Parameter: Tissue Value: Root Tips vs. Root Tops
  misc_feature: MA Experiment ID: 20000234 Result: Up-regulated in Transcription
  misc_feature: MA Experiment 20000234 PARAMETER Experiment Name: At_Siliques_P Parameter: Age (day) Value: 21
  misc_feature: MA Experiment 20000234 PARAMETER Experiment Name: At_Siliques_P Parameter: Organism Value: A. thaliana
  misc_feature: MA Experiment 20000234 PARAMETER Experiment Name: At_Siliques_P Parameter: Plant Line Value: WS
  misc_feature: MA Experiment 20000234 PARAMETER Experiment Name: At_Siliques_P Parameter: Tissue Value: Less Than 5mm Siliques vs. Whole Plant
  misc_feature: MA Experiment ID: 20000264 Result: Up-regulated in Transcription
  misc_feature: MA Experiment 20000264 PARAMETER Experiment Name: At_Open_Flower_P Parameter: Age (day) Value: 21
  misc_feature: MA Experiment 20000264 PARAMETER Experiment Name: At_Open_Flower_P Parameter: Plant Line Value: WS
  misc_feature: MA Experiment 20000264 PARAMETER Experiment Name: At_Open_Flower_P Parameter: Tissue Value: Open Flower vs. Whole Plant
  misc_feature: MA Experiment ID: 20000265 Result: Up-regulated in Transcription
  misc_feature: MA Experiment 20000265 PARAMETER Experiment Name: At_Open_Flower_P Parameter: Age (day) Value: 21
  misc_feature: MA Experiment 20000265 PARAMETER Experiment Name: At_Open_Flower_P Parameter: Plant Line Value: WS
  misc_feature: MA Experiment 20000265 PARAMETER Experiment Name: At_Open_Flower_P Parameter: Tissue Value: Closed Flower vs. Whole Plant
  misc_feature: MA Experiment ID: 20000286 Result: Up-regulated in Transcription
  misc_feature: MA Experiment 20000286 PARAMETER Experiment Name: At_Open_Flower_P Parameter: Age (day) Value: 21
  misc_feature: MA Experiment 20000286 PARAMETER Experiment Name: At_Open_Flower_P Parameter: Plant Line Value: WS
  misc_feature: MA Experiment 20000286 PARAMETER Experiment Name: At_Open_Flower_P Parameter: Tissue Value: Half Open vs. Whole Plant
  misc_feature: MA Experiment ID: 20000439 Result: Up-regulated in Transcription
  misc_feature: MA Experiment 20000439 PARAMETER Experiment Name: At_Roots__P Parameter: Age (day) Value: 14 vs. 21
  misc_feature: MA Experiment 20000439 PARAMETER Experiment Name: At_Roots__P Parameter: Organism Value: A. thaliana
  misc_feature: MA Experiment 20000439 PARAMETER Experiment Name: At_Roots__P Parameter: Tissue Value: Roots vs. Whole Plant
  misc_feature: MA Experiment ID: 20000441 Result: Down-regulated in Transcription
  misc_feature: MA Experiment 20000441 PARAMETER Experiment Name: At_1uM_BR-BRZ__P Parameter: Tissue Value: Shoot Apices
  misc_feature: MA Experiment 20000441 PARAMETER Experiment Name: At_1uM_BR-BRZ__P Parameter: Treatment Value: 1uM BR vs. No Treatment
  misc_feature: MA Experiment ID: 20000527 Result: Down-regulated in Transcription
  misc_feature: MA Experiment 20000527 PARAMETER Experiment Name: At_10percent_PEG_P Parameter: Age (day) Value: 20
  misc_feature: MA Experiment 20000527 PARAMETER Experiment Name: At_10percent_PEG_P Parameter: Organism Value: A. thaliana
  misc_feature: MA Experiment 20000527 PARAMETER Experiment Name: At_10percent_PEG_P Parameter: Plant Line Value: WS
  misc_feature: MA Experiment 20000527 PARAMETER Experiment Name: At_10percent_PEG_P Parameter: Timepoint (day) Value: 20
  misc_feature: MA Experiment 20000527 PARAMETER Experiment Name: At_10percent_PEG_P Parameter: Tissue Value: Whole Plant
  misc_feature: MA Experiment 20000527 PARAMETER Experiment Name: At_10percent_PEG_P Parameter: Treatment Value: 10percent PEG vs. No Treatment
  misc_feature: MA Experiment ID: 20001451 Result: Down-regulated in Transcription
  misc_feature: MA Experiment 20001451 PARAMETER Experiment Name: At_Far-red-induction_P Parameter: Age (day) Value: 7
  misc_feature: MA Experiment 20001451 PARAMETER Experiment Name: At_Far-red-induction_P Parameter: Light Value: Far-red vs. White
  misc_feature: MA Experiment 20001451 PARAMETER Experiment Name: At_Far-red-induction_P Parameter: Organism Value: A. thaliana
  misc_feature: MA Experiment 20001451 PARAMETER Experiment Name: At_Far-red-induction_P Parameter: Plant Line Value: Columbia
  misc_feature: MA Experiment 20001451 PARAMETER Experiment Name: At_Far-red-induction_P Parameter: Timepoint (hr) Value: 24
  misc_feature: MA Experiment 20001451 PARAMETER Experiment Name: At_Far-red-induction_P Parameter: Tissue Value: Whole Plant
  misc_feature: MA Experiment ID: 20001558 Result: Up-regulated in Transcription
  misc_feature: MA Experiment 20001558 PARAMETER Experiment Name: At_Drought_Soil_Dry_P Parameter: Age (day) Value: 27
  misc_feature: MA Experiment 20001558 PARAMETER Experiment Name: At_Drought_Soil_Dry_P Parameter: Organism Value: A. thaliana
  misc_feature: MA Experiment 20001558 PARAMETER Experiment Name: At_Drought_Soil_Dry_P Parameter: Plant Line Value: WS
  misc_feature: MA Experiment 20001558 PARAMETER Experiment Name: At_Drought_Soil_Dry_P Parameter: Post Timepoint (hr) Value: 6
  misc_feature: MA Experiment 20001558 PARAMETER Experiment Name: At_Drought_Soil_Dry_P Parameter: Post-Treatment Value: Re-Water vs. No Drought
  misc_feature: MA Experiment 20001558 PARAMETER Experiment Name: At_Drought_Soil_Dry_P Parameter: Timepoint (day) Value: 13
  misc_feature: MA Experiment 20001558 PARAMETER Experiment Name: At_Drought_Soil_Dry_P Parameter: Treatment Value: Drought vs. No Drought
  misc_feature: MA Experiment ID: 20001560 Result: Up-regulated in Transcription
  misc_feature: MA Experiment 20001560 PARAMETER Experiment Name: At_Drought_Soil_Dry_P Parameter: Age (day) Value: 28
  misc_feature: MA Experiment 20001560 PARAMETER Experiment Name: At_Drought_Soil_Dry_P Parameter: Organism Value: A. thaliana
  misc_feature: MA Experiment 20001560 PARAMETER Experiment Name: At_Drought_Soil_Dry_P Parameter: Plant Line Value: WS
  misc_feature: MA Experiment 20001560 PARAMETER Experiment Name: At_Drought_Soil_Dry_P Parameter: Post Timepoint (hr) Value: None
  misc_feature: MA Experiment 20001560 PARAMETER Experiment Name: At_Drought_Soil_Dry_P Parameter: Post-Treatment Value: None
  misc_feature: MA Experiment 20001560 PARAMETER Experiment Name: At_Drought_Soil_Dry_P Parameter: Timepoint (day) Value: 14
  misc_feature: MA Experiment 20001560 PARAMETER Experiment Name: At_Drought_Soil_Dry_P Parameter: Treatment Value: Drought vs. No Drought
gttgatcaacaattaaacacaaaaacccttaagttgacgtggctgtatctcttccaactcttaaaaatcaattactattatacccctcagaaaaatggcagagcgtgtgtctctcacactcaacggaaccctcctttctcctcctcccacaacaacaacaacaacaatgtcttcttctctccgatctaccaccgccgcttctcttctcctccgctcctcctcctcctcctccagatccactctcactctctccgcttcctcctctctctccttcgtcagatctctcgtctcttctccacgtctctcttcttcttcatccctctctcagaagaaatatcgaattgcgtcggtgaatcggagtttcaactccaccaccgccgctactaaatcttcatcttcagatcctgatcagttgaagaacgctagagaagatatcaaagagcttctcagcaccaaattctgccatccgattttggttagattaggttggcatgatgctggtacgtataacaagaacattaaggaatggccacaaagaggtggagctaatggaagtttgagattcgatattgagcttaaacatgctgctaacgctggtcttgtgaatgctttaaacttgattaaggatatcaaagagaaatactctgggatcagttatgctgatttgttccagttagctagtgctactgctatagaggaagctggaggaccgaaaataccgatgaaatatggtagagttgatgcctctggtcctgaggattgtccagaagaaggaaggcttccagatgctggtcctccttcacctgctactcatctcagagaagttttttacagaatgggattagatgacaaggacatagttgcattatctggtgctcacacgttaggaagatctaggccagaacgtagtggttgggggaagcctgagacgaagtacacgaaagaaggacctggagcaccaggaggacagtcatggacaccagagtggctgaagtttgataattcttacttcaaggagatcaaggaaaagagagatgaagatctccttgtcctacccactgatgctgccatcttcgaagattcttctttcaaggtctatgctgaaaagtatgctgcagatcaggatgcatttttcaaggattacgctgtagcccatgcgaagctcagcaatcttggagcagaatttaaccctccggagggtatcgttatctaatgggggcacataatttactcaaccagacttatgattttagagaaacgtagttcaataatgaaagagaagaaaaagttgacggagaacttttcatgcgagtacttttcgagataccttttggacaatgtttctggctgttcaaaggattttgtttagccgaaagtatttgatcgttttcatggttttgggctttcatgttttttcttgtaataaattgcggaagtgattattcaaaatctatacaaattttgtctgggattgaattattttatcgatgttat

SEQ ID NO: 105996 - protein, 372 aa, Arabidopsis thaliana; identical to SEQ ID NO: 35940
  peptide (1)..(372): Ceres Seq. ID no. 13618518
  misc_feature (110)..(342): Pfam Name: Peroxidase Pfam Description: Peroxidase
  misc_feature (1)..(372): Homolog of NCBI NO: 15236483 NR Description: stromal ascorbate peroxidase, putative (sAPX)
  misc_feature (1)..(372): Homolog of NCBI NO: 1419388 NR Description: stromal ascorbate peroxidase [Arabidopsis
  misc_feature (20)..(372): Homolog of NCBI NO: 2146725 NR Description: L-ascorbate peroxidase (EC 1.11.1.11) precursor -
  misc_feature (25)..(372): Homolog of NCBI NO: 1369920 NR Description: stromal ascorbate peroxidase [Spinacia oleracea]
  misc_feature (25)..(372): Homolog of NCBI NO: 1944507 NR Description: thylakoid-bound ascorbate peroxidase [Spinacia
  misc_feature (25)..(372): Homolog of NCBI NO: 2832920 NR Description: thylakoid-bound ascorbate peroxidase [Spinacia
  misc_feature (25)..(372): Homolog of NCBI NO: 2832921 NR Description: stromal ascorbate peroxidase [Spinacia oleracea]
  misc_feature (14)..(372): Homolog of NCBI NO: 7484621 NR Description: L-ascorbate peroxidase (EC 1.11.1.11) precursor -
  misc_feature (12)..(372): Homolog of NCBI NO: 4996602 NR Description: thylakoid-bound ascorbate peroxidase [Nicotiana
  misc_feature (12)..(372): Homolog of NCBI NO: 4996604 NR Description: stromal ascorbate peroxidase [Nicotiana tabacum]

SEQ ID NO: 105997 - protein, 348 aa, Arabidopsis thaliana; identical to SEQ ID NO: 35941
  peptide (1)..(348): Ceres Seq. ID no. 13618519
  misc_feature (86)..(318): Pfam Name: Peroxidase Pfam Description: Peroxidase
  misc_feature (1)..(348): Homolog of NCBI NO: 15236483 NR Description: stromal ascorbate peroxidase, putative (sAPX)
  misc_feature (1)..(348): Homolog of NCBI NO: 1419388 NR Description: stromal ascorbate peroxidase [Arabidopsis
  misc_feature (1)..(348): Homolog of NCBI NO: 2146725 NR Description: L-ascorbate peroxidase (EC 1.11.1.11) precursor -
  misc_feature (1)..(348): Homolog of NCBI NO: 1369920 NR Description: stromal ascorbate peroxidase [Spinacia oleracea]
  misc_feature (1)..(348): Homolog of NCBI NO: 1944507 NR Description: thylakoid-bound ascorbate peroxidase [Spinacia
  misc_feature (1)..(348): Homolog of NCBI NO: 2832920 NR Description: thylakoid-bound ascorbate peroxidase [Spinacia
  misc_feature (1)..(348): Homolog of NCBI NO: 2832921 NR Description: stromal ascorbate peroxidase [Spinacia oleracea]
  misc_feature (1)..(348): Homolog of NCBI NO: 7484621 NR Description: L-ascorbate peroxidase (EC 1.11.1.11) precursor -
  misc_feature (1)..(348): Homolog of NCBI NO: 4996602 NR Description: thylakoid-bound ascorbate peroxidase [Nicotiana
  misc_feature (1)..(348): Homolog of NCBI NO: 4996604 NR Description: stromal ascorbate peroxidase [Nicotiana tabacum]

SEQ ID NO: 105998 - DNA, 1401 bp, Arabidopsis thaliana
  misc_feature (1)..(1401): Ceres Seq. ID no. 13618520
  misc_feature: MA Experiment ID: 108576 Result: Up-regulated in Transcription
  misc_feature: MA Experiment 108576 PARAMETER Experiment Name: At_42deg_Heat_cDNA_P Parameter: Temperature (deg C) Value: 42 vs. 22
  misc_feature: MA Experiment 108576 PARAMETER Experiment Name: At_42deg_Heat_cDNA_P Parameter: Timepoint (hr) Value: 1
  misc_feature: MA Experiment 108576 PARAMETER Experiment Name: At_42deg_Heat_cDNA_P Parameter: Tissue Value: Aerial
  misc_feature: MA Experiment ID: 20000173 Result: Down-regulated in Transcription
  misc_feature: MA Experiment 20000173 PARAMETER Experiment Name: At_42deg_Heat_P Parameter: Age (day) Value: 14
  misc_feature: MA Experiment 20000173 PARAMETER Experiment Name: At_42deg_Heat_P Parameter: Organism Value: A. thaliana
  misc_feature: MA Experiment 20000173 PARAMETER Experiment Name: At_42deg_Heat_P Parameter: Plant Line Value: WS
  misc_feature: MA Experiment 20000173 PARAMETER Experiment Name: At_42deg_Heat_P Parameter: Temperature (deg C) Value: 42 vs. 22
  misc_feature: MA Experiment 20000173 PARAMETER Experiment Name: At_42deg_Heat_P Parameter: Timepoint (hr) Value: 6
  misc_feature: MA Experiment 20000173 PARAMETER Experiment Name: At_42deg_Heat_P Parameter: Tissue Value: Aerial
  misc_feature: MA Experiment ID: 20001557 Result: Down-regulated in Transcription
  misc_feature: MA Experiment 20001557 PARAMETER Experiment Name: At_Drought_Soil_Dry_P Parameter: Age (day) Value: 27
  misc_feature: MA Experiment 20001557 PARAMETER Experiment Name: At_Drought_Soil_Dry_P Parameter: Organism Value: A. thaliana
  misc_feature: MA Experiment 20001557 PARAMETER Experiment Name: At_Drought_Soil_Dry_P Parameter: Plant Line Value: WS
  misc_feature: MA Experiment 20001557 PARAMETER Experiment Name: At_Drought_Soil_Dry_P Parameter: Post Timepoint (hr) Value: 3
  misc_feature: MA Experiment 20001557 PARAMETER Experiment Name: At_Drought_Soil_Dry_P Parameter: Post-Treatment Value: Re-Water vs. No Drought
  misc_feature: MA Experiment 20001557 PARAMETER Experiment Name: At_Drought_Soil_Dry_P Parameter: Timepoint (day) Value: 13
  misc_feature: MA Experiment 20001557 PARAMETER Experiment Name: At_Drought_Soil_Dry_P Parameter: Treatment Value: Drought vs. No Drought
aaattaaatcacaaataggttctgttttttgtgggaagatatgagattttcttcaagcaaaaagggagttatgagatgattggtcgtcctcgccggagaaaagatacgagacttgtctctcaatcctgaagcagactcgattcatccatcagtcaacaaatcttccttcacaatggatgaagaagaagcaatgttactgctaaaggaagaagatgaaggaacaagaagaactagtgttcctacacaactcatgaaactaaaacgaacccattggtggattcttgtctttataagtatcttcttcctcatctctgcacaagccattgctgttcttcttggtcggttttattacaacgaaggtggaaacagtaaatggatctctactcttgtccaaacttgtggttttccgattctctatctccctctttgtttccttcctgcttcacactcttcttcatcttcttgttctttcaagactctggtttggatttatctttctcttggttttgctattggtttagacaatcttttatactcttttggtcttttgtatctctctgcttcaacttattcgattctttgttcttcacagttagctttcaatggtgtcttctcttattacatcaattctcagaaaatcacttgtttgattctcttctctgtgttgtttctctctgtctctgctgtgttggtttctcttgacgatgattccaatagcccatcaggagattctaagtggagttacttgattggttgtttatgtactgtttttgcttctcttatctattctcttcagctctctcttatgcagttttctttcgagaatgttctcaagagtgagacgttctctatggttctcgagatgcaaatctatacgtcgcttgtggcttcttgtgttgcggttatcgggttgtttgcgagcggggaatggatgttgttgagtgtggagatggaagagtttcacgagggtcaagtcatttatgttttgactttggttgggaccgcggtttcgtggcaattgggttctgtaggagccgtggcgcttatatttctggtttcttcgctgttttcgaaccttattggtacactctcactcattgttacgcctcttgcagccattgcggtgttccacgacaagctgactgaggttaagatggtcgcgatgctcattgccttcatggggttcgggttttatatctaccagaattatcttgatgacctgaaagtacaaagagcacgagaagctcaggctgaatagttctgctgtgttttattagttaattttgttagtaacctttcttagaacaagctagctacaagtgttgtattgtatatagtagagttcataatccggtgataatatacataatactaattgcatatggagcttgtttttacggg

SEQ ID NO: 105999 - protein, 361 aa, Arabidopsis thaliana; identical to SEQ ID NO: 24738
  peptide (1)..(361): Ceres Seq. ID no. 13618521
  misc_feature (177)..(359): Pfam Name: Domain of unknown function, DUF250 Pfam Description: Domain of unknown function, DUF250
  misc_feature (1)..(361): Homolog of NCBI NO: 18413147 NR Description: purine permease family [Arabidopsis thaliana] unknown protein [Arabidopsis thaliana]
  misc_feature (7)..(361): Homolog of NCBI NO: 25407443 NR Description: hypothetical protein AT4g08700 [imported] - thaliana >gi|7267512|emb|CAB77995.1| putative protein thaliana] >gi|7321059|emb|CAB82106.1| putative protein
  misc_feature (7)..(361): Homolog of NCBI NO: 15237573 NR Description: purine permease-related [Arabidopsis thaliana]
  misc_feature (8)..(360): Homolog of NCBI NO: 15219436 NR Description: purine permease family [Arabidopsis thaliana]
  misc_feature (1)..(355): Homolog of NCBI NO: 38605752 NR Description: OSJNBb0016D16.5 [Oryza sativa (japonica
  misc_feature (1)..(355): Homolog of NCBI NO: 38344290 NR Description: OSJNBa0013K16.22 [Oryza sativa (japonica
  misc_feature (13)..(357): Homolog of NCBI NO: 30684325 NR Description: purine permease family [Arabidopsis thaliana]
  misc_feature (46)..(357): Homolog of NCBI NO: 15236799 NR Description: purine permease family [Arabidopsis thaliana]
  misc_feature (59)..(357): Homolog of NCBI NO: 7487849 NR Description: hypothetical protein T9A21.60 - Arabidopsis >gi|2832695|emb|CAA16793.1| putative protein [Arabidopsis >gi|7268614|emb|CAB78823.1| putative protein [Arabidopsis
  misc_feature (21)..(351): Homolog of NCBI NO: 38605752 NR Description: OSJNBb0016D16.5 [Oryza sativa (japonica

SEQ ID NO: 106000 - protein, 355 aa, Arabidopsis thaliana; identical to SEQ ID NO: 24739
  peptide (1)..(355): Ceres Seq. ID no. 13618522
  misc_feature (171)..(353): Pfam Name: Domain of unknown function, DUF250 Pfam Description: Domain of unknown function, DUF250
  misc_feature (1)..(355): Homolog of NCBI NO: 18413147 NR Description: purine permease family [Arabidopsis thaliana] unknown protein [Arabidopsis thaliana]
  misc_feature (1)..(355): Homolog of NCBI NO: 25407443 NR Description: hypothetical protein AT4g08700 [imported] - thaliana >gi|7267512|emb|CAB77995.1| putative protein thaliana] >gi|7321059|emb|CAB82106.1| putative protein
  misc_feature (1)..(355): Homolog of NCBI NO: 15237573 NR Description: purine permease-related [Arabidopsis thaliana]
  misc_feature (2)..(354): Homolog of NCBI NO: 15219436 NR Description: purine permease family [Arabidopsis thaliana]
  misc_feature (1)..(349): Homolog of NCBI NO: 38605752 NR Description: OSJNBb0016D16.5 [Oryza sativa (japonica
  misc_feature (1)..(349): Homolog of NCBI NO: 38344290 NR Description: OSJNBa0013K16.22 [Oryza sativa (japonica
  misc_feature (7)..(351): Homolog of NCBI NO: 30684325 NR Description: purine permease family [Arabidopsis thaliana]
  misc_feature (40)..(351): Homolog of NCBI NO: 15236799 NR Description: purine permease family [Arabidopsis thaliana]
  misc_feature (53)..(351): Homolog of NCBI NO: 7487849 NR Description: hypothetical protein T9A21.60 - Arabidopsis >gi|2832695|emb|CAA16793.1| putative protein [Arabidopsis >gi|7268614|emb|CAB78823.1| putative protein [Arabidopsis
  misc_feature (15)..(345): Homolog of NCBI NO: 38605752 NR Description: OSJNBb0016D16.5 [Oryza sativa (japonica

SEQ ID NO: 106001 - protein, 335 aa, Arabidopsis thaliana; identical to SEQ ID NO: 24740
  peptide (1)..(335): Ceres Seq. ID no. 13618523
  misc_feature (151)..(333): Pfam Name: Domain of unknown function, DUF250 Pfam Description: Domain of unknown function, DUF250
  misc_feature (1)..(335): Homolog of NCBI NO: 18413147 NR Description: purine permease family [Arabidopsis thaliana] unknown protein [Arabidopsis thaliana]
  misc_feature (1)..(335): Homolog of NCBI NO: 25407443 NR Description: hypothetical protein AT4g08700 [imported] - thaliana >gi|7267512|emb|CAB77995.1| putative protein thaliana] >gi|7321059|emb|CAB82106.1| putative protein
  misc_feature (1)..(335): Homolog of NCBI NO: 15237573 NR Description: purine permease-related [Arabidopsis thaliana]
  misc_feature (1)..(334): Homolog of NCBI NO: 15219436 NR Description: purine permease family [Arabidopsis thaliana]
  misc_feature (1)..(329): Homolog of NCBI NO: 38605752 NR Description: OSJNBb0016D16.5 [Oryza sativa (japonica
  misc_feature (1)..(329): Homolog of NCBI NO: 38344290 NR Description: OSJNBa0013K16.22 [Oryza sativa (japonica
  misc_feature (1)..(331): Homolog of NCBI NO: 30684325 NR Description: purine permease family [Arabidopsis thaliana]
  misc_feature (20)..(331): Homolog of NCBI NO: 15236799 NR Description: purine permease family [Arabidopsis thaliana]
  misc_feature (33)..(331): Homolog of NCBI NO: 7487849 NR Description: hypothetical protein T9A21.60 - Arabidopsis >gi|2832695|emb|CAA16793.1| putative protein [Arabidopsis >gi|7268614|emb|CAB78823.1| putative protein [Arabidopsis
  misc_feature (1)..(325): Homolog of NCBI NO: 38605752 NR Description: OSJNBb0016D16.5 [Oryza sativa (japonica

SEQ ID NO: 106002 - DNA, 930 bp, Arabidopsis thaliana
  misc_feature (1)..(930): Ceres Seq. ID no. 13618530
  misc_feature: MA Experiment ID: 108585 Result: Up-regulated in Transcription
  misc_feature: MA Experiment 108585 PARAMETER Experiment Name: At_5mM_NaNP_cDNA_P Parameter: Timepoint (hr) Value: 6
  misc_feature: MA Experiment 108585 PARAMETER Experiment Name: At_5mM_NaNP_cDNA_P Parameter: Tissue Value: Aerial
  misc_feature: MA Experiment 108585 PARAMETER Experiment Name: At_5mM_NaNP_cDNA_P Parameter: Treatment Value: null
  misc_feature: MA Experiment ID: 108594 Result: Down-regulated in Transcription
  misc_feature: MA Experiment 108594 PARAMETER Experiment Name: At_Ler-rhl_Root_cDNA_P Parameter: Plant Line Value: null
  misc_feature: MA Experiment ID: 108595 Result: Up-regulated in Transcription
  misc_feature: MA Experiment 108595 PARAMETER Experiment Name: At_Ler-pi_Ovule_cDNA_P Parameter: Plant Line Value: null
  misc_feature: MA Experiment ID: 108667 Result: Up-regulated in Transcription
  misc_feature: MA Experiment 108667 PARAMETER Experiment Name: At_2mM_SA_cDNA_P Parameter: Plant Line Value: WS
  misc_feature: MA Experiment 108667 PARAMETER Experiment Name: At_2mM_SA_cDNA_P Parameter: Timepoint (hr) Value: 1
  misc_feature: MA Experiment 108667 PARAMETER Experiment Name: At_2mM_SA_cDNA_P Parameter: Treatment Value: 2mM SA vs. No Treatment
  misc_feature: MA Experiment ID: 108668 Result: Up-regulated in Transcription
  misc_feature: MA Experiment 108668 PARAMETER Experiment Name: At_2mM_SA_cDNA_P Parameter: Plant Line Value: WS
  misc_feature: MA Experiment 108668 PARAMETER Experiment Name: At_2mM_SA_cDNA_P Parameter: Timepoint (hr) Value: 6
  misc_feature: MA Experiment 108668 PARAMETER Experiment Name: At_2mM_SA_cDNA_P Parameter: Treatment Value: 2mM SA vs. No Treatment
  misc_feature: MA Experiment ID: 20000112 Result: Up-regulated in Transcription
  misc_feature: MA Experiment 20000112 PARAMETER Experiment Name: At_42deg_Heat_cDNA_P Parameter: Temperature (deg C) Value: 42 vs. 22
  misc_feature: MA Experiment 20000112 PARAMETER Experiment Name: At_42deg_Heat_cDNA_P Parameter: Timepoint (hr) Value: 2
  misc_feature: MA Experiment 20000112 PARAMETER Experiment Name: At_42deg_Heat_cDNA_P Parameter: Tissue Value: Aerial
  misc_feature: MA Experiment ID: 20000227 Result: Down-regulated in Transcription
  misc_feature: MA Experiment 20000227 PARAMETER Experiment Name: At_Root-Tips-vs-Tops_P Parameter: Tissue Value: Root Tips vs. Root Tops
  misc_feature: MA Experiment ID: 20000439 Result: Up-regulated in Transcription
  misc_feature: MA Experiment 20000439 PARAMETER Experiment Name: At_Roots__P Parameter: Age (day) Value: 14 vs. 21
  misc_feature: MA Experiment 20000439 PARAMETER Experiment Name: At_Roots__P Parameter: Organism Value: A. thaliana
  misc_feature: MA Experiment 20000439 PARAMETER Experiment Name: At_Roots__P Parameter: Tissue Value: Roots vs. Whole Plant
  misc_feature: MA Experiment ID: 20000527 Result: Down-regulated in Transcription
  misc_feature: MA Experiment 20000527 PARAMETER Experiment Name: At_10percent_PEG_P Parameter: Age (day) Value: 20
  misc_feature: MA Experiment 20000527 PARAMETER Experiment Name: At_10percent_PEG_P Parameter: Organism Value: A. thaliana
  misc_feature: MA Experiment 20000527 PARAMETER Experiment Name: At_10percent_PEG_P Parameter: Plant Line Value: WS
  misc_feature: MA Experiment 20000527 PARAMETER Experiment Name: At_10percent_PEG_P Parameter: Timepoint (day) Value: 20
  misc_feature: MA Experiment 20000527 PARAMETER Experiment Name: At_10percent_PEG_P Parameter: Tissue Value: Whole Plant
  misc_feature: MA Experiment 20000527 PARAMETER Experiment Name: At_10percent_PEG_P Parameter: Treatment Value: 10percent PEG vs. No Treatment
  misc_feature: MA Experiment ID: 20000709 Result: Up-regulated in Transcription
  misc_feature: MA Experiment 20000709 PARAMETER Experiment Name: At_15mM_NH4NO3_L-to-H_P Parameter: Age (hr) Value: 14
  misc_feature: MA Experiment 20000709 PARAMETER Experiment Name: At_15mM_NH4NO3_L-to-H_P Parameter: Organism Value: A. thaliana
  misc_feature: MA Experiment 20000709 PARAMETER Experiment Name: At_15mM_NH4NO3_L-to-H_P Parameter: Plant Line Value: WS
  misc_feature: MA Experiment 20000709 PARAMETER Experiment Name: At_15mM_NH4NO3_L-to-H_P Parameter: Timepoint (hr) Value: 4
  misc_feature: MA Experiment 20000709 PARAMETER Experiment Name: At_15mM_NH4NO3_L-to-H_P Parameter: Tissue Value: Aerial
  misc_feature: MA Experiment 20000709 PARAMETER Experiment Name: At_15mM_NH4NO3_L-to-H_P Parameter: Treatment Value: 15mM NH4NO3 vs. 30mM Mannitol
  misc_feature: MA Experiment ID: 20001247 Result: Down-regulated in Transcription
  misc_feature: MA Experiment 20001247 PARAMETER Experiment Name: At_Far-red-induction_P Parameter: Age (day) Value: 7
  misc_feature: MA Experiment 20001247 PARAMETER Experiment Name: At_Far-red-induction_P Parameter: Light Value: Far-red vs. White
  misc_feature: MA Experiment 20001247 PARAMETER Experiment Name: At_Far-red-induction_P Parameter: Organism Value: A. thaliana
  misc_feature: MA Experiment 20001247 PARAMETER Experiment Name: At_Far-red-induction_P Parameter: Plant Line Value: Columbia
  misc_feature: MA Experiment 20001247 PARAMETER Experiment Name: At_Far-red-induction_P Parameter: Timepoint (hr) Value: 1
  misc_feature: MA Experiment 20001247 PARAMETER Experiment Name: At_Far-red-induction_P Parameter: Tissue Value: Whole Plant
  misc_feature: MA Experiment ID: 20001450 Result: Down-regulated in Transcription
  misc_feature: MA Experiment 20001450 PARAMETER Experiment Name: At_Far-red-induction_P Parameter: Age (day) Value: 7
  misc_feature: MA Experiment 20001450 PARAMETER Experiment Name: At_Far-red-induction_P Parameter: Light Value: Far-red vs. White
  misc_feature: MA Experiment 20001450 PARAMETER Experiment Name: At_Far-red-induction_P Parameter: Organism Value: A. thaliana
  misc_feature: MA Experiment 20001450 PARAMETER Experiment Name: At_Far-red-induction_P Parameter: Plant Line Value: Columbia
  misc_feature: MA Experiment 20001450 PARAMETER Experiment Name: At_Far-red-induction_P Parameter: Timepoint (hr) Value: 8
  misc_feature: MA Experiment 20001450 PARAMETER Experiment Name: At_Far-red-induction_P Parameter: Tissue Value: Whole Plant
  misc_feature: MA Experiment ID: 20001560 Result: Up-regulated in Transcription
  misc_feature: MA Experiment 20001560 PARAMETER Experiment Name: At_Drought_Soil_Dry_P Parameter: Age (day) Value: 28
  misc_feature: MA Experiment 20001560 PARAMETER Experiment Name: At_Drought_Soil_Dry_P Parameter: Organism Value: A. thaliana
  misc_feature: MA Experiment 20001560 PARAMETER Experiment Name: At_Drought_Soil_Dry_P Parameter: Plant Line Value: WS
  misc_feature: MA Experiment 20001560 PARAMETER Experiment Name: At_Drought_Soil_Dry_P Parameter: Post Timepoint (hr) Value: None
  misc_feature: MA Experiment 20001560 PARAMETER Experiment Name: At_Drought_Soil_Dry_P Parameter: Post-Treatment Value: None
  misc_feature: MA Experiment 20001560 PARAMETER Experiment Name: At_Drought_Soil_Dry_P Parameter: Timepoint (day) Value: 14
  misc_feature: MA Experiment 20001560 PARAMETER Experiment Name: At_Drought_Soil_Dry_P Parameter: Treatment Value: Drought vs. No Drought
ttttatttgaaagacatttttgcctatttcattcatattttgcttttaaaacgagaattataattcttcgactccgtgggataagttttctaaaaaatcgaagaaagatcgatggctctagatatctgcgtgaaggttgccgtcggtgctcctgatgttctcggcgactgtccgtttagccaacgtgttcttctgacacttgaggagaagaagcttccctacaagacccatctgattaacgtctccgacaaaccccaatggttcttagacattagtccagaggggaaagttccggtggtgaagcttgatggcaaatgggtggctgattctgacgtaattgttggacttcttgaagagaaatatccagagccttctctcaagactcctcctgaatttgcttctgtaggatccaaaatctttggtgcttttgtgactttcttgaagagcaaagacgctaatgacggatccgagaaggctttggttgatgagttagaagcgttggagaatcacttgaagacacattctggtccttttgtagctggagagaagattactgcagtggatttgagtttagcaccaaagctttaccatcttgaggttgctcttggtcattacaagaactggtctgtccctgagagcttgaccagtgttcgtaactacgccaaggctttgttctctagggagtcgtttgagaacaccaaggctaagaaagagattgtggttgcgggttgggaatcgaaggtgaatgcgtgatgtggatccatgcttctctagttaatgttgctttagaactattcttcactgaataataagaatgcacgagtatgtgtgtgttcttgtttttgttagagttggttatcaataatgatgcgataaagcagcatatctttttttgataatatacacctcttattcaatttggtattacag

SEQ ID NO: 106003 - protein, 213 aa, Arabidopsis thaliana; identical to SEQ ID NO: 23177
  peptide (1)..(213): Ceres Seq. ID no. 13618531
  misc_feature (20)..(82): Pfam Name: Glutathione S-transferase, N-terminal domain Pfam Description: Glutathione S-transferase, N-terminal domain
  misc_feature (1)..(213): Homolog of NCBI NO: 15222163 NR Description: dehydroascorbate reductase, putative [Arabidopsis
  misc_feature (1)..(213): Homolog of NCBI NO: 21593056 NR Description: GSH-dependent dehydroascorbate reductase 1,
  misc_feature (1)..(212): Homolog of NCBI NO: 15223576 NR Description: dehydroascorbate reductase, putative [Arabidopsis
  misc_feature (1)..(212): Homolog of NCBI NO: 28192427 NR Description: dehydroascorbate reductase [Nicotiana tabacum]
  misc_feature (1)..(210): Homolog of NCBI NO: 25402899 NR Description: protein F18O14.33 [imported] - Arabidopsis >gi|8778432|gb|AAF79440.1|AC025808_22 F18O14.33 [Arabidopsis
  misc_feature (1)..(212): Homolog of NCBI NO: 15239354 NR Description: dehydroascorbate reductase, putative [Arabidopsis
  misc_feature (4)..(212): Homolog of NCBI NO: 28192421 NR Description: dehydroascorbate reductase [Triticum aestivum]
  misc_feature (1)..(213): Homolog of NCBI NO: 28192425 NR Description: dehydroascorbate reductase [Oryza sativa]
  misc_feature (1)..(213): Homolog of NCBI NO: 6939839 NR Description: GSH-dependent dehydroascorbate reductase 1 [Oryza
  misc_feature (3)..(211): Homolog of NCBI NO: 10952514 NR Description: dehydroascorbate reductase [Arabidopsis thaliana] glutathione dependent dehydroascorbate reductase precursor

SEQ ID NO: 106004 - DNA, 818 bp, Arabidopsis thaliana
  misc_feature (1)..(818): Ceres Seq. ID no. 13618553
  misc_feature: MA Experiment ID: 108433 Result: Up-regulated in Transcription
  misc_feature: MA Experiment 108433 PARAMETER Experiment Name: At_rhl_Mutant2_cDNA_P Parameter: Age (day) Value: 7
  misc_feature: MA Experiment 108433 PARAMETER Experiment Name: At_rhl_Mutant2_cDNA_P Parameter: Organism Value: A. thaliana
  misc_feature: MA Experiment 108433 PARAMETER Experiment Name: At_rhl_Mutant2_cDNA_P Parameter: Plant Line Value: rhl Mutant vs. wt landsburg
  misc_feature: MA Experiment 108433 PARAMETER Experiment Name: At_rhl_Mutant2_cDNA_P Parameter: Tissue Value: Roots
  misc_feature: MA Experiment ID: 108462 Result: Up-regulated in Transcription
  misc_feature: MA Experiment 108462 PARAMETER Experiment Name: At_Germinating_Seeds_cDNA_P Parameter: Age (day) Value: 2 vs. 0
  misc_feature: MA Experiment 108462 PARAMETER Experiment Name: At_Germinating_Seeds_cDNA_P Parameter: Tissue Value: Germinating Seeds
  misc_feature: MA Experiment ID: 108464 Result: Up-regulated in Transcription
  misc_feature: MA Experiment 108464 PARAMETER Experiment Name: At_Germinating_Seeds_cDNA_P Parameter: Age (day) Value: 4 vs. 0
  misc_feature: MA Experiment 108464 PARAMETER Experiment Name: At_Germinating_Seeds_cDNA_P Parameter: Tissue Value: Germinating Seeds
  misc_feature: MA Experiment ID: 20000436 Result: Up-regulated in Transcription
  misc_feature: MA Experiment 20000436 PARAMETER Experiment Name: At_Drought_P Parameter: Age (day) Value: 7
  misc_feature: MA Experiment 20000436 PARAMETER Experiment Name: At_Drought_P Parameter: Organism Value: A. thaliana
  misc_feature: MA Experiment 20000436 PARAMETER Experiment Name: At_Drought_P Parameter: Plant Line Value: WS
  misc_feature: MA Experiment 20000436 PARAMETER Experiment Name: At_Drought_P Parameter: Timepoint (hr) Value: 12
  misc_feature: MA Experiment 20000436 PARAMETER Experiment Name: At_Drought_P Parameter: Tissue Value: Whole Plant
  misc_feature: MA Experiment 20000436 PARAMETER Experiment Name: At_Drought_P Parameter: Treatment Value: Drought vs. No Drought
  misc_feature: MA Experiment ID: 20000437 Result: Up-regulated in Transcription
  misc_feature: MA Experiment 20000437 PARAMETER Experiment Name: At_Drought_P Parameter: Age (day) Value: 8
  misc_feature: MA Experiment 20000437 PARAMETER Experiment Name: At_Drought_P Parameter: Organism Value: A. thaliana
  misc_feature: MA Experiment 20000437 PARAMETER Experiment Name: At_Drought_P Parameter: Plant Line Value: WS
  misc_feature: MA Experiment 20000437 PARAMETER Experiment Name: At_Drought_P Parameter: Timepoint (hr) Value: 24
  misc_feature: MA Experiment 20000437 PARAMETER Experiment Name: At_Drought_P Parameter: Tissue Value: Whole Plant
  misc_feature: MA Experiment 20000437 PARAMETER Experiment Name: At_Drought_P Parameter: Treatment Value: Drought vs. No Drought
  misc_feature: MA Experiment ID: 20001450 Result: Up-regulated in Transcription
  misc_feature: MA Experiment 20001450 PARAMETER Experiment Name: At_Far-red-induction_P Parameter: Age (day) Value: 7
  misc_feature: MA Experiment 20001450 PARAMETER Experiment Name: At_Far-red-induction_P Parameter: Light Value: Far-red vs. White
  misc_feature: MA Experiment 20001450 PARAMETER Experiment Name: At_Far-red-induction_P Parameter: Organism Value: A. thaliana
  misc_feature: MA Experiment 20001450 PARAMETER Experiment Name: At_Far-red-induction_P Parameter: Plant Line Value: Columbia
  misc_feature: MA Experiment 20001450 PARAMETER Experiment Name: At_Far-red-induction_P Parameter: Timepoint (hr) Value: 8
  misc_feature: MA Experiment 20001450 PARAMETER Experiment Name: At_Far-red-induction_P Parameter: Tissue Value: Whole Plant
  misc_feature: MA Experiment ID: 20001557 Result: Down-regulated in Transcription
  misc_feature: MA Experiment 20001557 PARAMETER Experiment Name: At_Drought_Soil_Dry_P Parameter: Age (day) Value: 27
  misc_feature: MA Experiment 20001557 PARAMETER Experiment Name: At_Drought_Soil_Dry_P Parameter: Organism Value: A. thaliana
  misc_feature: MA Experiment 20001557 PARAMETER Experiment Name: At_Drought_Soil_Dry_P Parameter: Plant Line Value: WS
  misc_feature: MA Experiment 20001557 PARAMETER Experiment Name: At_Drought_Soil_Dry_P Parameter: Post Timepoint (hr) Value: 3
  misc_feature: MA Experiment 20001557 PARAMETER Experiment Name: At_Drought_Soil_Dry_P Parameter: Post-Treatment Value: Re-Water vs. No Drought
  misc_feature: MA Experiment 20001557 PARAMETER Experiment Name: At_Drought_Soil_Dry_P Parameter: Timepoint (day) Value: 13
  misc_feature: MA Experiment 20001557 PARAMETER Experiment Name: At_Drought_Soil_Dry_P Parameter: Treatment Value: Drought vs. No Drought
  misc_feature: MA Experiment ID: 20001558 Result: Down-regulated in Transcription
  misc_feature: MA Experiment 20001558 PARAMETER Experiment Name: At_Drought_Soil_Dry_P Parameter: Age (day) Value: 27
  misc_feature: MA Experiment 20001558 PARAMETER Experiment Name: At_Drought_Soil_Dry_P Parameter: Organism Value: A. thaliana
  misc_feature: MA Experiment 20001558 PARAMETER Experiment Name: At_Drought_Soil_Dry_P Parameter: Plant Line Value: WS
  misc_feature: MA Experiment 20001558 PARAMETER Experiment Name: At_Drought_Soil_Dry_P Parameter: Post Timepoint (hr) Value: 6
  misc_feature: MA Experiment 20001558 PARAMETER Experiment Name: At_Drought_Soil_Dry_P Parameter: Post-Treatment Value: Re-Water vs. No Drought
  misc_feature: MA Experiment 20001558 PARAMETER Experiment Name: At_Drought_Soil_Dry_P Parameter: Timepoint (day) Value: 13
  misc_feature: MA Experiment 20001558 PARAMETER Experiment Name: At_Drought_Soil_Dry_P Parameter: Treatment Value: Drought vs. No Drought
  misc_feature: MA Experiment ID: 20001560 Result: Down-regulated in Transcription
  misc_feature: MA Experiment 20001560 PARAMETER Experiment Name: At_Drought_Soil_Dry_P Parameter: Age (day) Value: 28
  misc_feature: MA Experiment 20001560 PARAMETER Experiment Name: At_Drought_Soil_Dry_P Parameter: Organism Value: A. thaliana
  misc_feature: MA Experiment 20001560 PARAMETER Experiment Name: At_Drought_Soil_Dry_P Parameter: Plant Line Value: WS
  misc_feature: MA Experiment 20001560 PARAMETER Experiment Name: At_Drought_Soil_Dry_P Parameter: Post Timepoint (hr) Value: None
  misc_feature: MA Experiment 20001560 PARAMETER Experiment Name: At_Drought_Soil_Dry_P Parameter: Post-Treatment Value: None
  misc_feature: MA Experiment 20001560 PARAMETER Experiment Name: At_Drought_Soil_Dry_P Parameter: Timepoint (day) Value: 14
  misc_feature: MA Experiment 20001560 PARAMETER Experiment Name: At_Drought_Soil_Dry_P Parameter: Treatment Value: Drought vs. No Drought
gaaaaagtgtgagtcagagaataatgattcgagcggttctcctgttccttgtcttcgtcgttgagacgagagtacaagcgcagctagtgccgccggtgaggcaagatggtttcgtttacccaccgggtcatcgtttcgacccggatactatactaattgaggcgtattttgacccggtttgcccggacagtagagactcttggccgccactgaagcaagctcttcatcactatggatctcgcgttgcccttctcctccatctccttcctttaccctaccatgacaatgcctatgtaacatcacgggccttacacattgtgaataccgtacacgccaatgctaccttcagtttgctggaagggttcttcaagcatcagtcattgttttacaacgcgcaaacacaactcctttcaagacctgcagttgtggagaaaatagtcgaacttggaacagtctcgttggggaactcatatcaatcggttcttaaatccggcttcagcgacaaaaaatcggatcgtgcaaccagagtttccttcaagtatagcgcttcaagaggggtttatggtacaccaaccttctacgttaacgggtttgtattgtctgatgctgcttccccttcaaattttggaggatggaagaaaatcattgatcctctggttcaagcacatgagatggaagataacttcattcccttcctttgaagattttaagtgcttttgctgtgtcaattgtcatggtataatactatctgtaatgtatagactttctcaaaacctgtatgttgctcattgtaaatttgtaataaaggaaagtgatcc

SEQ ID NO: 106005 - protein, 232 aa, Arabidopsis thaliana
  peptide (1)..(232): Ceres Seq. ID no. 13618554
  misc_feature (8)..(232): Homolog of NCBI NO: 15222928 NR Description: expressed protein [Arabidopsis thaliana]
  misc_feature (8)..(196): Homolog of NCBI NO: 8778813 NR Description: T4O12.23 [Arabidopsis thaliana]
  misc_feature (7)..(232): Homolog of NCBI NO: 22329686 NR Description: expressed protein [Arabidopsis thaliana] Unknown protein [Arabidopsis thaliana]
  misc_feature (8)..(218): Homolog of NCBI NO: 25518088 NR Description: T20H2.2 protein - Arabidopsis thaliana Contains similarity to pigpen protein from Mus musculus and contains protein of unknown function DUF78 PF|01918 domain.
  misc_feature (10)..(219): Homolog of NCBI NO: 38346025 NR Description: OSJNBb0071D01.2 [Oryza sativa (japonica
  misc_feature (18)..(179): Homolog of NCBI NO: 32526672 NR Description: unknown protein [Oryza sativa (japonica
KSVSQRIMIRAVLLFLVFVVETRVQAQLVPPVRQDGFVYPPGHRFDPDTILIEAYFDPVCPDSRDSWPPLKQALHHYGSRVALLLHLLPLPYHDNAYVTSRALHIVNTVHANATFSLLEGFFKHQSLFYNAQTQLLSRPAVVEKIVELGTVSLGNSYQSVLKSGFSDKKSDRATRVSFKYSASRGVYGTPTFYVNGFVLSDAASPSNFGGWKKIIDPLVQAHEMEDNFIPFL

SEQ ID NO: 106006 - protein, 225 aa, Arabidopsis thaliana
  peptide (1)..(225): Ceres Seq. ID no. 13618555
  misc_feature (1)..(225): Homolog of NCBI NO: 15222928 NR Description: expressed protein [Arabidopsis thaliana]
  misc_feature (1)..(189): Homolog of NCBI NO: 8778813 NR Description: T4O12.23 [Arabidopsis thaliana]
  misc_feature (1)..(225): Homolog of NCBI NO: 22329686 NR Description: expressed protein [Arabidopsis thaliana] Unknown protein [Arabidopsis thaliana]
  misc_feature (1)..(211): Homolog of NCBI NO: 25518088 NR Description: T20H2.2 protein - Arabidopsis thaliana Contains similarity to pigpen protein from Mus musculus and contains protein of unknown function DUF78 PF|01918 domain.
  misc_feature (3)..(212): Homolog of NCBI NO: 38346025 NR Description: OSJNBb0071D01.2 [Oryza sativa (japonica
  misc_feature (11)..(172): Homolog of NCBI NO: 32526672 NR Description: unknown protein [Oryza sativa (japonica
MIRAVLLFLVFVVETRVQAQLVPPVRQDGFVYPPGHRFDPDTILIEAYFDPVCPDSRDSWPPLKQALHHYGSRVALLLHLLPLPYHDNAYVTSRALHIVNTVHANATFSLLEGFFKHQSLFYNAQTQLLSRPAVVEKIVELGTVSLGNSYQSVLKSGFSDKKSDRATRVSFKYSASRGVYGTPTFYVNGFVLSDAASPSNFGGWKKIIDPLVQAHEMEDNFIPFL

SEQ ID NO: 106007 - DNA, 1112 bp, Arabidopsis thaliana
  misc_feature (1)..(1112): Ceres Seq. ID no. 13618564
  misc_feature: MA Experiment ID: 108434 Result: Down-regulated in Transcription
  misc_feature: MA Experiment 108434 PARAMETER Experiment Name: At_Root_Tips_cDNA_P Parameter: Tissue Value: Root Tips
  misc_feature: MA Experiment ID: 108435 Result: Down-regulated in Transcription
  misc_feature: MA Experiment 108435 PARAMETER Experiment Name: At_stm_Mutants_cDNA_P Parameter: Plant Line Value: wt Landsburg vs stm
  misc_feature: MA Experiment 108435 PARAMETER Experiment Name: At_stm_Mutants_cDNA_P Parameter: Tissue Value: Shoot Apical Meristem Region
  misc_feature: MA Experiment ID: 108461 Result: Up-regulated in Transcription
  misc_feature: MA Experiment 108461 PARAMETER Experiment Name: At_Germinating_Seeds_cDNA_P Parameter: Age (day) Value: 1 vs. 0
  misc_feature: MA Experiment 108461 PARAMETER Experiment Name: At_Germinating_Seeds_cDNA_P Parameter: Tissue Value: Germinating Seeds
  misc_feature: MA Experiment ID: 108462 Result: Up-regulated in Transcription
  misc_feature: MA Experiment 108462 PARAMETER Experiment Name: At_Germinating_Seeds_cDNA_P Parameter: Age (day) Value: 2 vs. 0
  misc_feature: MA Experiment 108462 PARAMETER Experiment Name: At_Germinating_Seeds_cDNA_P Parameter: Tissue Value: Germinating Seeds
  misc_feature: MA Experiment ID: 108463 Result: Up-regulated in Transcription
  misc_feature: MA Experiment 108463 PARAMETER Experiment Name: At_Germinating_Seeds_cDNA_P Parameter: Age (day) Value: 3 vs. 0
  misc_feature: MA Experiment 108463 PARAMETER Experiment Name: At_Germinating_Seeds_cDNA_P Parameter: Tissue Value: Germinating Seeds
  misc_feature: MA Experiment ID: 108464 Result: Up-regulated in Transcription
  misc_feature: MA Experiment 108464 PARAMETER Experiment Name: At_Germinating_Seeds_cDNA_P Parameter: Age (day) Value: 4 vs. 0
  misc_feature: MA Experiment 108464 PARAMETER Experiment Name: At_Germinating_Seeds_cDNA_P Parameter: Tissue Value: Germinating Seeds
  misc_feature: MA Experiment ID: 108576 Result: Up-regulated in Transcription
  misc_feature: MA Experiment 108576 PARAMETER Experiment Name: At_42deg_Heat_cDNA_P Parameter: Temperature (deg C) Value: 42 vs. 22
  misc_feature: MA Experiment 108576 PARAMETER Experiment Name: At_42deg_Heat_cDNA_P Parameter: Timepoint (hr) Value: 1
  misc_feature: MA Experiment 108576 PARAMETER Experiment Name: At_42deg_Heat_cDNA_P Parameter: Tissue Value: Aerial
  misc_feature: MA Experiment ID: 108577 Result: Up-regulated in Transcription
  misc_feature: MA Experiment 108577 PARAMETER Experiment Name: At_42deg_Heat_cDNA_P Parameter: Temperature (deg C) Value: 42 vs. 22
  misc_feature: MA Experiment 108577 PARAMETER Experiment Name: At_42deg_Heat_cDNA_P Parameter: Timepoint (hr) Value: 6
  misc_feature: MA Experiment 108577 PARAMETER Experiment Name: At_42deg_Heat_cDNA_P Parameter: Tissue Value: Aerial
  misc_feature: MA Experiment ID: 108579 Result: Up-regulated in Transcription
  misc_feature: MA Experiment 108579 PARAMETER Experiment Name: At_4deg_Cold_cDNA_P Parameter: Temperature (deg C) Value: 4 vs. 22
  misc_feature: MA Experiment 108579 PARAMETER Experiment Name: At_4deg_Cold_cDNA_P Parameter: Timepoint (hr) Value: 6
  misc_feature: MA Experiment 108579 PARAMETER Experiment Name: At_4deg_Cold_cDNA_P Parameter: Tissue Value: Aerial
  misc_feature: MA Experiment ID: 108595 Result: Down-regulated in Transcription
  misc_feature: MA Experiment 108595 PARAMETER Experiment Name: At_Ler-pi_Ovule_cDNA_P Parameter: Plant Line Value: null
  misc_feature: MA Experiment ID: 20000093 Result: Up-regulated in Transcription
  misc_feature: MA Experiment 20000093 PARAMETER Experiment Name: At_42deg_Heat_cDNA_P Parameter: Temperature (deg C) Value: 42 vs. 22
  misc_feature: MA Experiment 20000093 PARAMETER Experiment Name: At_42deg_Heat_cDNA_P Parameter: Timepoint (hr) Value: 0.5
  misc_feature: MA Experiment 20000093 PARAMETER Experiment Name: At_42deg_Heat_cDNA_P Parameter: Tissue Value: Aerial
  misc_feature: MA Experiment ID: 20000111 Result: Up-regulated in Transcription
  misc_feature: MA Experiment 20000111 PARAMETER Experiment Name: At_42deg_Heat_cDNA_P Parameter: Temperature (deg C) Value: 42 vs. 22
  misc_feature: MA Experiment 20000111 PARAMETER Experiment Name: At_42deg_Heat_cDNA_P Parameter: Timepoint (hr) Value: 6
  misc_feature: MA Experiment 20000111 PARAMETER Experiment Name: At_42deg_Heat_cDNA_P Parameter: Tissue Value: Aerial
  misc_feature: MA Experiment ID: 20000112 Result: Up-regulated in Transcription
  misc_feature: MA Experiment 20000112 PARAMETER Experiment Name: At_42deg_Heat_cDNA_P Parameter: Temperature (deg C) Value: 42 vs. 22
  misc_feature: MA Experiment 20000112 PARAMETER Experiment Name: At_42deg_Heat_cDNA_P Parameter: Timepoint (hr) Value: 2
  misc_feature: MA Experiment 20000112 PARAMETER Experiment Name: At_42deg_Heat_cDNA_P Parameter: Tissue Value: Aerial
  misc_feature: MA Experiment ID: 20000113 Result: Up-regulated in Transcription
  misc_feature: MA Experiment 20000113 PARAMETER Experiment Name: At_42deg_Heat_cDNA_P Parameter: Temperature (deg C) Value: 42 vs. 22
  misc_feature: MA Experiment 20000113 PARAMETER Experiment Name: At_42deg_Heat_cDNA_P Parameter: Timepoint (hr) Value: 8
  misc_feature: MA Experiment 20000113 PARAMETER Experiment Name: At_42deg_Heat_cDNA_P Parameter: Tissue Value: Aerial
  misc_feature: MA Experiment ID: 20000173 Result: Up-regulated in Transcription
  misc_feature: MA Experiment 20000173 PARAMETER Experiment Name: At_42deg_Heat_P Parameter: Age (day) Value: 14
  misc_feature: MA Experiment 20000173 PARAMETER Experiment Name: At_42deg_Heat_P Parameter: Organism Value: A. thaliana
  misc_feature: MA Experiment 20000173 PARAMETER Experiment Name: At_42deg_Heat_P Parameter: Plant Line Value: WS
  misc_feature: MA Experiment 20000173 PARAMETER Experiment Name: At_42deg_Heat_P Parameter: Temperature (deg C) Value: 42 vs. 22
  misc_feature: MA Experiment 20000173 PARAMETER Experiment Name: At_42deg_Heat_P Parameter: Timepoint (hr) Value: 6
  misc_feature: MA Experiment 20000173 PARAMETER Experiment Name: At_42deg_Heat_P Parameter: Tissue Value: Aerial
  misc_feature: MA Experiment ID: 20000179 Result: Up-regulated in Transcription
  misc_feature: MA Experiment 20000179 PARAMETER Experiment Name: At_Germinating_Seeds_P Parameter: Age (hr) Value: 6 vs. 0
  misc_feature: MA Experiment 20000179 PARAMETER Experiment Name: At_Germinating_Seeds_P Parameter: Tissue Value: Germinating Seeds
  misc_feature: MA Experiment ID: 20000180 Result: Up-regulated in Transcription
  misc_feature: MA Experiment 20000180 PARAMETER Experiment Name: At_Germinating_Seeds_P Parameter: Age (hr) Value: 24 vs. 0
  misc_feature: MA Experiment 20000180 PARAMETER Experiment Name: At_Germinating_Seeds_P Parameter: Tissue Value: Germinating Seeds
  misc_feature: MA Experiment ID: 20000184 Result: Up-regulated in Transcription
  misc_feature: MA Experiment 20000184 PARAMETER Experiment Name: At_Shoots__P Parameter: Age (day) Value: 7
  misc_feature: MA Experiment 20000184 PARAMETER Experiment Name: At_Shoots__P Parameter: Tissue Value: Shoots vs. Whole Plant
  misc_feature: MA Experiment ID: 20000185 Result: Down-regulated in Transcription
  misc_feature: MA Experiment 20000185 PARAMETER Experiment Name: At_Roots__P Parameter: Age (day) Value: 7 vs. 21
  misc_feature: MA Experiment 20000185 PARAMETER Experiment Name: At_Roots__P Parameter: Organism Value: A. thaliana
  misc_feature: MA Experiment 20000185 PARAMETER Experiment Name: At_Roots__P Parameter: Tissue Value: Roots vs. Whole Plant
  misc_feature: MA Experiment ID: 20000224 Result: Up-regulated in Transcription
  misc_feature: MA Experiment ID: 20000235 Result: Up-regulated in Transcription
  misc_feature: MA Experiment 20000235 PARAMETER Experiment Name: At_Siliques_P Parameter: Age (day) Value: 21
  misc_feature: MA Experiment 20000235 PARAMETER Experiment Name: At_Siliques_P Parameter: Organism Value: A. thaliana
  misc_feature: MA Experiment 20000235 PARAMETER Experiment Name: At_Siliques_P Parameter: Plant Line Value: WS
  misc_feature: MA Experiment 20000235 PARAMETER Experiment Name: At_Siliques_P Parameter: Tissue Value: 5-10mm Siliques vs. Whole Plant
  misc_feature: MA Experiment ID: 20000437 Result: Down-regulated in Transcription
  misc_feature: MA Experiment 20000437 PARAMETER Experiment Name: At_Drought_P Parameter: Age (day) Value: 8
  misc_feature: MA Experiment 20000437 PARAMETER Experiment Name: At_Drought_P Parameter: Organism Value: A. thaliana
  misc_feature: MA Experiment 20000437 PARAMETER Experiment Name: At_Drought_P Parameter: Plant Line Value: WS
  misc_feature: MA Experiment 20000437 PARAMETER Experiment Name: At_Drought_P Parameter: Timepoint (hr) Value: 24
  misc_feature: MA Experiment 20000437 PARAMETER Experiment Name: At_Drought_P Parameter: Tissue Value: Whole Plant
  misc_feature: MA Experiment 20000437 PARAMETER Experiment Name: At_Drought_P Parameter: Treatment Value: Drought vs. No Drought
  misc_feature: MA Experiment ID: 20000438 Result: Up-regulated in Transcription
  misc_feature: MA Experiment 20000438 PARAMETER Experiment Name: At_Shoots__P Parameter: Age (day) Value: 14
  misc_feature: MA Experiment 20000438 PARAMETER Experiment Name: At_Shoots__P Parameter: Tissue Value: Shoots vs. Whole Plant
  misc_feature: MA Experiment ID: 20000439 Result: Down-regulated in Transcription
  misc_feature: MA Experiment 20000439 PARAMETER Experiment Name: At_Roots__P Parameter: Age (day) Value: 14 vs. 21
  misc_feature: MA Experiment 20000439 PARAMETER Experiment Name: At_Roots__P Parameter: Organism Value: A. thaliana
  misc_feature: MA Experiment 20000439 PARAMETER Experiment Name: At_Roots__P Parameter: Tissue Value: Roots vs. Whole Plant
  misc_feature: MA Experiment ID: 20000441 Result: Up-regulated in Transcription
  misc_feature: MA Experiment 20000441 PARAMETER Experiment Name: At_1uM_BR-BRZ__P Parameter: Tissue Value: Shoot Apices
  misc_feature: MA Experiment 20000441 PARAMETER Experiment Name: At_1uM_BR-BRZ__P Parameter: Treatment Value: 1uM BR vs. No Treatment
  misc_feature: MA Experiment ID: 20000443 Result: Up-regulated in Transcription
  misc_feature: MA Experiment 20000443 PARAMETER Experiment Name: At_1uM_BR-BRZ__P Parameter: Tissue Value: Shoot Apices
  misc_feature: MA Experiment 20000443 PARAMETER Experiment Name: At_1uM_BR-BRZ__P Parameter: Treatment Value: 1uM BRZ vs. No Treatment
  misc_feature: MA Experiment ID: 20001248 Result: Down-regulated in Transcription
  misc_feature: MA Experiment 20001248 PARAMETER Experiment Name: At_Far-red-induction_P Parameter: Age (day) Value: 7
  misc_feature: MA Experiment 20001248 PARAMETER Experiment Name: At_Far-red-induction_P Parameter: Light Value: Far-red vs. White
  misc_feature: MA Experiment 20001248 PARAMETER Experiment Name: At_Far-red-induction_P Parameter: Organism Value: A. thaliana
  misc_feature: MA Experiment 20001248 PARAMETER Experiment Name: At_Far-red-induction_P Parameter: Plant Line Value: Columbia
  misc_feature: MA Experiment 20001248 PARAMETER Experiment Name: At_Far-red-induction_P Parameter: Timepoint (hr) Value: 4
  misc_feature: MA Experiment 20001248 PARAMETER Experiment Name: At_Far-red-induction_P Parameter: Tissue Value: Whole Plant
  misc_feature: MA Experiment ID: 20001450 Result: Down-regulated in Transcription
  misc_feature: MA Experiment 20001450 PARAMETER Experiment Name: At_Far-red-induction_P Parameter: Age (day) Value: 7
  misc_feature: MA Experiment 20001450 PARAMETER Experiment Name: At_Far-red-induction_P Parameter: Light Value: Far-red vs. White
  misc_feature: MA Experiment 20001450 PARAMETER Experiment Name: At_Far-red-induction_P Parameter: Organism Value: A. thaliana
  misc_feature: MA Experiment 20001450 PARAMETER Experiment Name: At_Far-red-induction_P Parameter: Plant Line Value: Columbia
  misc_feature: MA Experiment 20001450 PARAMETER Experiment Name: At_Far-red-induction_P Parameter: Timepoint (hr) Value: 8
  misc_feature: MA Experiment 20001450 PARAMETER Experiment Name: At_Far-red-induction_P Parameter: Tissue Value: Whole Plant
  misc_feature: MA Experiment ID: 20001906 Result: Down-regulated in Transcription
  misc_feature: MA Experiment 20001906 PARAMETER Experiment Name: At_Drought_Reproduction_P Parameter: Age (day) Value: 35
  misc_feature: MA Experiment 20001906 PARAMETER Experiment Name: At_Drought_Reproduction_P Parameter: Organism Value: A. thaliana
  misc_feature: MA Experiment 20001906 PARAMETER Experiment Name: At_Drought_Reproduction_P Parameter: Plant Line Value: WS
  misc_feature: MA Experiment 20001906 PARAMETER Experiment Name: At_Drought_Reproduction_P Parameter: Timepoint (day) Value: 5
  misc_feature: MA Experiment 20001906 PARAMETER Experiment Name: At_Drought_Reproduction_P Parameter: Tissue Value: Siliques
  misc_feature: MA Experiment 20001906 PARAMETER Experiment Name: At_Drought_Reproduction_P Parameter: Treatment Value: Drought vs. No Drought
  misc_feature: MA Experiment ID: 20001908 Result: Down-regulated in Transcription
  misc_feature: MA Experiment 20001908 PARAMETER Experiment Name: At_Drought_Reproduction_P Parameter: Age (day) Value: 40
  misc_feature: MA Experiment 20001908 PARAMETER Experiment Name: At_Drought_Reproduction_P Parameter: Organism Value: A. thaliana
  misc_feature: MA Experiment 20001908 PARAMETER Experiment Name: At_Drought_Reproduction_P Parameter: Plant Line Value: WS
  misc_feature: MA Experiment 20001908 PARAMETER Experiment Name: At_Drought_Reproduction_P Parameter: Timepoint (day) Value: 10
  misc_feature: MA Experiment 20001908 PARAMETER Experiment Name: At_Drought_Reproduction_P Parameter: Tissue Value: Siliques
  misc_feature: MA Experiment 20001908 PARAMETER Experiment Name: At_Drought_Reproduction_P Parameter: Treatment Value: Drought vs. No Drought
  misc_feature: MA Experiment ID: 20001911 Result: Down-regulated in Transcription
  misc_feature: MA Experiment 20001911 PARAMETER Experiment Name: At_Drought_Reproduction_P Parameter: Age (day) Value: 40
  misc_feature: MA Experiment 20001911 PARAMETER Experiment Name: At_Drought_Reproduction_P Parameter: Organism Value: A. thaliana
  misc_feature: MA Experiment 20001911 PARAMETER Experiment Name: At_Drought_Reproduction_P Parameter: Plant Line Value: WS
  misc_feature: MA Experiment 20001911 PARAMETER Experiment Name: At_Drought_Reproduction_P Parameter: Timepoint (day) Value: 10
  misc_feature: MA Experiment 20001911 PARAMETER Experiment Name: At_Drought_Reproduction_P Parameter: Tissue Value: Flowers
  misc_feature: MA Experiment 20001911 PARAMETER Experiment Name: At_Drought_Reproduction_P Parameter: Treatment Value: Drought vs. No Drought
attttaaaacatctatccacattaaatcattcactgatctctaaccaatcccacacacactaccacaaacaatggccaccgtcgctaacttcttagccaaaccaatctccaccgtagtcccacggccatcctccgccgttgcttcgacctcctccttcgtattctttaaccataaaactaatcctctgttccggaggaaaaacctcccgaaaagattattctccgccgtgaaaataaaggctggagcggcgtctccgggaaaggtgggtacaccaccggcgaatgacgagaaggtacaaaagattcacagcggagaggaattcgacgtagcgttgaaaaatgcgaagagcaaactcgtggttgcagagtttgctacgagtaagagtgatcagagtaataagatatatccgtttatggtggaactgagcaggacctgtaacgacgtcgttttcttgctcgtcatgggtgatgaatctgacaagaccagagaactctgtcggagagagaagattgagaaagttcctcactttagcttttataagagcatggagaaaatacacgaggaagaaggtattgaaccggaccagttaatgggagacgttctatactacggagacaaccactctgcggtggtgcagctgcacggccgacctgacgtggaaaagctgatcgacgagaatcgcactggaggcaagctgatcgtgcttgacgttggtctaaaacattgtggtccttgcgttaaagtgtatccgaccgtgctgaaactgtcccggtcaatgtccgagacagtcgtattcgctagaatgaacggtgacgagaacgatagttgtatggagtttctcaaggacatgaatgttatcgaagttccaactttcttgttcattagagacggcgagattcgtggccgttatgttggttccggtaaaggagaactcattggagagattcttcggtactcaggcgttcgtgtcacttattaatttgtatcaaaactttaattttattacatctcacttcaaaaaagaatgagtttttggtctttgtctgtaccatccgaaaccggttgatatgaaagaaaaaaaactcaaaatagtgtgattcttgattatttg

SEQ ID NO: 106008 - protein, 302 aa, Arabidopsis thaliana
  peptide (1)..(302): Ceres Seq. ID no. 13618565
  misc_feature (1)..(302): Homolog of NCBI NO: 15222954 NR Description: thioredoxin family [Arabidopsis thaliana]
  misc_feature (1)..(302): Homolog of NCBI NO: 21554102 NR Description: chloroplast drought-induced stress protein,
  misc_feature (1)..(302): Homolog of NCBI NO: 7489278 NR Description: thioredoxin-like protein CDSP32, chloroplast -
  misc_feature (1)..(301): Homolog of NCBI NO: 34901636 NR Description: putative plastid thioredoxin [Oryza sativa
  misc_feature (187)..(298): Homolog of NCBI NO: 21617968 NR Description: thioredoxin [Arabidopsis thaliana]
  misc_feature (200)..(298): Homolog of NCBI NO: 2117426 NR Description: thioredoxin (clone GREN) - Arabidopsis thaliana
  misc_feature (200)..(298): Homolog of NCBI NO: 15223645 NR Description: thioredoxin H-type 4 (TRX-H-4) [Arabidopsis
  misc_feature (185)..(288): Homolog of NCBI NO: 34394553 NR Description: putative thioredoxin [Oryza sativa (japonica
  misc_feature (189)..(301): Homolog of NCBI NO: 40287476 NR Description: thioredoxin [Capsicum annuum]
  misc_feature (182)..(302): Homolog of NCBI NO: 9294492 NR Description: thioredoxin-like protein [Arabidopsis thaliana]
MATVANFLAKPISTVVPRPSSAVASTSSFVFFNHKTNPLFRRKNLPKRLFSAVKIKAGAASPGKVGTPPANDEKVQKIHSGEEFDVALKNAKSKLVVAEFATSKSDQSNKIYPFMVELSRTCNDVVFLLVMGDESDKTRELCRREKIEKVPHFSFYKSMEKIHEEEGIEPDQLMGDVLYYGDNHSAVVQLHGRPDVEKLIDENRTGGKLIVLDVGLKHCGPCVKVYPTVLKLSRSMSETVVFARMNGDENDSCMEFLKDMNVIEVPTFLFIRDGEIRGRYVGSGKGELIGEILRYSGVRVTY

SEQ ID NO: 106009 - protein, 188 aa, Arabidopsis thaliana
  peptide (1)..(188): Ceres Seq. ID no. 13618566
  misc_feature (1)..(188): Homolog of NCBI NO: 15222954 NR Description: thioredoxin family [Arabidopsis thaliana]
  misc_feature (1)..(188): Homolog of NCBI NO: 21554102 NR Description: chloroplast drought-induced stress protein,
  misc_feature (1)..(188): Homolog of NCBI NO: 7489278 NR Description: thioredoxin-like protein CDSP32, chloroplast -
  misc_feature (1)..(187): Homolog of NCBI NO: 34901636 NR Description: putative plastid thioredoxin [Oryza sativa
  misc_feature (73)..(184): Homolog of NCBI NO: 21617968 NR Description: thioredoxin [Arabidopsis thaliana]
  misc_feature (86)..(184): Homolog of NCBI NO: 2117426 NR Description: thioredoxin (clone GREN) - Arabidopsis thaliana
  misc_feature (86)..(184): Homolog of NCBI NO: 15223645 NR Description: thioredoxin H-type 4 (TRX-H-4) [Arabidopsis
  misc_feature (71)..(174): Homolog of NCBI NO: 34394553 NR Description: putative thioredoxin [Oryza sativa (japonica
  misc_feature (75)..(187): Homolog of NCBI NO: 40287476 NR Description: thioredoxin [Capsicum annuum]
  misc_feature (68)..(188): Homolog of NCBI NO: 9294492 NR Description: thioredoxin-like protein [Arabidopsis thaliana]
MVELSRTCNDVVFLLVMGDESDKTRELCRREKIEKVPHFSFYKSMEKIHEEEGIEPDQLMGDVLYYGDNHSAVVQLHGRPDVEKLIDENRTGGKLIVLDVGLKHCGPCVKVYPTVLKLSRSMSETVVFARMNGDENDSCMEFLKDMNVIEVPTFLFIRDGEIRGRYVGSGKGELIGEILRYSGVRVTY

SEQ ID NO: 106010 - protein, 172 aa, Arabidopsis thaliana
  peptide (1)..(172): Ceres Seq. ID no. 13618567
  misc_feature (1)..(172): Homolog of NCBI NO: 15222954 NR Description: thioredoxin family [Arabidopsis thaliana]
  misc_feature (1)..(172): Homolog of NCBI NO: 21554102 NR Description: chloroplast drought-induced stress protein,
  misc_feature (1)..(172): Homolog of NCBI NO: 7489278 NR Description: thioredoxin-like protein CDSP32, chloroplast -
  misc_feature (1)..(171): Homolog of NCBI NO: 34901636 NR Description: putative plastid thioredoxin [Oryza sativa
  misc_feature (57)..(168): Homolog of NCBI NO: 21617968 NR Description: thioredoxin [Arabidopsis thaliana]
  misc_feature (70)..(168): Homolog of NCBI NO: 2117426 NR Description: thioredoxin (clone GREN) - Arabidopsis thaliana
  misc_feature (70)..(168): Homolog of NCBI NO: 15223645 NR Description: thioredoxin H-type 4 (TRX-H-4) [Arabidopsis
  misc_feature (55)..(158): Homolog of NCBI NO: 34394553 NR Description: putative thioredoxin [Oryza sativa (japonica
  misc_feature (59)..(171): Homolog of NCBI NO: 40287476 NR Description: thioredoxin [Capsicum annuum]
  misc_feature (52)..(172): Homolog of NCBI NO: 9294492 NR Description: thioredoxin-like protein [Arabidopsis thaliana]
MGDESDKTRELCRREKIEKVPHFSFYKSMEKIHEEEGIEPDQLMGDVLYYGDNHSAVVQLHGRPDVEKLIDENRTGGKLIVLDVGLKHCGPCVKVYPTVLKLSRSMSETVVFARMNGDENDSCMEFLKDMNVIEVPTFLFIRDGEIRGRYVGSGKGELIGEILRYSGVRVTY

SEQ ID NO: 106011 - DNA, 1240 bp, Arabidopsis thaliana
  misc_feature (1)..(1240): Ceres Seq. ID no. 13618572
  misc_feature: MA Experiment ID: 108434 Result: Down-regulated in Transcription
  misc_feature: MA Experiment 108434 PARAMETER Experiment Name: At_Root_Tips_cDNA_P Parameter: Tissue Value: Root Tips
  misc_feature: MA Experiment ID: 108488 Result: Down-regulated in Transcription
  misc_feature: MA Experiment ID: 108573 Result: Up-regulated in Transcription
  misc_feature: MA Experiment 108573 PARAMETER Experiment Name: At_Drought_cDNA_P Parameter: Timepoint (hr) Value: 6
  misc_feature: MA Experiment 108573 PARAMETER Experiment Name: At_Drought_cDNA_P Parameter: Tissue Value: Aerial
  misc_feature: MA Experiment 108573 PARAMETER Experiment Name: At_Drought_cDNA_P Parameter: Treatment Value: Drought vs. No Drought
  misc_feature: MA Experiment ID: 20000069 Result: Up-regulated in Transcription
  misc_feature: MA Experiment 20000069 PARAMETER Experiment Name: At_100uM_ABA_Mutants_cDNA_P Parameter: Plant Line Value: CS23
  misc_feature: MA Experiment 20000069 PARAMETER Experiment Name: At_100uM_ABA_Mutants_cDNA_P Parameter: Timepoint (hr) Value: 6
  misc_feature: MA Experiment 20000069 PARAMETER Experiment Name: At_100uM_ABA_Mutants_cDNA_P Parameter: Tissue Value: Aerial
  misc_feature: MA Experiment 20000069 PARAMETER Experiment Name: At_100uM_ABA_Mutants_cDNA_P Parameter: Treatment Value: 100uM ABA vs. No Treatment
  misc_feature: MA Experiment ID: 20000070 Result: Up-regulated in Transcription
  misc_feature: MA Experiment 20000070 PARAMETER Experiment Name: At_100uM_ABA_Mutants_cDNA_P Parameter: Plant Line Value: CS24
  misc_feature: MA Experiment 20000070 PARAMETER Experiment Name: At_100uM_ABA_Mutants_cDNA_P Parameter: Timepoint (hr) Value: 6
  misc_feature: MA Experiment 20000070 PARAMETER Experiment Name: At_100uM_ABA_Mutants_cDNA_P Parameter: Tissue Value: Aerial
  misc_feature: MA Experiment 20000070 PARAMETER Experiment Name: At_100uM_ABA_Mutants_cDNA_P Parameter: Treatment Value: 100uM ABA vs. No Treatment
  misc_feature: MA Experiment ID: 20000071 Result: Up-regulated in Transcription
  misc_feature: MA Experiment 20000071 PARAMETER Experiment Name: At_100uM_ABA_Mutants_cDNA_P Parameter: Plant Line Value: CS8104
  misc_feature: MA Experiment 20000071 PARAMETER Experiment Name: At_100uM_ABA_Mutants_cDNA_P Parameter: Timepoint (hr) Value: 6
  misc_feature: MA Experiment 20000071 PARAMETER Experiment Name: At_100uM_ABA_Mutants_cDNA_P Parameter: Tissue Value: Aerial
  misc_feature: MA Experiment 20000071 PARAMETER Experiment Name: At_100uM_ABA_Mutants_cDNA_P Parameter: Treatment Value: 100uM ABA vs. No Treatment
  misc_feature: MA Experiment ID: 20000086 Result: Up-regulated in Transcription
  misc_feature: MA Experiment 20000086 PARAMETER Experiment Name: At_100uM_ABA_Mutants_cDNA_P Parameter: Plant Line Value: CS22
  misc_feature: MA Experiment 20000086 PARAMETER Experiment Name: At_100uM_ABA_Mutants_cDNA_P Parameter: Timepoint (hr) Value: 6
  misc_feature: MA Experiment 20000086 PARAMETER Experiment Name: At_100uM_ABA_Mutants_cDNA_P Parameter: Tissue Value: Aerial
  misc_feature: MA Experiment 20000086 PARAMETER Experiment Name: At_100uM_ABA_Mutants_cDNA_P Parameter: Treatment Value: 100uM ABA vs. No Treatment
  misc_feature: MA Experiment ID: 20000088 Result: Up-regulated in Transcription
  misc_feature: MA Experiment 20000088 PARAMETER Experiment Name: At_100uM_ABA_Mutants_cDNA_P Parameter: Plant Line Value: Landsberg
  misc_feature: MA Experiment 20000088 PARAMETER Experiment Name: At_100uM_ABA_Mutants_cDNA_P Parameter: Timepoint (hr) Value: 6
  misc_feature: MA Experiment 20000088 PARAMETER Experiment Name: At_100uM_ABA_Mutants_cDNA_P Parameter: Tissue Value: Aerial
  misc_feature: MA Experiment 20000088 PARAMETER Experiment Name: At_100uM_ABA_Mutants_cDNA_P Parameter: Treatment Value: 100uM ABA vs. No Treatment
  misc_feature: MA Experiment ID: 20000117 Result: Up-regulated in Transcription
  misc_feature: MA Experiment 20000117 PARAMETER Experiment Name: At_100uM_ABA_Mutants_cDNA_P Parameter: Plant Line Value: Columbia
  misc_feature: MA Experiment 20000117 PARAMETER Experiment Name: At_100uM_ABA_Mutants_cDNA_P Parameter: Timepoint (hr) Value: 6
  misc_feature: MA Experiment 20000117 PARAMETER Experiment Name: At_100uM_ABA_Mutants_cDNA_P Parameter: Tissue Value: Aerial
  misc_feature: MA Experiment 20000117 PARAMETER Experiment Name: At_100uM_ABA_Mutants_cDNA_P Parameter: Treatment Value: 100uM ABA vs. No Treatment
  misc_feature: MA Experiment ID: 20000180 Result: Up-regulated in Transcription
  misc_feature: MA Experiment 20000180 PARAMETER Experiment Name: At_Germinating_Seeds_P Parameter: Age (hr) Value: 24 vs. 0
  misc_feature: MA Experiment 20000180 PARAMETER Experiment Name: At_Germinating_Seeds_P Parameter: Tissue Value: Germinating Seeds
  misc_feature: MA Experiment ID: 20000184 Result: Down-regulated in Transcription
  misc_feature: MA Experiment 20000184 PARAMETER Experiment Name: At_Shoots__P Parameter: Age (day) Value: 7
  misc_feature: MA Experiment 20000184 PARAMETER Experiment Name: At_Shoots__P Parameter: Tissue Value: Shoots vs. Whole Plant
  misc_feature: MA Experiment ID: 20000438 Result: Down-regulated in Transcription
  misc_feature: MA Experiment 20000438 PARAMETER Experiment Name: At_Shoots__P Parameter: Age (day) Value: 14
  misc_feature: MA Experiment 20000438 PARAMETER Experiment Name: At_Shoots__P Parameter: Tissue Value: Shoots vs. Whole Plant
  misc_feature: MA Experiment ID: 20000794 Result: Up-regulated in Transcription
  misc_feature: MA Experiment 20000794 PARAMETER Experiment Name: At_Petals_P Parameter: Age (day) Value: 23-25 days
  misc_feature: MA Experiment 20000794 PARAMETER Experiment Name: At_Petals_P Parameter: Plant Line Value: WS
  misc_feature: MA Experiment 20000794 PARAMETER Experiment Name: At_Petals_P Parameter: Tissue Value: Petals vs. Whole plant
  misc_feature: MA Experiment ID: 20001757 Result: Down-regulated in Transcription
  misc_feature: MA Experiment 20001757 PARAMETER Experiment Name: At_50mM_NH4NO3_L-to-H_P Parameter: Timepoint (hr) Value: 6
  misc_feature: MA Experiment 20001757 PARAMETER Experiment Name: At_50mM_NH4NO3_L-to-H_P Parameter: Tissue Value: Leaf
  misc_feature: MA Experiment 20001757 PARAMETER Experiment Name: At_50mM_NH4NO3_L-to-H_P Parameter: Treatment Value: 50mM NH4NO3 vs 100mM Mannitol
  misc_feature: MA Experiment ID: 20001904 Result: Up-regulated in Transcription
  misc_feature: MA Experiment 20001904 PARAMETER Experiment Name: At_Drought_Reproduction_P Parameter: Age (day) Value: 37
  misc_feature: MA Experiment 20001904 PARAMETER Experiment Name: At_Drought_Reproduction_P Parameter: Organism Value: A. thaliana
  misc_feature: MA Experiment 20001904 PARAMETER Experiment Name: At_Drought_Reproduction_P Parameter: Plant Line Value: WS
  misc_feature: MA Experiment 20001904 PARAMETER Experiment Name: At_Drought_Reproduction_P Parameter: Timepoint (day) Value: 7
  misc_feature: MA Experiment 20001904 PARAMETER Experiment Name: At_Drought_Reproduction_P Parameter: Tissue Value: Rosettes
  misc_feature: MA Experiment 20001904 PARAMETER Experiment Name: At_Drought_Reproduction_P Parameter: Treatment Value: Drought vs. No Drought
  misc_feature: MA Experiment ID: 20001905 Result: Up-regulated in Transcription
  misc_feature: MA Experiment 20001905 PARAMETER Experiment Name: At_Drought_Reproduction_P Parameter: Age (day) Value: 40
  misc_feature: MA Experiment 20001905 PARAMETER Experiment Name: At_Drought_Reproduction_P Parameter: Organism Value: A. thaliana
  misc_feature: MA Experiment 20001905 PARAMETER Experiment Name: At_Drought_Reproduction_P Parameter: Plant Line Value: WS
  misc_feature: MA Experiment 20001905 PARAMETER Experiment Name: At_Drought_Reproduction_P Parameter: Timepoint (day) Value: 10
  misc_feature: MA Experiment 20001905 PARAMETER Experiment Name: At_Drought_Reproduction_P Parameter: Tissue Value: Rosettes
  misc_feature: MA Experiment 20001905 PARAMETER Experiment Name: At_Drought_Reproduction_P Parameter: Treatment Value: Drought vs. No Drought
caggtgggacacggaagctgagctctaatcctgatcggagatggcgactagcgattctgaattcaattctgatcttcttctcgctcacaagcttcccgagacgcgttacacctacaatgaaagagatgtagcaatctatgctttgggaatcggcgcttgtggccaagatgctgtggattccgatgagctcaagtttgtgtatcacagaaatgggcaggatttgatccaggtcttaccaacttttgcttcactattcacacttggatctttgacagaaggactggatttgccaggttttaaatatgatcctagtctcttgttgcatgggcagcagtatattgaaatatacaggccattaccttccaaggcttccttaattaacaaagtaagcctcgctggtttgcaagataaaggtaaagcagctatccttgaattagaaaccagaagttacgaggaagggtcaggggaactgttatgcatgaataggacgactgttttcctaagaggtgctggtggtttctcaaattcatctcaaccattctcttacaaaaactatccaagtaaccagggcttagctgtgaaaatcccacaaagacaacctttgacagtgtgcgaagagcgcactcagccatcgcaggcattactttataggctgtctggtgactataatcctctgcattcagatccagaatttgcaaaacttgccggattcccacgcccgatattgcatgggctatgcacactcgggtttgcaatcaaggcaatcatcaagtgtgtttgcaagggtgacccaactgctgtcaaaaccatatctggacgattcctcacgactgtttttcctggcgaaactctgataaccgaaatgtggcttgaaggcttgagggttatatatcagacgaaagtgaaggaaaggaacaaaactgtgttagctggttatgttgatattcgtgggttatcttcgtcactttagaatgttaggtccttagatatattgggctgtcataatattgcaaaggtaataaacatgtcagaagactcttgatgtttgcttggcgtaatgagccattgagccatcaataaacactctttgatgacggtcacaatttactgaaatggttagttgtatcgtgttactgttgtaataaatgttgagtgacgcaaaatgcacatgccggatgaagcaaaatgcattgaagaaaatcctttttgggtgtcaatgaactggaacataaagcctgag

SEQ ID NO: 106012 - protein, 309 aa, Arabidopsis thaliana; identical to SEQ ID NO: 39716
  peptide (1)..(309): Ceres Seq. ID no. 13618573
  misc_feature (174)..(299): Pfam Name: MaoC like domain Pfam Description: MaoC like domain
  misc_feature (1)..(309): Homolog of NCBI NO: 22330656 NR Description: expressed protein [Arabidopsis thaliana] At1g76150/T23E18_38 [Arabidopsis thaliana]
  misc_feature (1)..(200): Homolog of NCBI NO: 6573727 NR Description: T23E18.9 [Arabidopsis thaliana]
  misc_feature (2)..(308): Homolog of NCBI NO: 4504505 NR Description: hydroxysteroid (17-beta) dehydrogenase 4 [Homo
  misc_feature (6)..(302): Homolog of NCBI NO: 2315981 NR Description: 17-beta-hydroxysteroid dehydrogenase type IV
  misc_feature (1)..(302): Homolog of NCBI NO: 13242303 NR Description: peroxisomal multifunctional enzyme type II norvegicus] >gi|1592545|gb|AAB09724.1| peroxisomal
  misc_feature (14)..(302): Homolog of NCBI NO: 31982273 NR Description: hydroxysteroid (17-beta) dehydrogenase 4;
  misc_feature (1)..(302): Homolog of NCBI NO: 2492741 NR Description: Estradiol 17 beta-dehydrogenase 4 (17-beta-HSD 4)
  misc_feature (14)..(309): Homolog of NCBI NO: 499340 NR Description: 17beta-estradiol dehydrogenase [Sus scrofa]
  misc_feature (1)..(302): Homolog of NCBI NO: 1620451 NR Description: multifunctional protein 2 [Rattus norvegicus]
  misc_feature (1)..(302): Homolog of NCBI NO: 7514017 NR Description: multifunctional beta-oxidation protein 2,

SEQ ID NO: 106013 - protein, 163 aa, Arabidopsis thaliana; identical to SEQ ID NO: 39717
  peptide (1)..(163): Ceres Seq. ID no. 13618574
  misc_feature (28)..(153): Pfam Name: MaoC like domain Pfam Description: MaoC like domain
  misc_feature (1)..(163): Homolog of NCBI NO: 22330656 NR Description: expressed protein [Arabidopsis thaliana] At1g76150/T23E18_38 [Arabidopsis thaliana]
  misc_feature (1)..(54): Homolog of NCBI NO: 6573727 NR Description: T23E18.9 [Arabidopsis thaliana]
  misc_feature (1)..(162): Homolog of NCBI NO: 4504505 NR Description: hydroxysteroid (17-beta) dehydrogenase 4 [Homo
  misc_feature (1)..(156): Homolog of NCBI NO: 2315981 NR Description: 17-beta-hydroxysteroid dehydrogenase type IV
  misc_feature (1)..(156): Homolog of NCBI NO: 13242303 NR Description: peroxisomal multifunctional enzyme type II norvegicus] >gi|1592545|gb|AAB09724.1| peroxisomal
  misc_feature (1)..(156): Homolog of NCBI NO: 31982273 NR Description: hydroxysteroid (17-beta) dehydrogenase 4;
  misc_feature (1)..(156): Homolog of NCBI NO: 2492741 NR Description: Estradiol 17 beta-dehydrogenase 4 (17-beta-HSD 4)
  misc_feature (1)..(163): Homolog of NCBI NO: 499340 NR Description: 17beta-estradiol dehydrogenase [Sus scrofa]
  misc_feature (1)..(156): Homolog of NCBI NO: 1620451 NR Description: multifunctional protein 2 [Rattus norvegicus]
  misc_feature (1)..(156): Homolog of NCBI NO: 7514017 NR Description: multifunctional beta-oxidation protein 2,

SEQ ID NO: 106014 - DNA, 1933 bp, Arabidopsis thaliana
  misc_feature (1)..(1933): Ceres Seq. ID no. 13618575
  misc_feature: MA Experiment ID: 108434 Result: Down-regulated in Transcription
  misc_feature: MA Experiment 108434 PARAMETER Experiment Name: At_Root_Tips_cDNA_P Parameter: Tissue Value: Root Tips
  misc_feature: MA Experiment ID: 108461 Result: Up-regulated in Transcription
  misc_feature: MA Experiment 108461 PARAMETER Experiment Name: At_Germinating_Seeds_cDNA_P Parameter: Age (day) Value: 1 vs. 0
  misc_feature: MA Experiment 108461 PARAMETER Experiment Name: At_Germinating_Seeds_cDNA_P Parameter: Tissue Value: Germinating Seeds
  misc_feature: MA Experiment ID: 108463 Result: Down-regulated in Transcription
  misc_feature: MA Experiment 108463 PARAMETER Experiment Name: At_Germinating_Seeds_cDNA_P Parameter: Age (day) Value: 3 vs. 0
  misc_feature: MA Experiment 108463 PARAMETER Experiment Name: At_Germinating_Seeds_cDNA_P Parameter: Tissue Value: Germinating Seeds
  misc_feature: MA Experiment ID: 108464 Result: Down-regulated in Transcription
  misc_feature: MA Experiment 108464 PARAMETER Experiment Name: At_Germinating_Seeds_cDNA_P Parameter: Age (day) Value: 4 vs. 0
  misc_feature: MA Experiment 108464 PARAMETER Experiment Name: At_Germinating_Seeds_cDNA_P Parameter: Tissue Value: Germinating Seeds
  misc_feature: MA Experiment ID: 108569 Result: Up-regulated in Transcription
  misc_feature: MA Experiment 108569 PARAMETER Experiment Name: At_0.001%_MeJA__cDNA_P Parameter: Timepoint (hr) Value: 6
  misc_feature: MA Experiment 108569 PARAMETER Experiment Name: At_0.001%_MeJA__cDNA_P Parameter: Tissue Value: Aerial
  misc_feature: MA Experiment 108569 PARAMETER Experiment Name: At_0.001%_MeJA__cDNA_P Parameter: Treatment Value: 0.001% MeJA vs. No Treatment
  misc_feature: MA Experiment ID: 108573 Result: Up-regulated in Transcription
  misc_feature: MA Experiment 108573 PARAMETER Experiment Name: At_Drought_cDNA_P Parameter: Timepoint (hr) Value: 6
  misc_feature: MA Experiment 108573 PARAMETER Experiment Name: At_Drought_cDNA_P Parameter: Tissue Value: Aerial
  misc_feature: MA Experiment 108573 PARAMETER Experiment Name: At_Drought_cDNA_P Parameter: Treatment Value: Drought vs. No Drought
  misc_feature: MA Experiment ID: 108576 Result: Down-regulated in Transcription
  misc_feature: MA Experiment 108576 PARAMETER Experiment Name: At_42deg_Heat_cDNA_P Parameter: Temperature (deg C) Value: 42 vs. 22
  misc_feature: MA Experiment 108576 PARAMETER Experiment Name: At_42deg_Heat_cDNA_P Parameter: Timepoint (hr) Value: 1
  misc_feature: MA Experiment 108576 PARAMETER Experiment Name: At_42deg_Heat_cDNA_P Parameter: Tissue Value: Aerial
  misc_feature: MA Experiment ID: 108577 Result: Down-regulated in Transcription
  misc_feature: MA Experiment 108577 PARAMETER Experiment Name: At_42deg_Heat_cDNA_P Parameter: Temperature (deg C) Value: 42 vs. 22
  misc_feature: MA Experiment 108577 PARAMETER Experiment Name: At_42deg_Heat_cDNA_P Parameter: Timepoint (hr) Value: 6
  misc_feature: MA Experiment 108577 PARAMETER Experiment Name: At_42deg_Heat_cDNA_P Parameter: Tissue Value: Aerial
  misc_feature: MA Experiment ID: 108579 Result: Up-regulated in Transcription
  misc_feature: MA Experiment 108579 PARAMETER Experiment Name: At_4deg_Cold_cDNA_P Parameter: Temperature (deg C) Value: 4 vs. 22
  misc_feature: MA Experiment 108579 PARAMETER Experiment Name: At_4deg_Cold_cDNA_P Parameter: Timepoint (hr) Value: 6
  misc_feature: MA Experiment 108579 PARAMETER Experiment Name: At_4deg_Cold_cDNA_P Parameter: Tissue Value: Aerial
  misc_feature: MA Experiment ID: 108585 Result: Up-regulated in Transcription
  misc_feature: MA Experiment 108585 PARAMETER Experiment Name: At_5mM_NaNP_cDNA_P Parameter: Timepoint (hr) Value: 6
  misc_feature: MA Experiment 108585 PARAMETER Experiment Name: At_5mM_NaNP_cDNA_P Parameter: Tissue Value: Aerial
  misc_feature: MA Experiment 108585 PARAMETER Experiment Name: At_5mM_NaNP_cDNA_P Parameter: Treatment Value: null
  misc_feature: MA Experiment ID: 108595 Result: Down-regulated in Transcription
  misc_feature: MA Experiment 108595 PARAMETER Experiment Name: At_Ler-pi_Ovule_cDNA_P Parameter: Plant Line Value: null
  misc_feature: MA Experiment ID: 20000068 Result: Down-regulated in Transcription
  misc_feature: MA Experiment ID: 20000087 Result: Down-regulated in Transcription
  misc_feature: MA Experiment 20000087 PARAMETER Experiment Name: At_100uM_ABA_Mutants_cDNA_P Parameter: Plant Line Value: WS
  misc_feature: MA Experiment 20000087 PARAMETER Experiment Name: At_100uM_ABA_Mutants_cDNA_P Parameter: Timepoint (hr) Value: 6
  misc_feature: MA Experiment 20000087 PARAMETER Experiment Name: At_100uM_ABA_Mutants_cDNA_P Parameter: Tissue Value: Aerial
  misc_feature: MA Experiment 20000087 PARAMETER Experiment Name: At_100uM_ABA_Mutants_cDNA_P Parameter: Treatment Value: 100uM ABA vs. No Treatment
  misc_feature: MA Experiment ID: 20000117 Result: Down-regulated in Transcription
  misc_feature: MA Experiment 20000117 PARAMETER Experiment Name: At_100uM_ABA_Mutants_cDNA_P Parameter: Plant Line Value: Columbia
  misc_feature: MA Experiment 20000117 PARAMETER Experiment Name: At_100uM_ABA_Mutants_cDNA_P Parameter: Timepoint (hr) Value: 6
  misc_feature: MA Experiment 20000117 PARAMETER Experiment Name: At_100uM_ABA_Mutants_cDNA_P Parameter: Tissue Value: Aerial
  misc_feature: MA Experiment 20000117 PARAMETER Experiment Name: At_100uM_ABA_Mutants_cDNA_P Parameter: Treatment Value: 100uM ABA vs. No Treatment
  misc_feature: MA Experiment ID: 20000179 Result: Up-regulated in Transcription
  misc_feature: MA Experiment 20000179 PARAMETER Experiment Name: At_Germinating_Seeds_P Parameter: Age (hr) Value: 6 vs. 0
  misc_feature: MA Experiment 20000179 PARAMETER Experiment Name: At_Germinating_Seeds_P Parameter: Tissue Value: Germinating Seeds
  misc_feature: MA Experiment ID: 20000180 Result: Up-regulated in Transcription
  misc_feature: MA Experiment 20000180 PARAMETER Experiment Name: At_Germinating_Seeds_P Parameter: Age (hr) Value: 24 vs. 0
  misc_feature: MA Experiment 20000180 PARAMETER Experiment Name: At_Germinating_Seeds_P Parameter: Tissue Value: Germinating Seeds
  misc_feature: MA Experiment ID: 20000185 Result: Down-regulated in Transcription
  misc_feature: MA Experiment 20000185 PARAMETER Experiment Name: At_Roots__P Parameter: Age (day) Value: 7 vs. 21
  misc_feature: MA Experiment 20000185 PARAMETER Experiment Name: At_Roots__P Parameter: Organism Value: A. thaliana
  misc_feature: MA Experiment 20000185 PARAMETER Experiment Name: At_Roots__P Parameter: Tissue Value: Roots vs. Whole Plant
  misc_feature: MA Experiment ID: 20000224 Result: Down-regulated in Transcription
  misc_feature: MA Experiment ID: 20000264 Result: Down-regulated in Transcription
  misc_feature: MA Experiment 20000264 PARAMETER Experiment Name: At_Open_Flower_P Parameter: Age (day) Value: 21
  misc_feature: MA Experiment 20000264 PARAMETER Experiment Name: At_Open_Flower_P Parameter: Plant Line Value: WS
  misc_feature: MA Experiment 20000264 PARAMETER Experiment Name: At_Open_Flower_P Parameter: Tissue Value: Open Flower vs. Whole Plant
  misc_feature: MA Experiment ID: 20000439 Result: Down-regulated in Transcription
  misc_feature: MA Experiment 20000439 PARAMETER Experiment Name: At_Roots__P Parameter: Age (day) Value: 14 vs. 21
  misc_feature: MA Experiment 20000439 PARAMETER Experiment Name: At_Roots__P Parameter: Organism Value: A. thaliana
  misc_feature: MA Experiment 20000439 PARAMETER Experiment Name: At_Roots__P Parameter: Tissue Value: Roots vs. Whole Plant
  misc_feature: MA Experiment ID: 20000495 Result: Down-regulated in Transcription
  misc_feature: MA Experiment 20000495 PARAMETER Experiment Name: At_Guard_Cells_P Parameter: Harvest Date Value: 8/2/2002
  misc_feature: MA Experiment 20000495 PARAMETER Experiment Name: At_Guard_Cells_P Parameter: Organism Value: A. thaliana
  misc_feature: MA Experiment 20000495 PARAMETER Experiment Name: At_Guard_Cells_P Parameter: Tissue Value: Guard Cells vs. Leaves
  misc_feature: MA Experiment ID: 20000496 Result: Down-regulated in Transcription
  misc_feature: MA Experiment 20000496 PARAMETER Experiment Name: At_Guard_Cells_P Parameter: Harvest Date Value: 7/19/2002
  misc_feature: MA Experiment 20000496 PARAMETER Experiment Name: At_Guard_Cells_P Parameter: Organism Value: Canola
  misc_feature: MA Experiment 20000496 PARAMETER Experiment Name: At_Guard_Cells_P Parameter: Tissue Value: Guard Cells vs. Leaves
  misc_feature: MA Experiment ID: 20000574 Result: Up-regulated in Transcription
  misc_feature: MA Experiment 20000574 PARAMETER Experiment Name: At_100uM_ABA_Mutants__P Parameter: Organism Value: A. thaliana
  misc_feature: MA Experiment 20000574 PARAMETER Experiment Name: At_100uM_ABA_Mutants__P Parameter: Plant Line Value: CS23 vs. Ler wt
  misc_feature: MA Experiment 20000574 PARAMETER Experiment Name: At_100uM_ABA_Mutants__P Parameter: Timepoint (hr) Value: N/A
  misc_feature: MA Experiment 20000574 PARAMETER Experiment Name: At_100uM_ABA_Mutants__P Parameter: Tissue Value: Whole Plant
  misc_feature: MA Experiment 20000574 PARAMETER Experiment Name: At_100uM_ABA_Mutants__P Parameter: Treatment Value: None
  misc_feature: MA Experiment ID: 20000606 Result: Up-regulated in Transcription
  misc_feature: MA Experiment 20000606 PARAMETER Experiment Name: At_CS8548_Mutant_P Parameter: Age (day) Value: 14
  misc_feature: MA Experiment 20000606 PARAMETER Experiment Name: At_CS8548_Mutant_P Parameter: Plant Line Value: CS8548 vs. wt
  misc_feature: MA Experiment 20000606 PARAMETER Experiment Name: At_CS8548_Mutant_P Parameter: Tissue Value: Whole Plant
  misc_feature: MA Experiment ID: 20000794 Result: Down-regulated in Transcription
  misc_feature: MA Experiment 20000794 PARAMETER Experiment Name: At_Petals_P Parameter: Age (day) Value: 23-25 days
  misc_feature: MA Experiment 20000794 PARAMETER Experiment Name: At_Petals_P Parameter: Plant Line Value: WS
  misc_feature: MA Experiment 20000794 PARAMETER Experiment Name: At_Petals_P Parameter: Tissue Value: Petals vs. Whole plant
  misc_feature: MA Experiment ID: 20001247 Result: Up-regulated in Transcription
  misc_feature: MA Experiment 20001247 PARAMETER Experiment Name: At_Far-red-induction_P Parameter: Age (day) Value: 7
  misc_feature: MA Experiment 20001247 PARAMETER Experiment Name: At_Far-red-induction_P Parameter: Light Value: Far-red vs. White
  misc_feature: MA Experiment 20001247 PARAMETER Experiment Name: At_Far-red-induction_P Parameter: Organism Value: A. thaliana
  misc_feature: MA Experiment 20001247 PARAMETER Experiment Name: At_Far-red-induction_P Parameter: Plant Line Value: Columbia
  misc_feature: MA Experiment 20001247 PARAMETER Experiment Name: At_Far-red-induction_P Parameter: Timepoint (hr) Value: 1
  misc_feature: MA Experiment 20001247 PARAMETER Experiment Name: At_Far-red-induction_P Parameter: Tissue Value: Whole Plant
  misc_feature: MA Experiment ID: 20001248 Result: Up-regulated in Transcription
  misc_feature: MA Experiment 20001248 PARAMETER Experiment Name: At_Far-red-induction_P Parameter: Age (day) Value: 7
  misc_feature: MA Experiment 20001248 PARAMETER Experiment Name: At_Far-red-induction_P Parameter: Light Value: Far-red vs. White
  misc_feature: MA Experiment 20001248 PARAMETER Experiment Name: At_Far-red-induction_P Parameter: Organism Value: A. thaliana
  misc_feature: MA Experiment 20001248 PARAMETER Experiment Name: At_Far-red-induction_P Parameter: Plant Line Value: Columbia
  misc_feature: MA Experiment 20001248 PARAMETER Experiment Name: At_Far-red-induction_P Parameter: Timepoint (hr) Value: 4
  misc_feature: MA Experiment 20001248 PARAMETER Experiment Name: At_Far-red-induction_P Parameter: Tissue Value: Whole Plant
  misc_feature: MA Experiment ID: 20001451 Result: Down-regulated in Transcription
  misc_feature: MA Experiment 20001451 PARAMETER Experiment Name: At_Far-red-induction_P Parameter: Age (day) Value: 7
  misc_feature: MA Experiment 20001451 PARAMETER Experiment Name: At_Far-red-induction_P Parameter: Light Value: Far-red vs. White
  misc_feature: MA Experiment 20001451 PARAMETER Experiment Name: At_Far-red-induction_P Parameter: Organism Value: A. thaliana
  misc_feature: MA Experiment 20001451 PARAMETER Experiment Name: At_Far-red-induction_P Parameter: Plant Line Value: Columbia
  misc_feature: MA Experiment 20001451 PARAMETER Experiment Name: At_Far-red-induction_P Parameter: Timepoint (hr) Value: 24
  misc_feature: MA Experiment 20001451 PARAMETER Experiment Name: At_Far-red-induction_P Parameter: Tissue Value: Whole Plant
  misc_feature: MA Experiment ID: 20001554 Result: Down-regulated in Transcription
  misc_feature: MA Experiment 20001554 PARAMETER Experiment Name: At_Drought_Soil_Dry_P Parameter: Age (day) Value: 21
  misc_feature: MA Experiment 20001554 PARAMETER Experiment Name: At_Drought_Soil_Dry_P Parameter: Organism Value: A. thaliana
  misc_feature: MA Experiment 20001554 PARAMETER Experiment Name: At_Drought_Soil_Dry_P Parameter: Plant Line Value: WS
  misc_feature: MA Experiment 20001554 PARAMETER Experiment Name: At_Drought_Soil_Dry_P Parameter: Post Timepoint (hr) Value: None
  misc_feature: MA Experiment 20001554 PARAMETER Experiment Name: At_Drought_Soil_Dry_P Parameter: Post-Treatment Value: None
  misc_feature: MA Experiment 20001554 PARAMETER Experiment Name: At_Drought_Soil_Dry_P Parameter: Timepoint (day) Value: 7
  misc_feature: MA Experiment 20001554 PARAMETER Experiment Name: At_Drought_Soil_Dry_P Parameter: Treatment Value: Drought vs. No Drought
  misc_feature: MA Experiment ID: 20001556 Result: Down-regulated in Transcription
  misc_feature: MA Experiment 20001556 PARAMETER Experiment Name: At_Drought_Soil_Dry_P Parameter: Age (day) Value: 26
  misc_feature: MA Experiment 20001556 PARAMETER Experiment Name: At_Drought_Soil_Dry_P Parameter: Organism Value: A. thaliana
  misc_feature: MA Experiment 20001556 PARAMETER Experiment Name: At_Drought_Soil_Dry_P Parameter: Plant Line Value: WS
  misc_feature: MA Experiment 20001556 PARAMETER Experiment Name: At_Drought_Soil_Dry_P Parameter: Post Timepoint (hr) Value: None
  misc_feature: MA Experiment 20001556 PARAMETER Experiment Name: At_Drought_Soil_Dry_P Parameter: Post-Treatment Value: None
  misc_feature: MA Experiment 20001556 PARAMETER Experiment Name: At_Drought_Soil_Dry_P Parameter: Timepoint (day) Value: 12
  misc_feature: MA Experiment 20001556 PARAMETER Experiment Name: At_Drought_Soil_Dry_P Parameter: Treatment Value: Drought vs. No Drought
  misc_feature: MA Experiment ID: 20001557 Result: Up-regulated in Transcription
  misc_feature: MA Experiment 20001557 PARAMETER Experiment Name: At_Drought_Soil_Dry_P Parameter: Age (day) Value: 27
  misc_feature: MA Experiment 20001557 PARAMETER Experiment Name: At_Drought_Soil_Dry_P Parameter: Organism Value: A. thaliana
  misc_feature: MA Experiment 20001557 PARAMETER Experiment Name: At_Drought_Soil_Dry_P Parameter: Plant Line Value: WS
  misc_feature: MA Experiment 20001557 PARAMETER Experiment Name: At_Drought_Soil_Dry_P Parameter: Post Timepoint (hr) Value: 3
  misc_feature: MA Experiment 20001557 PARAMETER Experiment Name: At_Drought_Soil_Dry_P Parameter: Post-Treatment Value: Re-Water vs. No Drought
  misc_feature: MA Experiment 20001557 PARAMETER Experiment Name: At_Drought_Soil_Dry_P Parameter: Timepoint (day) Value: 13
  misc_feature: MA Experiment 20001557 PARAMETER Experiment Name: At_Drought_Soil_Dry_P Parameter: Treatment Value: Drought vs. No Drought
  misc_feature: MA Experiment ID: 20001558 Result: Up-regulated in Transcription
  misc_feature: MA Experiment 20001558 PARAMETER Experiment Name: At_Drought_Soil_Dry_P Parameter: Age (day) Value: 27
  misc_feature: MA Experiment 20001558 PARAMETER Experiment Name: At_Drought_Soil_Dry_P Parameter: Organism Value: A. thaliana
  misc_feature: MA Experiment 20001558 PARAMETER Experiment Name: At_Drought_Soil_Dry_P Parameter: Plant Line Value: WS
  misc_feature: MA Experiment 20001558 PARAMETER Experiment Name: At_Drought_Soil_Dry_P Parameter: Post Timepoint (hr) Value: 6
  misc_feature: MA Experiment 20001558 PARAMETER Experiment Name: At_Drought_Soil_Dry_P Parameter: Post-Treatment Value: Re-Water vs. No Drought
  misc_feature: MA Experiment 20001558 PARAMETER Experiment Name: At_Drought_Soil_Dry_P Parameter: Timepoint (day) Value: 13
  misc_feature: MA Experiment 20001558 PARAMETER Experiment Name: At_Drought_Soil_Dry_P Parameter: Treatment Value: Drought vs. No Drought
  misc_feature: MA Experiment ID: 20001560 Result: Up-regulated in Transcription
  misc_feature: MA Experiment 20001560 PARAMETER Experiment Name: At_Drought_Soil_Dry_P Parameter: Age (day) Value: 28
  misc_feature: MA Experiment 20001560 PARAMETER Experiment Name: At_Drought_Soil_Dry_P Parameter: Organism Value: A. thaliana
  misc_feature: MA Experiment 20001560 PARAMETER Experiment Name: At_Drought_Soil_Dry_P Parameter: Plant Line Value: WS
  misc_feature: MA Experiment 20001560 PARAMETER Experiment Name: At_Drought_Soil_Dry_P Parameter: Post Timepoint (hr) Value: None
  misc_feature: MA Experiment 20001560 PARAMETER Experiment Name: At_Drought_Soil_Dry_P Parameter: Post-Treatment Value: None
  misc_feature: MA Experiment 20001560 PARAMETER Experiment Name: At_Drought_Soil_Dry_P Parameter: Timepoint (day) Value: 14
  misc_feature: MA Experiment 20001560 PARAMETER Experiment Name: At_Drought_Soil_Dry_P Parameter: Treatment Value: Drought vs. No Drought
  misc_feature: MA Experiment ID: 20001911 Result: Down-regulated in Transcription
  misc_feature: MA Experiment 20001911 PARAMETER Experiment Name: At_Drought_Reproduction_P Parameter: Age (day) Value: 40
  misc_feature: MA Experiment 20001911 PARAMETER Experiment Name: At_Drought_Reproduction_P Parameter: Organism Value: A. thaliana
  misc_feature: MA Experiment 20001911 PARAMETER Experiment Name: At_Drought_Reproduction_P Parameter: Plant Line Value: WS
  misc_feature: MA Experiment 20001911 PARAMETER Experiment Name: At_Drought_Reproduction_P Parameter: Timepoint (day) Value: 10
  misc_feature: MA Experiment 20001911 PARAMETER Experiment Name: At_Drought_Reproduction_P Parameter: Tissue Value: Flowers
  misc_feature: MA Experiment 20001911 PARAMETER Experiment Name: At_Drought_Reproduction_P Parameter: Treatment Value: Drought vs. No Drought
agagttagagagagagagaccacgccagatatacctttcttgtttcaccggttttcatacacaaaaatggcgggcagtgcctcattcgccgccgcattattcatcggactctctcttctcttcgccgtcacggctgaagatccgtacagattctttgaatggaacataacttacggcgatatatacccactcggtgttcgccaacagggtattttgatcaacggggcgtttccgggaccggacattcattcggttactaatgacaatctcatcatcaacgtctacaatagcctcgacgaacctttccttctttcatggaatggaattcaacagaggaggaactctttcgttgatggagtgtatggaacgacatgcccaatcccgccggggaagaactacacttacattcttcagatgaaggatcagatcggaagtttttactacttcccttctctcggctttcacaaagccgccggtggatttggtggcattcgtatcctcagtcgtcctagaatcccggtccctttccctgatcccgccggagataccactgtccttatcggagactggtacaaagcaaaccacacggatttgagagcacagcttgataatggtaagaagcttcctttaccagacggcatcctcatcaatggtcgttcaagtggtgcaactcttaatgttgaacaaggtaagacatacaggtttagaatatccaatgtagggttacaagactctctcaacttccgcattcaagaccataagatgaaagtggtggaagtcgaaggaacacacactcttcagactactttctcttcactagatgttcatgttggacaatcttactcagtccttgtaaccgcggaccagactccacgggattattacgtggtcgtctcttctcggtttacctcaaatgtccttactaccacgggtattttccgatacagtaattctgctggtggtgtttctggacctattcctggtggacctaccattcaaatcgactggtccttgaaccaggctcgagccatcaggactaacctttcagcgagcggaccaaggccaaatccacaaggatcgtaccactacggtatgataaacactacaagaacgatcagacttgctagctctgctggtcaggttgatgggaagcaacgatacgctgtgaacagtgtctcattcaaacccgcagacactcctctgaaaatcgcggactacttcaagattgacggtgtttacagaagtggaagcatacagtaccaacccactggtggaggaatatacctcgacacatctgttatgcaagttgattacagaacctttgtggagattattttcgaaaattctgaggatattgtccagagctggcatcttgatggttactctttctgggttgttggaatggatggtggacagtggagtccagatagtaggaacgagtataacctacgcgatgcagtcgctcgctgcaccgttcaggtatacccaagctcatggacggctatattgatagcactcgacaacgtaggaatgtggaatctaagatccgagttctgggcgaggcaatacttaggacaacaattgtatttacgtgtgtacacaccctcaacttctctcagagatgaatatccaatccccaagaacgctcttctctgcgggagagccagtggtcgcagcaccagaccgctttgagctggtggttagatatagaaatgacggagagatggtcagccaaaccagctgacgcgttcttgaggcgggtttcttgttttatacacattcttcattttgctaatgaatgagaagagtttatgttaaaatcagtatatcagtttgtaacgatctcagctcgaggtctcattcttgattcttatattctttctttttctatggaacgaaacatttattcaatataattccacagtttcatcgt

SEQ ID NO: 106015 - protein, 563 aa, Arabidopsis thaliana
  peptide (1)..(563): Ceres Seq. ID no. 13618576
  misc_feature (23)..(563): Homolog of NCBI NO: 15222981 NR Description: pectinesterase (pectin methylesterase), putative
  misc_feature (23)..(563): Homolog of NCBI NO: 15982771 NR Description: At1g76160/T23E18_10 [Arabidopsis thaliana]
  misc_feature (23)..(563): Homolog of NCBI NO: 22531132 NR Description: pectinesterase, putative [Arabidopsis thaliana]
  misc_feature (23)..(563): Homolog of NCBI NO: 16648889 NR Description: Unknown protein [Arabidopsis thaliana]
  misc_feature (23)..(563): Homolog of NCBI NO: 18400509 NR Description: pectinesterase (pectin methylesterase) -related
  misc_feature (23)..(563): Homolog of NCBI NO: 25285550 NR Description: probable pectinesterase [imported] - Arabidopsis >gi|9802764|gb|AAF99833.1|AC008046_5 Putative pectinesterase
  misc_feature (30)..(563): Homolog of NCBI NO: 1255951 NR Description: PS60 [Nicotiana tabacum]
  misc_feature (46)..(547): Homolog of NCBI NO: 7432997 NR Description: pollen-specific protein homolog - tomato >gi|1944575|emb|CAB08077.1| pectinesterase [Lycopersicon
  misc_feature (32)..(560): Homolog of NCBI NO: 15219118 NR Description: pectinesterase (pectin methylesterase), putative
  misc_feature (27)..(556): Homolog of NCBI NO: 15219120 NR Description: pectinesterase (pectin methylesterase), putative thaliana] >gi|6552744|gb|AAF16543.1|AC013482_17 T26F17.7
RVRERETTPDIPFLFHRFSYTKMAGSASFAAALFIGLSLLFAVTAEDPYRFFEWNITYGDIYPLGVRQQGILINGAFPGPDIHSVTNDNLIINVYNSLDEPFLLSWNGIQQRRNSFVDGVYGTTCPIPPGKNYTYILQMKDQIGSFYYFPSLGFHKAAGGFGGIRILSRPRIPVPFPDPAGDTTVLIGDWYKANHTDLRAQLDNGKKLPLPDGILINGRSSGATLNVEQGKTYRFRISNVGLQDSLNFRIQDHKMKVVEVEGTHTLQTTFSSLDVHVGQSYSVLVTADQTPRDYYVVVSSRFTSNVLTTTGIFRYSNSAGGVSGPIPGGPTIQIDWSLNQARAIRTNLSASGPRPNPQGSYHYGMINTTRTIRLASSAGQVDGKQRYAVNSVSFKPADTPLKIADYFKIDGVYRSGSIQYQPTGGGIYLDTSVMQVDYRTFVEIIFENSEDIVQSWHLDGYSFWVVGMDGGQWSPDSRNEYNLRDAVARCTVQVYPSSWTAILIALDNVGMWNLRSEFWARQYLGQQLYLRVYTPSTSLRDEYPIPKNALLCGRASGRSTRPL

SEQ ID NO: 106016 - protein, 541 aa, Arabidopsis thaliana
  peptide (1)..(541): Ceres Seq. ID no. 13618577
  misc_feature (1)..(541): Homolog of NCBI NO: 15222981 NR Description: pectinesterase (pectin methylesterase), putative
  misc_feature (1)..(541): Homolog of NCBI NO: 15982771 NR Description: At1g76160/T23E18_10 [Arabidopsis thaliana]
  misc_feature (1)..(541): Homolog of NCBI NO: 22531132 NR Description: pectinesterase, putative [Arabidopsis thaliana]
  misc_feature (1)..(541): Homolog of NCBI NO: 16648889 NR Description: Unknown protein [Arabidopsis thaliana]
  misc_feature (1)..(541): Homolog of NCBI NO: 25285550 NR Description: probable pectinesterase [imported] - Arabidopsis >gi|9802764|gb|AAF99833.1|AC008046_5 Putative pectinesterase
  misc_feature (1)..(541): Homolog of NCBI NO: 18400509 NR Description: pectinesterase (pectin methylesterase) -related
  misc_feature (8)..(541): Homolog of NCBI NO: 1255951 NR Description: PS60 [Nicotiana tabacum]
  misc_feature (24)..(525): Homolog of NCBI NO: 7432997 NR Description: pollen-specific protein homolog - tomato >gi|1944575|emb|CAB08077.1| pectinesterase [Lycopersicon
  misc_feature (10)..(538): Homolog of NCBI NO: 15219118 NR Description: pectinesterase (pectin methylesterase), putative
  misc_feature (5)..(534): Homolog of NCBI NO: 15219120 NR Description: pectinesterase (pectin methylesterase), putative thaliana] >gi|6552744|gb|AAF16543.1|AC013482_17 T26F17.7
MAGSASFAAALFIGLSLLFAVTAEDPYRFFEWNITYGDIYPLGVRQQGILINGAFPGPDIHSVTNDNLIINVYNSLDEPFLLSWNGIQQRRNSFVDGVYGTTCPIPPGKNYTYILQMKDQIGSFYYFPSLGFHKAAGGFGGIRILSRPRIPVPFPDPAGDTTVLIGDWYKANHTDLRAQLDNGKKLPLPDGILINGRSSGATLNVEQGKTYRFRISNVGLQDSLNFRIQDHKMKVVEVEGTHTLQTTFSSLDVHVGQSYSVLVTADQTPRDYYVVVSSRFTSNVLTTTGIFRYSNSAGGVSGPIPGGPTIQIDWSLNQARAIRTNLSASGPRPNPQGSYHYGMINTTRTIRLASSAGQVDGKQRYAVNSVSFKPADTPLKIADYFKIDGVYRSGSIQYQPTGGGIYLDTSVMQVDYRTFVEIIFENSEDIVQSWHLDGYSFWVVGMDGGQWSPDSRNEYNLRDAVARCTVQVYPSSWTAILIALDNVGMWNLRSEFWARQYLGQQLYLRVYTPSTSLRDEYPIPKNALLCGRASGRSTRPL

SEQ ID NO: 106017 - protein, 425 aa, Arabidopsis thaliana
  peptide (1)..(425): Ceres Seq. ID no. 13618578
  misc_feature (1)..(425): Homolog of NCBI NO: 15222981 NR Description: pectinesterase (pectin methylesterase), putative
  misc_feature (1)..(425): Homolog of NCBI NO: 15982771 NR Description: At1g76160/T23E18_10 [Arabidopsis thaliana]
  misc_feature (1)..(425): Homolog of NCBI NO: 22531132 NR Description: pectinesterase, putative [Arabidopsis thaliana]
  misc_feature (1)..(425): Homolog of NCBI NO: 16648889 NR Description: Unknown protein [Arabidopsis thaliana]
  misc_feature (1)..(425): Homolog of NCBI NO: 18400509 NR Description: pectinesterase (pectin methylesterase) -related
  misc_feature (1)..(425): Homolog of NCBI NO: 25285550 NR Description: probable pectinesterase [imported] - Arabidopsis >gi|9802764|gb|AAF99833.1|AC008046_5 Putative pectinesterase
  misc_feature (1)..(425): Homolog of NCBI NO: 1255951 NR Description: PS60 [Nicotiana tabacum]
  misc_feature (1)..(409): Homolog of NCBI NO: 7432997 NR Description: pollen-specific protein homolog - tomato >gi|1944575|emb|CAB08077.1| pectinesterase [Lycopersicon
  misc_feature (1)..(422): Homolog of NCBI NO: 15219118 NR Description: pectinesterase (pectin methylesterase), putative
  misc_feature (1)..(418): Homolog of NCBI NO: 15219120 NR Description: pectinesterase (pectin methylesterase), putative thaliana] >gi|6552744|gb|AAF16543.1|AC013482_17 T26F17.7
MKDQIGSFYYFPSLGFHKAAGGFGGIRILSRPRIPVPFPDPAGDTTVLIGDWYKANHTDLRAQLDNGKKLPLPDGILINGRSSGATLNVEQGKTYRFRISNVGLQDSLNFRIQDHKMKVVEVEGTHTLQTTFSSLDVHVGQSYSVLVTADQTPRDYYVVVSSRFTSNVLTTTGIFRYSNSAGGVSGPIPGGPTIQIDWSLNQARAIRTNLSASGPRPNPQGSYHYGMINTTRTIRLASSAGQVDGKQRYAVNSVSFKPADTPLKIADYFKIDGVYRSGSIQYQPTGGGIYLDTSVMQVDYRTFVEIIFENSEDIVQSWHLDGYSFWVVGMDGGQWSPDSRNEYNLRDAVARCTVQVYPSSWTAILIALDNVGMWNLRSEFWARQYLGQQLYLRVYTPSTSLRDEYPIPKNALLCGRASGRSTRPL

SEQ ID NO: 106018 - DNA, 1658 bp, Arabidopsis thaliana
  misc_feature (1)..(1658): Ceres Seq. ID no. 13618587
  misc_feature: MA Experiment ID: 20000173 Result: Down-regulated in Transcription
  misc_feature: MA Experiment 20000173 PARAMETER Experiment Name: At_42deg_Heat_P Parameter: Age (day) Value: 14
  misc_feature: MA Experiment 20000173 PARAMETER Experiment Name: At_42deg_Heat_P Parameter: Organism Value: A. thaliana
  misc_feature: MA Experiment 20000173 PARAMETER Experiment Name: At_42deg_Heat_P Parameter: Plant Line Value: WS
  misc_feature: MA Experiment 20000173 PARAMETER Experiment Name: At_42deg_Heat_P Parameter: Temperature (deg C) Value: 42 vs. 22
  misc_feature: MA Experiment 20000173 PARAMETER Experiment Name: At_42deg_Heat_P Parameter: Timepoint (hr) Value: 6
  misc_feature: MA Experiment 20000173 PARAMETER Experiment Name: At_42deg_Heat_P Parameter: Tissue Value: Aerial
  misc_feature: MA Experiment ID: 20000234 Result: Down-regulated in Transcription
  misc_feature: MA Experiment 20000234 PARAMETER Experiment Name: At_Siliques_P Parameter: Age (day) Value: 21
  misc_feature: MA Experiment 20000234 PARAMETER Experiment Name: At_Siliques_P Parameter: Organism Value: A. thaliana
  misc_feature: MA Experiment 20000234 PARAMETER Experiment Name: At_Siliques_P Parameter: Plant Line Value: WS
  misc_feature: MA Experiment 20000234 PARAMETER Experiment Name: At_Siliques_P Parameter: Tissue Value: Less Than 5mm Siliques vs. Whole Plant
  misc_feature: MA Experiment ID: 20000235 Result: Down-regulated in Transcription
  misc_feature: MA Experiment 20000235 PARAMETER Experiment Name: At_Siliques_P Parameter: Age (day) Value: 21
  misc_feature: MA Experiment 20000235 PARAMETER Experiment Name: At_Siliques_P Parameter: Organism Value: A. thaliana
  misc_feature: MA Experiment 20000235 PARAMETER Experiment Name: At_Siliques_P Parameter: Plant Line Value: WS
  misc_feature: MA Experiment 20000235 PARAMETER Experiment Name: At_Siliques_P Parameter: Tissue Value: 5-10mm Siliques vs. Whole Plant
  misc_feature: MA Experiment ID: 20000264 Result: Down-regulated in Transcription
  misc_feature: MA Experiment 20000264 PARAMETER Experiment Name: At_Open_Flower_P Parameter: Age (day) Value: 21
  misc_feature: MA Experiment 20000264 PARAMETER Experiment Name: At_Open_Flower_P Parameter: Plant Line Value: WS
  misc_feature: MA Experiment 20000264 PARAMETER Experiment Name: At_Open_Flower_P Parameter: Tissue Value: Open Flower vs. Whole Plant
  misc_feature: MA Experiment ID: 20000265 Result: Down-regulated in Transcription
  misc_feature: MA Experiment 20000265 PARAMETER Experiment Name: At_Open_Flower_P Parameter: Age (day) Value: 21
  misc_feature: MA Experiment 20000265 PARAMETER Experiment Name: At_Open_Flower_P Parameter: Plant Line Value: WS
  misc_feature: MA Experiment 20000265 PARAMETER Experiment Name: At_Open_Flower_P Parameter: Tissue Value: Closed Flower vs. Whole Plant
  misc_feature: MA Experiment ID: 20000286 Result: Down-regulated in Transcription
  misc_feature: MA Experiment 20000286 PARAMETER Experiment Name: At_Open_Flower_P Parameter: Age (day) Value: 21
  misc_feature: MA Experiment 20000286 PARAMETER Experiment Name: At_Open_Flower_P Parameter: Plant Line Value: WS
  misc_feature: MA Experiment 20000286 PARAMETER Experiment Name: At_Open_Flower_P Parameter: Tissue Value: Half Open vs. Whole Plant
  misc_feature: MA Experiment ID: 20001248 Result: Down-regulated in Transcription
  misc_feature: MA Experiment 20001248 PARAMETER Experiment Name: At_Far-red-induction_P Parameter: Age (day) Value: 7
  misc_feature: MA Experiment 20001248 PARAMETER Experiment Name: At_Far-red-induction_P Parameter: Light Value: Far-red vs. White
  misc_feature: MA Experiment 20001248 PARAMETER Experiment Name: At_Far-red-induction_P Parameter: Organism Value: A. thaliana
  misc_feature: MA Experiment 20001248 PARAMETER Experiment Name: At_Far-red-induction_P Parameter: Plant Line Value: Columbia
  misc_feature: MA Experiment 20001248 PARAMETER Experiment Name: At_Far-red-induction_P Parameter: Timepoint (hr) Value: 4
  misc_feature: MA Experiment 20001248 PARAMETER Experiment Name: At_Far-red-induction_P Parameter: Tissue Value: Whole Plant
  misc_feature: MA Experiment ID: 20001560 Result: Down-regulated in Transcription
  misc_feature: MA Experiment 20001560 PARAMETER Experiment Name: At_Drought_Soil_Dry_P Parameter: Age (day) Value: 28
  misc_feature: MA Experiment 20001560 PARAMETER Experiment Name: At_Drought_Soil_Dry_P Parameter: Organism Value: A. thaliana
  misc_feature: MA Experiment 20001560 PARAMETER Experiment Name: At_Drought_Soil_Dry_P Parameter: Plant Line Value: WS
  misc_feature: MA Experiment 20001560 PARAMETER Experiment Name: At_Drought_Soil_Dry_P Parameter: Post Timepoint (hr) Value: None
  misc_feature: MA Experiment 20001560 PARAMETER Experiment Name: At_Drought_Soil_Dry_P Parameter: Post-Treatment Value: None
  misc_feature: MA Experiment 20001560 PARAMETER Experiment Name: At_Drought_Soil_Dry_P Parameter: Timepoint (day) Value: 14
  misc_feature: MA Experiment 20001560 PARAMETER Experiment Name: At_Drought_Soil_Dry_P Parameter: Treatment Value: Drought vs. No Drought
  misc_feature: MA Experiment ID: 20001905 Result: Down-regulated in Transcription
  misc_feature: MA Experiment 20001905 PARAMETER Experiment Name: At_Drought_Reproduction_P Parameter: Age (day) Value: 40
  misc_feature: MA Experiment 20001905 PARAMETER Experiment Name: At_Drought_Reproduction_P Parameter: Organism Value: A. thaliana
  misc_feature: MA Experiment 20001905 PARAMETER Experiment Name: At_Drought_Reproduction_P Parameter: Plant Line Value: WS
  misc_feature: MA Experiment 20001905 PARAMETER Experiment Name: At_Drought_Reproduction_P Parameter: Timepoint (day) Value: 10
  misc_feature: MA Experiment 20001905 PARAMETER Experiment Name: At_Drought_Reproduction_P Parameter: Tissue Value: Rosettes
  misc_feature: MA Experiment 20001905 PARAMETER Experiment Name: At_Drought_Reproduction_P Parameter: Treatment Value: Drought vs. No Drought
atgggaaacatctgtcctggctctggatcttccactgttaaccacgaacctgtctccaccaaacccctcccagtgagacgtgtgcagaccccagagaataaaaagtttcctccgccgctggtggcgatgccggcgttacatcccacgtttccactgccggaaacaggacataaactgagacccgccgctaccccgcctcgtgaaaaaccgcaacataggacgacgagatccgtcgagaacccacctcgtgaaaaaccgcaggagaagacaagatccgtcgagaacccgcctcgtgaaaaaccgcaggagaaaacaagatccgttgaaaccccacctcaggagaagacgagacccgtcgataatccgccgtcaaagccggtagaaaaattgggtttaggaaggaaagcagtgccaccgagtgggaagatagtgacacctaatctaaagatgtttacattagtggagcttaagacggctacaaagaactttcgaccagaatctgtgatcggagaaggtggattcggacaggtttttaaaggatgggtggatgagaaaacattagctccgtcgagagctggcgtcggaataccagtcgccgtcaagaaatcaaaccctgatagtgagcaaggcttacatgaatggcagtgtgaagtgagattcttagggaagtttcatcatccaaatttggtgaagctcttgggttattgctgggaagagaaccagttccttttggtctatgagtatttgcctaaaggaagccttgaaaatcacctcttctcaaaaggagcagaggcattaccttgggatacacgtttgaagatagccattgaagcagctcaaggacttacctttttgcataactccgagaagagtgttatctatagagacttcaaagcttccaatattcttctcgattccaacttccacgccaagctttcagacttcggactagctaaaaatgggcccattaatggattctcacacgtgaccacacgtgtcatgggcacacaaggctatgcagctcccgagtacatggctacaggtcatctatatgtgaggagtgatgtttacgggtttggagtggtactcttagagctcttaaccggtttaagagcattagacccaaaccgaccatctgcgcaacaaaatcttgtggaatgggctaaaccggggttgaaccagaagaagaaggttcagaaaatgatggatccacggctcgagcagaagtatccacttttggcggtgaccaaaaccgcggagctcattcttcggtgtctggaggctgacccgaaaaaccgaccgccaatggatgatgtgcttagagaattagaagtcgtaaggactatcagagaccaaccccaagaagagaggcgtaaaaggagcagtggtccagatactaaccgggttcgtggaaatgattcaccatatggccgtagaaccggtcgaaccggatagtcaaagagttcttttggatcagtcatacgtatattacacagtatatacagacgaacaacctttaaagaaaaaaaaatgtaatactttttctctggtagtgaatatatgttattaatttctagacctagtgaaatatttgttgtacacttcaaaataaagccataatttattggaagacatgtaaataaaaattgtgtatctac

SEQ ID NO: 106019 - protein, 484 aa, Arabidopsis thaliana
  peptide (1)..(484): Ceres Seq. ID no. 13618588
  misc_feature (43)..(484): Homolog of NCBI NO: 25287650 NR Description: hypothetical protein F15M4.14 [imported] -
  misc_feature (150)..(484): Homolog of NCBI NO: 30699159 NR Description: protein kinase, putative [Arabidopsis thaliana]
  misc_feature (130)..(464): Homolog of NCBI NO: 38345396 NR Description: OSJNBa0017B10.2 [Oryza sativa (japonica
  misc_feature (79)..(475): Homolog of NCBI NO: 21537344 NR Description: putative protein kinase [Arabidopsis thaliana]
  misc_feature (139)..(475): Homolog of NCBI NO: 18398350 NR Description: protein kinase -related [Arabidopsis thaliana] putative protein kinase [Arabidopsis thaliana]
  misc_feature (139)..(475): Homolog of NCBI NO: 25287605 NR Description: probable protein kinase [imported] - Arabidopsis
  misc_feature (140)..(478): Homolog of NCBI NO: 20503002 NR Description: Putative protein kinase [Oryza sativa (japonica
  misc_feature (141)..(480): Homolog of NCBI NO: 15227001 NR Description: protein kinase (APK1b) [Arabidopsis thaliana]
  misc_feature (141)..(462): Homolog of NCBI NO: 166809 NR Description: protein kinase
  misc_feature (141)..(462): Homolog of NCBI NO: 15241749 NR Description: protein kinase, putative [Arabidopsis thaliana]
MGNICPGSGSSTVNHEPVSTKPLPVRRVQTPENKKFPPPLVAMPALHPTFPLPETGHKLRPAATPPREKPQHRTTRSVENPPREKPQEKTRSVENPPREKPQEKTRSVETPPQEKTRPVDNPPSKPVEKLGLGRKAVPPSGKIVTPNLKMFTLVELKTATKNFRPESVIGEGGFGQVFKGWVDEKTLAPSRAGVGIPVAVKKSNPDSEQGLHEWQCEVRFLGKFHHPNLVKLLGYCWEENQFLLVYEYLPKGSLENHLFSKGAEALPWDTRLKIAIEAAQGLTFLHNSEKSVIYRDFKASNILLDSNFHAKLSDFGLAKNGPINGFSHVTTRVMGTQGYAAPEYMATGHLYVRSDVYGFGVVLLELLTGLRALDPNRPSAQQNLVEWAKPGLNQKKKVQKMMDPRLEQKYPLLAVTKTAELILRCLEADPKNRPPMDDVLRELEVVRTIRDQPQEERRKRSSGPDTNRVRGNDSPYGRRTGRTG

SEQ ID NO: 106020 - protein, 442 aa, Arabidopsis thaliana
  peptide (1)..(442): Ceres Seq. ID no. 13618589
  misc_feature (1)..(442): Homolog of NCBI NO: 25287650 NR Description: hypothetical protein F15M4.14 [imported] -
  misc_feature (108)..(442): Homolog of NCBI NO: 30699159 NR Description: protein kinase, putative [Arabidopsis thaliana]
  misc_feature (88)..(422): Homolog of NCBI NO: 38345396 NR Description: OSJNBa0017B10.2 [Oryza sativa (japonica
  misc_feature (37)..(433): Homolog of NCBI NO: 21537344 NR Description: putative protein kinase [Arabidopsis thaliana]
  misc_feature (97)..(433): Homolog of NCBI NO: 18398350 NR Description: protein kinase -related [Arabidopsis thaliana] putative protein kinase [Arabidopsis thaliana]
  misc_feature (97)..(433): Homolog of NCBI NO: 25287605 NR Description: probable protein kinase [imported] - Arabidopsis
  misc_feature (98)..(436): Homolog of NCBI NO: 20503002 NR Description: Putative protein kinase [Oryza sativa (japonica
  misc_feature (99)..(438): Homolog of NCBI NO: 15227001 NR Description: protein kinase (APK1b) [Arabidopsis thaliana]
  misc_feature (99)..(420): Homolog of NCBI NO: 166809 NR Description: protein kinase
  misc_feature (99)..(420): Homolog of NCBI NO: 15241749 NR Description: protein kinase, putative [Arabidopsis thaliana]
MPALHPTFPLPETGHKLRPAATPPREKPQHRTTRSVENPPREKPQEKTRSVENPPREKPQEKTRSVETPPQEKTRPVDNPPSKPVEKLGLGRKAVPPSGKIVTPNLKMFTLVELKTATKNFRPESVIGEGGFGQVFKGWVDEKTLAPSRAGVGIPVAVKKSNPDSEQGLHEWQCEVRFLGKFHHPNLVKLLGYCWEENQFLLVYEYLPKGSLENHLFSKGAEALPWDTRLKIAIEAAQGLTFLHNSEKSVIYRDFKASNILLDSNFHAKLSDFGLAKNGPINGFSHVTTRVMGTQGYAAPEYMATGHLYVRSDVYGFGVVLLELLTGLRALDPNRPSAQQNLVEWAKPGLNQKKKVQKMMDPRLEQKYPLLAVTKTAELILRCLEADPKNRPPMDDVLRELEVVRTIRDQPQEERRKRSSGPDTNRVRGNDSPYGRRTGRTG

SEQ ID NO: 106021 - protein, 335 aa, Arabidopsis thaliana
  peptide (1)..(335): Ceres Seq. ID no. 13618590
  misc_feature (1)..(335): Homolog of NCBI NO: 25287650 NR Description: hypothetical protein F15M4.14 [imported] -
  misc_feature (1)..(335): Homolog of NCBI NO: 30699159 NR Description: protein kinase, putative [Arabidopsis thaliana]
  misc_feature (1)..(315): Homolog of NCBI NO: 38345396 NR Description: OSJNBa0017B10.2 [Oryza sativa (japonica
  misc_feature (1)..(326): Homolog of NCBI NO: 21537344 NR Description: putative protein kinase [Arabidopsis thaliana]
  misc_feature (1)..(326): Homolog of NCBI NO: 18398350 NR Description: protein kinase -related [Arabidopsis thaliana] putative protein kinase [Arabidopsis thaliana]
  misc_feature (1)..(326): Homolog of NCBI NO: 25287605 NR Description: probable protein kinase [imported] - Arabidopsis
  misc_feature (1)..(329): Homolog of NCBI NO: 20503002 NR Description: Putative protein kinase [Oryza sativa (japonica
  misc_feature (1)..(331): Homolog of NCBI NO: 15227001 NR Description: protein kinase (APK1b) [Arabidopsis thaliana]
  misc_feature (1)..(313): Homolog of NCBI NO: 166809 NR Description: protein kinase
  misc_feature (1)..(313): Homolog of NCBI NO: 15241749 NR Description: protein kinase, putative [Arabidopsis thaliana]
MFTLVELKTATKNFRPESVIGEGGFGQVFKGWVDEKTLAPSRAGVGIPVAVKKSNPDSEQGLHEWQCEVRFLGKFHHPNLVKLLGYCWEENQFLLVYEYLPKGSLENHLFSKGAEALPWDTRLKIAIEAAQGLTFLHNSEKSVIYRDFKASNILLDSNFHAKLSDFGLAKNGPINGFSHVTTRVMGTQGYAAPEYMATGHLYVRSDVYGFGVVLLELLTGLRALDPNRPSAQQNLVEWAKPGLNQKKKVQKMMDPRLEQKYPLLAVTKTAELILRCLEADPKNRPPMDDVLRELEVVRTIRDQPQEERRKRSSGPDTNRVRGNDSPYGRRTGRTG

SEQ ID NO: 106022 - DNA, 986 bp, Arabidopsis thaliana
  misc_feature (1)..(986): Ceres Seq. ID no. 13618591
  misc_feature: MA Experiment ID: 108473 Result: Up-regulated in Transcription
  misc_feature: MA Experiment 108473 PARAMETER Experiment Name: At_Drought_Flowers_cDNA_P Parameter: Timepoint (hr) Value: 7 d
  misc_feature: MA Experiment 108473 PARAMETER Experiment Name: At_Drought_Flowers_cDNA_P Parameter: Tissue Value: Flower
  misc_feature: MA Experiment 108473 PARAMETER Experiment Name: At_Drought_Flowers_cDNA_P Parameter: Treatment Value: Drought vs. No Drought
  misc_feature: MA Experiment ID: 108474 Result: Down-regulated in Transcription
  misc_feature: MA Experiment 108474 PARAMETER Experiment Name: At_Drought_Flowers_cDNA_P Parameter: Timepoint (hr) Value: null
  misc_feature: MA Experiment 108474 PARAMETER Experiment Name: At_Drought_Flowers_cDNA_P Parameter: Treatment Value: Drought vs. No Drought
  misc_feature: MA Experiment ID: 108561 Result: Up-regulated in Transcription
  misc_feature: MA Experiment 108561 PARAMETER Experiment Name: At_100uM_ABA_cDNA_P Parameter: Timepoint (hr) Value: 6
  misc_feature: MA Experiment 108561 PARAMETER Experiment Name: At_100uM_ABA_cDNA_P Parameter: Tissue Value: Aerial
  misc_feature: MA Experiment 108561 PARAMETER Experiment Name: At_100uM_ABA_cDNA_P Parameter: Treatment Value: 100uM ABA vs. No Treatment
  misc_feature: MA Experiment ID: 108572 Result: Up-regulated in Transcription
  misc_feature: MA Experiment 108572 PARAMETER Experiment Name: At_Drought_cDNA_P Parameter: Timepoint (hr) Value: 1
  misc_feature: MA Experiment 108572 PARAMETER Experiment Name: At_Drought_cDNA_P Parameter: Tissue Value: Aerial
  misc_feature: MA Experiment 108572 PARAMETER Experiment Name: At_Drought_cDNA_P Parameter: Treatment Value: Drought vs. No Drought
  misc_feature: MA Experiment ID: 108573 Result: Up-regulated in Transcription
  misc_feature: MA Experiment 108573 PARAMETER Experiment Name: At_Drought_cDNA_P Parameter: Timepoint (hr) Value: 6
  misc_feature: MA Experiment 108573 PARAMETER Experiment Name: At_Drought_cDNA_P Parameter: Tissue Value: Aerial
  misc_feature: MA Experiment 108573 PARAMETER Experiment Name: At_Drought_cDNA_P Parameter: Treatment Value: Drought vs. No Drought
  misc_feature: MA Experiment ID: 108595 Result: Up-regulated in Transcription
  misc_feature: MA Experiment 108595 PARAMETER Experiment Name: At_Ler-pi_Ovule_cDNA_P Parameter: Plant Line Value: null
  misc_feature: MA Experiment ID: 108605 Result: Up-regulated in Transcription
  misc_feature: MA Experiment 108605 PARAMETER Experiment Name: At_100uM_ABA_cDNA_P Parameter: Timepoint (hr) Value: 6
  misc_feature: MA Experiment 108605 PARAMETER Experiment Name: At_100uM_ABA_cDNA_P Parameter: Tissue Value: Aerial
  misc_feature: MA Experiment 108605 PARAMETER Experiment Name: At_100uM_ABA_cDNA_P Parameter: Treatment Value: 100uM ABA vs. No Treatment
  misc_feature: MA Experiment ID: 108607 Result: Up-regulated in Transcription
  misc_feature: MA Experiment 108607 PARAMETER Experiment Name: At_100uM_ABA_cDNA_P Parameter: Timepoint (hr) Value: 4
  misc_feature: MA Experiment 108607 PARAMETER Experiment Name: At_100uM_ABA_cDNA_P Parameter: Tissue Value: Aerial
  misc_feature: MA Experiment 108607 PARAMETER Experiment Name: At_100uM_ABA_cDNA_P Parameter: Treatment Value: 100uM ABA vs. No Treatment
  misc_feature: MA Experiment ID: 108668 Result: Up-regulated in Transcription
  misc_feature: MA Experiment 108668 PARAMETER Experiment Name: At_2mM_SA_cDNA_P Parameter: Plant Line Value: WS
  misc_feature: MA Experiment 108668 PARAMETER Experiment Name: At_2mM_SA_cDNA_P Parameter: Timepoint (hr) Value: 6
  misc_feature: MA Experiment 108668 PARAMETER Experiment Name: At_2mM_SA_cDNA_P Parameter: Treatment Value: 2mM SA vs. No Treatment
  misc_feature: MA Experiment ID: 20000069 Result: Up-regulated in Transcription
  misc_feature: MA Experiment 20000069 PARAMETER Experiment Name: At_100uM_ABA_Mutants_cDNA_P Parameter: Plant Line Value: CS23
  misc_feature: MA Experiment 20000069 PARAMETER Experiment Name: At_100uM_ABA_Mutants_cDNA_P Parameter: Timepoint (hr) Value: 6
  misc_feature: MA Experiment 20000069 PARAMETER Experiment Name: At_100uM_ABA_Mutants_cDNA_P Parameter: Tissue Value: Aerial
  misc_feature: MA Experiment 20000069 PARAMETER Experiment Name: At_100uM_ABA_Mutants_cDNA_P Parameter: Treatment Value: 100uM ABA vs. No Treatment
  misc_feature: MA Experiment ID: 20000070 Result: Up-regulated in Transcription
  misc_feature: MA Experiment 20000070 PARAMETER Experiment Name: At_100uM_ABA_Mutants_cDNA_P Parameter: Plant Line Value: CS24
  misc_feature: MA Experiment 20000070 PARAMETER Experiment Name: At_100uM_ABA_Mutants_cDNA_P Parameter: Timepoint (hr) Value: 6
  misc_feature: MA Experiment 20000070 PARAMETER Experiment Name: At_100uM_ABA_Mutants_cDNA_P Parameter: Tissue Value: Aerial
  misc_feature: MA Experiment 20000070 PARAMETER Experiment Name: At_100uM_ABA_Mutants_cDNA_P Parameter: Treatment Value: 100uM ABA vs. No Treatment
  misc_feature: MA Experiment ID: 20000071 Result: Up-regulated in Transcription
  misc_feature: MA Experiment 20000071 PARAMETER Experiment Name: At_100uM_ABA_Mutants_cDNA_P Parameter: Plant Line Value: CS8104
  misc_feature: MA Experiment 20000071 PARAMETER Experiment Name: At_100uM_ABA_Mutants_cDNA_P Parameter: Timepoint (hr) Value: 6
  misc_feature: MA Experiment 20000071 PARAMETER Experiment Name: At_100uM_ABA_Mutants_cDNA_P Parameter: Tissue Value: Aerial
  misc_feature: MA Experiment 20000071 PARAMETER Experiment Name: At_100uM_ABA_Mutants_cDNA_P Parameter: Treatment Value: 100uM ABA vs. No Treatment
  misc_feature: MA Experiment ID: 20000086 Result: Up-regulated in Transcription
  misc_feature: MA Experiment 20000086 PARAMETER Experiment Name: At_100uM_ABA_Mutants_cDNA_P Parameter: Plant Line Value: CS22
  misc_feature: MA Experiment 20000086 PARAMETER Experiment Name: At_100uM_ABA_Mutants_cDNA_P Parameter: Timepoint (hr) Value: 6
  misc_feature: MA Experiment 20000086 PARAMETER Experiment Name: At_100uM_ABA_Mutants_cDNA_P Parameter: Tissue Value: Aerial
  misc_feature: MA Experiment 20000086 PARAMETER Experiment Name: At_100uM_ABA_Mutants_cDNA_P Parameter: Treatment Value: 100uM ABA vs. No Treatment
  misc_feature: MA Experiment ID: 20000087 Result: Up-regulated in Transcription
  misc_feature: MA Experiment 20000087 PARAMETER Experiment Name: At_100uM_ABA_Mutants_cDNA_P Parameter: Plant Line Value: WS
  misc_feature: MA Experiment 20000087 PARAMETER Experiment Name: At_100uM_ABA_Mutants_cDNA_P Parameter: Timepoint (hr) Value: 6
  misc_feature: MA Experiment 20000087 PARAMETER Experiment Name: At_100uM_ABA_Mutants_cDNA_P Parameter: Tissue Value: Aerial
  misc_feature: MA Experiment 20000087 PARAMETER Experiment Name: At_100uM_ABA_Mutants_cDNA_P Parameter: Treatment Value: 100uM ABA vs. No Treatment
  misc_feature: MA Experiment ID: 20000088 Result: Up-regulated in Transcription
  misc_feature: MA Experiment 20000088 PARAMETER Experiment Name: At_100uM_ABA_Mutants_cDNA_P Parameter: Plant Line Value: Landsberg
  misc_feature: MA Experiment 20000088 PARAMETER Experiment Name: At_100uM_ABA_Mutants_cDNA_P Parameter: Timepoint (hr) Value: 6
  misc_feature: MA Experiment 20000088 PARAMETER Experiment Name: At_100uM_ABA_Mutants_cDNA_P Parameter: Tissue Value: Aerial
  misc_feature: MA Experiment 20000088 PARAMETER Experiment Name: At_100uM_ABA_Mutants_cDNA_P Parameter: Treatment Value: 100uM ABA vs. No Treatment
  misc_feature: MA Experiment ID: 20000090 Result: Up-regulated in Transcription
  misc_feature: MA Experiment ID: 20000113 Result: Down-regulated in Transcription
  misc_feature: MA Experiment 20000113 PARAMETER Experiment Name: At_42deg_Heat_cDNA_P Parameter: Temperature (deg C) Value: 42 vs. 22
  misc_feature: MA Experiment 20000113 PARAMETER Experiment Name: At_42deg_Heat_cDNA_P Parameter: Timepoint (hr) Value: 8
  misc_feature: MA Experiment 20000113 PARAMETER Experiment Name: At_42deg_Heat_cDNA_P Parameter: Tissue Value: Aerial
  misc_feature: MA Experiment ID: 20000117 Result: Up-regulated in Transcription
  misc_feature: MA Experiment 20000117 PARAMETER Experiment Name: At_100uM_ABA_Mutants_cDNA_P Parameter: Plant Line Value: Columbia
  misc_feature: MA Experiment 20000117 PARAMETER Experiment Name: At_100uM_ABA_Mutants_cDNA_P Parameter: Timepoint (hr) Value: 6
  misc_feature: MA Experiment 20000117 PARAMETER Experiment Name: At_100uM_ABA_Mutants_cDNA_P Parameter: Tissue Value: Aerial
  misc_feature: MA Experiment 20000117 PARAMETER Experiment Name: At_100uM_ABA_Mutants_cDNA_P Parameter: Treatment Value: 100uM ABA vs. No Treatment
  misc_feature: MA Experiment ID: 20000169 Result: Up-regulated in Transcription
  misc_feature: MA Experiment 20000169 PARAMETER Experiment Name: At_100uM_ABA_P Parameter: Age (day) Value: 14
  misc_feature: MA Experiment 20000169 PARAMETER Experiment Name: At_100uM_ABA_P Parameter: Organism Value: A. thaliana
  misc_feature: MA Experiment 20000169 PARAMETER Experiment Name: At_100uM_ABA_P Parameter: Plant Line Value: WS
  misc_feature: MA Experiment 20000169 PARAMETER Experiment Name: At_100uM_ABA_P Parameter: Timepoint (hr) Value: 6
  misc_feature: MA Experiment 20000169 PARAMETER Experiment Name: At_100uM_ABA_P Parameter: Tissue Value: Aerial
  misc_feature: MA Experiment 20000169 PARAMETER Experiment Name: At_100uM_ABA_P Parameter: Treatment Value: 100uM ABA vs. No Treatment
  misc_feature: MA Experiment ID: 20000182 Result: Up-regulated in Transcription
  misc_feature: MA Experiment 20000182 PARAMETER Experiment Name: At_2mM_SA_P Parameter: Age (day) Value: 14
  misc_feature: MA Experiment 20000182 PARAMETER Experiment Name: At_2mM_SA_P Parameter: Organism Value: A. thaliana
  misc_feature: MA Experiment 20000182 PARAMETER Experiment Name: At_2mM_SA_P Parameter: Plant Line Value: WS
  misc_feature: MA Experiment 20000182 PARAMETER Experiment Name: At_2mM_SA_P Parameter: Timepoint (hr) Value: 6
  misc_feature: MA Experiment 20000182 PARAMETER Experiment Name: At_2mM_SA_P Parameter: Tissue Value: Aerial
  misc_feature: MA Experiment 20000182 PARAMETER Experiment Name: At_2mM_SA_P Parameter: Treatment Value: 2mM SA vs. No Treatment
  misc_feature: MA Experiment ID: 20000234 Result: Up-regulated in Transcription
  misc_feature: MA Experiment 20000234 PARAMETER Experiment Name: At_Siliques_P Parameter: Age (day) Value: 21
  misc_feature: MA Experiment 20000234 PARAMETER Experiment Name: At_Siliques_P Parameter: Organism Value: A. thaliana
  misc_feature: MA Experiment 20000234 PARAMETER Experiment Name: At_Siliques_P Parameter: Plant Line Value: WS
  misc_feature: MA Experiment 20000234 PARAMETER Experiment Name: At_Siliques_P Parameter: Tissue Value: Less Than 5mm Siliques vs. Whole Plant
  misc_feature: MA Experiment ID: 20000265 Result: Up-regulated in Transcription
  misc_feature: MA Experiment 20000265 PARAMETER Experiment Name: At_Open_Flower_P Parameter: Age (day) Value: 21
  misc_feature: MA Experiment 20000265 PARAMETER Experiment Name: At_Open_Flower_P Parameter: Plant Line Value: WS
  misc_feature: MA Experiment 20000265 PARAMETER Experiment Name: At_Open_Flower_P Parameter: Tissue Value: Closed Flower vs. Whole Plant
  misc_feature: MA Experiment ID: 20000267 Result: Up-regulated in Transcription
  misc_feature: MA Experiment 20000267 PARAMETER Experiment Name: At_Drought_P Parameter: Age (day) Value: 7
  misc_feature: MA Experiment 20000267 PARAMETER Experiment Name: At_Drought_P Parameter: Organism Value: A. thaliana
  misc_feature: MA Experiment 20000267 PARAMETER Experiment Name: At_Drought_P Parameter: Plant Line Value: WS
  misc_feature: MA Experiment 20000267 PARAMETER Experiment Name: At_Drought_P Parameter: Timepoint (hr) Value: 6
  misc_feature: MA Experiment 20000267 PARAMETER Experiment Name: At_Drought_P Parameter: Tissue Value: Whole Plant
  misc_feature: MA Experiment 20000267 PARAMETER Experiment Name: At_Drought_P Parameter: Treatment Value: Drought vs. No Drought
  misc_feature: MA Experiment ID: 20000286 Result: Up-regulated in Transcription
  misc_feature: MA Experiment 20000286 PARAMETER Experiment Name: At_Open_Flower_P Parameter: Age (day) Value: 21
  misc_feature: MA Experiment 20000286 PARAMETER Experiment Name: At_Open_Flower_P Parameter: Plant Line Value: WS
  misc_feature: MA Experiment 20000286 PARAMETER Experiment Name: At_Open_Flower_P Parameter: Tissue Value: Half Open vs. Whole Plant
  misc_feature: MA Experiment ID: 20000436 Result: Up-regulated in Transcription
  misc_feature: MA Experiment 20000436 PARAMETER Experiment Name: At_Drought_P Parameter: Age (day) Value: 7
  misc_feature: MA Experiment 20000436 PARAMETER Experiment Name: At_Drought_P Parameter: Organism Value: A. thaliana
  misc_feature: MA Experiment 20000436 PARAMETER Experiment Name: At_Drought_P Parameter: Plant Line Value: WS
  misc_feature: MA Experiment 20000436 PARAMETER Experiment Name: At_Drought_P Parameter: Timepoint (hr) Value: 12
  misc_feature: MA Experiment 20000436 PARAMETER Experiment Name: At_Drought_P Parameter: Tissue Value: Whole Plant
  misc_feature: MA Experiment 20000436 PARAMETER Experiment Name: At_Drought_P Parameter: Treatment Value: Drought vs. No Drought
  misc_feature: MA Experiment ID: 20000437 Result: Up-regulated in Transcription
  misc_feature: MA Experiment 20000437 PARAMETER Experiment Name: At_Drought_P Parameter: Age (day) Value: 8
  misc_feature: MA Experiment 20000437 PARAMETER Experiment Name: At_Drought_P Parameter: Organism Value: A. thaliana
  misc_feature: MA Experiment 20000437 PARAMETER Experiment Name: At_Drought_P Parameter: Plant Line Value: WS
  misc_feature: MA Experiment 20000437 PARAMETER Experiment Name: At_Drought_P Parameter: Timepoint (hr) Value: 24
  misc_feature: MA Experiment 20000437 PARAMETER Experiment Name: At_Drought_P Parameter: Tissue Value: Whole Plant
  misc_feature: MA Experiment 20000437 PARAMETER Experiment Name: At_Drought_P Parameter: Treatment Value: Drought vs. No Drought
  misc_feature: MA Experiment ID: 20000438 Result: Down-regulated in Transcription
  misc_feature: MA Experiment 20000438 PARAMETER Experiment Name: At_Shoots__P Parameter: Age (day) Value: 14
  misc_feature: MA Experiment 20000438 PARAMETER Experiment Name: At_Shoots__P Parameter: Tissue Value: Shoots vs. Whole Plant
  misc_feature: MA Experiment ID: 20000441 Result: Down-regulated in Transcription
  misc_feature: MA Experiment 20000441 PARAMETER Experiment Name: At_1uM_BR-BRZ__P Parameter: Tissue Value: Shoot Apices
  misc_feature: MA Experiment 20000441 PARAMETER Experiment Name: At_1uM_BR-BRZ__P Parameter: Treatment Value: 1uM BR vs. No Treatment
  misc_feature: MA Experiment ID: 20000453 Result: Up-regulated in Transcription
  misc_feature: MA Experiment 20000453 PARAMETER Experiment Name: At_100uM_ABA_P Parameter: Age (day) Value: 15
  misc_feature: MA Experiment 20000453 PARAMETER Experiment Name: At_100uM_ABA_P Parameter: Organism Value: A. thaliana
  misc_feature: MA Experiment 20000453 PARAMETER Experiment Name: At_100uM_ABA_P Parameter: Plant Line Value: WS
  misc_feature: MA Experiment 20000453 PARAMETER Experiment Name: At_100uM_ABA_P Parameter: Timepoint (hr) Value: 24
  misc_feature: MA Experiment 20000453 PARAMETER Experiment Name: At_100uM_ABA_P Parameter: Tissue Value: Aerial
  misc_feature: MA Experiment 20000453 PARAMETER Experiment Name: At_100uM_ABA_P Parameter: Treatment Value: 100uM ABA vs. No Treatment
  misc_feature: MA Experiment ID: 20000794 Result: Up-regulated in Transcription
  misc_feature: MA Experiment 20000794 PARAMETER Experiment Name: At_Petals_P Parameter: Age (day) Value: 23-25 days
  misc_feature: MA Experiment 20000794 PARAMETER Experiment Name: At_Petals_P Parameter: Plant Line Value: WS
  misc_feature: MA Experiment 20000794 PARAMETER Experiment Name: At_Petals_P Parameter: Tissue Value: Petals vs. Whole plant
  misc_feature: MA Experiment ID: 20001554 Result: Up-regulated in Transcription
  misc_feature: MA Experiment 20001554 PARAMETER Experiment Name: At_Drought_Soil_Dry_P Parameter: Age (day) Value: 21
  misc_feature: MA Experiment 20001554 PARAMETER Experiment Name: At_Drought_Soil_Dry_P Parameter: Organism Value: A. thaliana
  misc_feature: MA Experiment 20001554 PARAMETER Experiment Name: At_Drought_Soil_Dry_P Parameter: Plant Line Value: WS
  misc_feature: MA Experiment 20001554 PARAMETER Experiment Name: At_Drought_Soil_Dry_P Parameter: Post Timepoint (hr) Value: None
  misc_feature: MA Experiment 20001554 PARAMETER Experiment Name: At_Drought_Soil_Dry_P Parameter: Post-Treatment Value: None
  misc_feature: MA Experiment 20001554 PARAMETER Experiment Name: At_Drought_Soil_Dry_P Parameter: Timepoint (day) Value: 7
  misc_feature: MA Experiment 20001554 PARAMETER Experiment Name: At_Drought_Soil_Dry_P Parameter: Treatment Value: Drought vs. No Drought
  misc_feature: MA Experiment ID: 20001555 Result: Up-regulated in Transcription
  misc_feature: MA Experiment 20001555 PARAMETER Experiment Name: At_Drought_Soil_Dry_P Parameter: Age (day) Value: 24
  misc_feature: MA Experiment 20001555 PARAMETER Experiment Name: At_Drought_Soil_Dry_P Parameter: Organism Value: A. thaliana
  misc_feature: MA Experiment 20001555 PARAMETER Experiment Name: At_Drought_Soil_Dry_P Parameter: Plant Line Value: WS
  misc_feature: MA Experiment 20001555 PARAMETER Experiment Name: At_Drought_Soil_Dry_P Parameter: Post Timepoint (hr) Value: None
  misc_feature: MA Experiment 20001555 PARAMETER Experiment Name: At_Drought_Soil_Dry_P Parameter: Post-Treatment Value: None
  misc_feature: MA Experiment 20001555 PARAMETER Experiment Name: At_Drought_Soil_Dry_P Parameter: Timepoint (day) Value: 10
  misc_feature: MA Experiment 20001555 PARAMETER Experiment Name: At_Drought_Soil_Dry_P Parameter: Treatment Value: Drought vs. No Drought
  misc_feature: MA Experiment ID: 20001556 Result: Up-regulated in Transcription
  misc_feature: MA Experiment 20001556 PARAMETER Experiment Name: At_Drought_Soil_Dry_P Parameter: Age (day) Value: 26
  misc_feature: MA Experiment 20001556 PARAMETER Experiment Name: At_Drought_Soil_Dry_P Parameter: Organism Value: A. thaliana
  misc_feature: MA Experiment 20001556 PARAMETER Experiment Name: At_Drought_Soil_Dry_P Parameter: Plant Line Value: WS
  misc_feature: MA Experiment 20001556 PARAMETER Experiment Name: At_Drought_Soil_Dry_P Parameter: Post Timepoint (hr) Value: None
  misc_feature: MA Experiment 20001556 PARAMETER Experiment Name: At_Drought_Soil_Dry_P Parameter: Post-Treatment Value: None
  misc_feature: MA Experiment 20001556 PARAMETER Experiment Name: At_Drought_Soil_Dry_P Parameter: Timepoint (day) Value: 12
  misc_feature: MA Experiment 20001556 PARAMETER Experiment Name: At_Drought_Soil_Dry_P Parameter: Treatment Value: Drought vs. No Drought
  misc_feature: MA Experiment ID: 20001559 Result: Up-regulated in Transcription
  misc_feature: MA Experiment 20001559 PARAMETER Experiment Name: At_Drought_Soil_Dry_P Parameter: Age (day) Value: 28
  misc_feature: MA Experiment 20001559 PARAMETER Experiment Name: At_Drought_Soil_Dry_P Parameter: Organism Value: A. thaliana
  misc_feature: MA Experiment 20001559 PARAMETER Experiment Name: At_Drought_Soil_Dry_P Parameter: Plant Line Value: WS
  misc_feature: MA Experiment 20001559 PARAMETER Experiment Name: At_Drought_Soil_Dry_P Parameter: Post Timepoint (hr) Value: 29
  misc_feature: MA Experiment 20001559 PARAMETER Experiment Name: At_Drought_Soil_Dry_P Parameter: Post-Treatment Value: Re-Water vs. No Drought
  misc_feature: MA Experiment 20001559 PARAMETER Experiment Name: At_Drought_Soil_Dry_P Parameter: Timepoint (day) Value: 14
  misc_feature: MA Experiment 20001559 PARAMETER Experiment Name: At_Drought_Soil_Dry_P Parameter: Treatment Value: Drought vs. No Drought
  misc_feature: MA Experiment ID: 20001560 Result: Up-regulated in Transcription
  misc_feature: MA Experiment 20001560 PARAMETER Experiment Name: At_Drought_Soil_Dry_P Parameter: Age (day) Value: 28
  misc_feature: MA Experiment 20001560 PARAMETER Experiment Name: At_Drought_Soil_Dry_P Parameter: Organism Value: A. thaliana
  misc_feature: MA Experiment 20001560 PARAMETER Experiment Name: At_Drought_Soil_Dry_P Parameter: Plant Line Value: WS
  misc_feature: MA Experiment 20001560 PARAMETER Experiment Name: At_Drought_Soil_Dry_P Parameter: Post Timepoint (hr) Value: None
  misc_feature: MA Experiment 20001560 PARAMETER Experiment Name: At_Drought_Soil_Dry_P Parameter: Post-Treatment Value: None
  misc_feature: MA Experiment 20001560 PARAMETER Experiment Name: At_Drought_Soil_Dry_P Parameter: Timepoint (day) Value: 14
  misc_feature: MA Experiment 20001560 PARAMETER Experiment Name: At_Drought_Soil_Dry_P Parameter: Treatment Value: Drought vs. No Drought
  misc_feature: MA Experiment ID: 20001757 Result: Down-regulated in Transcription
  misc_feature: MA Experiment 20001757 PARAMETER Experiment Name: At_50mM_NH4NO3_L-to-H_P Parameter: Timepoint (hr) Value: 6
  misc_feature: MA Experiment 20001757 PARAMETER Experiment Name: At_50mM_NH4NO3_L-to-H_P Parameter: Tissue Value: Leaf
  misc_feature: MA Experiment 20001757 PARAMETER Experiment Name: At_50mM_NH4NO3_L-to-H_P Parameter: Treatment Value: 50mM NH4NO3 vs 100mM Mannitol
  misc_feature: MA Experiment ID: 20001904 Result: Up-regulated in Transcription
  misc_feature: MA Experiment 20001904 PARAMETER Experiment Name: At_Drought_Reproduction_P Parameter: Age (day) Value: 37
  misc_feature: MA Experiment 20001904 PARAMETER Experiment Name: At_Drought_Reproduction_P Parameter: Organism Value: A. thaliana
  misc_feature: MA Experiment 20001904 PARAMETER Experiment Name: At_Drought_Reproduction_P Parameter: Plant Line Value: WS
  misc_feature: MA Experiment 20001904 PARAMETER Experiment Name: At_Drought_Reproduction_P Parameter: Timepoint (day) Value: 7
  misc_feature: MA Experiment 20001904 PARAMETER Experiment Name: At_Drought_Reproduction_P Parameter: Tissue Value: Rosettes
  misc_feature: MA Experiment 20001904 PARAMETER Experiment Name: At_Drought_Reproduction_P Parameter: Treatment Value: Drought vs. No Drought
  misc_feature: MA Experiment ID: 20001905 Result: Up-regulated in Transcription
  misc_feature: MA Experiment 20001905 PARAMETER Experiment Name: At_Drought_Reproduction_P Parameter: Age (day) Value: 40
  misc_feature: MA Experiment 20001905 PARAMETER Experiment Name: At_Drought_Reproduction_P Parameter: Organism Value: A. thaliana
  misc_feature: MA Experiment 20001905 PARAMETER Experiment Name: At_Drought_Reproduction_P Parameter: Plant Line Value: WS
  misc_feature: MA Experiment 20001905 PARAMETER Experiment Name: At_Drought_Reproduction_P Parameter: Timepoint (day) Value: 10
  misc_feature: MA Experiment 20001905 PARAMETER Experiment Name: At_Drought_Reproduction_P Parameter: Tissue Value: Rosettes
  misc_feature: MA Experiment 20001905 PARAMETER Experiment Name: At_Drought_Reproduction_P Parameter: Treatment Value: Drought vs. No Drought
  misc_feature: MA Experiment ID: 20001906 Result: Up-regulated in Transcription
  misc_feature: MA Experiment 20001906 PARAMETER Experiment Name: At_Drought_Reproduction_P Parameter: Age (day) Value: 35
  misc_feature: MA Experiment 20001906 PARAMETER Experiment Name: At_Drought_Reproduction_P Parameter: Organism Value: A. thaliana
  misc_feature: MA Experiment 20001906 PARAMETER Experiment Name: At_Drought_Reproduction_P Parameter: Plant Line Value: WS
  misc_feature: MA Experiment 20001906 PARAMETER Experiment Name: At_Drought_Reproduction_P Parameter: Timepoint (day) Value: 5
  misc_feature: MA Experiment 20001906 PARAMETER Experiment Name: At_Drought_Reproduction_P Parameter: Tissue Value: Siliques
  misc_feature: MA Experiment 20001906 PARAMETER Experiment Name: At_Drought_Reproduction_P Parameter: Treatment Value: Drought vs. No Drought
  misc_feature: MA Experiment ID: 20001907 Result: Up-regulated in Transcription
  misc_feature: MA Experiment 20001907 PARAMETER Experiment Name: At_Drought_Reproduction_P Parameter: Age (day) Value: 37
  misc_feature: MA Experiment 20001907 PARAMETER Experiment Name: At_Drought_Reproduction_P Parameter: Organism Value: A. thaliana
  misc_feature: MA Experiment 20001907 PARAMETER Experiment Name: At_Drought_Reproduction_P Parameter: Plant Line Value: WS
  misc_feature: MA Experiment 20001907 PARAMETER Experiment Name: At_Drought_Reproduction_P Parameter: Timepoint (day) Value: 7
  misc_feature: MA Experiment 20001907 PARAMETER Experiment Name: At_Drought_Reproduction_P Parameter: Tissue Value: Siliques
  misc_feature: MA Experiment 20001907 PARAMETER Experiment Name: At_Drought_Reproduction_P Parameter: Treatment Value: Drought vs. No Drought
  misc_feature: MA Experiment ID: 20001908 Result: Up-regulated in Transcription
  misc_feature: MA Experiment 20001908 PARAMETER Experiment Name: At_Drought_Reproduction_P Parameter: Age (day) Value: 40
  misc_feature: MA Experiment 20001908 PARAMETER Experiment Name: At_Drought_Reproduction_P Parameter: Organism Value: A. thaliana
  misc_feature: MA Experiment 20001908 PARAMETER Experiment Name: At_Drought_Reproduction_P Parameter: Plant Line Value: WS
  misc_feature: MA Experiment 20001908 PARAMETER Experiment Name: At_Drought_Reproduction_P Parameter: Timepoint (day) Value: 10
  misc_feature: MA Experiment 20001908 PARAMETER Experiment Name: At_Drought_Reproduction_P Parameter: Tissue Value: Siliques
  misc_feature: MA Experiment 20001908 PARAMETER Experiment Name: At_Drought_Reproduction_P Parameter: Treatment Value: Drought vs. No Drought
aacataccgaattacatatatatctcgctcgctctcttctttgttcttgctccttgttctagttcggatttttcttttgaagtgaaatggttaacgctacagttgcgagaaacattgccggcatttgtggaaatgtcatctccttgttcttgttcttatctcccatacctacgttcataaccatatacaagaagaaaaaggtggaggagtacaaagctgacccatacttagccacggttctaaattgcgcactatgggtcttttatggcttaccaatggttcaaccagatagtctccttgtgatcaccataaatggtaccggtttagccattgagctggtgtatctcgctatcttcttcttcttttctccaactagtcgcaaggtgaaagtggggctatggttaataggagagatggtgtttgtaggaatagtagccacatgcacattgctattgttccacacacataaccagagatcttcttttgttggaatcttttgtgtcatttttgttagtctcatgtatattgctcctctcaccatcatgagtaaggtgatcaagaccaaaagtgtgaagtacatgccattctctctctcacttgccaatttcctcaatggtgtcgtttgggttatttatgcacttattaagttcgaccttttcattttgattggaaatggacttggaacggtatcaggagcagtacaacttatactctatgcttgctattacaagacaacaccaaaagatgatgaagatgaagaagatgaggagaatctttctaaggttaactctcagttacaacttagtggcaacagtggacaagctaaacgagtttcagcttgattatatgtttggattcatgagatatgaatttagttttatgtttttttttaagcttttggctgatttaactttaagtaactctattattttcgcgtttcctttttgtaaaatgcaaactctttttcttctatgaaagatattaac

SEQ ID NO: 106023 - protein, 251 aa, Arabidopsis thaliana; identical to SEQ ID NO: 35363
  peptide (1)..(251): Ceres Seq. ID no. 13618592
  misc_feature (9)..(98): Pfam Name: MtN3/saliva family Pfam Description: MtN3/saliva family
  misc_feature (39)..(251): Homolog of NCBI NO: 11994120 NR Description: contains similarity to nodulin MtN3
  misc_feature (1)..(251): Homolog of NCBI NO: 18405611 NR Description: nodulin MtN3 family protein [Arabidopsis >gi|16226222|gb|AAL16107.1|AF428275_1 unknown protein thaliana] >gi|25090096|gb|AAN72227.1| At3g28008/At3g28008
  misc_feature (1)..(251): Homolog of NCBI NO: 21592355 NR Description: contains similarity to nodulin MtN3 protein
  misc_feature (1)..(234): Homolog of NCBI NO: 34912454 NR Description: P0681B11.31 [Oryza sativa (japonica
  misc_feature (1)..(235): Homolog of NCBI NO: 34912462 NR Description: MtN3-like protein [Oryza sativa (japonica
  misc_feature (1)..(194): Homolog of NCBI NO: 10177463 NR Description: contains similarity to MtN3
  misc_feature (8)..(246): Homolog of NCBI NO: 18413388 NR Description: nodulin MtN3 family protein [Arabidopsis >gi|21592843|gb|AAM64793.1| contains similarity to Medicago
  misc_feature (1)..(217): Homolog of NCBI NO: 15219732 NR Description: nodulin MtN3 family protein [Arabidopsis >gi|12597757|gb|AAG60070.1|AC013288_4 hypothetical protein
  misc_feature (28)..(246): Homolog of NCBI NO: 7486148 NR Description: hypothetical protein F25I24.60 - Arabidopsis >gi|4539359|emb|CAB40053.1| putative protein [Arabidopsis >gi|7267783|emb|CAB81186.1| putative protein [Arabidopsis
  misc_feature (1)..(231): Homolog of NCBI NO: 18421965 NR Description: nodulin MtN3 family protein [Arabidopsis >gi|21537064|gb|AAM61405.1| contains similarity to MtN3 thaliana] >gi|26451732|dbj|BAC42961.1| unknown protein

SEQ ID NO: 106024 - protein, 188 aa, Arabidopsis thaliana; identical to SEQ ID NO: 35364
  peptide (1)..(188): Ceres Seq. ID no. 13618593
  misc_feature (1)..(188): Homolog of NCBI NO: 11994120 NR Description: contains similarity to nodulin MtN3
  misc_feature (1)..(188): Homolog of NCBI NO: 18405611 NR Description: nodulin MtN3 family protein [Arabidopsis >gi|16226222|gb|AAL16107.1|AF428275_1 unknown protein thaliana] >gi|25090096|gb|AAN72227.1| At3g28008/At3g28008
  misc_feature (1)..(188): Homolog of NCBI NO: 21592355 NR Description: contains similarity to nodulin MtN3 protein
  misc_feature (1)..(171): Homolog of NCBI NO: 34912454 NR Description: P0681B11.31 [Oryza sativa (japonica
  misc_feature (1)..(172): Homolog of NCBI NO: 34912462 NR Description: MtN3-like protein [Oryza sativa (japonica
  misc_feature (1)..(131): Homolog of NCBI NO: 10177463 NR Description: contains similarity to MtN3
  misc_feature (1)..(183): Homolog of NCBI NO: 18413388 NR Description: nodulin MtN3 family protein [Arabidopsis >gi|21592843|gb|AAM64793.1| contains similarity to Medicago
  misc_feature (1)..(154): Homolog of NCBI NO: 15219732 NR Description: nodulin MtN3 family protein [Arabidopsis >gi|12597757|gb|AAG60070.1|AC013288_4 hypothetical protein
  misc_feature (1)..(183): Homolog of NCBI NO: 7486148 NR Description: hypothetical protein F25I24.60 - Arabidopsis >gi|4539359|emb|CAB40053.1| putative protein [Arabidopsis >gi|7267783|emb|CAB81186.1| putative protein [Arabidopsis
  misc_feature (1)..(168): Homolog of NCBI NO: 18421965 NR Description: nodulin MtN3 family protein [Arabidopsis >gi|21537064|gb|AAM61405.1| contains similarity to MtN3 thaliana] >gi|26451732|dbj|BAC42961.1| unknown protein

SEQ ID NO: 106025 - protein, 142 aa, Arabidopsis thaliana; identical to SEQ ID NO: 35365
  peptide (1)..(142): Ceres Seq. ID no. 13618594
  misc_feature (1)..(142): Homolog of NCBI NO: 11994120 NR Description: contains similarity to nodulin MtN3
  misc_feature (1)..(142): Homolog of NCBI NO: 18405611 NR Description: nodulin MtN3 family protein [Arabidopsis >gi|16226222|gb|AAL16107.1|AF428275_1 unknown protein thaliana] >gi|25090096|gb|AAN72227.1| At3g28008/At3g28008
  misc_feature (1)..(142): Homolog of NCBI NO: 21592355 NR Description: contains similarity to nodulin MtN3 protein
  misc_feature (1)..(125): Homolog of NCBI NO: 34912454 NR Description: P0681B11.31 [Oryza sativa (japonica
  misc_feature (1)..(126): Homolog of NCBI NO: 34912462 NR Description: MtN3-like protein [Oryza sativa (japonica
  misc_feature (1)..(85): Homolog of NCBI NO: 10177463 NR Description: contains similarity to MtN3
  misc_feature (1)..(137): Homolog of NCBI NO: 18413388 NR Description: nodulin MtN3 family protein [Arabidopsis >gi|21592843|gb|AAM64793.1| contains similarity to Medicago
  misc_feature (1)..(108): Homolog of NCBI NO: 15219732 NR Description: nodulin MtN3 family protein [Arabidopsis >gi|12597757|gb|AAG60070.1|AC013288_4 hypothetical protein
  misc_feature (1)..(137): Homolog of NCBI NO: 7486148 NR Description: hypothetical protein F25I24.60 - Arabidopsis >gi|4539359|emb|CAB40053.1| putative protein [Arabidopsis >gi|7267783|emb|CAB81186.1| putative protein [Arabidopsis
  misc_feature (1)..(122): Homolog of NCBI NO: 18421965 NR Description: nodulin MtN3 family protein [Arabidopsis >gi|21537064|gb|AAM61405.1| contains similarity to MtN3 thaliana] >gi|26451732|dbj|BAC42961.1| unknown protein

SEQ ID NO: 106026 - DNA, 1283 bp, Arabidopsis thaliana
  misc_feature (1)..(1283): Ceres Seq. ID no. 13618595
  misc_feature: MA Experiment ID: 108462 Result: Up-regulated in Transcription
  misc_feature: MA Experiment 108462 PARAMETER Experiment Name: At_Germinating_Seeds_cDNA_P Parameter: Age (day) Value: 2 vs. 0
  misc_feature: MA Experiment 108462 PARAMETER Experiment Name: At_Germinating_Seeds_cDNA_P Parameter: Tissue Value: Germinating Seeds
  misc_feature: MA Experiment ID: 108463 Result: Up-regulated in Transcription
  misc_feature: MA Experiment 108463 PARAMETER Experiment Name: At_Germinating_Seeds_cDNA_P Parameter: Age (day) Value: 3 vs. 0
  misc_feature: MA Experiment 108463 PARAMETER Experiment Name: At_Germinating_Seeds_cDNA_P Parameter: Tissue Value: Germinating Seeds
  misc_feature: MA Experiment ID: 108464 Result: Up-regulated in Transcription
  misc_feature: MA Experiment 108464 PARAMETER Experiment Name: At_Germinating_Seeds_cDNA_P Parameter: Age (day) Value: 4 vs. 0
  misc_feature: MA Experiment 108464 PARAMETER Experiment Name: At_Germinating_Seeds_cDNA_P Parameter: Tissue Value: Germinating Seeds
  misc_feature: MA Experiment ID: 108489 Result: Down-regulated in Transcription
  misc_feature: MA Experiment ID: 108607 Result: Down-regulated in Transcription
  misc_feature: MA Experiment 108607 PARAMETER Experiment Name: At_100uM_ABA_cDNA_P Parameter: Timepoint (hr) Value: 4
  misc_feature: MA Experiment 108607 PARAMETER Experiment Name: At_100uM_ABA_cDNA_P Parameter: Tissue Value: Aerial
  misc_feature: MA Experiment 108607 PARAMETER Experiment Name: At_100uM_ABA_cDNA_P Parameter: Treatment Value: 100uM ABA vs. No Treatment
  misc_feature: MA Experiment ID: 20000070 Result: Down-regulated in Transcription
  misc_feature: MA Experiment 20000070 PARAMETER Experiment Name: At_100uM_ABA_Mutants_cDNA_P Parameter: Plant Line Value: CS24
  misc_feature: MA Experiment 20000070 PARAMETER Experiment Name: At_100uM_ABA_Mutants_cDNA_P Parameter: Timepoint (hr) Value: 6
  misc_feature: MA Experiment 20000070 PARAMETER Experiment Name: At_100uM_ABA_Mutants_cDNA_P Parameter: Tissue Value: Aerial
  misc_feature: MA Experiment 20000070 PARAMETER Experiment Name: At_100uM_ABA_Mutants_cDNA_P Parameter: Treatment Value: 100uM ABA vs. No Treatment
  misc_feature: MA Experiment ID: 20000072 Result: Down-regulated in Transcription
  misc_feature: MA Experiment 20000072 PARAMETER Experiment Name: At_100uM_ABA_Mutants_cDNA_P Parameter: Plant Line Value: CS8105
  misc_feature: MA Experiment 20000072 PARAMETER Experiment Name: At_100uM_ABA_Mutants_cDNA_P Parameter: Timepoint (hr) Value: 6
  misc_feature: MA Experiment 20000072 PARAMETER Experiment Name: At_100uM_ABA_Mutants_cDNA_P Parameter: Tissue Value: Aerial
  misc_feature: MA Experiment 20000072 PARAMETER Experiment Name: At_100uM_ABA_Mutants_cDNA_P Parameter: Treatment Value: 100uM ABA vs. No Treatment
  misc_feature: MA Experiment ID: 20000087 Result: Down-regulated in Transcription
  misc_feature: MA Experiment 20000087 PARAMETER Experiment Name: At_100uM_ABA_Mutants_cDNA_P Parameter: Plant Line Value: WS
  misc_feature: MA Experiment 20000087 PARAMETER Experiment Name: At_100uM_ABA_Mutants_cDNA_P Parameter: Timepoint (hr) Value: 6
  misc_feature: MA Experiment 20000087 PARAMETER Experiment Name: At_100uM_ABA_Mutants_cDNA_P Parameter: Tissue Value: Aerial
  misc_feature: MA Experiment 20000087 PARAMETER Experiment Name: At_100uM_ABA_Mutants_cDNA_P Parameter: Treatment Value: 100uM ABA vs. No Treatment
  misc_feature: MA Experiment ID: 20000089 Result: Down-regulated in Transcription
  misc_feature: MA Experiment ID: 20000090 Result: Down-regulated in Transcription
  misc_feature: MA Experiment ID: 20000111 Result: Down-regulated in Transcription
  misc_feature: MA Experiment 20000111 PARAMETER Experiment Name: At_42deg_Heat_cDNA_P Parameter: Temperature (deg C) Value: 42 vs. 22
  misc_feature: MA Experiment 20000111 PARAMETER Experiment Name: At_42deg_Heat_cDNA_P Parameter: Timepoint (hr) Value: 6
  misc_feature: MA Experiment 20000111 PARAMETER Experiment Name: At_42deg_Heat_cDNA_P Parameter: Tissue Value: Aerial
  misc_feature: MA Experiment ID: 20000112 Result: Down-regulated in Transcription
  misc_feature: MA Experiment 20000112 PARAMETER Experiment Name: At_42deg_Heat_cDNA_P Parameter: Temperature (deg C) Value: 42 vs. 22
  misc_feature: MA Experiment 20000112 PARAMETER Experiment Name: At_42deg_Heat_cDNA_P Parameter: Timepoint (hr) Value: 2
  misc_feature: MA Experiment 20000112 PARAMETER Experiment Name: At_42deg_Heat_cDNA_P Parameter: Tissue Value: Aerial
  misc_feature: MA Experiment ID: 20000113 Result: Down-regulated in Transcription
  misc_feature: MA Experiment 20000113 PARAMETER Experiment Name: At_42deg_Heat_cDNA_P Parameter: Temperature (deg C) Value: 42 vs. 22
  misc_feature: MA Experiment 20000113 PARAMETER Experiment Name: At_42deg_Heat_cDNA_P Parameter: Timepoint (hr) Value: 8
  misc_feature: MA Experiment 20000113 PARAMETER Experiment Name: At_42deg_Heat_cDNA_P Parameter: Tissue Value: Aerial
accatttccaatggccggagcagtaagcctttggcggagagaggccgtgttcttgacggcgatgctggcaggcgaaaccagcatcgtcggactaagtactctgtttaaggtagcaacttcaaagggactcaacatttaccctttcctcagctattcttatcttcttgcttctcttctccttcttccttctctgttcttcaccaacaggtcaagatcacttcctccactaagtgcctcaatactctctaagattggacttcttggctttctaggatcaatgtatgttattacaggaggcataggcatcgaatacagcaacccaaccttagcctccgccataggcaatattgttcctgctcttaccttcatcctcgctgttatcttcaggatggagaaagtatcattcaaagaaaggagcagtgtagccaaagtgatggggacgatactgtcactaataggcgcatttgtggtgattttctaccacggtccacgtgtctttgtcgcatcttctccaccatatctaaacttccgtcagctttctccaccgttgtcatcgtcaaagtctgattggctcatcggaggagctattcttaccatacaaggcatcttcgtttctgtttcttttattctccagacacatataatgagagaatatcctgaagcattcacagtctccattctctacattctatgtatttcaatcgtgacctcaatgattggactagtagtcgaaaagaacaacccaagcatttggatcattcatttcgatattacattgtttacaattgttactacgggaataataacttcagtatactatgtgattcattcatgggcaatacgtcacaaaagacctctatacttagcgatatttaagcctctgtctattttgatagcagtggttatggggaccatttttctcaacgattctctctatctcggatgtttgattggaggaattttgataacattaggcttttatgttgtgatgtggggcaaagcaaacgaagagaagaacaagttgttatcattttcaggaaaagagaaaacccctcttctattgagcggcaaaaacgaccaaatttaaatgaaaaaaaatttataatcaaaggagttacaaactctgaaatagtctcttatatacatagcgtgcaaactattagtgtatactgtgtattgctttgtatataacttagaaaatgactatctaattgttttttaagttacgggtacgtaacgactatctaaattcgttagatcacgacatctaacgaattttggtc

SEQ ID NO: 106027 - protein, 361 aa, Arabidopsis thaliana
  peptide (1)..(361): Ceres Seq. ID no. 13618596
  misc_feature (26)..(159): Pfam Name: Integral membrane protein DUF6 Pfam Description: Integral membrane protein DUF6
  misc_feature (4)..(361): Homolog of NCBI NO: 18405642 NR Description: nodulin MtN21 family protein [Arabidopsis
  misc_feature (4)..(361): Homolog of NCBI NO: 21618226 NR Description: contains similarity to integral membrane protein
  misc_feature (4)..(361): Homolog of NCBI NO: 30689045 NR Description: nodulin MtN21 family protein [Arabidopsis >gi|17381140|gb|AAL36382.1| unknown protein [Arabidopsis >gi|21436253|gb|AAM51265.1| unknown protein [Arabidopsis
  misc_feature (4)..(361): Homolog of NCBI NO: 22331380 NR Description: nodulin MtN21 family protein [Arabidopsis >gi|17529268|gb|AAL38861.1| unknown protein [Arabidopsis >gi|21436157|gb|AAM51325.1| unknown protein [Arabidopsis
  misc_feature (4)..(356): Homolog of NCBI NO: 11994130 NR Description: contains similarity to integral membrane protein
  misc_feature (93)..(361): Homolog of NCBI NO: 11994129 NR Description: contains similarity to nodulin~gene_id:MMG15.13
  misc_feature (4)..(264): Homolog of NCBI NO: 11994127 NR Description: contains similarity to nodulin~gene_id:MMG15.11
  misc_feature (130)..(356): Homolog of NCBI NO: 15232901 NR Description: nodulin MtN21 family protein [Arabidopsis
  misc_feature (92)..(361): Homolog of NCBI NO: 18405657 NR Description: nodulin MtN21 family protein [Arabidopsis >gi|15146274|gb|AAK83620.1| AT3g28130/MMG15_14 [Arabidopsis >gi|22136586|gb|AAM91079.1| AT3g28130/MMG15_14 [Arabidopsis
  misc_feature (181)..(353): Homolog of NCBI NO: 18421959 NR Description: nodulin MtN21 family protein [Arabidopsis >gi|15724298|gb|AAL06542.1|AF412089_1 AT5g40210/MSN9_110 thaliana] >gi|24111287|gb|AAN46767.1| At5g40210/MSN9_110
PFPMAGAVSLWRREAVFLTAMLAGETSIVGLSTLFKVATSKGLNIYPFLSYSYLLASLLLLPSLFFTNRSRSLPPLSASILSKIGLLGFLGSMYVITGGIGIEYSNPTLASAIGNIVPALTFILAVIFRMEKVSFKERSSVAKVMGTILSLIGAFVVIFYHGPRVFVASSPPYLNFRQLSPPLSSSKSDWLIGGAILTIQGIFVSVSFILQTHIMREYPEAFTVSILYILCISIVTSMIGLVVEKNNPSIWIIHFDITLFTIVTTGIITSVYYVIHSWAIRHKRPLYLAIFKPLSILIAVVMGTIFLNDSLYLGCLIGGILITLGFYVVMWGKANEEKNKLLSFSGKEKTPLLLSGKNDQI

SEQ ID NO: 106028 - protein, 358 aa, Arabidopsis thaliana
  peptide (1)..(358): Ceres Seq. ID no. 13618597
  misc_feature (23)..(156): Pfam Name: Integral membrane protein DUF6 Pfam Description: Integral membrane protein DUF6
  misc_feature (1)..(358): Homolog of NCBI NO: 18405642 NR Description: nodulin MtN21 family protein [Arabidopsis
  misc_feature (1)..(358): Homolog of NCBI NO: 21618226 NR Description: contains similarity to integral membrane protein
  misc_feature (1)..(358): Homolog of NCBI NO: 30689045 NR Description: nodulin MtN21 family protein [Arabidopsis >gi|17381140|gb|AAL36382.1| unknown protein [Arabidopsis >gi|21436253|gb|AAM51265.1| unknown protein [Arabidopsis
  misc_feature (1)..(358): Homolog of NCBI NO: 22331380 NR Description: nodulin MtN21 family protein [Arabidopsis >gi|17529268|gb|AAL38861.1| unknown protein [Arabidopsis >gi|21436157|gb|AAM51325.1| unknown protein [Arabidopsis
  misc_feature (1)..(353): Homolog of NCBI NO: 11994130 NR Description: contains similarity to integral membrane protein
  misc_feature (90)..(358): Homolog of NCBI NO: 11994129 NR Description: contains similarity to nodulin~gene_id:MMG15.13
  misc_feature (1)..(261): Homolog of NCBI NO: 11994127 NR Description: contains similarity to nodulin~gene_id:MMG15.11
  misc_feature (127)..(353): Homolog of NCBI NO: 15232901 NR Description: nodulin MtN21 family protein [Arabidopsis
  misc_feature (89)..(358): Homolog of NCBI NO: 18405657 NR Description: nodulin MtN21 family protein [Arabidopsis >gi|15146274|gb|AAK83620.1| AT3g28130/MMG15_14 [Arabidopsis >gi|22136586|gb|AAM91079.1| AT3g28130/MMG15_14 [Arabidopsis
  misc_feature (178)..(350): Homolog of NCBI NO: 18421959 NR Description: nodulin MtN21 family protein [Arabidopsis >gi|15724298|gb|AAL06542.1|AF412089_1 AT5g40210/MSN9_110 thaliana] >gi|24111287|gb|AAN46767.1| At5g40210/MSN9_110
MAGAVSLWRREAVFLTAMLAGETSIVGLSTLFKVATSKGLNIYPFLSYSYLLASLLLLPSLFFTNRSRSLPPLSASILSKIGLLGFLGSMYVITGGIGIEYSNPTLASAIGNIVPALTFILAVIFRMEKVSFKERSSVAKVMGTILSLIGAFVVIFYHGPRVFVASSPPYLNFRQLSPPLSSSKSDWLIGGAILTIQGIFVSVSFILQTHIMREYPEAFTVSILYILCISIVTSMIGLVVEKNNPSIWIIHFDITLFTIVTTGIITSVYYVIHSWAIRHKRPLYLAIFKPLSILIAVVMGTIFLNDSLYLGCLIGGILITLGFYVVMWGKANEEKNKLLSFSGKEKTPLLLSGKNDQI

SEQ ID NO: 106029 - protein, 341 aa, Arabidopsis thaliana
  peptide (1)..(341): Ceres Seq. ID no. 13618598
  misc_feature (6)..(139): Pfam Name: Integral membrane protein DUF6 Pfam Description: Integral membrane protein DUF6
  misc_feature (1)..(341): Homolog of NCBI NO: 18405642 NR Description: nodulin MtN21 family protein [Arabidopsis
  misc_feature (1)..(341): Homolog of NCBI NO: 21618226 NR Description: contains similarity to integral membrane protein
  misc_feature (1)..(341): Homolog of NCBI NO: 30689045 NR Description: nodulin MtN21 family protein [Arabidopsis >gi|17381140|gb|AAL36382.1| unknown protein [Arabidopsis >gi|21436253|gb|AAM51265.1| unknown protein [Arabidopsis
  misc_feature (1)..(341): Homolog of NCBI NO: 22331380 NR Description: nodulin MtN21 family protein [Arabidopsis >gi|17529268|gb|AAL38861.1| unknown protein [Arabidopsis >gi|21436157|gb|AAM51325.1| unknown protein [Arabidopsis
  misc_feature (1)..(336): Homolog of NCBI NO: 11994130 NR Description: contains similarity to integral membrane protein
  misc_feature (73)..(341): Homolog of NCBI NO: 11994129 NR Description: contains similarity to nodulin~gene_id:MMG15.13
  misc_feature (1)..(244): Homolog of NCBI NO: 11994127 NR Description: contains similarity to nodulin~gene_id:MMG15.11
  misc_feature (110)..(336): Homolog of NCBI NO: 15232901 NR Description: nodulin MtN21 family protein [Arabidopsis
  misc_feature (72)..(341): Homolog of NCBI NO: 18405657 NR Description: nodulin MtN21 family protein [Arabidopsis >gi|15146274|gb|AAK83620.1| AT3g28130/MMG15_14 [Arabidopsis >gi|22136586|gb|AAM91079.1| AT3g28130/MMG15_14 [Arabidopsis
  misc_feature (161)..(333): Homolog of NCBI NO: 18421959 NR Description: nodulin MtN21 family protein [Arabidopsis >gi|15724298|gb|AAL06542.1|AF412089_1 AT5g40210/MSN9_110 thaliana] >gi|24111287|gb|AAN46767.1| At5g40210/MSN9_110
MLAGETSIVGLSTLFKVATSKGLNIYPFLSYSYLLASLLLLPSLFFTNRSRSLPPLSASILSKIGLLGFLGSMYVITGGIGIEYSNPTLASAIGNIVPALTFILAVIFRMEKVSFKERSSVAKVMGTILSLIGAFVVIFYHGPRVFVASSPPYLNFRQLSPPLSSSKSDWLIGGAILTIQGIFVSVSFILQTHIMREYPEAFTVSILYILCISIVTSMIGLVVEKNNPSIWIIHFDITLFTIVTTGIITSVYYVIHSWAIRHKRPLYLAIFKPLSILIAVVMGTIFLNDSLYLGCLIGGILITLGFYVVMWGKANEEKNKLLSFSGKEKTPLLLSGKNDQI

SEQ ID NO: 106030 - DNA, 1108 bp, Arabidopsis thaliana
  misc_feature (1)..(1108): Ceres Seq. ID no. 13618602
  misc_feature: MA Experiment ID: 108463 Result: Up-regulated in Transcription
  misc_feature: MA Experiment 108463 PARAMETER Experiment Name: At_Germinating_Seeds_cDNA_P Parameter: Age (day) Value: 3 vs. 0
  misc_feature: MA Experiment 108463 PARAMETER Experiment Name: At_Germinating_Seeds_cDNA_P Parameter: Tissue Value: Germinating Seeds
  misc_feature: MA Experiment ID: 108464 Result: Up-regulated in Transcription
  misc_feature: MA Experiment 108464 PARAMETER Experiment Name: At_Germinating_Seeds_cDNA_P Parameter: Age (day) Value: 4 vs. 0
  misc_feature: MA Experiment 108464 PARAMETER Experiment Name: At_Germinating_Seeds_cDNA_P Parameter: Tissue Value: Germinating Seeds
  misc_feature: MA Experiment ID: 108501 Result: Up-regulated in Transcription
  misc_feature: MA Experiment 108501 PARAMETER Experiment Name: At_ap2_floral_buds_cDNA_P Parameter: Plant Line Value: ap2 (Ler.)
  misc_feature: MA Experiment 108501 PARAMETER Experiment Name: At_ap2_floral_buds_cDNA_P Parameter: Tissue Value: Closed Flower
  misc_feature: MA Experiment ID: 108607 Result: Down-regulated in Transcription
  misc_feature: MA Experiment 108607 PARAMETER Experiment Name: At_100uM_ABA_cDNA_P Parameter: Timepoint (hr) Value: 4
  misc_feature: MA Experiment 108607 PARAMETER Experiment Name: At_100uM_ABA_cDNA_P Parameter: Tissue Value: Aerial
  misc_feature: MA Experiment 108607 PARAMETER Experiment Name: At_100uM_ABA_cDNA_P Parameter: Treatment Value: 100uM ABA vs. No Treatment
  misc_feature: MA Experiment ID: 108668 Result: Down-regulated in Transcription
  misc_feature: MA Experiment 108668 PARAMETER Experiment Name: At_2mM_SA_cDNA_P Parameter: Plant Line Value: WS
  misc_feature: MA Experiment 108668 PARAMETER Experiment Name: At_2mM_SA_cDNA_P Parameter: Timepoint (hr) Value: 6
  misc_feature: MA Experiment 108668 PARAMETER Experiment Name: At_2mM_SA_cDNA_P Parameter: Treatment Value: 2mM SA vs. No Treatment
  misc_feature: MA Experiment ID: 20000112 Result: Down-regulated in Transcription
  misc_feature: MA Experiment 20000112 PARAMETER Experiment Name: At_42deg_Heat_cDNA_P Parameter: Temperature (deg C) Value: 42 vs. 22
  misc_feature: MA Experiment 20000112 PARAMETER Experiment Name: At_42deg_Heat_cDNA_P Parameter: Timepoint (hr) Value: 2
  misc_feature: MA Experiment 20000112 PARAMETER Experiment Name: At_42deg_Heat_cDNA_P Parameter: Tissue Value: Aerial
  misc_feature: MA Experiment ID: 20000117 Result: Down-regulated in Transcription
  misc_feature: MA Experiment 20000117 PARAMETER Experiment Name: At_100uM_ABA_Mutants_cDNA_P Parameter: Plant Line Value: Columbia
  misc_feature: MA Experiment 20000117 PARAMETER Experiment Name: At_100uM_ABA_Mutants_cDNA_P Parameter: Timepoint (hr) Value: 6
  misc_feature: MA Experiment 20000117 PARAMETER Experiment Name: At_100uM_ABA_Mutants_cDNA_P Parameter: Tissue Value: Aerial
  misc_feature: MA Experiment 20000117 PARAMETER Experiment Name: At_100uM_ABA_Mutants_cDNA_P Parameter: Treatment Value: 100uM ABA vs. No Treatment
  misc_feature: MA Experiment ID: 20000144 Result: Down-regulated in Transcription
  misc_feature: MA Experiment 20000144 PARAMETER Experiment Name: At_42deg_Heat_cDNA_P Parameter: Temperature (deg C) Value: 42 vs. 22
  misc_feature: MA Experiment 20000144 PARAMETER Experiment Name: At_42deg_Heat_cDNA_P Parameter: Timepoint (hr) Value: 1
  misc_feature: MA Experiment 20000144 PARAMETER Experiment Name: At_42deg_Heat_cDNA_P Parameter: Tissue Value: Aerial
  misc_feature: MA Experiment ID: 20000171 Result: Down-regulated in Transcription
  misc_feature: MA Experiment 20000171 PARAMETER Experiment Name: At_42deg_Heat_P Parameter: Age (day) Value: 14
  misc_feature: MA Experiment 20000171 PARAMETER Experiment Name: At_42deg_Heat_P Parameter: Organism Value: A. thaliana
  misc_feature: MA Experiment 20000171 PARAMETER Experiment Name: At_42deg_Heat_P Parameter: Plant Line Value: WS
  misc_feature: MA Experiment 20000171 PARAMETER Experiment Name: At_42deg_Heat_P Parameter: Temperature (deg C) Value: 42 vs. 22
  misc_feature: MA Experiment 20000171 PARAMETER Experiment Name: At_42deg_Heat_P Parameter: Timepoint (hr) Value: 1
  misc_feature: MA Experiment 20000171 PARAMETER Experiment Name: At_42deg_Heat_P Parameter: Tissue Value: Aerial
  misc_feature: MA Experiment ID: 20000173 Result: Down-regulated in Transcription
  misc_feature: MA Experiment 20000173 PARAMETER Experiment Name: At_42deg_Heat_P Parameter: Age (day) Value: 14
  misc_feature: MA Experiment 20000173 PARAMETER Experiment Name: At_42deg_Heat_P Parameter: Organism Value: A. thaliana
  misc_feature: MA Experiment 20000173 PARAMETER Experiment Name: At_42deg_Heat_P Parameter: Plant Line Value: WS
  misc_feature: MA Experiment 20000173 PARAMETER Experiment Name: At_42deg_Heat_P Parameter: Temperature (deg C) Value: 42 vs. 22
  misc_feature: MA Experiment 20000173 PARAMETER Experiment Name: At_42deg_Heat_P Parameter: Timepoint (hr) Value: 6
  misc_feature: MA Experiment 20000173 PARAMETER Experiment Name: At_42deg_Heat_P Parameter: Tissue Value: Aerial
  misc_feature: MA Experiment ID: 20000182 Result: Down-regulated in Transcription
  misc_feature: MA Experiment 20000182 PARAMETER Experiment Name: At_2mM_SA_P Parameter: Age (day) Value: 14
  misc_feature: MA Experiment 20000182 PARAMETER Experiment Name: At_2mM_SA_P Parameter: Organism Value: A. thaliana
  misc_feature: MA Experiment 20000182 PARAMETER Experiment Name: At_2mM_SA_P Parameter: Plant Line Value: WS
  misc_feature: MA Experiment 20000182 PARAMETER Experiment Name: At_2mM_SA_P Parameter: Timepoint (hr) Value: 6
  misc_feature: MA Experiment 20000182 PARAMETER Experiment Name: At_2mM_SA_P Parameter: Tissue Value: Aerial
  misc_feature: MA Experiment 20000182 PARAMETER Experiment Name: At_2mM_SA_P Parameter: Treatment Value: 2mM SA vs. No Treatment
  misc_feature: MA Experiment ID: 20000184 Result: Up-regulated in Transcription
  misc_feature: MA Experiment 20000184 PARAMETER Experiment Name: At_Shoots__P Parameter: Age (day) Value: 7
  misc_feature: MA Experiment 20000184 PARAMETER Experiment Name: At_Shoots__P Parameter: Tissue Value: Shoots vs. Whole Plant
  misc_feature: MA Experiment ID: 20000224 Result: Down-regulated in Transcription
  misc_feature: MA Experiment ID: 20000264 Result: Down-regulated in Transcription
  misc_feature: MA Experiment 20000264 PARAMETER Experiment Name: At_Open_Flower_P Parameter: Age (day) Value: 21
  misc_feature: MA Experiment 20000264 PARAMETER Experiment Name: At_Open_Flower_P Parameter: Plant Line Value: WS
  misc_feature: MA Experiment 20000264 PARAMETER Experiment Name: At_Open_Flower_P Parameter: Tissue Value: Open Flower vs. Whole Plant
  misc_feature: MA Experiment ID: 20000265 Result: Down-regulated in Transcription
  misc_feature: MA Experiment 20000265 PARAMETER Experiment Name: At_Open_Flower_P Parameter: Age (day) Value: 21
  misc_feature: MA Experiment 20000265 PARAMETER Experiment Name: At_Open_Flower_P Parameter: Plant Line Value: WS
  misc_feature: MA Experiment 20000265 PARAMETER Experiment Name: At_Open_Flower_P Parameter: Tissue Value: Closed Flower vs. Whole Plant
  misc_feature: MA Experiment ID: 20000286 Result: Down-regulated in Transcription
  misc_feature: MA Experiment 20000286 PARAMETER Experiment Name: At_Open_Flower_P Parameter: Age (day) Value: 21
  misc_feature: MA Experiment 20000286 PARAMETER Experiment Name: At_Open_Flower_P Parameter: Plant Line Value: WS
  misc_feature: MA Experiment 20000286 PARAMETER Experiment Name: At_Open_Flower_P Parameter: Tissue Value: Half Open vs. Whole Plant
  misc_feature: MA Experiment ID: 20000445 Result: Up-regulated in Transcription
  misc_feature: MA Experiment 20000445 PARAMETER Experiment Name: At_100uM_NAA__P Parameter: Age (day) Value: 14
  misc_feature: MA Experiment 20000445 PARAMETER Experiment Name: At_100uM_NAA__P Parameter: Organism Value: A. thaliana
  misc_feature: MA Experiment 20000445 PARAMETER Experiment Name: At_100uM_NAA__P Parameter: Plant Line Value: WS
  misc_feature: MA Experiment 20000445 PARAMETER Experiment Name: At_100uM_NAA__P Parameter: Timepoint (hr) Value: 6
  misc_feature: MA Experiment 20000445 PARAMETER Experiment Name: At_100uM_NAA__P Parameter: Tissue Value: Aerial
  misc_feature: MA Experiment 20000445 PARAMETER Experiment Name: At_100uM_NAA__P Parameter: Treatment Value: 100uM NAA vs. No Treatment
  misc_feature: MA Experiment ID: 20000495 Result: Down-regulated in Transcription
  misc_feature: MA Experiment 20000495 PARAMETER Experiment Name: At_Guard_Cells_P Parameter: Harvest Date Value: 8/2/2002
  misc_feature: MA Experiment 20000495 PARAMETER Experiment Name: At_Guard_Cells_P Parameter: Organism Value: A. thaliana
  misc_feature: MA Experiment 20000495 PARAMETER Experiment Name: At_Guard_Cells_P Parameter: Tissue Value: Guard Cells vs. Leaves
  misc_feature: MA Experiment ID: 20000573 Result: Down-regulated in Transcription
  misc_feature: MA Experiment 20000573 PARAMETER Experiment Name: At_100uM_ABA_Mutants__P Parameter: Organism Value: A. thaliana
  misc_feature: MA Experiment 20000573 PARAMETER Experiment Name: At_100uM_ABA_Mutants__P Parameter: Plant Line Value: CS22 vs. Ler wt
  misc_feature: MA Experiment 20000573 PARAMETER Experiment Name: At_100uM_ABA_Mutants__P Parameter: Timepoint (hr) Value: N/A
  misc_feature: MA Experiment 20000573 PARAMETER Experiment Name: At_100uM_ABA_Mutants__P Parameter: Tissue Value: Whole Plant
  misc_feature: MA Experiment 20000573 PARAMETER Experiment Name: At_100uM_ABA_Mutants__P Parameter: Treatment Value: None
  misc_feature: MA Experiment ID: 20000574 Result: Down-regulated in Transcription
  misc_feature: MA Experiment 20000574 PARAMETER Experiment Name: At_100uM_ABA_Mutants__P Parameter: Organism Value: A. thaliana
  misc_feature: MA Experiment 20000574 PARAMETER Experiment Name: At_100uM_ABA_Mutants__P Parameter: Plant Line Value: CS23 vs. Ler wt
  misc_feature: MA Experiment 20000574 PARAMETER Experiment Name: At_100uM_ABA_Mutants__P Parameter: Timepoint (hr) Value: N/A
  misc_feature: MA Experiment 20000574 PARAMETER Experiment Name: At_100uM_ABA_Mutants__P Parameter: Tissue Value: Whole Plant
  misc_feature: MA Experiment 20000574 PARAMETER Experiment Name: At_100uM_ABA_Mutants__P Parameter: Treatment Value: None
  misc_feature: MA Experiment ID: 20000794 Result: Down-regulated in Transcription
  misc_feature: MA Experiment 20000794 PARAMETER Experiment Name: At_Petals_P Parameter: Age (day) Value: 23-25 days
  misc_feature: MA Experiment 20000794 PARAMETER Experiment Name: At_Petals_P Parameter: Plant Line Value: WS
  misc_feature: MA Experiment 20000794 PARAMETER Experiment Name: At_Petals_P Parameter: Tissue Value: Petals vs. Whole plant
  misc_feature: MA Experiment ID: 20001247 Result: Up-regulated in Transcription
  misc_feature: MA Experiment 20001247 PARAMETER Experiment Name: At_Far-red-induction_P Parameter: Age (day) Value: 7
  misc_feature: MA Experiment 20001247 PARAMETER Experiment Name: At_Far-red-induction_P Parameter: Light Value: Far-red vs. White
  misc_feature: MA Experiment 20001247 PARAMETER Experiment Name: At_Far-red-induction_P Parameter: Organism Value: A. thaliana
  misc_feature: MA Experiment 20001247 PARAMETER Experiment Name: At_Far-red-induction_P Parameter: Plant Line Value: Columbia
  misc_feature: MA Experiment 20001247 PARAMETER Experiment Name: At_Far-red-induction_P Parameter: Timepoint (hr) Value: 1
  misc_feature: MA Experiment 20001247 PARAMETER Experiment Name: At_Far-red-induction_P Parameter: Tissue Value: Whole Plant
  misc_feature: MA Experiment ID: 20001557 Result: Up-regulated in Transcription
  misc_feature: MA Experiment 20001557 PARAMETER Experiment Name: At_Drought_Soil_Dry_P Parameter: Age (day) Value: 27
  misc_feature: MA Experiment 20001557 PARAMETER Experiment Name: At_Drought_Soil_Dry_P Parameter: Organism Value: A. thaliana
  misc_feature: MA Experiment 20001557 PARAMETER Experiment Name: At_Drought_Soil_Dry_P Parameter: Plant Line Value: WS
  misc_feature: MA Experiment 20001557 PARAMETER Experiment Name: At_Drought_Soil_Dry_P Parameter: Post Timepoint (hr) Value: 3
  misc_feature: MA Experiment 20001557 PARAMETER Experiment Name: At_Drought_Soil_Dry_P Parameter: Post-Treatment Value: Re-Water vs. No Drought
  misc_feature: MA Experiment 20001557 PARAMETER Experiment Name: At_Drought_Soil_Dry_P Parameter: Timepoint (day) Value: 13
  misc_feature: MA Experiment 20001557 PARAMETER Experiment Name: At_Drought_Soil_Dry_P Parameter: Treatment Value: Drought vs. No Drought
  misc_feature: MA Experiment ID: 20001558 Result: Up-regulated in Transcription
  misc_feature: MA Experiment 20001558 PARAMETER Experiment Name: At_Drought_Soil_Dry_P Parameter: Age (day) Value: 27
  misc_feature: MA Experiment 20001558 PARAMETER Experiment Name: At_Drought_Soil_Dry_P Parameter: Organism Value: A. thaliana
  misc_feature: MA Experiment 20001558 PARAMETER Experiment Name: At_Drought_Soil_Dry_P Parameter: Plant Line Value: WS
  misc_feature: MA Experiment 20001558 PARAMETER Experiment Name: At_Drought_Soil_Dry_P Parameter: Post Timepoint (hr) Value: 6
  misc_feature: MA Experiment 20001558 PARAMETER Experiment Name: At_Drought_Soil_Dry_P Parameter: Post-Treatment Value: Re-Water vs. No Drought
  misc_feature: MA Experiment 20001558 PARAMETER Experiment Name: At_Drought_Soil_Dry_P Parameter: Timepoint (day) Value: 13
  misc_feature: MA Experiment 20001558 PARAMETER Experiment Name: At_Drought_Soil_Dry_P Parameter: Treatment Value: Drought vs. No Drought
  misc_feature: MA Experiment ID: 20001560 Result: Up-regulated in Transcription
  misc_feature: MA Experiment 20001560 PARAMETER Experiment Name: At_Drought_Soil_Dry_P Parameter: Age (day) Value: 28
  misc_feature: MA Experiment 20001560 PARAMETER Experiment Name: At_Drought_Soil_Dry_P Parameter: Organism Value: A. thaliana
  misc_feature: MA Experiment 20001560 PARAMETER Experiment Name: At_Drought_Soil_Dry_P Parameter: Plant Line Value: WS
  misc_feature: MA Experiment 20001560 PARAMETER Experiment Name: At_Drought_Soil_Dry_P Parameter: Post Timepoint (hr) Value: None
  misc_feature: MA Experiment 20001560 PARAMETER Experiment Name: At_Drought_Soil_Dry_P Parameter: Post-Treatment Value: None
  misc_feature: MA Experiment 20001560 PARAMETER Experiment Name: At_Drought_Soil_Dry_P Parameter: Timepoint (day) Value: 14
  misc_feature: MA Experiment 20001560 PARAMETER Experiment Name: At_Drought_Soil_Dry_P Parameter: Treatment Value: Drought vs. No Drought
  misc_feature: MA Experiment ID: 20001906 Result: Down-regulated in Transcription
  misc_feature: MA Experiment 20001906 PARAMETER Experiment Name: At_Drought_Reproduction_P Parameter: Age (day) Value: 35
  misc_feature: MA Experiment 20001906 PARAMETER Experiment Name: At_Drought_Reproduction_P Parameter: Organism Value: A. thaliana
  misc_feature: MA Experiment 20001906 PARAMETER Experiment Name: At_Drought_Reproduction_P Parameter: Plant Line Value: WS
  misc_feature: MA Experiment 20001906 PARAMETER Experiment Name: At_Drought_Reproduction_P Parameter: Timepoint (day) Value: 5
  misc_feature: MA Experiment 20001906 PARAMETER Experiment Name: At_Drought_Reproduction_P Parameter: Tissue Value: Siliques
  misc_feature: MA Experiment 20001906 PARAMETER Experiment Name: At_Drought_Reproduction_P Parameter: Treatment Value: Drought vs. No Drought
  misc_feature: MA Experiment ID: 20001911 Result: Down-regulated in Transcription
  misc_feature: MA Experiment 20001911 PARAMETER Experiment Name: At_Drought_Reproduction_P Parameter: Age (day) Value: 40
  misc_feature: MA Experiment 20001911 PARAMETER Experiment Name: At_Drought_Reproduction_P Parameter: Organism Value: A. thaliana
  misc_feature: MA Experiment 20001911 PARAMETER Experiment Name: At_Drought_Reproduction_P Parameter: Plant Line Value: WS
  misc_feature: MA Experiment 20001911 PARAMETER Experiment Name: At_Drought_Reproduction_P Parameter: Timepoint (day) Value: 10
  misc_feature: MA Experiment 20001911 PARAMETER Experiment Name: At_Drought_Reproduction_P Parameter: Tissue Value: Flowers
  misc_feature: MA Experiment 20001911 PARAMETER Experiment Name: At_Drought_Reproduction_P Parameter: Treatment Value: Drought vs. No Drought
tctctctctctctctcttctcaacaatggcttcactcaaatctctcttcctcctcttcctcttcttcttcacagctcaatctcgcttaaccacaaacttctactcaaaaacatgcccaagattcctcgacatcatccgtgacacaatcacaaacaaacaaatcactaatcccaccaccgcagccgccgttatccgtctcttcttccacgactgtttccctaacggctgcgacgcctccgtcctcatctcctccaccgccttcaacaccgcagaacgtgactcttccatcaacctctcactccccggagacggtttcgacgtcattgtccgagccaaaacagctctcgaactcgcttgtcccaacacagtttcttgctcagacatcatctccgtcgcaacacgtgatcttctaatcaccgtcggtggtccttactacgacgttttcctcggccgtcgtgattcaagaacgtcgaaatcttctcttttaaccgatcttcttcctcttccttccacaccaatctctaaaatcattcaacagtttgaatcaaaaggtttcactgttcaagaaatggttgctcttagtggagcacattctatagggttttcacattgtaaagagtttgtgggtcgggtgggtcggaataataccgggtataacccgagattcgcagtggctttgaagaaagcttgtgctaattaccctaaagatccgactatctctgtgtttaatgatattatgactcctaataagtttgataatatgtattatcagaatcttaaaaagggtcttgggttacttgaatcggatcatggattatattctgaccctagaaccagatattttgttgatctttatgctaagaatcaagatctgtttttcaaagattttgctaaagctatgcagaagttgagtctttttggtatacagactggtagaagaggagagatccgaagaaggtgcgatgctattaattgagtttatgtttttaatttatttaatttttgggttatattggattgtgaatcttctgagttattacactcatatgtttttgtgtaatgtaaaagatatatggttgattgttctaattaagagattggttttggt

SEQ ID NO: 106031 - protein, 324 aa, Arabidopsis thaliana
  peptide (1)..(324): Ceres Seq. ID no. 13618603
  misc_feature (45)..(288): Pfam Name: Peroxidase Pfam Description: Peroxidase
  misc_feature (9)..(324): Homolog of NCBI NO: 15232929 NR Description: peroxidase, putative [Arabidopsis thaliana] Peroxidase 31 precursor (Atperox P31) (ATP41) peroxidase [Arabidopsis thaliana] >gi|23297263|gb|AAN12927.1|
  misc_feature (9)..(324): Homolog of NCBI NO: 14334600 NR Description: putative peroxidase [Arabidopsis thaliana]
  misc_feature (15)..(324): Homolog of NCBI NO: 15242580 NR Description: peroxidase, putative [Arabidopsis thaliana] Peroxidase 63 precursor (Atperox P63) (ATP26a) peroxidase ATP26a homolog [Arabidopsis thaliana]
  misc_feature (50)..(324): Homolog of NCBI NO: 1890317 NR Description: peroxidase ATP26a [Arabidopsis thaliana]
  misc_feature (29)..(324): Homolog of NCBI NO: 9759442 NR Description: peroxidase [Arabidopsis thaliana]
  misc_feature (29)..(324): Homolog of NCBI NO: 21593687 NR Description: peroxidase [Arabidopsis thaliana]
  misc_feature (29)..(324): Homolog of NCBI NO: 18422742 NR Description: peroxidase, putative [Arabidopsis thaliana] Peroxidase 65 precursor (Atperox P65) (ATP43)
  misc_feature (9)..(324): Homolog of NCBI NO: 15236620 NR Description: peroxidase, putative [Arabidopsis thaliana]
  misc_feature (15)..(324): Homolog of NCBI NO: 15221670 NR Description: peroxidase, putative [Arabidopsis thaliana]
  misc_feature (25)..(323): Homolog of NCBI NO: 32489883 NR Description: OSJNBa0060P14.16 [Oryza sativa (japonica
LSLSLFSTMASLKSLFLLFLFFFTAQSRLTTNFYSKTCPRFLDIIRDTITNKQITNPTTAAAVIRLFFHDCFPNGCDASVLISSTAFNTAERDSSINLSLPGDGFDVIVRAKTALELACPNTVSCSDIISVATRDLLITVGGPYYDVFLGRRDSRTSKSSLLTDLLPLPSTPISKIIQQFESKGFTVQEMVALSGAHSIGFSHCKEFVGRVGRNNTGYNPRFAVALKKACANYPKDPTISVFNDIMTPNKFDNMYYQNLKKGLGLLESDHGLYSDPRTRYFVDLYAKNQDLFFKDFAKAMQKLSLFGIQTGRRGEIRRRCDAIN

SEQ ID NO: 106032 - protein, 316 aa, Arabidopsis thaliana; identical to SEQ ID NO: 30085
  peptide (1)..(316): Ceres Seq. ID no. 13618604
  misc_feature (37)..(280): Pfam Name: Peroxidase Pfam Description: Peroxidase
  misc_feature (1)..(316): Homolog of NCBI NO: 15232929 NR Description: peroxidase, putative [Arabidopsis thaliana] Peroxidase 31 precursor (Atperox P31) (ATP41) peroxidase [Arabidopsis thaliana] >gi|23297263|gb|AAN12927.1|
  misc_feature (1)..(316): Homolog of NCBI NO: 14334600 NR Description: putative peroxidase [Arabidopsis thaliana]
  misc_feature (7)..(316): Homolog of NCBI NO: 15242580 NR Description: peroxidase, putative [Arabidopsis thaliana] Peroxidase 63 precursor (Atperox P63) (ATP26a) peroxidase ATP26a homolog [Arabidopsis thaliana]
  misc_feature (42)..(316): Homolog of NCBI NO: 1890317 NR Description: peroxidase ATP26a [Arabidopsis thaliana]
  misc_feature (21)..(316): Homolog of NCBI NO: 9759442 NR Description: peroxidase [Arabidopsis thaliana]
  misc_feature (21)..(316): Homolog of NCBI NO: 21593687 NR Description: peroxidase [Arabidopsis thaliana]
  misc_feature (21)..(316): Homolog of NCBI NO: 18422742 NR Description: peroxidase, putative [Arabidopsis thaliana] Peroxidase 65 precursor (Atperox P65) (ATP43)
  misc_feature (1)..(316): Homolog of NCBI NO: 15236620 NR Description: peroxidase, putative [Arabidopsis thaliana]
  misc_feature (7)..(316): Homolog of NCBI NO: 15221670 NR Description: peroxidase, putative [Arabidopsis thaliana]
  misc_feature (17)..(315): Homolog of NCBI NO: 32489883 NR Description: OSJNBa0060P14.16 [Oryza sativa (japonica

SEQ ID NO: 106033 - DNA, 1181 bp, Arabidopsis thaliana
  misc_feature (1)..(1181): Ceres Seq. ID no. 13618615
  misc_feature: MA Experiment ID: 108434 Result: Down-regulated in Transcription
  misc_feature: MA Experiment 108434 PARAMETER Experiment Name: At_Root_Tips_cDNA_P Parameter: Tissue Value: Root Tips
  misc_feature: MA Experiment ID: 108462 Result: Up-regulated in Transcription
  misc_feature: MA Experiment 108462 PARAMETER Experiment Name: At_Germinating_Seeds_cDNA_P Parameter: Age (day) Value: 2 vs. 0
  misc_feature: MA Experiment 108462 PARAMETER Experiment Name: At_Germinating_Seeds_cDNA_P Parameter: Tissue Value: Germinating Seeds
  misc_feature: MA Experiment ID: 108463 Result: Up-regulated in Transcription
  misc_feature: MA Experiment 108463 PARAMETER Experiment Name: At_Germinating_Seeds_cDNA_P Parameter: Age (day) Value: 3 vs. 0
  misc_feature: MA Experiment 108463 PARAMETER Experiment Name: At_Germinating_Seeds_cDNA_P Parameter: Tissue Value: Germinating Seeds
  misc_feature: MA Experiment ID: 108464 Result: Up-regulated in Transcription
  misc_feature: MA Experiment 108464 PARAMETER Experiment Name: At_Germinating_Seeds_cDNA_P Parameter: Age (day) Value: 4 vs. 0
  misc_feature: MA Experiment 108464 PARAMETER Experiment Name: At_Germinating_Seeds_cDNA_P Parameter: Tissue Value: Germinating Seeds
  misc_feature: MA Experiment ID: 108473 Result: Up-regulated in Transcription
  misc_feature: MA Experiment 108473 PARAMETER Experiment Name: At_Drought_Flowers_cDNA_P Parameter: Timepoint (hr) Value: 7 d
  misc_feature: MA Experiment 108473 PARAMETER Experiment Name: At_Drought_Flowers_cDNA_P Parameter: Tissue Value: Flower
  misc_feature: MA Experiment 108473 PARAMETER Experiment Name: At_Drought_Flowers_cDNA_P Parameter: Treatment Value: Drought vs. No Drought
  misc_feature: MA Experiment ID: 108488 Result: Down-regulated in Transcription
  misc_feature: MA Experiment ID: 108609 Result: Up-regulated in Transcription
  misc_feature: MA Experiment 108609 PARAMETER Experiment Name: At_100uM_ABA_cDNA_P Parameter: Timepoint (hr) Value: 24
  misc_feature: MA Experiment 108609 PARAMETER Experiment Name: At_100uM_ABA_cDNA_P Parameter: Tissue Value: Aerial
  misc_feature: MA Experiment 108609 PARAMETER Experiment Name: At_100uM_ABA_cDNA_P Parameter: Treatment Value: 100uM ABA vs. No Treatment
  misc_feature: MA Experiment ID: 20000144 Result: Up-regulated in Transcription
  misc_feature: MA Experiment 20000144 PARAMETER Experiment Name: At_42deg_Heat_cDNA_P Parameter: Temperature (deg C) Value: 42 vs. 22
  misc_feature: MA Experiment 20000144 PARAMETER Experiment Name: At_42deg_Heat_cDNA_P Parameter: Timepoint (hr) Value: 1
  misc_feature: MA Experiment 20000144 PARAMETER Experiment Name: At_42deg_Heat_cDNA_P Parameter: Tissue Value: Aerial
  misc_feature: MA Experiment ID: 20000171 Result: Up-regulated in Transcription
  misc_feature: MA Experiment 20000171 PARAMETER Experiment Name: At_42deg_Heat_P Parameter: Age (day) Value: 14
  misc_feature: MA Experiment 20000171 PARAMETER Experiment Name: At_42deg_Heat_P Parameter: Organism Value: A. thaliana
  misc_feature: MA Experiment 20000171 PARAMETER Experiment Name: At_42deg_Heat_P Parameter: Plant Line Value: WS
  misc_feature: MA Experiment 20000171 PARAMETER Experiment Name: At_42deg_Heat_P Parameter: Temperature (deg C) Value: 42 vs. 22
  misc_feature: MA Experiment 20000171 PARAMETER Experiment Name: At_42deg_Heat_P Parameter: Timepoint (hr) Value: 1
  misc_feature: MA Experiment 20000171 PARAMETER Experiment Name: At_42deg_Heat_P Parameter: Tissue Value: Aerial
  misc_feature: MA Experiment ID: 20000185 Result: Up-regulated in Transcription
  misc_feature: MA Experiment 20000185 PARAMETER Experiment Name: At_Roots__P Parameter: Age (day) Value: 7 vs. 21
  misc_feature: MA Experiment 20000185 PARAMETER Experiment Name: At_Roots__P Parameter: Organism Value: A. thaliana
  misc_feature: MA Experiment 20000185 PARAMETER Experiment Name: At_Roots__P Parameter: Tissue Value: Roots vs. Whole Plant
  misc_feature: MA Experiment ID: 20000227 Result: Down-regulated in Transcription
  misc_feature: MA Experiment 20000227 PARAMETER Experiment Name: At_Root-Tips-vs-Tops_P Parameter: Tissue Value: Root Tips vs. Root Tops
  misc_feature: MA Experiment ID: 20000265 Result: Down-regulated in Transcription
  misc_feature: MA Experiment 20000265 PARAMETER Experiment Name: At_Open_Flower_P Parameter: Age (day) Value: 21
  misc_feature: MA Experiment 20000265 PARAMETER Experiment Name: At_Open_Flower_P Parameter: Plant Line Value: WS
  misc_feature: MA Experiment 20000265 PARAMETER Experiment Name: At_Open_Flower_P Parameter: Tissue Value: Closed Flower vs. Whole Plant
  misc_feature: MA Experiment ID: 20000439 Result: Up-regulated in Transcription
  misc_feature: MA Experiment 20000439 PARAMETER Experiment Name: At_Roots__P Parameter: Age (day) Value: 14 vs. 21
  misc_feature: MA Experiment 20000439 PARAMETER Experiment Name: At_Roots__P Parameter: Organism Value: A. thaliana
  misc_feature: MA Experiment 20000439 PARAMETER Experiment Name: At_Roots__P Parameter: Tissue Value: Roots vs. Whole Plant
  misc_feature: MA Experiment ID: 20000452 Result: Down-regulated in Transcription
  misc_feature: MA Experiment 20000452 PARAMETER Experiment Name: At_CS6879_Shoots-Roots_P Parameter: Age (day) Value: 14
  misc_feature: MA Experiment 20000452 PARAMETER Experiment Name: At_CS6879_Shoots-Roots_P Parameter: Organism Value: A. thaliana
  misc_feature: MA Experiment 20000452 PARAMETER Experiment Name: At_CS6879_Shoots-Roots_P Parameter: Plant Line Value: CS6879 vs. WS
  misc_feature: MA Experiment 20000452 PARAMETER Experiment Name: At_CS6879_Shoots-Roots_P Parameter: Tissue Value: Shoots
  misc_feature: MA Experiment ID: 20000495 Result: Up-regulated in Transcription
  misc_feature: MA Experiment 20000495 PARAMETER Experiment Name: At_Guard_Cells_P Parameter: Harvest Date Value: 8/2/2002
  misc_feature: MA Experiment 20000495 PARAMETER Experiment Name: At_Guard_Cells_P Parameter: Organism Value: A. thaliana
  misc_feature: MA Experiment 20000495 PARAMETER Experiment Name: At_Guard_Cells_P Parameter: Tissue Value: Guard Cells vs. Leaves
  misc_feature: MA Experiment ID: 20001247 Result: Up-regulated in Transcription
  misc_feature: MA Experiment 20001247 PARAMETER Experiment Name: At_Far-red-induction_P Parameter: Age (day) Value: 7
  misc_feature: MA Experiment 20001247 PARAMETER Experiment Name: At_Far-red-induction_P Parameter: Light Value: Far-red vs. White
  misc_feature: MA Experiment 20001247 PARAMETER Experiment Name: At_Far-red-induction_P Parameter: Organism Value: A. thaliana
  misc_feature: MA Experiment 20001247 PARAMETER Experiment Name: At_Far-red-induction_P Parameter: Plant Line Value: Columbia
  misc_feature: MA Experiment 20001247 PARAMETER Experiment Name: At_Far-red-induction_P Parameter: Timepoint (hr) Value: 1
  misc_feature: MA Experiment 20001247 PARAMETER Experiment Name: At_Far-red-induction_P Parameter: Tissue Value: Whole Plant
  misc_feature: MA Experiment ID: 20001558 Result: Up-regulated in Transcription
  misc_feature: MA Experiment 20001558 PARAMETER Experiment Name: At_Drought_Soil_Dry_P Parameter: Age (day) Value: 27
  misc_feature: MA Experiment 20001558 PARAMETER Experiment Name: At_Drought_Soil_Dry_P Parameter: Organism Value: A. thaliana
  misc_feature: MA Experiment 20001558 PARAMETER Experiment Name: At_Drought_Soil_Dry_P Parameter: Plant Line Value: WS
  misc_feature: MA Experiment 20001558 PARAMETER Experiment Name: At_Drought_Soil_Dry_P Parameter: Post Timepoint (hr) Value: 6
  misc_feature: MA Experiment 20001558 PARAMETER Experiment Name: At_Drought_Soil_Dry_P Parameter: Post-Treatment Value: Re-Water vs. No Drought
  misc_feature: MA Experiment 20001558 PARAMETER Experiment Name: At_Drought_Soil_Dry_P Parameter: Timepoint (day) Value: 13
  misc_feature: MA Experiment 20001558 PARAMETER Experiment Name: At_Drought_Soil_Dry_P Parameter: Treatment Value: Drought vs. No Drought
  misc_feature: MA Experiment ID: 20001560 Result: Up-regulated in Transcription
  misc_feature: MA Experiment 20001560 PARAMETER Experiment Name: At_Drought_Soil_Dry_P Parameter: Age (day) Value: 28
  misc_feature: MA Experiment 20001560 PARAMETER Experiment Name: At_Drought_Soil_Dry_P Parameter: Organism Value: A. thaliana
  misc_feature: MA Experiment 20001560 PARAMETER Experiment Name: At_Drought_Soil_Dry_P Parameter: Plant Line Value: WS
  misc_feature: MA Experiment 20001560 PARAMETER Experiment Name: At_Drought_Soil_Dry_P Parameter: Post Timepoint (hr) Value: None
  misc_feature: MA Experiment 20001560 PARAMETER Experiment Name: At_Drought_Soil_Dry_P Parameter: Post-Treatment Value: None
  misc_feature: MA Experiment 20001560 PARAMETER Experiment Name: At_Drought_Soil_Dry_P Parameter: Timepoint (day) Value: 14
  misc_feature: MA Experiment 20001560 PARAMETER Experiment Name: At_Drought_Soil_Dry_P Parameter: Treatment Value: Drought vs. No Drought
  misc_feature: MA Experiment ID: 20001757 Result: Down-regulated in Transcription
  misc_feature: MA Experiment 20001757 PARAMETER Experiment Name: At_50mM_NH4NO3_L-to-H_P Parameter: Timepoint (hr) Value: 6
  misc_feature: MA Experiment 20001757 PARAMETER Experiment Name: At_50mM_NH4NO3_L-to-H_P Parameter: Tissue Value: Leaf
  misc_feature: MA Experiment 20001757 PARAMETER Experiment Name: At_50mM_NH4NO3_L-to-H_P Parameter: Treatment Value: 50mM NH4NO3 vs 100mM Mannitol
atcttaattatactgatctttatcatgttgactagatttaagaaacaaaataataagatggttagggcaaatatagtgagcatggttctgttgatgcatgccatcgttgggtttccttttcatgcgaggggattaagtatgacttactacatgatgagctgtcctttcgctgaacagattgtgaagaacagtgttaacaatgctcttcaagccgatcccactttagccgctggtcttatccgtatgttgttccacgactgtttcatcgagggatgtgatgcgtcaattctgctagattcaacgaaagacaacactgcggaaaaggattcgcctgcgaatctgagtctacgtggctacgagatcatcgatgatgcaaaggagaaaatcgagaatagatgtccaggagttgtatcatgcgcagatatagttgccatggctgctagagatgctgtcttttgggctggtggtccatattatgacataccgaaaggaaggtttgatggtaaaagatcaaagatagaagatacaagaaatctaccttcaccttttcttaatgcctctcaactcattcaaacttttggccaacgtggtttcactccacaagatgttgttgctctctctggagcacataccctaggagttgcacgatgctcctccttcaaggctagacttaccgtcccagactcttcattagactcgacttttgcaaacactctctctaaaacatgcagcgcgggtgacaatgcagagcaaccctttgatgctacgcgcaacgatttcgacaatgcttacttcaatgcgcttcagatgaaatcaggagtcctcttttcagaccaaactttattcaacacaccaaggaccaggaatcttgttaacggctatgcacttaaccaagccaagttcttctttgatttccaacaggccatgcgcaagatgagcaatcttgatgttaaacttggctctcaaggtgaagtccgtcaaaattgtcggagtattaattaggctagaccacatctacttacgatttttgtatttataataagttctctactcttgttatatgaagaatcatgaatcttctaggctactatgtaaaaattgtgtactctcgtaatatgcagttgtatacttattgcttgtgtggttcagatatccatcaaaaagtaatatactttggttgc

SEQ ID NO: 106034 - protein, 333 aa, Arabidopsis thaliana
  peptide (1)..(333): Ceres Seq. ID no. 13618616
  misc_feature (61)..(297): Pfam Name: Peroxidase Pfam Description: Peroxidase
  misc_feature (9)..(333): Homolog of NCBI NO: 18418208 NR Description: peroxidase, putative [Arabidopsis thaliana]
  misc_feature (20)..(333): Homolog of NCBI NO: 26397921 NR Description: Peroxidase 47 precursor (Atperox P47) (ATP32)
  misc_feature (25)..(333): Homolog of NCBI NO: 7484677 NR Description: peroxidase (EC 1.11.1.7) prx11 precursor - spinach
  misc_feature (25)..(333): Homolog of NCBI NO: 15242213 NR Description: peroxidase -related [Arabidopsis thaliana] Peroxidase 66 precursor (Atperox P66) (ATP27a) peroxidase [Arabidopsis thaliana] >gi|18175873|gb|AAL59943.1|
  misc_feature (60)..(333): Homolog of NCBI NO: 2956707 NR Description: peroxidase [Spinacia oleracea]
  misc_feature (21)..(332): Homolog of NCBI NO: 15238309 NR Description: peroxidase, putative [Arabidopsis thaliana] Peroxidase 64 precursor (Atperox P64) (PRXR4) (ATP17a) peroxidase [Arabidopsis thaliana] >gi|1429223|emb|CAA67550.1|
ILIILIFIMLTRFKKQNNKMVRANIVSMVLLMHAIVGFPFHARGLSMTYYMMSCPFAEQIVKNSVNNALQADPTLAAGLIRMLFHDCFIEGCDASILLDSTKDNTAEKDSPANLSLRGYEIIDDAKEKIENRCPGVVSCADIVAMAARDAVFWAGGPYYDIPKGRFDGKRSKIEDTRNLPSPFLNASQLIQTFGQRGFTPQDVVALSGAHTLGVARCSSFKARLTVPDSSLDSTFANTLSKTCSAGDNAEQPFDATRNDFDNAYFNALQMKSGVLFSDQTLFNTPRTRNLVNGYALNQAKFFFDFQQAMRKMSNLDVKLGSQGEVRQNCRSIN

SEQ ID NO: 106035 - protein, 325 aa, Arabidopsis thaliana
  peptide (1)..(325): Ceres Seq. ID no. 13618617
  misc_feature (53)..(289): Pfam Name: Peroxidase Pfam Description: Peroxidase
  misc_feature (1)..(325): Homolog of NCBI NO: 18418208 NR Description: peroxidase, putative [Arabidopsis thaliana]
  misc_feature (12)..(325): Homolog of NCBI NO: 26397921 NR Description: Peroxidase 47 precursor (Atperox P47) (ATP32)
  misc_feature (17)..(325): Homolog of NCBI NO: 7484677 NR Description: peroxidase (EC 1.11.1.7) prx11 precursor - spinach
  misc_feature (17)..(325): Homolog of NCBI NO: 15242213 NR Description: peroxidase -related [Arabidopsis thaliana] Peroxidase 66 precursor (Atperox P66) (ATP27a) peroxidase [Arabidopsis thaliana] >gi|18175873|gb|AAL59943.1|
  misc_feature (52)..(325): Homolog of NCBI NO: 2956707 NR Description: peroxidase [Spinacia oleracea]
  misc_feature (13)..(324): Homolog of NCBI NO: 15238309 NR Description: peroxidase, putative [Arabidopsis thaliana] Peroxidase 64 precursor (Atperox P64) (PRXR4) (ATP17a) peroxidase [Arabidopsis thaliana] >gi|1429223|emb|CAA67550.1|
MLTRFKKQNNKMVRANIVSMVLLMHAIVGFPFHARGLSMTYYMMSCPFAEQIVKNSVNNALQADPTLAAGLIRMLFHDCFIEGCDASILLDSTKDNTAEKDSPANLSLRGYEIIDDAKEKIENRCPGVVSCADIVAMAARDAVFWAGGPYYDIPKGRFDGKRSKIEDTRNLPSPFLNASQLIQTFGQRGFTPQDVVALSGAHTLGVARCSSFKARLTVPDSSLDSTFANTLSKTCSAGDNAEQPFDATRNDFDNAYFNALQMKSGVLFSDQTLFNTPRTRNLVNGYALNQAKFFFDFQQAMRKMSNLDVKLGSQGEVRQNCRSIN

SEQ ID NO: 106036 - protein, 314 aa, Arabidopsis thaliana; identical to SEQ ID NO: 21993
  peptide (1)..(314): Ceres Seq. ID no. 13618618
  misc_feature (42)..(278): Pfam Name: Peroxidase Pfam Description: Peroxidase
  misc_feature (1)..(314): Homolog of NCBI NO: 18418208 NR Description: peroxidase, putative [Arabidopsis thaliana]
  misc_feature (1)..(314): Homolog of NCBI NO: 26397921 NR Description: Peroxidase 47 precursor (Atperox P47) (ATP32)
  misc_feature (6)..(314): Homolog of NCBI NO: 7484677 NR Description: peroxidase (EC 1.11.1.7) prx11 precursor - spinach
  misc_feature (6)..(314): Homolog of NCBI NO: 15242213 NR Description: peroxidase -related [Arabidopsis thaliana] Peroxidase 66 precursor (Atperox P66) (ATP27a) peroxidase [Arabidopsis thaliana] >gi|18175873|gb|AAL59943.1|
  misc_feature (41)..(314): Homolog of NCBI NO: 2956707 NR Description: peroxidase [Spinacia oleracea]
  misc_feature (2)..(313): Homolog of NCBI NO: 15238309 NR Description: peroxidase, putative [Arabidopsis thaliana] Peroxidase 64 precursor (Atperox P64) (PRXR4) (ATP17a) peroxidase [Arabidopsis thaliana] >gi|1429223|emb|CAA67550.1|

SEQ ID NO: 106037 - DNA, 1623 bp, Arabidopsis thaliana
  misc_feature (1)..(1623): Ceres Seq. ID no. 13618629
  misc_feature: MA Experiment ID: 108435 Result: Down-regulated in Transcription
  misc_feature: MA Experiment 108435 PARAMETER Experiment Name: At_stm_Mutants_cDNA_P Parameter: Plant Line Value: wt Landsburg vs stm
  misc_feature: MA Experiment 108435 PARAMETER Experiment Name: At_stm_Mutants_cDNA_P Parameter: Tissue Value: Shoot Apical Meristem Region
  misc_feature: MA Experiment ID: 108462 Result: Up-regulated in Transcription
  misc_feature: MA Experiment 108462 PARAMETER Experiment Name: At_Germinating_Seeds_cDNA_P Parameter: Age (day) Value: 2 vs. 0
  misc_feature: MA Experiment 108462 PARAMETER Experiment Name: At_Germinating_Seeds_cDNA_P Parameter: Tissue Value: Germinating Seeds
  misc_feature: MA Experiment ID: 108464 Result: Up-regulated in Transcription
  misc_feature: MA Experiment 108464 PARAMETER Experiment Name: At_Germinating_Seeds_cDNA_P Parameter: Age (day) Value: 4 vs. 0
  misc_feature: MA Experiment 108464 PARAMETER Experiment Name: At_Germinating_Seeds_cDNA_P Parameter: Tissue Value: Germinating Seeds
  misc_feature: MA Experiment ID: 108577 Result: Up-regulated in Transcription
  misc_feature: MA Experiment 108577 PARAMETER Experiment Name: At_42deg_Heat_cDNA_P Parameter: Temperature (deg C) Value: 42 vs. 22
  misc_feature: MA Experiment 108577 PARAMETER Experiment Name: At_42deg_Heat_cDNA_P Parameter: Timepoint (hr) Value: 6
  misc_feature: MA Experiment 108577 PARAMETER Experiment Name: At_42deg_Heat_cDNA_P Parameter: Tissue Value: Aerial
  misc_feature: MA Experiment ID: 108594 Result: Up-regulated in Transcription
  misc_feature: MA Experiment 108594 PARAMETER Experiment Name: At_Ler-rhl_Root_cDNA_P Parameter: Plant Line Value: null
  misc_feature: MA Experiment ID: 108595 Result: Down-regulated in Transcription
  misc_feature: MA Experiment 108595 PARAMETER Experiment Name: At_Ler-pi_Ovule_cDNA_P Parameter: Plant Line Value: null
  misc_feature: MA Experiment ID: 20000071 Result: Down-regulated in Transcription
  misc_feature: MA Experiment 20000071 PARAMETER Experiment Name: At_100uM_ABA_Mutants_cDNA_P Parameter: Plant Line Value: CS8104
  misc_feature: MA Experiment 20000071 PARAMETER Experiment Name: At_100uM_ABA_Mutants_cDNA_P Parameter: Timepoint (hr) Value: 6
  misc_feature: MA Experiment 20000071 PARAMETER Experiment Name: At_100uM_ABA_Mutants_cDNA_P Parameter: Tissue Value: Aerial
  misc_feature: MA Experiment 20000071 PARAMETER Experiment Name: At_100uM_ABA_Mutants_cDNA_P Parameter: Treatment Value: 100uM ABA vs. No Treatment
  misc_feature: MA Experiment ID: 20000086 Result: Down-regulated in Transcription
  misc_feature: MA Experiment 20000086 PARAMETER Experiment Name: At_100uM_ABA_Mutants_cDNA_P Parameter: Plant Line Value: CS22
  misc_feature: MA Experiment 20000086 PARAMETER Experiment Name: At_100uM_ABA_Mutants_cDNA_P Parameter: Timepoint (hr) Value: 6
  misc_feature: MA Experiment 20000086 PARAMETER Experiment Name: At_100uM_ABA_Mutants_cDNA_P Parameter: Tissue Value: Aerial
  misc_feature: MA Experiment 20000086 PARAMETER Experiment Name: At_100uM_ABA_Mutants_cDNA_P Parameter: Treatment Value: 100uM ABA vs. No Treatment
  misc_feature: MA Experiment ID: 20000089 Result: Down-regulated in Transcription
  misc_feature: MA Experiment ID: 20000090 Result: Down-regulated in Transcription
  misc_feature: MA Experiment ID: 20000113 Result: Up-regulated in Transcription
  misc_feature: MA Experiment 20000113 PARAMETER Experiment Name: At_42deg_Heat_cDNA_P Parameter: Temperature (deg C) Value: 42 vs. 22
  misc_feature: MA Experiment 20000113 PARAMETER Experiment Name: At_42deg_Heat_cDNA_P Parameter: Timepoint (hr) Value: 8
  misc_feature: MA Experiment 20000113 PARAMETER Experiment Name: At_42deg_Heat_cDNA_P Parameter: Tissue Value: Aerial
  misc_feature: MA Experiment ID: 20000117 Result: Down-regulated in Transcription
  misc_feature: MA Experiment 20000117 PARAMETER Experiment Name: At_100uM_ABA_Mutants_cDNA_P Parameter: Plant Line Value: Columbia
  misc_feature: MA Experiment 20000117 PARAMETER Experiment Name: At_100uM_ABA_Mutants_cDNA_P Parameter: Timepoint (hr) Value: 6
  misc_feature: MA Experiment 20000117 PARAMETER Experiment Name: At_100uM_ABA_Mutants_cDNA_P Parameter: Tissue Value: Aerial
  misc_feature: MA Experiment 20000117 PARAMETER Experiment Name: At_100uM_ABA_Mutants_cDNA_P Parameter: Treatment Value: 100uM ABA vs. No Treatment
  misc_feature: MA Experiment ID: 20000438 Result: Up-regulated in Transcription
  misc_feature: MA Experiment 20000438 PARAMETER Experiment Name: At_Shoots__P Parameter: Age (day) Value: 14
  misc_feature: MA Experiment 20000438 PARAMETER Experiment Name: At_Shoots__P Parameter: Tissue Value: Shoots vs. Whole Plant
  misc_feature: MA Experiment ID: 20001247 Result: Up-regulated in Transcription
  misc_feature: MA Experiment 20001247 PARAMETER Experiment Name: At_Far-red-induction_P Parameter: Age (day) Value: 7
  misc_feature: MA Experiment 20001247 PARAMETER Experiment Name: At_Far-red-induction_P Parameter: Light Value: Far-red vs. White
  misc_feature: MA Experiment 20001247 PARAMETER Experiment Name: At_Far-red-induction_P Parameter: Organism Value: A. thaliana
  misc_feature: MA Experiment 20001247 PARAMETER Experiment Name: At_Far-red-induction_P Parameter: Plant Line Value: Columbia
  misc_feature: MA Experiment 20001247 PARAMETER Experiment Name: At_Far-red-induction_P Parameter: Timepoint (hr) Value: 1
  misc_feature: MA Experiment 20001247 PARAMETER Experiment Name: At_Far-red-induction_P Parameter: Tissue Value: Whole Plant
  misc_feature: MA Experiment ID: 20001248 Result: Down-regulated in Transcription
  misc_feature: MA Experiment 20001248 PARAMETER Experiment Name: At_Far-red-induction_P Parameter: Age (day) Value: 7
  misc_feature: MA Experiment 20001248 PARAMETER Experiment Name: At_Far-red-induction_P Parameter: Light Value: Far-red vs. White
  misc_feature: MA Experiment 20001248 PARAMETER Experiment Name: At_Far-red-induction_P Parameter: Organism Value: A. thaliana
  misc_feature: MA Experiment 20001248 PARAMETER Experiment Name: At_Far-red-induction_P Parameter: Plant Line Value: Columbia
  misc_feature: MA Experiment 20001248 PARAMETER Experiment Name: At_Far-red-induction_P Parameter: Timepoint (hr) Value: 4
  misc_feature: MA Experiment 20001248 PARAMETER Experiment Name: At_Far-red-induction_P Parameter: Tissue Value: Whole Plant
  misc_feature: MA Experiment ID: 20001911 Result: Up-regulated in Transcription
  misc_feature: MA Experiment 20001911 PARAMETER Experiment Name: At_Drought_Reproduction_P Parameter: Age (day) Value: 40
  misc_feature: MA Experiment 20001911 PARAMETER Experiment Name: At_Drought_Reproduction_P Parameter: Organism Value: A. thaliana
  misc_feature: MA Experiment 20001911 PARAMETER Experiment Name: At_Drought_Reproduction_P Parameter: Plant Line Value: WS
  misc_feature: MA Experiment 20001911 PARAMETER Experiment Name: At_Drought_Reproduction_P Parameter: Timepoint (day) Value: 10
  misc_feature: MA Experiment 20001911 PARAMETER Experiment Name: At_Drought_Reproduction_P Parameter: Tissue Value: Flowers
  misc_feature: MA Experiment 20001911 PARAMETER Experiment Name: At_Drought_Reproduction_P Parameter: Treatment Value: Drought vs. No Drought
ggaccaaaatcgtccattgaagtgaacagtcagcatcgttttgcttgcttgtgcgtttctctcgaactctctccatggctgttgcgctccaattcagccgattatgcgttcgaccggatactttcgtgcgggagaatcatctctctggatccggatctctccgccgccggaaagctttatcagtccggtgctcgtctggcgatgagaacgctccttcgccatcggtggtgatggactccgatttcgacgccaaggtgttccgtaagaacttgacgagaagcgataattacaatcgtaaagggttcggtcataaggaggagacactcaagctcatgaatcgagagtacaccagtgatatattggagacactgaaaacaaatgggtatacttattcttggggagatgttactgtgaaactcgctaaagcatatggtttttgctggggtgttgagcgtgctgttcagattgcatatgaagcacgaaagcagtttccagaggagaggctttggattactaacgaaatcattcataacccgaccgtcaataagaggttggaagatatggatgttaaaattattccggttgaggattcaaagaaacagtttgatgtagtagagaaagatgatgtggttatccttcctgcgtttggagctggtgttgacgagatgtatgttcttaatgataaaaaggtgcaaattgttgacacgacttgtccttgggtgacaaaggtctggaacacggttgagaagcacaagaagggggaatacacatcagtaatccatggtaaatataatcatgaagagacgattgcaactgcgtcttttgcaggaaagtacatcattgtaaagaacatgaaagaggcaaattacgtttgtgattacattctcggtggccaatacgatggatctagctccacaaaagaggagttcatggagaaattcaaatacgcaatttcgaagggtttcgatcccgacaatgaccttgtcaaagttggtattgcaaaccaaacaacgatgctaaagggagaaacagaggagataggaagattactcgagacaacaatgatgcgcaagtatggagtggaaaatgtaagcggacatttcatcagcttcaacacaatatgcgacgctactcaagagcgacaagacgcaatctatgagctagtggaagagaagattgacctcatgctagtggttggcggatggaattcaagtaacacctctcaccttcaggaaatctcagaggcacggggaatcccatcttactggatcgatagtgagaaacggataggacctgggaataaaatagcctataagctccactatggagaactggtcgagaaggaaaactttctcccaaagggaccaataacaatcggtgtgacatcaggtgcatcaaccccggataaggtcgtggaagatgctttggtgaaggtgttcgacattaaacgtgaagagttattgcagctggcttgattcggcattgtgatcgtattcaaatactatttgtcatgtcaagagtgtactaaaatatatgtagttgtatgatttgtctttataacttttgtaagaggttttgtaattcaaagtcaacatcctcgttatcttactccacttaatgttc

SEQ ID NO: 106038 - protein, 466 aa, Arabidopsis thaliana; identical to SEQ ID NO: 21125
  peptide (1)..(466): Ceres Seq. ID no. 13618630
  misc_feature (113)..(457): Pfam Name: LytB protein Pfam Description: LytB protein
  misc_feature (1)..(466): Homolog of NCBI NO: 18418433 NR Description: ISPH [Arabidopsis thaliana] putative protein [Arabidopsis thaliana] putative protein [Arabidopsis thaliana]
  misc_feature (1)..(466): Homolog of NCBI NO: 7485313 NR Description: hypothetical protein F10M10.120 - Arabidopsis >gi|4455180|emb|CAB36712.1| putative protein [Arabidopsis >gi|7270385|emb|CAB80152.1| putative protein [Arabidopsis
  misc_feature (1)..(466): Homolog of NCBI NO: 10716963 NR Description: LYTB-like protein precursor [Adonis palaestina]
  misc_feature (58)..(458): Homolog of NCBI NO: 17228480 NR Description: hypothetical protein [Nostoc sp. PCC 7120]
  misc_feature (58)..(458): Homolog of NCBI NO: 22298585 NR Description: ORF_ID:tlr1041~penicillin tolerance protein LytB
  misc_feature (58)..(466): Homolog of NCBI NO: 16331361 NR Description: hypothetical protein [Synechocystis sp. PCC 6803]
  misc_feature (58)..(458): Homolog of NCBI NO: 23128578 NR Description: hypothetical protein [Nostoc punctiforme]
  misc_feature (58)..(458): Homolog of NCBI NO: 23040062 NR Description: hypothetical protein [Trichodesmium erythraeum
  misc_feature (86)..(466): Homolog of NCBI NO: 8928192 NR Description: IspH protein >gi|1256595|gb|AAB72119.1| LytB
  misc_feature (58)..(463): Homolog of NCBI NO: 33239748 NR Description: 4-hydroxy-3-methylbut-2-enyl diphosphate

SEQ ID NO: 106039 - protein, 414 aa, Arabidopsis thaliana; identical to SEQ ID NO: 21126
  peptide (1)..(414): Ceres Seq. ID no. 13618631
  misc_feature (61)..(405): Pfam Name: LytB protein Pfam Description: LytB protein
  misc_feature (1)..(414): Homolog of NCBI NO: 18418433 NR Description: ISPH [Arabidopsis thaliana] putative protein [Arabidopsis thaliana] putative protein [Arabidopsis thaliana]
  misc_feature (1)..(414): Homolog of NCBI NO: 7485313 NR Description: hypothetical protein F10M10.120 - Arabidopsis >gi|4455180|emb|CAB36712.1| putative protein [Arabidopsis >gi|7270385|emb|CAB80152.1| putative protein [Arabidopsis
  misc_feature (1)..(414): Homolog of NCBI NO: 10716963 NR Description: LYTB-like protein precursor [Adonis palaestina]
  misc_feature (6)..(406): Homolog of NCBI NO: 17228480 NR Description: hypothetical protein [Nostoc sp. PCC 7120]
  misc_feature (6)..(406): Homolog of NCBI NO: 22298585 NR Description: ORF_ID:tlr1041~penicillin tolerance protein LytB
  misc_feature (6)..(414): Homolog of NCBI NO: 16331361 NR Description: hypothetical protein [Synechocystis sp. PCC 6803]
  misc_feature (6)..(406): Homolog of NCBI NO: 23128578 NR Description: hypothetical protein [Nostoc punctiforme]
  misc_feature (6)..(406): Homolog of NCBI NO: 23040062 NR Description: hypothetical protein [Trichodesmium erythraeum
  misc_feature (34)..(414): Homolog of NCBI NO: 8928192 NR Description: IspH protein >gi|1256595|gb|AAB72119.1| LytB
  misc_feature (6)..(411): Homolog of NCBI NO: 33239748 NR Description: 4-hydroxy-3-methylbut-2-enyl diphosphate

SEQ ID NO: 106040 - protein, 380 aa, Arabidopsis thaliana; identical to SEQ ID NO: 21127
  peptide (1)..(380): Ceres Seq. ID no. 13618632
  misc_feature (27)..(371): Pfam Name: LytB protein Pfam Description: LytB protein
  misc_feature (1)..(380): Homolog of NCBI NO: 18418433 NR Description: ISPH [Arabidopsis thaliana] putative protein [Arabidopsis thaliana] putative protein [Arabidopsis thaliana]
  misc_feature (1)..(380): Homolog of NCBI NO: 7485313 NR Description: hypothetical protein F10M10.120 - Arabidopsis >gi|4455180|emb|CAB36712.1| putative protein [Arabidopsis >gi|7270385|emb|CAB80152.1| putative protein [Arabidopsis
  misc_feature (1)..(380): Homolog of NCBI NO: 10716963 NR Description: LYTB-like protein precursor [Adonis palaestina]
  misc_feature (1)..(372): Homolog of NCBI NO: 17228480 NR Description: hypothetical protein [Nostoc sp. PCC 7120]
  misc_feature (1)..(372): Homolog of NCBI NO: 22298585 NR Description: ORF_ID:tlr1041~penicillin tolerance protein LytB
  misc_feature (1)..(380): Homolog of NCBI NO: 16331361 NR Description: hypothetical protein [Synechocystis sp. PCC 6803]
  misc_feature (1)..(372): Homolog of NCBI NO: 23128578 NR Description: hypothetical protein [Nostoc punctiforme]
  misc_feature (1)..(372): Homolog of NCBI NO: 23040062 NR Description: hypothetical protein [Trichodesmium erythraeum
  misc_feature (1)..(380): Homolog of NCBI NO: 8928192 NR Description: IspH protein >gi|1256595|gb|AAB72119.1| LytB
  misc_feature (1)..(377): Homolog of NCBI NO: 33239748 NR Description: 4-hydroxy-3-methylbut-2-enyl diphosphate

SEQ ID NO: 106041 - DNA, 1311 bp, Arabidopsis thaliana
  misc_feature (1)..(1311): Ceres Seq. ID no. 13618633
  misc_feature: MA Experiment ID: 108433 Result: Down-regulated in Transcription
  misc_feature: MA Experiment 108433 PARAMETER Experiment Name: At_rhl_Mutant2_cDNA_P Parameter: Age (day) Value: 7
  misc_feature: MA Experiment 108433 PARAMETER Experiment Name: At_rhl_Mutant2_cDNA_P Parameter: Organism Value: A. thaliana
  misc_feature: MA Experiment 108433 PARAMETER Experiment Name: At_rhl_Mutant2_cDNA_P Parameter: Plant Line Value: rhl Mutant vs. wt landsburg
  misc_feature: MA Experiment 108433 PARAMETER Experiment Name: At_rhl_Mutant2_cDNA_P Parameter: Tissue Value: Roots
  misc_feature: MA Experiment ID: 108435 Result: Up-regulated in Transcription
  misc_feature: MA Experiment 108435 PARAMETER Experiment Name: At_stm_Mutants_cDNA_P Parameter: Plant Line Value: wt Landsburg vs stm
  misc_feature: MA Experiment 108435 PARAMETER Experiment Name: At_stm_Mutants_cDNA_P Parameter: Tissue Value: Shoot Apical Meristem Region
  misc_feature: MA Experiment ID: 108461 Result: Up-regulated in Transcription
  misc_feature: MA Experiment 108461 PARAMETER Experiment Name: At_Germinating_Seeds_cDNA_P Parameter: Age (day) Value: 1 vs. 0
  misc_feature: MA Experiment 108461 PARAMETER Experiment Name: At_Germinating_Seeds_cDNA_P Parameter: Tissue Value: Germinating Seeds
  misc_feature: MA Experiment ID: 108464 Result: Up-regulated in Transcription
  misc_feature: MA Experiment 108464 PARAMETER Experiment Name: At_Germinating_Seeds_cDNA_P Parameter: Age (day) Value: 4 vs. 0
  misc_feature: MA Experiment 108464 PARAMETER Experiment Name: At_Germinating_Seeds_cDNA_P Parameter: Tissue Value: Germinating Seeds
  misc_feature: MA Experiment ID: 20000087 Result: Up-regulated in Transcription
  misc_feature: MA Experiment 20000087 PARAMETER Experiment Name: At_100uM_ABA_Mutants_cDNA_P Parameter: Plant Line Value: WS
  misc_feature: MA Experiment 20000087 PARAMETER Experiment Name: At_100uM_ABA_Mutants_cDNA_P Parameter: Timepoint (hr) Value: 6
  misc_feature: MA Experiment 20000087 PARAMETER Experiment Name: At_100uM_ABA_Mutants_cDNA_P Parameter: Tissue Value: Aerial
  misc_feature: MA Experiment 20000087 PARAMETER Experiment Name: At_100uM_ABA_Mutants_cDNA_P Parameter: Treatment Value: 100uM ABA vs. No Treatment
  misc_feature: MA Experiment ID: 20000117 Result: Up-regulated in Transcription
  misc_feature: MA Experiment 20000117 PARAMETER Experiment Name: At_100uM_ABA_Mutants_cDNA_P Parameter: Plant Line Value: Columbia
  misc_feature: MA Experiment 20000117 PARAMETER Experiment Name: At_100uM_ABA_Mutants_cDNA_P Parameter: Timepoint (hr) Value: 6
  misc_feature: MA Experiment 20000117 PARAMETER Experiment Name: At_100uM_ABA_Mutants_cDNA_P Parameter: Tissue Value: Aerial
  misc_feature: MA Experiment 20000117 PARAMETER Experiment Name: At_100uM_ABA_Mutants_cDNA_P Parameter: Treatment Value: 100uM ABA vs. No Treatment
  misc_feature: MA Experiment ID: 20000179 Result: Up-regulated in Transcription
  misc_feature: MA Experiment 20000179 PARAMETER Experiment Name: At_Germinating_Seeds_P Parameter: Age (hr) Value: 6 vs. 0
  misc_feature: MA Experiment 20000179 PARAMETER Experiment Name: At_Germinating_Seeds_P Parameter: Tissue Value: Germinating Seeds
  misc_feature: MA Experiment ID: 20000180 Result: Up-regulated in Transcription
  misc_feature: MA Experiment 20000180 PARAMETER Experiment Name: At_Germinating_Seeds_P Parameter: Age (hr) Value: 24 vs. 0
  misc_feature: MA Experiment 20000180 PARAMETER Experiment Name: At_Germinating_Seeds_P Parameter: Tissue Value: Germinating Seeds
  misc_feature: MA Experiment ID: 20000184 Result: Down-regulated in Transcription
  misc_feature: MA Experiment 20000184 PARAMETER Experiment Name: At_Shoots__P Parameter: Age (day) Value: 7
  misc_feature: MA Experiment 20000184 PARAMETER Experiment Name: At_Shoots__P Parameter: Tissue Value: Shoots vs. Whole Plant
  misc_feature: MA Experiment ID: 20000224 Result: Up-regulated in Transcription
  misc_feature: MA Experiment ID: 20000234 Result: Up-regulated in Transcription
  misc_feature: MA Experiment 20000234 PARAMETER Experiment Name: At_Siliques_P Parameter: Age (day) Value: 21
  misc_feature: MA Experiment 20000234 PARAMETER Experiment Name: At_Siliques_P Parameter: Organism Value: A. thaliana
  misc_feature: MA Experiment 20000234 PARAMETER Experiment Name: At_Siliques_P Parameter: Plant Line Value: WS
  misc_feature: MA Experiment 20000234 PARAMETER Experiment Name: At_Siliques_P Parameter: Tissue Value: Less Than 5mm Siliques vs. Whole Plant
  misc_feature: MA Experiment ID: 20000235 Result: Up-regulated in Transcription
  misc_feature: MA Experiment 20000235 PARAMETER Experiment Name: At_Siliques_P Parameter: Age (day) Value: 21
  misc_feature: MA Experiment 20000235 PARAMETER Experiment Name: At_Siliques_P Parameter: Organism Value: A. thaliana
  misc_feature: MA Experiment 20000235 PARAMETER Experiment Name: At_Siliques_P Parameter: Plant Line Value: WS
  misc_feature: MA Experiment 20000235 PARAMETER Experiment Name: At_Siliques_P Parameter: Tissue Value: 5-10mm Siliques vs. Whole Plant
  misc_feature: MA Experiment ID: 20000264 Result: Up-regulated in Transcription
  misc_feature: MA Experiment 20000264 PARAMETER Experiment Name: At_Open_Flower_P Parameter: Age (day) Value: 21
  misc_feature: MA Experiment 20000264 PARAMETER Experiment Name: At_Open_Flower_P Parameter: Plant Line Value: WS
  misc_feature: MA Experiment 20000264 PARAMETER Experiment Name: At_Open_Flower_P Parameter: Tissue Value: Open Flower vs. Whole Plant
  misc_feature: MA Experiment ID: 20000265 Result: Up-regulated in Transcription
  misc_feature: MA Experiment 20000265 PARAMETER Experiment Name: At_Open_Flower_P Parameter: Age (day) Value: 21
  misc_feature: MA Experiment 20000265 PARAMETER Experiment Name: At_Open_Flower_P Parameter: Plant Line Value: WS
  misc_feature: MA Experiment 20000265 PARAMETER Experiment Name: At_Open_Flower_P Parameter: Tissue Value: Closed Flower vs. Whole Plant
  misc_feature: MA Experiment ID: 20000286 Result: Up-regulated in Transcription
  misc_feature: MA Experiment 20000286 PARAMETER Experiment Name: At_Open_Flower_P Parameter: Age (day) Value: 21
  misc_feature: MA Experiment 20000286 PARAMETER Experiment Name: At_Open_Flower_P Parameter: Plant Line Value: WS
  misc_feature: MA Experiment 20000286 PARAMETER Experiment Name: At_Open_Flower_P Parameter: Tissue Value: Half Open vs. Whole Plant
  misc_feature: MA Experiment ID: 20000437 Result: Up-regulated in Transcription
  misc_feature: MA Experiment 20000437 PARAMETER Experiment Name: At_Drought_P Parameter: Age (day) Value: 8
  misc_feature: MA Experiment 20000437 PARAMETER Experiment Name: At_Drought_P Parameter: Organism Value: A. thaliana
  misc_feature: MA Experiment 20000437 PARAMETER Experiment Name: At_Drought_P Parameter: Plant Line Value: WS
  misc_feature: MA Experiment 20000437 PARAMETER Experiment Name: At_Drought_P Parameter: Timepoint (hr) Value: 24
  misc_feature: MA Experiment 20000437 PARAMETER Experiment Name: At_Drought_P Parameter: Tissue Value: Whole Plant
  misc_feature: MA Experiment 20000437 PARAMETER Experiment Name: At_Drought_P Parameter: Treatment Value: Drought vs. No Drought
  misc_feature: MA Experiment ID: 20000438 Result: Down-regulated in Transcription
  misc_feature: MA Experiment 20000438 PARAMETER Experiment Name: At_Shoots__P Parameter: Age (day) Value: 14
  misc_feature: MA Experiment 20000438 PARAMETER Experiment Name: At_Shoots__P Parameter: Tissue Value: Shoots vs. Whole Plant
  misc_feature: MA Experiment ID: 20000456 Result: Up-regulated in Transcription
  misc_feature: MA Experiment 20000456 PARAMETER Experiment Name: At_100uM_BA_P Parameter: Age (day) Value: 14
  misc_feature: MA Experiment 20000456 PARAMETER Experiment Name: At_100uM_BA_P Parameter: Organism Value: A. thaliana
  misc_feature: MA Experiment 20000456 PARAMETER Experiment Name: At_100uM_BA_P Parameter: Plant Line Value: WS
  misc_feature: MA Experiment 20000456 PARAMETER Experiment Name: At_100uM_BA_P Parameter: Timepoint (hr) Value: 6
  misc_feature: MA Experiment 20000456 PARAMETER Experiment Name: At_100uM_BA_P Parameter: Tissue Value: Aerial
  misc_feature: MA Experiment 20000456 PARAMETER Experiment Name: At_100uM_BA_P Parameter: Treatment Value: 100uM BA vs. No Treatment
  misc_feature: MA Experiment ID: 20000573 Result: Down-regulated in Transcription
  misc_feature: MA Experiment 20000573 PARAMETER Experiment Name: At_100uM_ABA_Mutants__P Parameter: Organism Value: A. thaliana
  misc_feature: MA Experiment 20000573 PARAMETER Experiment Name: At_100uM_ABA_Mutants__P Parameter: Plant Line Value: CS22 vs. Ler wt
  misc_feature: MA Experiment 20000573 PARAMETER Experiment Name: At_100uM_ABA_Mutants__P Parameter: Timepoint (hr) Value: N/A
  misc_feature: MA Experiment 20000573 PARAMETER Experiment Name: At_100uM_ABA_Mutants__P Parameter: Tissue Value: Whole Plant
  misc_feature: MA Experiment 20000573 PARAMETER Experiment Name: At_100uM_ABA_Mutants__P Parameter: Treatment Value: None
  misc_feature: MA Experiment ID: 20001247 Result: Down-regulated in Transcription
  misc_feature: MA Experiment 20001247 PARAMETER Experiment Name: At_Far-red-induction_P Parameter: Age (day) Value: 7
  misc_feature: MA Experiment 20001247 PARAMETER Experiment Name: At_Far-red-induction_P Parameter: Light Value: Far-red vs. White
  misc_feature: MA Experiment 20001247 PARAMETER Experiment Name: At_Far-red-induction_P Parameter: Organism Value: A. thaliana
  misc_feature: MA Experiment 20001247 PARAMETER Experiment Name: At_Far-red-induction_P Parameter: Plant Line Value: Columbia
  misc_feature: MA Experiment 20001247 PARAMETER Experiment Name: At_Far-red-induction_P Parameter: Timepoint (hr) Value: 1
  misc_feature: MA Experiment 20001247 PARAMETER Experiment Name: At_Far-red-induction_P Parameter: Tissue Value: Whole Plant
  misc_feature: MA Experiment ID: 20001248 Result: Down-regulated in Transcription
  misc_feature: MA Experiment 20001248 PARAMETER Experiment Name: At_Far-red-induction_P Parameter: Age (day) Value: 7
  misc_feature: MA Experiment 20001248 PARAMETER Experiment Name: At_Far-red-induction_P Parameter: Light Value: Far-red vs. White
  misc_feature: MA Experiment 20001248 PARAMETER Experiment Name: At_Far-red-induction_P Parameter: Organism Value: A. thaliana
  misc_feature: MA Experiment 20001248 PARAMETER Experiment Name: At_Far-red-induction_P Parameter: Plant Line Value: Columbia
  misc_feature: MA Experiment 20001248 PARAMETER Experiment Name: At_Far-red-induction_P Parameter: Timepoint (hr) Value: 4
  misc_feature: MA Experiment 20001248 PARAMETER Experiment Name: At_Far-red-induction_P Parameter: Tissue Value: Whole Plant
  misc_feature: MA Experiment ID: 20001450 Result: Down-regulated in Transcription
  misc_feature: MA Experiment 20001450 PARAMETER Experiment Name: At_Far-red-induction_P Parameter: Age (day) Value: 7
  misc_feature: MA Experiment 20001450 PARAMETER Experiment Name: At_Far-red-induction_P Parameter: Light Value: Far-red vs. White
  misc_feature: MA Experiment 20001450 PARAMETER Experiment Name: At_Far-red-induction_P Parameter: Organism Value: A. thaliana
  misc_feature: MA Experiment 20001450 PARAMETER Experiment Name: At_Far-red-induction_P Parameter: Plant Line Value: Columbia
  misc_feature: MA Experiment 20001450 PARAMETER Experiment Name: At_Far-red-induction_P Parameter: Timepoint (hr) Value: 8
  misc_feature: MA Experiment 20001450 PARAMETER Experiment Name: At_Far-red-induction_P Parameter: Tissue Value: Whole Plant
  misc_feature: MA Experiment ID: 20001451 Result: Down-regulated in Transcription
  misc_feature: MA Experiment 20001451 PARAMETER Experiment Name: At_Far-red-induction_P Parameter: Age (day) Value: 7
  misc_feature: MA Experiment 20001451 PARAMETER Experiment Name: At_Far-red-induction_P Parameter: Light Value: Far-red vs. White
  misc_feature: MA Experiment 20001451 PARAMETER Experiment Name: At_Far-red-induction_P Parameter: Organism Value: A. thaliana
  misc_feature: MA Experiment 20001451 PARAMETER Experiment Name: At_Far-red-induction_P Parameter: Plant Line Value: Columbia
  misc_feature: MA Experiment 20001451 PARAMETER Experiment Name: At_Far-red-induction_P Parameter: Timepoint (hr) Value: 24
  misc_feature: MA Experiment 20001451 PARAMETER Experiment Name: At_Far-red-induction_P Parameter: Tissue Value: Whole Plant
  misc_feature: MA Experiment ID: 20001555 Result: Up-regulated in Transcription
  misc_feature: MA Experiment 20001555 PARAMETER Experiment Name: At_Drought_Soil_Dry_P Parameter: Age (day) Value: 24
  misc_feature: MA Experiment 20001555 PARAMETER Experiment Name: At_Drought_Soil_Dry_P Parameter: Organism Value: A. thaliana
  misc_feature: MA Experiment 20001555 PARAMETER Experiment Name: At_Drought_Soil_Dry_P Parameter: Plant Line Value: WS
  misc_feature: MA Experiment 20001555 PARAMETER Experiment Name: At_Drought_Soil_Dry_P Parameter: Post Timepoint (hr) Value: None
  misc_feature: MA Experiment 20001555 PARAMETER Experiment Name: At_Drought_Soil_Dry_P Parameter: Post-Treatment Value: None
  misc_feature: MA Experiment 20001555 PARAMETER Experiment Name: At_Drought_Soil_Dry_P Parameter: Timepoint (day) Value: 10
  misc_feature: MA Experiment 20001555 PARAMETER Experiment Name: At_Drought_Soil_Dry_P Parameter: Treatment Value: Drought vs. No Drought
  misc_feature: MA Experiment ID: 20001556 Result: Up-regulated in Transcription
  misc_feature: MA Experiment 20001556 PARAMETER Experiment Name: At_Drought_Soil_Dry_P Parameter: Age (day) Value: 26
  misc_feature: MA Experiment 20001556 PARAMETER Experiment Name: At_Drought_Soil_Dry_P Parameter: Organism Value: A. thaliana
  misc_feature: MA Experiment 20001556 PARAMETER Experiment Name: At_Drought_Soil_Dry_P Parameter: Plant Line Value: WS
  misc_feature: MA Experiment 20001556 PARAMETER Experiment Name: At_Drought_Soil_Dry_P Parameter: Post Timepoint (hr) Value: None
  misc_feature: MA Experiment 20001556 PARAMETER Experiment Name: At_Drought_Soil_Dry_P Parameter: Post-Treatment Value: None
  misc_feature: MA Experiment 20001556 PARAMETER Experiment Name: At_Drought_Soil_Dry_P Parameter: Timepoint (day) Value: 12
  misc_feature: MA Experiment 20001556 PARAMETER Experiment Name: At_Drought_Soil_Dry_P Parameter: Treatment Value: Drought vs. No Drought
  misc_feature: MA Experiment ID: 20001557 Result: Up-regulated in Transcription
  misc_feature: MA Experiment 20001557 PARAMETER Experiment Name: At_Drought_Soil_Dry_P Parameter: Age (day) Value: 27
  misc_feature: MA Experiment 20001557 PARAMETER Experiment Name: At_Drought_Soil_Dry_P Parameter: Organism Value: A. thaliana
  misc_feature: MA Experiment 20001557 PARAMETER Experiment Name: At_Drought_Soil_Dry_P Parameter: Plant Line Value: WS
  misc_feature: MA Experiment 20001557 PARAMETER Experiment Name: At_Drought_Soil_Dry_P Parameter: Post Timepoint (hr) Value: 3
  misc_feature: MA Experiment 20001557 PARAMETER Experiment Name: At_Drought_Soil_Dry_P Parameter: Post-Treatment Value: Re-Water vs. No Drought
  misc_feature: MA Experiment 20001557 PARAMETER Experiment Name: At_Drought_Soil_Dry_P Parameter: Timepoint (day) Value: 13
  misc_feature: MA Experiment 20001557 PARAMETER Experiment Name: At_Drought_Soil_Dry_P Parameter: Treatment Value: Drought vs. No Drought
  misc_feature: MA Experiment ID: 20001558 Result: Up-regulated in Transcription
  misc_feature: MA Experiment 20001558 PARAMETER Experiment Name: At_Drought_Soil_Dry_P Parameter: Age (day) Value: 27
  misc_feature: MA Experiment 20001558 PARAMETER Experiment Name: At_Drought_Soil_Dry_P Parameter: Organism Value: A. thaliana
  misc_feature: MA Experiment 20001558 PARAMETER Experiment Name: At_Drought_Soil_Dry_P Parameter: Plant Line Value: WS
  misc_feature: MA Experiment 20001558 PARAMETER Experiment Name: At_Drought_Soil_Dry_P Parameter: Post Timepoint (hr) Value: 6
  misc_feature: MA Experiment 20001558 PARAMETER Experiment Name: At_Drought_Soil_Dry_P Parameter: Post-Treatment Value: Re-Water vs. No Drought
  misc_feature: MA Experiment 20001558 PARAMETER Experiment Name: At_Drought_Soil_Dry_P Parameter: Timepoint (day) Value: 13
  misc_feature: MA Experiment 20001558 PARAMETER Experiment Name: At_Drought_Soil_Dry_P Parameter: Treatment Value: Drought vs. No Drought
  misc_feature: MA Experiment ID: 20001560 Result: Up-regulated in Transcription
  misc_feature: MA Experiment 20001560 PARAMETER Experiment Name: At_Drought_Soil_Dry_P Parameter: Age (day) Value: 28
  misc_feature: MA Experiment 20001560 PARAMETER Experiment Name: At_Drought_Soil_Dry_P Parameter: Organism Value: A. thaliana
  misc_feature: MA Experiment 20001560 PARAMETER Experiment Name: At_Drought_Soil_Dry_P Parameter: Plant Line Value: WS
  misc_feature: MA Experiment 20001560 PARAMETER Experiment Name: At_Drought_Soil_Dry_P Parameter: Post Timepoint (hr) Value: None
  misc_feature: MA Experiment 20001560 PARAMETER Experiment Name: At_Drought_Soil_Dry_P Parameter: Post-Treatment Value: None
  misc_feature: MA Experiment 20001560 PARAMETER Experiment Name: At_Drought_Soil_Dry_P Parameter: Timepoint (day) Value: 14
  misc_feature: MA Experiment 20001560 PARAMETER Experiment Name: At_Drought_Soil_Dry_P Parameter: Treatment Value: Drought vs. No Drought
  misc_feature: MA Experiment ID: 20001904 Result: Up-regulated in Transcription
  misc_feature: MA Experiment 20001904 PARAMETER Experiment Name: At_Drought_Reproduction_P Parameter: Age (day) Value: 37
  misc_feature: MA Experiment 20001904 PARAMETER Experiment Name: At_Drought_Reproduction_P Parameter: Organism Value: A. thaliana
  misc_feature: MA Experiment 20001904 PARAMETER Experiment Name: At_Drought_Reproduction_P Parameter: Plant Line Value: WS
  misc_feature: MA Experiment 20001904 PARAMETER Experiment Name: At_Drought_Reproduction_P Parameter: Timepoint (day) Value: 7
  misc_feature: MA Experiment 20001904 PARAMETER Experiment Name: At_Drought_Reproduction_P Parameter: Tissue Value: Rosettes
  misc_feature: MA Experiment 20001904 PARAMETER Experiment Name: At_Drought_Reproduction_P Parameter: Treatment Value: Drought vs. No Drought
  misc_feature: MA Experiment ID: 20001905 Result: Up-regulated in Transcription
  misc_feature: MA Experiment 20001905 PARAMETER Experiment Name: At_Drought_Reproduction_P Parameter: Age (day) Value: 40
  misc_feature: MA Experiment 20001905 PARAMETER Experiment Name: At_Drought_Reproduction_P Parameter: Organism Value: A. thaliana
  misc_feature: MA Experiment 20001905 PARAMETER Experiment Name: At_Drought_Reproduction_P Parameter: Plant Line Value: WS
  misc_feature: MA Experiment 20001905 PARAMETER Experiment Name: At_Drought_Reproduction_P Parameter: Timepoint (day) Value: 10
  misc_feature: MA Experiment 20001905 PARAMETER Experiment Name: At_Drought_Reproduction_P Parameter: Tissue Value: Rosettes
  misc_feature: MA Experiment 20001905 PARAMETER Experiment Name: At_Drought_Reproduction_P Parameter: Treatment Value: Drought vs. No Drought
cccctcttctctccttctctcccttttctctctctctcgaagatatcgcctttaattccttcttcttcttctgatttcttcaaagattcatttcttagagatctcagcttctgtaagagtaggctagctaccaaaaaaaaagaaatagaaaaaaacattgatgcttaatcagcagttcttggtgtttgagacacatgtctccaataatactcagtgagatctttctctctgggtttatgttaaattccacaatcaggcgcaggacccatcttgttcaatctttctctgttgtcttcctttactggctttactatgtctcatgatctctgaacttatctccagttttatatctatacgcataattacaacaaaaccctagtttcttttcaaatttctcttcttcgtttttcgtcatctgggtcctgtcctgttctgttgtgtcttgttctgttctgtttttaattcccctaaaaacccattttaaaatattttatctctcttctcttaaaaaaaactcttccctgtttttgtttgtgtgttactaaatggaatcgtcgtcgtcgggaacaacttcgtcgacgattcaaacgtcgtcaggatcggaggagagtctcatggagcagaggaaacgtaaacggatgctctcaaaccgtgaatctgcaaggagatcaagaatgaagaaacaaaagctcctagacgatctaacggctcaggttaatcatctgaaaaaagagaacacggagatcgtgacaagtgtcagcatcacaacgcaacactacctaaccgttgaagcagagaactctgttctcagagctcagcttgatgaacttaaccacaggctccaatctctcaacgacatcatcgagttcctcgacagtagcaacaacaacaacaacaacaacatgggcatgtgttcgaaccctctggttggtttggagtgtgatgatttcttcgtgaatcagatgaacatgtcttatattatgaaccagcctctcatggcgtcttctgatgctttaatgtattaaatgtggacctaaaaaccccctcgaaatcacaaagaaatggggccgtttttatttgtccgatttagagacatgtccaaagagagagatttatatataaaaatgggtctgttgtttgatttgtttccatttcaaatttttgtttgtttgggtccgttttaggcgttaggtatctctaagcatcatcgttatgagtgtgtctgtaataaaggctctgttgccgcatgagtacaaagtgttttcttaatattgtaatatgcttattactttctttttattcttaagtact

SEQ ID NO: 106042 - protein, 159 aa, Arabidopsis thaliana; identical to SEQ ID NO: 25285
  peptide (1)..(159): Ceres Seq. ID no. 13618634
  misc_feature (23)..(87): Pfam Name: bZIP transcription factor Pfam Description: bZIP transcription factor
  misc_feature (1)..(159): Homolog of NCBI NO: 15236153 NR Description: bZIP family transcription factor [Arabidopsis
  misc_feature (1)..(159): Homolog of NCBI NO: 1769891 NR Description: bZIP transcription factor [Arabidopsis thaliana] ATB2 [Arabidopsis thaliana] >gi|10443483|gb|AAG17475.1|AF053940_1
  misc_feature (3)..(159): Homolog of NCBI NO: 24460973 NR Description: bZIP transcription factor [Capsicum chinense]
  misc_feature (3)..(159): Homolog of NCBI NO: 4457221 NR Description: putative bZIP DNA-binding protein [Capsicum
  misc_feature (3)..(159): Homolog of NCBI NO: 16580130 NR Description: bZIP transcription factor BZI-2 [Nicotiana

SEQ ID NO: 106043 - protein, 136 aa, Arabidopsis thaliana; identical to SEQ ID NO: 25286
  peptide (1)..(136): Ceres Seq. ID no. 13618635
  misc_feature (1)..(64): Pfam Name: bZIP transcription factor Pfam Description: bZIP transcription factor
  misc_feature (1)..(136): Homolog of NCBI NO: 15236153 NR Description: bZIP family transcription factor [Arabidopsis
  misc_feature (1)..(136): Homolog of NCBI NO: 1769891 NR Description: bZIP transcription factor [Arabidopsis thaliana] ATB2 [Arabidopsis thaliana] >gi|10443483|gb|AAG17475.1|AF053940_1
  misc_feature (1)..(136): Homolog of NCBI NO: 24460973 NR Description: bZIP transcription factor [Capsicum chinense]
  misc_feature (1)..(136): Homolog of NCBI NO: 4457221 NR Description: putative bZIP DNA-binding protein [Capsicum
  misc_feature (1)..(136): Homolog of NCBI NO: 16580130 NR Description: bZIP transcription factor BZI-2 [Nicotiana

SEQ ID NO: 106044 - protein, 128 aa, Arabidopsis thaliana; identical to SEQ ID NO: 25287
  peptide (1)..(128): Ceres Seq. ID no. 13618636
  misc_feature (1)..(56): Pfam Name: bZIP transcription factor Pfam Description: bZIP transcription factor
  misc_feature (1)..(128): Homolog of NCBI NO: 15236153 NR Description: bZIP family transcription factor [Arabidopsis
  misc_feature (1)..(128): Homolog of NCBI NO: 1769891 NR Description: bZIP transcription factor [Arabidopsis thaliana] ATB2 [Arabidopsis thaliana] >gi|10443483|gb|AAG17475.1|AF053940_1
  misc_feature (1)..(128): Homolog of NCBI NO: 24460973 NR Description: bZIP transcription factor [Capsicum chinense]
  misc_feature (1)..(128): Homolog of NCBI NO: 4457221 NR Description: putative bZIP DNA-binding protein [Capsicum
  misc_feature (1)..(128): Homolog of NCBI NO: 16580130 NR Description: bZIP transcription factor BZI-2 [Nicotiana

SEQ ID NO: 106045 - DNA, 1608 bp, Arabidopsis thaliana
  misc_feature (1)..(1608): Ceres Seq. ID no. 13618637
  misc_feature: MA Experiment ID: 20000113 Result: Down-regulated in Transcription
  misc_feature: MA Experiment 20000113 PARAMETER Experiment Name: At_42deg_Heat_cDNA_P Parameter: Temperature (deg C) Value: 42 vs. 22
  misc_feature: MA Experiment 20000113 PARAMETER Experiment Name: At_42deg_Heat_cDNA_P Parameter: Timepoint (hr) Value: 8
  misc_feature: MA Experiment 20000113 PARAMETER Experiment Name: At_42deg_Heat_cDNA_P Parameter: Tissue Value: Aerial
agagaaatttgttctgagctcaacgccatttttgacgatttcgaatctctgtcttctctgagttgttccaagtaatcggagggaactcgtaaagtggaagaataggagaaagagagaaggaagaagatttgtgaatagctcttgatctggtgaagaatggatgcaattagaaaacaagctagcaggttgagagaacaagttgcgagacagcagcaggctgtctttaagcaatttggaggagggggatatggctctggtttagctgatgaagcagaactcaatcagcatcagaagctagaaaagctttacatatccactcgtgctgctaagcattaccaaagagatattgttcgtggtgtggaaggttatatagttacagggtcaaaacaagttgaaataggtacgaaattgtctgaggatagcaggaaatatggttcagagaatacatgtacgaatggtaacgtattaacacgggctgcactgaactatgggcgtgctcgagcacaaatggagaaggaacgtggaaatatgttgaaggctcttggtacacaggttgctgagccattacgggcaatggttttgggagctccattggaggatgctagacatcttgctcaacgctatgacagaatgcgccaagaagctgaagctcaggctacagaagttgccagacgccaagcaaaggcgagagagtctcaaggtaatcctgacatcttgatgaaactggaatctgctgaagcaaaacttcacgacctaaaatcaaatatgacaatattggggaaagaagctgcttctgctttagcttccgttgaagatcaacaacagaaattgactcttgaacgacttctttcaatggttgaatctgaacgcgcctaccatcaaagagtcctccaaatacttgatcagctcgaaggagagatggtatctgagaggcaacgtatagaagctccctctactccctcaagcgcagacagtatgccgccacctccatcatatgaggaagctaatggagtgtttgcatctcagatgcatgacacgtcaacagatagcatgggttacttcttaggagaggtcttgttcccatatcacggtgtgacagatgtcgagctcagcttatcaactggtgaatacgttgttgttagaaaggttacaggcagtggatgggccgaaggtgaatgcaaaggcaaagctggttggttcccttatgggtacattgaaagacgggaacgagttcttgctagcaaagtgtccgaagttttctgagaatttgaaggtaacattatggttctttgttggttatggaattgagttgcttctgtagaagagttgtgtgttctgtagaagaaaaagaaagaaaagattcacgggctaaaacagaagtccatatgcatgaggatcagagttgatgcgggtttctgccatgttctgaatctaatagtgatgccacttgaacaagagttcagtttttaggtattatcttcatattggatttggatattttctttgtcatttgatgtaaacgccacatctctgtttatcttcgtatgtgaatacacttcttttcgggtcttatttgtgattttttgtccaaattactttcatttgata

SEQ ID NO: 106046 - protein, 368 aa, Arabidopsis thaliana; identical to SEQ ID NO: 21997
  peptide (1)..(368): Ceres Seq. ID no. 13618638
  misc_feature (302)..(356): Pfam Name: SH3 domain Pfam Description: SH3 domain
  misc_feature (1)..(368): Homolog of NCBI NO: 18418491 NR Description: SH3 domain-containing protein 2 [Arabidopsis
  misc_feature (1)..(368): Homolog of NCBI NO: 7487662 NR Description: hypothetical protein T4L20.240 - Arabidopsis >gi|3096935|emb|CAA18845.1| putative protein [Arabidopsis >gi|7270416|emb|CAB80183.1| putative protein [Arabidopsis
  misc_feature (1)..(368): Homolog of NCBI NO: 38344978 NR Description: OSJNBa0011L07.8 [Oryza sativa (japonica
  misc_feature (1)..(282): Homolog of NCBI NO: 34902022 NR Description: unknown protein [Oryza sativa (japonica
  misc_feature (301)..(366): Homolog of NCBI NO: 34902022 NR Description: unknown protein [Oryza sativa (japonica
  misc_feature (1)..(270): Homolog of NCBI NO: 15221714 NR Description: SH3 domain-containing protein 1 [Arabidopsis
  misc_feature (254)..(366): Homolog of NCBI NO: 15221714 NR Description: SH3 domain-containing protein 1 [Arabidopsis
  misc_feature (1)..(242): Homolog of NCBI NO: 7485521 NR Description: hypothetical protein F15J5.30 - Arabidopsis >gi|5816992|emb|CAB53647.1| putative protein [Arabidopsis >gi|7268558|emb|CAB78808.1| putative protein [Arabidopsis
  misc_feature (293)..(368): Homolog of NCBI NO: 7485521 NR Description: hypothetical protein F15J5.30 - Arabidopsis >gi|5816992|emb|CAB53647.1| putative protein [Arabidopsis >gi|7268558|emb|CAB78808.1| putative protein [Arabidopsis
  misc_feature (140)..(368): Homolog of NCBI NO: 37535998 NR Description: unknown protein [Oryza sativa (japonica

SEQ ID NO: 106047 - protein, 251 aa, Arabidopsis thaliana; identical to SEQ ID NO: 21998
  peptide (1)..(251): Ceres Seq. ID no. 13618639
  misc_feature (185)..(239): Pfam Name: SH3 domain Pfam Description: SH3 domain
  misc_feature (1)..(251): Homolog of NCBI NO: 18418491 NR Description: SH3 domain-containing protein 2 [Arabidopsis
  misc_feature (1)..(251): Homolog of NCBI NO: 7487662 NR Description: hypothetical protein T4L20.240 - Arabidopsis >gi|3096935|emb|CAA18845.1| putative protein [Arabidopsis >gi|7270416|emb|CAB80183.1| putative protein [Arabidopsis
  misc_feature (1)..(251): Homolog of NCBI NO: 38344978 NR Description: OSJNBa0011L07.8 [Oryza sativa (japonica
  misc_feature (1)..(165): Homolog of NCBI NO: 34902022 NR Description: unknown protein [Oryza sativa (japonica
  misc_feature (184)..(249): Homolog of NCBI NO: 34902022 NR Description: unknown protein [Oryza sativa (japonica
  misc_feature (1)..(153): Homolog of NCBI NO: 15221714 NR Description: SH3 domain-containing protein 1 [Arabidopsis
  misc_feature (137)..(249): Homolog of NCBI NO: 15221714 NR Description: SH3 domain-containing protein 1 [Arabidopsis
  misc_feature (1)..(125): Homolog of NCBI NO: 7485521 NR Description: hypothetical protein F15J5.30 - Arabidopsis >gi|5816992|emb|CAB53647.1| putative protein [Arabidopsis >gi|7268558|emb|CAB78808.1| putative protein [Arabidopsis
  misc_feature (176)..(251): Homolog of NCBI NO: 7485521 NR Description: hypothetical protein F15J5.30 - Arabidopsis >gi|5816992|emb|CAB53647.1| putative protein [Arabidopsis >gi|7268558|emb|CAB78808.1| putative protein [Arabidopsis
  misc_feature (23)..(251): Homolog of NCBI NO: 37535998 NR Description: unknown protein [Oryza sativa (japonica

SEQ ID NO: 106048 - protein, 244 aa, Arabidopsis thaliana; identical to SEQ ID NO: 21999
  peptide (1)..(244): Ceres Seq. ID no. 13618640
  misc_feature (178)..(232): Pfam Name: SH3 domain Pfam Description: SH3 domain
  misc_feature (1)..(244): Homolog of NCBI NO: 18418491 NR Description: SH3 domain-containing protein 2 [Arabidopsis
  misc_feature (1)..(244): Homolog of NCBI NO: 7487662 NR Description: hypothetical protein T4L20.240 - Arabidopsis >gi|3096935|emb|CAA18845.1| putative protein [Arabidopsis >gi|7270416|emb|CAB80183.1| putative protein [Arabidopsis
  misc_feature (1)..(244): Homolog of NCBI NO: 38344978 NR Description: OSJNBa0011L07.8 [Oryza sativa (japonica
  misc_feature (1)..(158): Homolog of NCBI NO: 34902022 NR Description: unknown protein [Oryza sativa (japonica
  misc_feature (177)..(242): Homolog of NCBI NO: 34902022 NR Description: unknown protein [Oryza sativa (japonica
  misc_feature (1)..(146): Homolog of NCBI NO: 15221714 NR Description: SH3 domain-containing protein 1 [Arabidopsis
  misc_feature (130)..(242): Homolog of NCBI NO: 15221714 NR Description: SH3 domain-containing protein 1 [Arabidopsis
  misc_feature (1)..(118): Homolog of NCBI NO: 7485521 NR Description: hypothetical protein F15J5.30 - Arabidopsis >gi|5816992|emb|CAB53647.1| putative protein [Arabidopsis >gi|7268558|emb|CAB78808.1| putative protein [Arabidopsis
  misc_feature (169)..(244): Homolog of NCBI NO: 7485521 NR Description: hypothetical protein F15J5.30 - Arabidopsis >gi|5816992|emb|CAB53647.1| putative protein [Arabidopsis >gi|7268558|emb|CAB78808.1| putative protein [Arabidopsis
  misc_feature (16)..(244): Homolog of NCBI NO: 37535998 NR Description: unknown protein [Oryza sativa (japonica

SEQ ID NO: 106049 - DNA, 1292 bp, Arabidopsis thaliana
  misc_feature (1)..(1292): Ceres Seq. ID no. 13618643
  misc_feature: MA Experiment ID: 108573 Result: Up-regulated in Transcription
  misc_feature: MA Experiment 108573 PARAMETER Experiment Name: At_Drought_cDNA_P Parameter: Timepoint (hr) Value: 6
  misc_feature: MA Experiment 108573 PARAMETER Experiment Name: At_Drought_cDNA_P Parameter: Tissue Value: Aerial
  misc_feature: MA Experiment 108573 PARAMETER Experiment Name: At_Drought_cDNA_P Parameter: Treatment Value: Drought vs. No Drought
  misc_feature: MA Experiment ID: 108594 Result: Down-regulated in Transcription
  misc_feature: MA Experiment 108594 PARAMETER Experiment Name: At_Ler-rhl_Root_cDNA_P Parameter: Plant Line Value: null
ataacttcatctctcccattctcttcactcttctcaaaaattcgatctttagggtttttcttttatcctcttatcgctaatctggagctctatagagactataaagggtttttgattgattcgggagctcgagatttgacttcttttagctgattcggcaagtttgtatctagaaaggatcgattggtgaggtcaatagtggttggtgggttttagtaatggaagacggtgagcttgatttctccaatcaggaagtgttttcgagttcggagatgggtgaattaccacctagcaattgttcgatggatagtttctttgatgggcttttaatggatactaatgctgcttgtacccacactcacacctgtaaccccactggaccagagaacactcatactcacacgtgcttccatgtccacaccaagattctcccggatgagagcgatgaaaaagtttctactgatgatacagctgagtcttgtgggaagaagggtgaaaagagacctttgggaaaccgggaagcggttagaaagtatagagagaagaagaaggctaaagctgcttctttggaggatgaggttgcaaggcttagggcggtgaatcagcagctggtgaagaggttgcaaaatcaggctaccttggaagctgaggtttcgaggcttaagtgtttgcttgtggatttgagaggaagaatagatggagagattggatcttttccttatcagaaacctatggctgcaaatattccttctttctcgcacatgatgaatccttgtaatgtacaatgtgatgatgaagtttattgccctcagaatgtgtttggagtgaatagccaagaaggtgcctcgatcaatgaccaagggttaagtggttgtgattttgatcagctacaatgcatggctaatcagaacttaaatggaaatggaaacggatcattcagcaacgtcaatacatctgtctcgaataagagaaaaggtgggcatcgtgcatcaagagcagtttgaagcatcatcaagcttgtactatctatttccaccagcatagatattgtattccaaataagttgtagagttcagctgcaggatcagcttcgctcaggttcctttgtatcctcatttttgttttttgttttctgactctctttcccttccattgtatttccttgttgagcttgacaaactagaaggatgatatattgttaatacaacaaactcaaatgttctgtgtgttcttgccatttgttttcatacttgagctgcttcttcttaagtttatgtcgaagaagttgattg

SEQ ID NO: 106050 - protein, 261 aa, Arabidopsis thaliana; identical to SEQ ID NO: 35160
  peptide (1)..(261): Ceres Seq. ID no. 13618644
  misc_feature (87)..(154): Pfam Name: bZIP transcription factor Pfam Description: bZIP transcription factor
  misc_feature (1)..(261): Homolog of NCBI NO: 18418563 NR Description: bZIP protein [Arabidopsis thaliana] putative protein [Arabidopsis thaliana]
  misc_feature (1)..(261): Homolog of NCBI NO: 21554283 NR Description: putative transcription factor [Arabidopsis
  misc_feature (1)..(253): Homolog of NCBI NO: 7486791 NR Description: hypothetical protein M4E13.100 - Arabidopsis >gi|2924515|emb|CAA17769.1| putative protein [Arabidopsis >gi|7270455|emb|CAB80221.1| putative protein [Arabidopsis
  misc_feature (1)..(261): Homolog of NCBI NO: 30679757 NR Description: bZIP protein [Arabidopsis thaliana] putative bzip transcription factor atbzip23 [Arabidopsis
  misc_feature (1)..(253): Homolog of NCBI NO: 25370607 NR Description: hypothetical protein At2g16770 [imported] - thaliana >gi|4581120|gb|AAD24610.1| hypothetical protein
  misc_feature (1)..(226): Homolog of NCBI NO: 18855044 NR Description: putative transcription factor [Oryza sativa]
  misc_feature (44)..(213): Homolog of NCBI NO: 30693560 NR Description: bZIP family transcription factor [Arabidopsis >gi|26450338|dbj|BAC42285.1| putative bZip transcription factor
  misc_feature (44)..(213): Homolog of NCBI NO: 30693563 NR Description: bZIP family transcription factor [Arabidopsis
  misc_feature (44)..(170): Homolog of NCBI NO: 11357780 NR Description: hypothetical protein F4F15.70 - Arabidopsis >gi|4678925|emb|CAB41316.1| putative protein [Arabidopsis
  misc_feature (94)..(186): Homolog of NCBI NO: 34908964 NR Description: P0003D09.19 [Oryza sativa (japonica

SEQ ID NO: 106051 - protein, 243 aa, Arabidopsis thaliana; identical to SEQ ID NO: 35161
  peptide (1)..(243): Ceres Seq. ID no. 13618645
  misc_feature (69)..(136): Pfam Name: bZIP transcription factor Pfam Description: bZIP transcription factor
  misc_feature (1)..(243): Homolog of NCBI NO: 18418563 NR Description: bZIP protein [Arabidopsis thaliana] putative protein [Arabidopsis thaliana]
  misc_feature (1)..(243): Homolog of NCBI NO: 21554283 NR Description: putative transcription factor [Arabidopsis
  misc_feature (1)..(235): Homolog of NCBI NO: 7486791 NR Description: hypothetical protein M4E13.100 - Arabidopsis >gi|2924515|emb|CAA17769.1| putative protein [Arabidopsis >gi|7270455|emb|CAB80221.1| putative protein [Arabidopsis
  misc_feature (1)..(243): Homolog of NCBI NO: 30679757 NR Description: bZIP protein [Arabidopsis thaliana] putative bzip transcription factor atbzip23 [Arabidopsis
  misc_feature (1)..(235): Homolog of NCBI NO: 25370607 NR Description: hypothetical protein At2g16770 [imported] - thaliana >gi|4581120|gb|AAD24610.1| hypothetical protein
  misc_feature (1)..(208): Homolog of NCBI NO: 18855044 NR Description: putative transcription factor [Oryza sativa]
  misc_feature (26)..(195): Homolog of NCBI NO: 30693560 NR Description: bZIP family transcription factor [Arabidopsis >gi|26450338|dbj|BAC42285.1| putative bZip transcription factor
  misc_feature (26)..(195): Homolog of NCBI NO: 30693563 NR Description: bZIP family transcription factor [Arabidopsis
  misc_feature (26)..(152): Homolog of NCBI NO: 11357780 NR Description: hypothetical protein F4F15.70 - Arabidopsis >gi|4678925|emb|CAB41316.1| putative protein [Arabidopsis
  misc_feature (76)..(168): Homolog of NCBI NO: 34908964 NR Description: P0003D09.19 [Oryza sativa (japonica

SEQ ID NO: 106052 - protein, 233 aa, Arabidopsis thaliana; identical to SEQ ID NO: 35162
  peptide (1)..(233): Ceres Seq. ID no. 13618646
  misc_feature (59)..(126): Pfam Name: bZIP transcription factor Pfam Description: bZIP transcription factor
  misc_feature (1)..(233): Homolog of NCBI NO: 18418563 NR Description: bZIP protein [Arabidopsis thaliana] putative protein [Arabidopsis thaliana]
  misc_feature (1)..(233): Homolog of NCBI NO: 21554283 NR Description: putative transcription factor [Arabidopsis
  misc_feature (1)..(225): Homolog of NCBI NO: 7486791 NR Description: hypothetical protein M4E13.100 - Arabidopsis >gi|2924515|emb|CAA17769.1| putative protein [Arabidopsis >gi|7270455|emb|CAB80221.1| putative protein [Arabidopsis
  misc_feature (1)..(233): Homolog of NCBI NO: 30679757 NR Description: bZIP protein [Arabidopsis thaliana] putative bzip transcription factor atbzip23 [Arabidopsis
  misc_feature (1)..(225): Homolog of NCBI NO: 25370607 NR Description: hypothetical protein At2g16770 [imported] - thaliana >gi|4581120|gb|AAD24610.1| hypothetical protein
  misc_feature (1)..(198): Homolog of NCBI NO: 18855044 NR Description: putative transcription factor [Oryza sativa]
  misc_feature (16)..(185): Homolog of NCBI NO: 30693560 NR Description: bZIP family transcription factor [Arabidopsis >gi|26450338|dbj|BAC42285.1| putative bZip transcription factor
  misc_feature (16)..(185): Homolog of NCBI NO: 30693563 NR Description: bZIP family transcription factor [Arabidopsis
  misc_feature (16)..(142): Homolog of NCBI NO: 11357780 NR Description: hypothetical protein F4F15.70 - Arabidopsis >gi|4678925|emb|CAB41316.1| putative protein [Arabidopsis
  misc_feature (66)..(158): Homolog of NCBI NO: 34908964 NR Description: P0003D09.19 [Oryza sativa (japonica

SEQ ID NO: 106053 - DNA, 834 bp, Arabidopsis thaliana
  misc_feature (1)..(834): Ceres Seq. ID no. 13618647
  misc_feature: MA Experiment ID: 108434 Result: Up-regulated in Transcription
  misc_feature: MA Experiment 108434 PARAMETER Experiment Name: At_Root_Tips_cDNA_P Parameter: Tissue Value: Root Tips
atcatcactttcacaatcttcttcatcgatttctctcttccaaatctcccaaaagatgtcgaaccctagagttttcttcgacatgagtctcagcggtactcccatcggacggatcgagatggagcttttcgctgatacaaccccaaacacggcggagaatttccgtgctctctgtaccggcgagaaaggaatgggaaagctaggtaagccacttcacttcaaaggatcgatcttccaccgtgtgattcccggattcatgtgtcaaggaggtgatttcaccgccaagaacggaaccggtggtgaatcgatctacggtgctaagttcaaggacgagaactttatcaagaagcatacaggagctgggattctctcaatggctaactctggtcctaacactaacggatctcagttcttcatctgtaccgataagacgtcgtggttagatggtaagcacgttgtgtttggacaagttgttaaaggcttggacgtcgtgaaggcgattgagaaagttggatctgattctggaaagacttccaaagtcgttaccatcactgattgtggtcagctttcttagatctgagtgagaaagtgagagactttgatctttatgagtaataatggtgtcttttgctttcggttgttcttcctcttaccttaatggattattctgtttagggtttgagttttcgtttcagagtttgtaacaaaacccttttgtgttttctggggtttgaaataattatgagcttacccaattgcttctttgtgtttttgcttctatgaacaagtagtaactgattcgtcttctgattcttcaactgaatcgtgaatctt

SEQ ID NO: 106054 - protein, 190 aa, Arabidopsis thaliana
  peptide (1)..(190): Ceres Seq. ID no. 13618648
  misc_feature (19)..(190): Homolog of NCBI NO: 15236211 NR Description: peptidylprolyl isomerase (cyclophilin)
  misc_feature (19)..(190): Homolog of NCBI NO: 3334157 NR Description: Peptidyl-prolyl cis-trans isomerase (PPIase)
  misc_feature (19)..(189): Homolog of NCBI NO: 11270316 NR Description: peptidylprolyl isomerase (EC 5.2.1.8) - Digitalis lanata >gi|1563719|emb|CAA69622.1| cyclophylin
  misc_feature (20)..(190): Homolog of NCBI NO: 18076088 NR Description: cyclophilin [Ricinus communis]
  misc_feature (19)..(189): Homolog of NCBI NO: 11270322 NR Description: peptidylprolyl isomerase (EC 5.2.1.8) - potato >gi|4559302|gb|AAD22975.1|AF126551_1 cyclophilin
  misc_feature (20)..(190): Homolog of NCBI NO: 21886603 NR Description: peptidylprolyl isomerase (cyclophilin) [Betula
  misc_feature (19)..(190): Homolog of NCBI NO: 18146786 NR Description: CYP1 [Vigna radiata]
  misc_feature (19)..(189): Homolog of NCBI NO: 11270318 NR Description: peptidylprolyl isomerase (EC 5.2.1.8) CYP18 - Digitalis lanata >gi|1561575|emb|CAA69598.1| cyclophilin
  misc_feature (19)..(190): Homolog of NCBI NO: 1076510 NR Description: peptidylprolyl isomerase (EC 5.2.1.8) Cyp -
  misc_feature (19)..(190): Homolog of NCBI NO: 29124975 NR Description: cyclophilin [Populus tremuloides]
SSLSQSSSSISLFQISQKMSNPRVFFDMSLSGTPIGRIEMELFADTTPNTAENFRALCTGEKGMGKLGKPLHFKGSIFHRVIPGFMCQGGDFTAKNGTGGESIYGAKFKDENFIKKHTGAGILSMANSGPNTNGSQFFICTDKTSWLDGKHVVFGQVVKGLDVVKAIEKVGSDSGKTSKVVTITDCGQLS

SEQ ID NO: 106055 - protein, 172 aa, Arabidopsis thaliana; identical to SEQ ID NO: 25632
  peptide (1)..(172): Ceres Seq. ID no. 13618649
  misc_feature (1)..(172): Homolog of NCBI NO: 15236211 NR Description: peptidylprolyl isomerase (cyclophilin)
  misc_feature (1)..(172): Homolog of NCBI NO: 3334157 NR Description: Peptidyl-prolyl cis-trans isomerase (PPIase)
  misc_feature (1)..(171): Homolog of NCBI NO: 11270316 NR Description: peptidylprolyl isomerase (EC 5.2.1.8) - Digitalis lanata >gi|1563719|emb|CAA69622.1| cyclophylin
  misc_feature (2)..(172): Homolog of NCBI NO: 18076088 NR Description: cyclophilin [Ricinus communis]
  misc_feature (1)..(171): Homolog of NCBI NO: 11270322 NR Description: peptidylprolyl isomerase (EC 5.2.1.8) - potato >gi|4559302|gb|AAD22975.1|AF126551_1 cyclophilin
  misc_feature (2)..(172): Homolog of NCBI NO: 21886603 NR Description: peptidylprolyl isomerase (cyclophilin) [Betula
  misc_feature (1)..(172): Homolog of NCBI NO: 18146786 NR Description: CYP1 [Vigna radiata]
  misc_feature (1)..(171): Homolog of NCBI NO: 11270318 NR Description: peptidylprolyl isomerase (EC 5.2.1.8) CYP18 - Digitalis lanata >gi|1561575|emb|CAA69598.1| cyclophilin
  misc_feature (1)..(172): Homolog of NCBI NO: 1076510 NR Description: peptidylprolyl isomerase (EC 5.2.1.8) Cyp -
  misc_feature (1)..(172): Homolog of NCBI NO: 29124975 NR Description: cyclophilin [Populus tremuloides]

SEQ ID NO: 106056 - protein, 163 aa, Arabidopsis thaliana; identical to SEQ ID NO: 25633
  peptide (1)..(163): Ceres Seq. ID no. 13618650
  misc_feature (1)..(163): Homolog of NCBI NO: 15236211 NR Description: peptidylprolyl isomerase (cyclophilin)
  misc_feature (1)..(163): Homolog of NCBI NO: 3334157 NR Description: Peptidyl-prolyl cis-trans isomerase (PPIase)
  misc_feature (1)..(162): Homolog of NCBI NO: 11270316 NR Description: peptidylprolyl isomerase (EC 5.2.1.8) - Digitalis lanata >gi|1563719|emb|CAA69622.1| cyclophylin
  misc_feature (1)..(163): Homolog of NCBI NO: 18076088 NR Description: cyclophilin [Ricinus communis]
  misc_feature (1)..(162): Homolog of NCBI NO: 11270322 NR Description: peptidylprolyl isomerase (EC 5.2.1.8) - potato >gi|4559302|gb|AAD22975.1|AF126551_1 cyclophilin
  misc_feature (1)..(163): Homolog of NCBI NO: 21886603 NR Description: peptidylprolyl isomerase (cyclophilin) [Betula
  misc_feature (1)..(163): Homolog of NCBI NO: 18146786 NR Description: CYP1 [Vigna radiata]
  misc_feature (1)..(162): Homolog of NCBI NO: 11270318 NR Description: peptidylprolyl isomerase (EC 5.2.1.8) CYP18 - Digitalis lanata >gi|1561575|emb|CAA69598.1| cyclophilin
  misc_feature (1)..(163): Homolog of NCBI NO: 1076510 NR Description: peptidylprolyl isomerase (EC 5.2.1.8) Cyp -
  misc_feature (1)..(163): Homolog of NCBI NO: 29124975 NR Description: cyclophilin [Populus tremuloides]

SEQ ID NO: 106057 - DNA, 1299 bp, Arabidopsis thaliana
  misc_feature (1)..(1299): Ceres Seq. ID no. 13618654
  misc_feature: MA Experiment ID: 108501 Result: Down-regulated in Transcription
  misc_feature: MA Experiment 108501 PARAMETER Experiment Name: At_ap2_floral_buds_cDNA_P Parameter: Plant Line Value: ap2 (Ler.)
  misc_feature: MA Experiment 108501 PARAMETER Experiment Name: At_ap2_floral_buds_cDNA_P Parameter: Tissue Value: Closed Flower
  misc_feature: MA Experiment ID: 20000286 Result: Up-regulated in Transcription
  misc_feature: MA Experiment 20000286 PARAMETER Experiment Name: At_Open_Flower_P Parameter: Age (day) Value: 21
  misc_feature: MA Experiment 20000286 PARAMETER Experiment Name: At_Open_Flower_P Parameter: Plant Line Value: WS
  misc_feature: MA Experiment 20000286 PARAMETER Experiment Name: At_Open_Flower_P Parameter: Tissue Value: Half Open vs. Whole Plant
  misc_feature: MA Experiment ID: 20000709 Result: Down-regulated in Transcription
  misc_feature: MA Experiment 20000709 PARAMETER Experiment Name: At_15mM_NH4NO3_L-to-H_P Parameter: Age (hr) Value: 14
  misc_feature: MA Experiment 20000709 PARAMETER Experiment Name: At_15mM_NH4NO3_L-to-H_P Parameter: Organism Value: A. thaliana
  misc_feature: MA Experiment 20000709 PARAMETER Experiment Name: At_15mM_NH4NO3_L-to-H_P Parameter: Plant Line Value: WS
  misc_feature: MA Experiment 20000709 PARAMETER Experiment Name: At_15mM_NH4NO3_L-to-H_P Parameter: Timepoint (hr) Value: 4
  misc_feature: MA Experiment 20000709 PARAMETER Experiment Name: At_15mM_NH4NO3_L-to-H_P Parameter: Tissue Value: Aerial
  misc_feature: MA Experiment 20000709 PARAMETER Experiment Name: At_15mM_NH4NO3_L-to-H_P Parameter: Treatment Value: 15mM NH4NO3 vs. 30mM Mannitol
  misc_feature: MA Experiment ID: 20001910 Result: Down-regulated in Transcription
  misc_feature: MA Experiment 20001910 PARAMETER Experiment Name: At_Drought_Reproduction_P Parameter: Age (day) Value: 37
  misc_feature: MA Experiment 20001910 PARAMETER Experiment Name: At_Drought_Reproduction_P Parameter: Organism Value: A. thaliana
  misc_feature: MA Experiment 20001910 PARAMETER Experiment Name: At_Drought_Reproduction_P Parameter: Plant Line Value: WS
  misc_feature: MA Experiment 20001910 PARAMETER Experiment Name: At_Drought_Reproduction_P Parameter: Timepoint (day) Value: 7
  misc_feature: MA Experiment 20001910 PARAMETER Experiment Name: At_Drought_Reproduction_P Parameter: Tissue Value: Flowers
  misc_feature: MA Experiment 20001910 PARAMETER Experiment Name: At_Drought_Reproduction_P Parameter: Treatment Value: Drought vs. No Drought
agacccaagatttgagtcttcaacaaacagatacaaatgggaagcatcgatgctgcagtgttgggttcagagaagaaatcaaacccgggaaaagccacaattcttgctctgggaaaagcctttcctcaccagctagtaatgcaagagtacttagtcgatggctacttcaaaaccaccaagtgtgatgaccctgaactcaaacagaaacttactcgtctctgcaagacaacaacggtgaagacaaggtatgttgtgatgtcagaggagattctcaagaagtacccagaacttgccattgaaggaggatccacagtgacgcagcgtctagacatctgcaacgatgcagtgaccgagatggcagtagaagcctccagagcctgcatcaagaactggggacgttctatttccgacataactcacgttgtctatgtctcctcaagcgaagctcgtcttcctggtggggacttgtacctggccaaggggcttggactcagtcctgacacacaccgtgttctgctctactttgttggctgttctggtggcgttgcaggtctccgtgtagccaaagacatcgccgagaataatccgggcagtagagttttgcttgccacgtctgagacaaccatcattgggttcaagcccccaagtgtggatagaccgtatgatcttgttggggtcgcgttgtttggtgatggagccggagctatgatcattggatccgatccagacccgatctgcgagaagcctctctttgagcttcatactgcaatacagaactttttacctgaaacagagaagacgatagatggaaggctaacagaacaagggataaacttcaagctatcgagagagcttccacagataatagaagacaatgtggagaatttctgcaagaagctaataggaaaagcgggactggctcataagaactataaccagatgttctgggcggttcatccaggtggaccagccatcttgaaccggattgaaaagcggcttaacctgtcgcctgagaagctgagtccaagcagaagagctctcatggactatggcaatgcgagcagcaattcaattgtttatgtgctggagtatatgttggaggagagcaagaaagtgaggaacatgaatgaagaagaaaacgagtggggtctgattcttgcttttggacctggtgttacatttgaaggcattatcgctcgaaaccttgatgtctgaacaataagtttttaccttgcagatcgagaaagaaccccttatgctttaataaagacatgaagctaaacatacgaaatatttttt

SEQ ID NO: 106058 - protein, 392 aa, Arabidopsis thaliana
  peptide (1)..(392): Ceres Seq. ID no. 13618655
  misc_feature (4)..(230): Pfam Name: Chalcone and stilbene synthases, N-terminal domain Pfam Description: Chalcone and stilbene synthases, N-terminal
  misc_feature (1)..(392): Homolog of NCBI NO: 18418528 NR Description: chalcone and stilbene synthase family
  misc_feature (1)..(392): Homolog of NCBI NO: 7433787 NR Description: anther-specific protein homolog T11I11.90 -
  misc_feature (2)..(390): Homolog of NCBI NO: 34902722 NR Description: putative chalcone synthase [Oryza sativa cultivar- group)] >gi|24060090|dbj|BAC21541.1| putative chalcone
  misc_feature (2)..(390): Homolog of NCBI NO: 7433790 NR Description: chalcone synthase homolog ChS1 - Monterey pine
  misc_feature (11)..(390): Homolog of NCBI NO: 15217605 NR Description: chalcone and stilbene synthase family
  misc_feature (25)..(390): Homolog of NCBI NO: 7433783 NR Description: anther-specific protein - wood tobacco
  misc_feature (4)..(390): Homolog of NCBI NO: 21554288 NR Description: putative chalcone synthase [Arabidopsis thaliana]
  misc_feature (4)..(390): Homolog of NCBI NO: 15236691 NR Description: chalcone and stilbene synthase family
  misc_feature (10)..(391): Homolog of NCBI NO: 37535500 NR Description: anther-specific protein YY2 [Oryza sativa
  misc_feature (10)..(391): Homolog of NCBI NO: 7433785 NR Description: chalcone synthase homolog - rice
MGSIDAAVLGSEKKSNPGKATILALGKAFPHQLVMQEYLVDGYFKTTKCDDPELKQKLTRLCKTTTVKTRYVVMSEEILKKYPELAIEGGSTVTQRLDICNDAVTEMAVEASRACIKNWGRSISDITHVVYVSSSEARLPGGDLYLAKGLGLSPDTHRVLLYFVGCSGGVAGLRVAKDIAENNPGSRVLLATSETTIIGFKPPSVDRPYDLVGVALFGDGAGAMIIGSDPDPICEKPLFELHTAIQNFLPETEKTIDGRLTEQGINFKLSRELPQIIEDNVENFCKKLIGKAGLAHKNYNQMFWAVHPGGPAILNRIEKRLNLSPEKLSPSRRALMDYGNASSNSIVYVLEYMLEESKKVRNMNEEENEWGLILAFGPGVTFEGIIARNLDV

SEQ ID NO: 106059 - protein, 358 aa, Arabidopsis thaliana
  peptide (1)..(358): Ceres Seq. ID no. 13618656
  misc_feature (1)..(196): Pfam Name: Chalcone and stilbene synthases, N-terminal domain Pfam Description: Chalcone and stilbene synthases, N-terminal
  misc_feature (1)..(358): Homolog of NCBI NO: 18418528 NR Description: chalcone and stilbene synthase family
  misc_feature (1)..(358): Homolog of NCBI NO: 7433787 NR Description: anther-specific protein homolog T11I11.90 -
  misc_feature (1)..(356): Homolog of NCBI NO: 34902722 NR Description: putative chalcone synthase [Oryza sativa cultivar- group)] >gi|24060090|dbj|BAC21541.1| putative chalcone
  misc_feature (1)..(356): Homolog of NCBI NO: 7433790 NR Description: chalcone synthase homolog ChS1 - Monterey pine
  misc_feature (1)..(356): Homolog of NCBI NO: 15217605 NR Description: chalcone and stilbene synthase family
  misc_feature (1)..(356): Homolog of NCBI NO: 7433783 NR Description: anther-specific protein - wood tobacco
  misc_feature (1)..(356): Homolog of NCBI NO: 21554288 NR Description: putative chalcone synthase [Arabidopsis thaliana]
  misc_feature (1)..(356): Homolog of NCBI NO: 15236691 NR Description: chalcone and stilbene synthase family
  misc_feature (1)..(357): Homolog of NCBI NO: 37535500 NR Description: anther-specific protein YY2 [Oryza sativa
  misc_feature (1)..(357): Homolog of NCBI NO: 7433785 NR Description: chalcone synthase homolog - rice
MQEYLVDGYFKTTKCDDPELKQKLTRLCKTTTVKTRYVVMSEEILKKYPELAIEGGSTVTQRLDICNDAVTEMAVEASRACIKNWGRSISDITHVVYVSSSEARLPGGDLYLAKGLGLSPDTHRVLLYFVGCSGGVAGLRVAKDIAENNPGSRVLLATSETTIIGFKPPSVDRPYDLVGVALFGDGAGAMIIGSDPDPICEKPLFELHTAIQNFLPETEKTIDGRLTEQGINFKLSRELPQIIEDNVENFCKKLIGKAGLAHKNYNQMFWAVHPGGPAILNRIEKRLNLSPEKLSPSRRALMDYGNASSNSIVYVLEYMLEESKKVRNMNEEENEWGLILAFGPGVTFEGIIARNLDV

SEQ ID NO: 106060 - protein, 319 aa, Arabidopsis thaliana
  peptide (1)..(319): Ceres Seq. ID no. 13618657
  misc_feature (1)..(157): Pfam Name: Chalcone and stilbene synthases, N-terminal domain Pfam Description: Chalcone and stilbene synthases, N-terminal
  misc_feature (1)..(319): Homolog of NCBI NO: 18418528 NR Description: chalcone and stilbene synthase family
  misc_feature (1)..(319): Homolog of NCBI NO: 7433787 NR Description: anther-specific protein homolog T11I11.90 -
  misc_feature (1)..(317): Homolog of NCBI NO: 34902722 NR Description: putative chalcone synthase [Oryza sativa cultivar- group)] >gi|24060090|dbj|BAC21541.1| putative chalcone
  misc_feature (1)..(317): Homolog of NCBI NO: 7433790 NR Description: chalcone synthase homolog ChS1 - Monterey pine
  misc_feature (1)..(317): Homolog of NCBI NO: 15217605 NR Description: chalcone and stilbene synthase family
  misc_feature (1)..(317): Homolog of NCBI NO: 7433783 NR Description: anther-specific protein - wood tobacco
  misc_feature (1)..(317): Homolog of NCBI NO: 21554288 NR Description: putative chalcone synthase [Arabidopsis thaliana]
  misc_feature (1)..(317): Homolog of NCBI NO: 15236691 NR Description: chalcone and stilbene synthase family
  misc_feature (1)..(318): Homolog of NCBI NO: 37535500 NR Description: anther-specific protein YY2 [Oryza sativa
  misc_feature (1)..(318): Homolog of NCBI NO: 7433785 NR Description: chalcone synthase homolog - rice
MSEEILKKYPELAIEGGSTVTQRLDICNDAVTEMAVEASRACIKNWGRSISDITHVVYVSSSEARLPGGDLYLAKGLGLSPDTHRVLLYFVGCSGGVAGLRVAKDIAENNPGSRVLLATSETTIIGFKPPSVDRPYDLVGVALFGDGAGAMIIGSDPDPICEKPLFELHTAIQNFLPETEKTIDGRLTEQGINFKLSRELPQIIEDNVENFCKKLIGKAGLAHKNYNQMFWAVHPGGPAILNRIEKRLNLSPEKLSPSRRALMDYGNASSNSIVYVLEYMLEESKKVRNMNEEENEWGLILAFGPGVTFEGIIARNLDV

SEQ ID NO: 106061 - DNA, 1171 bp, Arabidopsis thaliana
  misc_feature (1)..(1171): Ceres Seq. ID no. 13618658
  misc_feature: MA Experiment ID: 108595 Result: Down-regulated in Transcription
  misc_feature: MA Experiment 108595 PARAMETER Experiment Name: At_Ler-pi_Ovule_cDNA_P Parameter: Plant Line Value: null
  misc_feature: MA Experiment ID: 20000113 Result: Up-regulated in Transcription
  misc_feature: MA Experiment 20000113 PARAMETER Experiment Name: At_42deg_Heat_cDNA_P Parameter: Temperature (deg C) Value: 42 vs. 22
  misc_feature: MA Experiment 20000113 PARAMETER Experiment Name: At_42deg_Heat_cDNA_P Parameter: Timepoint (hr) Value: 8
  misc_feature: MA Experiment 20000113 PARAMETER Experiment Name: At_42deg_Heat_cDNA_P Parameter: Tissue Value: Aerial
  misc_feature: MA Experiment ID: 20000173 Result: Up-regulated in Transcription
  misc_feature: MA Experiment 20000173 PARAMETER Experiment Name: At_42deg_Heat_P Parameter: Age (day) Value: 14
  misc_feature: MA Experiment 20000173 PARAMETER Experiment Name: At_42deg_Heat_P Parameter: Organism Value: A. thaliana
  misc_feature: MA Experiment 20000173 PARAMETER Experiment Name: At_42deg_Heat_P Parameter: Plant Line Value: WS
  misc_feature: MA Experiment 20000173 PARAMETER Experiment Name: At_42deg_Heat_P Parameter: Temperature (deg C) Value: 42 vs. 22
  misc_feature: MA Experiment 20000173 PARAMETER Experiment Name: At_42deg_Heat_P Parameter: Timepoint (hr) Value: 6
  misc_feature: MA Experiment 20000173 PARAMETER Experiment Name: At_42deg_Heat_P Parameter: Tissue Value: Aerial
  misc_feature: MA Experiment ID: 20000437 Result: Down-regulated in Transcription
  misc_feature: MA Experiment 20000437 PARAMETER Experiment Name: At_Drought_P Parameter: Age (day) Value: 8
  misc_feature: MA Experiment 20000437 PARAMETER Experiment Name: At_Drought_P Parameter: Organism Value: A. thaliana
  misc_feature: MA Experiment 20000437 PARAMETER Experiment Name: At_Drought_P Parameter: Plant Line Value: WS
  misc_feature: MA Experiment 20000437 PARAMETER Experiment Name: At_Drought_P Parameter: Timepoint (hr) Value: 24
  misc_feature: MA Experiment 20000437 PARAMETER Experiment Name: At_Drought_P Parameter: Tissue Value: Whole Plant
  misc_feature: MA Experiment 20000437 PARAMETER Experiment Name: At_Drought_P Parameter: Treatment Value: Drought vs. No Drought
gggtggttttatctctttggcccaaatttcggtgtaaccaaaaaaaatcttcacacacatccttgaccattttcttgttcatcgctctctttcttcttcacaaatcctaaacgagtaggagctatggctgcaccgattgttgatgcggagtacttgaaagagatcactaaggctcgccgtgagctccgttctctcatcgcgaacaagaactgtgctcctatcatgctccgattggcatggcacgatgctggaacctatgatgctcaatcgaagaccggtggacctaatggctctatcaggaacgaagaagagcacactcatggtgccaacagtggtttgaagatcgctctcgatctctgtgagggcgtgaaagctaagcatcccaaaatcacatacgcagacctgtatcagcttgctggtgtggtagcagttgaggttactggtggacctgacatcgtgttcgttcccgggagaaaggattcaaatgtctgccccaaggaaggaagacttcctgatgccaaacaaggtttccaacatctcagagatgtcttctaccgcatgggactatctgataaggatattgtggcactctcagggggtcatactctgggaagggctcacccggagaggtcaggctttgatggaccatggacccaagagccgctgaagtttgacaactcctacttcgtggaactgctgaaaggagaatcagagggcttgttgaaacttccaactgacaagaccttattggaagacccggagttccgtcgtcttgttgagctttatgcaaaggatgaagatgcattcttcagagactacgcggaatcgcacaagaaactctctgagcttggtttcaacccaaactcctcagcaggcaaagcagttgcagacagcacgattctggcacagagtgcgttcggggttgcagttgctgctgcggttgtggcatttggttacttttacgagatccggaagaggatgaagtaaacgaaataggaagtaaaacacgaagcaacgatgctcttatttgggtattaaagaaactattaatcgtctatcgaatctattttgctgctacaagattctaaactctttgaatccacgattctactgtttagtagtaaaaaagttaaaaagtcaatattttgggtccgtgattcatttttgcgat

SEQ ID NO: 106062 - protein, 287 aa, Arabidopsis thaliana; identical to SEQ ID NO: 35212
  peptide (1)..(287): Ceres Seq. ID no. 13618659
  misc_feature (17)..(224): Pfam Name: Peroxidase Pfam Description: Peroxidase
  misc_feature (1)..(287): Homolog of NCBI NO: 15236239 NR Description: ascorbate peroxidase, putative (APX) [Arabidopsis
  misc_feature (1)..(287): Homolog of NCBI NO: 3288066 NR Description: ascorbate peroxidase [Arabidopsis thaliana]
  misc_feature (1)..(287): Homolog of NCBI NO: 7484726 NR Description: L-ascorbate peroxidase (EC 1.11.1.11),
  misc_feature (1)..(287): Homolog of NCBI NO: 17066705 NR Description: ascorbate peroxidase [Capsicum annuum]
  misc_feature (1)..(287): Homolog of NCBI NO: 15430584 NR Description: peroxisomal ascorbate peroxidase [Cucurbita cv.
  misc_feature (1)..(287): Homolog of NCBI NO: 5442410 NR Description: ascorbate peroxidase [Zantedeschia aethiopica]
  misc_feature (1)..(287): Homolog of NCBI NO: 15080682 NR Description: peroxisome type ascorbate peroxidase [Hordeum
  misc_feature (4)..(287): Homolog of NCBI NO: 4835909 NR Description: cytosolic ascorbate peroxidase [Mesembryanthemum
  misc_feature (2)..(286): Homolog of NCBI NO: 38344123 NR Description: OSJNBb0072N21.2 [Oryza sativa (japonica
  misc_feature (2)..(286): Homolog of NCBI NO: 37030052 NR Description: putative peroxisome-bound ascorbate peroxidase

SEQ ID NO: 106063 - protein, 254 aa, Arabidopsis thaliana; identical to SEQ ID NO: 35213
  peptide (1)..(254): Ceres Seq. ID no. 13618660
  misc_feature (1)..(191): Pfam Name: Peroxidase Pfam Description: Peroxidase
  misc_feature (1)..(254): Homolog of NCBI NO: 15236239 NR Description: ascorbate peroxidase, putative (APX) [Arabidopsis
  misc_feature (1)..(254): Homolog of NCBI NO: 3288066 NR Description: ascorbate peroxidase [Arabidopsis thaliana]
  misc_feature (1)..(254): Homolog of NCBI NO: 7484726 NR Description: L-ascorbate peroxidase (EC 1.11.1.11),
  misc_feature (1)..(254): Homolog of NCBI NO: 17066705 NR Description: ascorbate peroxidase [Capsicum annuum]
  misc_feature (1)..(254): Homolog of NCBI NO: 15430584 NR Description: peroxisomal ascorbate peroxidase [Cucurbita cv.
  misc_feature (1)..(254): Homolog of NCBI NO: 5442410 NR Description: ascorbate peroxidase [Zantedeschia aethiopica]
  misc_feature (1)..(254): Homolog of NCBI NO: 15080682 NR Description: peroxisome type ascorbate peroxidase [Hordeum
  misc_feature (1)..(254): Homolog of NCBI NO: 4835909 NR Description: cytosolic ascorbate peroxidase [Mesembryanthemum
  misc_feature (1)..(253): Homolog of NCBI NO: 38344123 NR Description: OSJNBb0072N21.2 [Oryza sativa (japonica
  misc_feature (1)..(253): Homolog of NCBI NO: 37030052 NR Description: putative peroxisome-bound ascorbate peroxidase

SEQ ID NO: 106064 - DNA, 1347 bp, Arabidopsis thaliana
  misc_feature (1)..(1347): Ceres Seq. ID no. 13618661
  misc_feature: MA Experiment ID: 20000314 Result: Up-regulated in Transcription
  misc_feature: MA Experiment 20000314 PARAMETER Experiment Name: At_14day_Shoots-Roots_Sub_P Parameter: Age (day) Value: 14
  misc_feature: MA Experiment 20000314 PARAMETER Experiment Name: At_14day_Shoots-Roots_Sub_P Parameter: Organism Value: A. thaliana
  misc_feature: MA Experiment 20000314 PARAMETER Experiment Name: At_14day_Shoots-Roots_Sub_P Parameter: Plant Line Value: WS
  misc_feature: MA Experiment 20000314 PARAMETER Experiment Name: At_14day_Shoots-Roots_Sub_P Parameter: Tissue Value: Roots vs. Whole Plant
  misc_feature: MA Experiment ID: 20001807 Result: Down-regulated in Transcription
  misc_feature: MA Experiment 20001807 PARAMETER Experiment Name: At_50mM_NH4NO3_L-to-H_Sub_P Parameter: Timepoint (hr) Value: 6
  misc_feature: MA Experiment 20001807 PARAMETER Experiment Name: At_50mM_NH4NO3_L-to-H_Sub_P Parameter: Tissue Value: Leaf
  misc_feature: MA Experiment 20001807 PARAMETER Experiment Name: At_50mM_NH4NO3_L-to-H_Sub_P Parameter: Treatment Value: 50mM NH4NO3 vs 100mM Mannitol
atgggtgaagaaaagaggagaatttcaggaagatcagtttcacttccatcgatagacatattactagacgagaaaccaggttggccatttcttaaaagagcaagtttagggacaccacaacaagttcacaaatggcacacacgaaaagtctcagtggtcaattgggtcatgagcttacctgaacggtttccaaatcatcaacagactctaaactatgagacaagcttgataaagaaacaaatcaaggacatattgagagacaataacaaatggttcaactacaatgttcttaggaaagcaacatcagatttctctcaagagaatgtgattgggaaaggaggatgcaacgaagtgtaccgagggattcttgaagatggaaaaggcattgcagtgaaaatcttgaagtcatcatctaaagaagcaatgacaaatttcgttcatgaaatcaacattatctcttctttgagtcaccaaaacatctcaccgttacttggtgtttgtgtccaagacaatgaactaatctccgtttacaatctttcaaacacaggaagtttagaagaaacccttcacggtaagcaaaagggaaagtatgtattatcatgggaagagagattcaagatagctatcgggttggcggaagcattagactatcttcataaccgatgttctaagccagtgattcatagagatgtcaaaacttctaacgtccttctatcacttgagctccaacctcagctgtcagattttggtctgtcgatgtggggaccgacaacatcttctcgatattcgatacaaggtgatgtggtgggaacatttggatatcttgcaccggagtacttcatgtatggaaaagtcagtgataaagttgatgtttacgcctttggagtggttctgcttgaactcatttctggaagaaatcctatttcacctcagaatcctagaggacaagagagtttggtaatgtgggcaaagcctttgattgataccggaaatttaaaagtactgttggatccagacgttacagatatattcgacgagtctcagtttcaaagaatggtacttgctgcttcacattgcctcacaagatcagccacacatcgtcccaatataagacaaatactgaggctactaagagatgaaaacgaagccgggaaatggattatggaagaagaaggaaatgaagattgcttcgatgacgaggtttacccgaattccagcacagaattacacttaaaccttgcgatgcttgaggtggaagacgatgaaactgcatcaatcagcagcatggagagaagtaacaacagccttttttcttctacttgttcatctagggagcttcaaacataa

SEQ ID NO: 106065 - protein, 448 aa, Arabidopsis thaliana
  peptide (1)..(448): Ceres Seq. ID no. 13618662
  misc_feature (1)..(448): Homolog of NCBI NO: 15236248 NR Description: protein kinase - like [Arabidopsis thaliana]
  misc_feature (1)..(246): Homolog of NCBI NO: 27754592 NR Description: putative protein kinase [Arabidopsis thaliana]
  misc_feature (2)..(448): Homolog of NCBI NO: 15227291 NR Description: protein kinase -related [Arabidopsis thaliana]
  misc_feature (9)..(322): Homolog of NCBI NO: 15223890 NR Description: hypothetical protein [Arabidopsis thaliana]
  misc_feature (323)..(431): Homolog of NCBI NO: 15223890 NR Description: hypothetical protein [Arabidopsis thaliana]
  misc_feature (90)..(431): Homolog of NCBI NO: 22329713 NR Description: expressed protein [Arabidopsis thaliana] At1g21590/F24J8_9 [Arabidopsis thaliana]
  misc_feature (92)..(436): Homolog of NCBI NO: 15237563 NR Description: expressed protein [Arabidopsis thaliana] contains similarity to protein kinase~gene_id:MBM17.4 thaliana] >gi|20260318|gb|AAM13057.1| unknown protein
  misc_feature (92)..(432): Homolog of NCBI NO: 28376688 NR Description: putative serine/threonine kinase [Oryza sativa
  misc_feature (16)..(431): Homolog of NCBI NO: 25518708 NR Description: hypothetical protein F24J8.18 - Arabidopsis >gi|9454581|gb|AAF87904.1|AC015447_14 Similar to protein kinases
  misc_feature (92)..(400): Homolog of NCBI NO: 15242821 NR Description: protein kinase family [Arabidopsis thaliana] contains similarity to unknown protein~gene_id:MRI1.2~pir||T01617
MGEEKRRISGRSVSLPSIDILLDEKPGWPFLKRASLGTPQQVHKWHTRKVSVVNWVMSLPERFPNHQQTLNYETSLIKKQIKDILRDNNKWFNYNVLRKATSDFSQENVIGKGGCNEVYRGILEDGKGIAVKILKSSSKEAMTNFVHEINIISSLSHQNISPLLGVCVQDNELISVYNLSNTGSLEETLHGKQKGKYVLSWEERFKIAIGLAEALDYLHNRCSKPVIHRDVKTSNVLLSLELQPQLSDFGLSMWGPTTSSRYSIQGDVVGTFGYLAPEYFMYGKVSDKVDVYAFGVVLLELISGRNPISPQNPRGQESLVMWAKPLIDTGNLKVLLDPDVTDIFDESQFQRMVLAASHCLTRSATHRPNIRQILRLLRDENEAGKWIMEEEGNEDCFDDEVYPNSSTELHLNLAMLEVEDDETASISSMERSNNSLFSSTCSSRELQT

SEQ ID NO: 106066 - protein, 392 aa, Arabidopsis thaliana
  peptide (1)..(392): Ceres Seq. ID no. 13618663
  misc_feature (1)..(392): Homolog of NCBI NO: 15236248 NR Description: protein kinase - like [Arabidopsis thaliana]
  misc_feature (1)..(190): Homolog of NCBI NO: 27754592 NR Description: putative protein kinase [Arabidopsis thaliana]
  misc_feature (1)..(392): Homolog of NCBI NO: 15227291 NR Description: protein kinase -related [Arabidopsis thaliana]
  misc_feature (1)..(266): Homolog of NCBI NO: 15223890 NR Description: hypothetical protein [Arabidopsis thaliana]
  misc_feature (267)..(375): Homolog of NCBI NO: 15223890 NR Description: hypothetical protein [Arabidopsis thaliana]
  misc_feature (34)..(375): Homolog of NCBI NO: 22329713 NR Description: expressed protein [Arabidopsis thaliana] At1g21590/F24J8_9 [Arabidopsis thaliana]
  misc_feature (36)..(380): Homolog of NCBI NO: 15237563 NR Description: expressed protein [Arabidopsis thaliana] contains similarity to protein kinase~gene_id:MBM17.4 thaliana] >gi|20260318|gb|AAM13057.1| unknown protein
  misc_feature (36)..(376): Homolog of NCBI NO: 28376688 NR Description: putative serine/threonine kinase [Oryza sativa
  misc_feature (1)..(375): Homolog of NCBI NO: 25518708 NR Description: hypothetical protein F24J8.18 - Arabidopsis >gi|9454581|gb|AAF87904.1|AC015447_14 Similar to protein kinases
  misc_feature (36)..(344): Homolog of NCBI NO: 15242821 NR Description: protein kinase family [Arabidopsis thaliana] contains similarity to unknown protein~gene_id:MRI1.2~pir||T01617
MSLPERFPNHQQTLNYETSLIKKQIKDILRDNNKWFNYNVLRKATSDFSQENVIGKGGCNEVYRGILEDGKGIAVKILKSSSKEAMTNFVHEINIISSLSHQNISPLLGVCVQDNELISVYNLSNTGSLEETLHGKQKGKYVLSWEERFKIAIGLAEALDYLHNRCSKPVIHRDVKTSNVLLSLELQPQLSDFGLSMWGPTTSSRYSIQGDVVGTFGYLAPEYFMYGKVSDKVDVYAFGVVLLELISGRNPISPQNPRGQESLVMWAKPLIDTGNLKVLLDPDVTDIFDESQFQRMVLAASHCLTRSATHRPNIRQILRLLRDENEAGKWIMEEEGNEDCFDDEVYPNSSTELHLNLAMLEVEDDETASISSMERSNNSLFSSTCSSRELQT

SEQ ID NO: 106067 - protein, 307 aa, Arabidopsis thaliana
  peptide (1)..(307): Ceres Seq. ID no. 13618664
  misc_feature (1)..(307): Homolog of NCBI NO: 15236248 NR Description: protein kinase - like [Arabidopsis thaliana]
  misc_feature (1)..(105): Homolog of NCBI NO: 27754592 NR Description: putative protein kinase [Arabidopsis thaliana]
  misc_feature (1)..(307): Homolog of NCBI NO: 15227291 NR Description: protein kinase -related [Arabidopsis thaliana]
  misc_feature (1)..(181): Homolog of NCBI NO: 15223890 NR Description: hypothetical protein [Arabidopsis thaliana]
  misc_feature (182)..(290): Homolog of NCBI NO: 15223890 NR Description: hypothetical protein [Arabidopsis thaliana]
  misc_feature (1)..(290): Homolog of NCBI NO: 22329713 NR Description: expressed protein [Arabidopsis thaliana] At1g21590/F24J8_9 [Arabidopsis thaliana]
  misc_feature (1)..(295): Homolog of NCBI NO: 15237563 NR Description: expressed protein [Arabidopsis thaliana] contains similarity to protein kinase~gene_id:MBM17.4 thaliana] >gi|20260318|gb|AAM13057.1| unknown protein
  misc_feature (1)..(291): Homolog of NCBI NO: 28376688 NR Description: putative serine/threonine kinase [Oryza sativa
  misc_feature (1)..(290): Homolog of NCBI NO: 25518708 NR Description: hypothetical protein F24J8.18 - Arabidopsis >gi|9454581|gb|AAF87904.1|AC015447_14 Similar to protein kinases
  misc_feature (1)..(259): Homolog of NCBI NO: 15242821 NR Description: protein kinase family [Arabidopsis thaliana] contains similarity to unknown protein~gene_id:MRI1.2~pir||T01617
MTNFVHEINIISSLSHQNISPLLGVCVQDNELISVYNLSNTGSLEETLHGKQKGKYVLSWEERFKIAIGLAEALDYLHNRCSKPVIHRDVKTSNVLLSLELQPQLSDFGLSMWGPTTSSRYSIQGDVVGTFGYLAPEYFMYGKVSDKVDVYAFGVVLLELISGRNPISPQNPRGQESLVMWAKPLIDTGNLKVLLDPDVTDIFDESQFQRMVLAASHCLTRSATHRPNIRQILRLLRDENEAGKWIMEEEGNEDCFDDEVYPNSSTELHLNLAMLEVEDDETASISSMERSNNSLFSSTCSSRELQT

SEQ ID NO: 106068 - DNA, 1416 bp, Arabidopsis thaliana
  misc_feature (1)..(1416): Ceres Seq. ID no. 13618669
  misc_feature: MA Experiment ID: 108462 Result: Down-regulated in Transcription
  misc_feature: MA Experiment 108462 PARAMETER Experiment Name: At_Germinating_Seeds_cDNA_P Parameter: Age (day) Value: 2 vs. 0
  misc_feature: MA Experiment 108462 PARAMETER Experiment Name: At_Germinating_Seeds_cDNA_P Parameter: Tissue Value: Germinating Seeds
  misc_feature: MA Experiment ID: 108463 Result: Down-regulated in Transcription
  misc_feature: MA Experiment 108463 PARAMETER Experiment Name: At_Germinating_Seeds_cDNA_P Parameter: Age (day) Value: 3 vs. 0
  misc_feature: MA Experiment 108463 PARAMETER Experiment Name: At_Germinating_Seeds_cDNA_P Parameter: Tissue Value: Germinating Seeds
  misc_feature: MA Experiment ID: 108569 Result: Up-regulated in Transcription
  misc_feature: MA Experiment 108569 PARAMETER Experiment Name: At_0.001%_MeJA__cDNA_P Parameter: Timepoint (hr) Value: 6
  misc_feature: MA Experiment 108569 PARAMETER Experiment Name: At_0.001%_MeJA__cDNA_P Parameter: Tissue Value: Aerial
  misc_feature: MA Experiment 108569 PARAMETER Experiment Name: At_0.001%_MeJA__cDNA_P Parameter: Treatment Value: 0.001% MeJA vs. No Treatment
  misc_feature: MA Experiment ID: 20000087 Result: Down-regulated in Transcription
  misc_feature: MA Experiment 20000087 PARAMETER Experiment Name: At_100uM_ABA_Mutants_cDNA_P Parameter: Plant Line Value: WS
  misc_feature: MA Experiment 20000087 PARAMETER Experiment Name: At_100uM_ABA_Mutants_cDNA_P Parameter: Timepoint (hr) Value: 6
  misc_feature: MA Experiment 20000087 PARAMETER Experiment Name: At_100uM_ABA_Mutants_cDNA_P Parameter: Tissue Value: Aerial
  misc_feature: MA Experiment 20000087 PARAMETER Experiment Name: At_100uM_ABA_Mutants_cDNA_P Parameter: Treatment Value: 100uM ABA vs. No Treatment
  misc_feature: MA Experiment ID: 20000184 Result: Up-regulated in Transcription
  misc_feature: MA Experiment 20000184 PARAMETER Experiment Name: At_Shoots__P Parameter: Age (day) Value: 7
  misc_feature: MA Experiment 20000184 PARAMETER Experiment Name: At_Shoots__P Parameter: Tissue Value: Shoots vs. Whole Plant
  misc_feature: MA Experiment ID: 20000185 Result: Up-regulated in Transcription
  misc_feature: MA Experiment 20000185 PARAMETER Experiment Name: At_Roots__P Parameter: Age (day) Value: 7 vs. 21
  misc_feature: MA Experiment 20000185 PARAMETER Experiment Name: At_Roots__P Parameter: Organism Value: A. thaliana
  misc_feature: MA Experiment 20000185 PARAMETER Experiment Name: At_Roots__P Parameter: Tissue Value: Roots vs. Whole Plant
  misc_feature: MA Experiment ID: 20000286 Result: Up-regulated in Transcription
  misc_feature: MA Experiment 20000286 PARAMETER Experiment Name: At_Open_Flower_P Parameter: Age (day) Value: 21
  misc_feature: MA Experiment 20000286 PARAMETER Experiment Name: At_Open_Flower_P Parameter: Plant Line Value: WS
  misc_feature: MA Experiment 20000286 PARAMETER Experiment Name: At_Open_Flower_P Parameter: Tissue Value: Half Open vs. Whole Plant
  misc_feature: MA Experiment ID: 20000439 Result: Up-regulated in Transcription
  misc_feature: MA Experiment 20000439 PARAMETER Experiment Name: At_Roots__P Parameter: Age (day) Value: 14 vs. 21
  misc_feature: MA Experiment 20000439 PARAMETER Experiment Name: At_Roots__P Parameter: Organism Value: A. thaliana
  misc_feature: MA Experiment 20000439 PARAMETER Experiment Name: At_Roots__P Parameter: Tissue Value: Roots vs. Whole Plant
  misc_feature: MA Experiment ID: 20001557 Result: Up-regulated in Transcription
  misc_feature: MA Experiment 20001557 PARAMETER Experiment Name: At_Drought_Soil_Dry_P Parameter: Age (day) Value: 27
  misc_feature: MA Experiment 20001557 PARAMETER Experiment Name: At_Drought_Soil_Dry_P Parameter: Organism Value: A. thaliana
  misc_feature: MA Experiment 20001557 PARAMETER Experiment Name: At_Drought_Soil_Dry_P Parameter: Plant Line Value: WS
  misc_feature: MA Experiment 20001557 PARAMETER Experiment Name: At_Drought_Soil_Dry_P Parameter: Post Timepoint (hr) Value: 3
  misc_feature: MA Experiment 20001557 PARAMETER Experiment Name: At_Drought_Soil_Dry_P Parameter: Post-Treatment Value: Re-Water vs. No Drought
  misc_feature: MA Experiment 20001557 PARAMETER Experiment Name: At_Drought_Soil_Dry_P Parameter: Timepoint (day) Value: 13
  misc_feature: MA Experiment 20001557 PARAMETER Experiment Name: At_Drought_Soil_Dry_P Parameter: Treatment Value: Drought vs. No Drought
  misc_feature: MA Experiment ID: 20001558 Result: Up-regulated in Transcription
  misc_feature: MA Experiment 20001558 PARAMETER Experiment Name: At_Drought_Soil_Dry_P Parameter: Age (day) Value: 27
  misc_feature: MA Experiment 20001558 PARAMETER Experiment Name: At_Drought_Soil_Dry_P Parameter: Organism Value: A. thaliana
  misc_feature: MA Experiment 20001558 PARAMETER Experiment Name: At_Drought_Soil_Dry_P Parameter: Plant Line Value: WS
  misc_feature: MA Experiment 20001558 PARAMETER Experiment Name: At_Drought_Soil_Dry_P Parameter: Post Timepoint (hr) Value: 6
  misc_feature: MA Experiment 20001558 PARAMETER Experiment Name: At_Drought_Soil_Dry_P Parameter: Post-Treatment Value: Re-Water vs. No Drought
  misc_feature: MA Experiment 20001558 PARAMETER Experiment Name: At_Drought_Soil_Dry_P Parameter: Timepoint (day) Value: 13
  misc_feature: MA Experiment 20001558 PARAMETER Experiment Name: At_Drought_Soil_Dry_P Parameter: Treatment Value: Drought vs. No Drought
tctatctcagtttcgagactcattgcctcgccgagagagaaggagacgccatggaaaggcttcttcaaccatcttcttcttcttcctcaatttctccttccaaattcccttcacggacttctcctttccttccccgtctccgctcatcgggtctgagctttgtctcgactcaccggcccgagtcacgccgagtcagctcaatttcctgcaacagttcccagattccgtcactgtatacgcctataggatctaacacaactaacaattccttcaatgggtctcccaaatcggatgaatcgaaacctaatcccggatttctcacacggatcgcgacgtcggcttctgagcagcgaaagacgttatctactggaaccgttatactaatctctgcagtagctgtgcttttgcttaacccgcttcttgcaccacctgctttcgctagctttcaaactgcagctaaatccggttggctaacaagtgcgtggaccggtttccttgctggttgcttgcacacgctctcaggacctgatcacctcgctgctttagctccgctttcgatcggacgcagcaaaatggaaagtgctgctgttggagctctctggggatgtgggcatgatgctggtcaagtcatctttggtttactgtttctgctacttaaagaccggcttcacattgaagtattacaaacttggggtacaagaattgtgggattgactcttgttattatcggtgctatgggaatcaaggaagcttctgagattccagaaccttgtgtcgctttagaaaccgacatcagcatggtatcaacagagaaagaagccttaccactgcccaaaaagaagaagatcgggtttgctacatttgcaactggagtggttcacgggttgcaaccggatgctctgatgattgttttgcctgcattagctctcccatcacggttagcagggtctgcgtttttgataatgtttctggttgggacagttatagcgatgggaagttacacagcgtttattgggtcttgcagtgaggctttgaaagagaaagttccaaggatcacagagaaactaacttgggtttcgtcacttgtggctattggtcttggattgggaattgtcatcagccctttctttggttttagcctctactgagaaagtaaaagcttcttcaggtaaatgagacaagttgaaatctttgtagttcttatagaagaaagagaggtttttttgggtccatatcactcgtattattgtcacctgtacgaacaaaatctcgtaatcttgcttcagaaactcctctcggagaaaaccatttggtgattctttttattttccttatttttaagagaagtttggttttggttctgaattatcgatcaactgcatgtaaccatactttgtaatattatcaaattttaac

SEQ ID NO: 106069 - protein, 381 aa, Arabidopsis thaliana; identical to SEQ ID NO: 29711
  peptide (1)..(381): Ceres Seq. ID no. 13618670
  misc_feature (17)..(381): Homolog of NCBI NO: 18418571 NR Description: expressed protein [Arabidopsis thaliana] AT4g35080/M4E13_135 [Arabidopsis thaliana]
  misc_feature (118)..(381): Homolog of NCBI NO: 7486794 NR Description: hypothetical protein M4E13.135 - Arabidopsis >gi|3115852|emb|CAA17779.1| putative protein [Arabidopsis >gi|7270459|emb|CAB80225.1| putative protein [Arabidopsis
  misc_feature (17)..(381): Homolog of NCBI NO: 18398217 NR Description: expressed protein [Arabidopsis thaliana]
  misc_feature (17)..(381): Homolog of NCBI NO: 15724154 NR Description: At2g16800/T24I21.21 [Arabidopsis thaliana]
  misc_feature (17)..(381): Homolog of NCBI NO: 21592431 NR Description: unknown [Arabidopsis thaliana]
  misc_feature (110)..(381): Homolog of NCBI NO: 34897966 NR Description: hypothetical protein~similar to Arabidopsis
  misc_feature (121)..(381): Homolog of NCBI NO: 21397272 NR Description: Hypothetical protein [Oryza sativa (japonica
  misc_feature (157)..(343): Homolog of NCBI NO: 33862611 NR Description: marine cyanobacterial conserved hypothetical marinus str. MIT 9313] >gi|33634527|emb|CAE20513.1| marine

SEQ ID NO: 106070 - protein, 365 aa, Arabidopsis thaliana; identical to SEQ ID NO: 29712
  peptide (1)..(365): Ceres Seq. ID no. 13618671
  misc_feature (1)..(365): Homolog of NCBI NO: 18418571 NR Description: expressed protein [Arabidopsis thaliana] AT4g35080/M4E13_135 [Arabidopsis thaliana]
  misc_feature (102)..(365): Homolog of NCBI NO: 7486794 NR Description: hypothetical protein M4E13.135 - Arabidopsis >gi|3115852|emb|CAA17779.1| putative protein [Arabidopsis >gi|7270459|emb|CAB80225.1| putative protein [Arabidopsis
  misc_feature (1)..(365): Homolog of NCBI NO: 18398217 NR Description: expressed protein [Arabidopsis thaliana]
  misc_feature (1)..(365): Homolog of NCBI NO: 15724154 NR Description: At2g16800/T24I21.21 [Arabidopsis thaliana]
  misc_feature (1)..(365): Homolog of NCBI NO: 21592431 NR Description: unknown [Arabidopsis thaliana]
  misc_feature (94)..(365): Homolog of NCBI NO: 34897966 NR Description: hypothetical protein~similar to Arabidopsis
  misc_feature (105)..(365): Homolog of NCBI NO: 21397272 NR Description: Hypothetical protein [Oryza sativa (japonica
  misc_feature (141)..(327): Homolog of NCBI NO: 33862611 NR Description: marine cyanobacterial conserved hypothetical marinus str. MIT 9313] >gi|33634527|emb|CAE20513.1| marine

SEQ ID NO: 106071 - protein, 191 aa, Arabidopsis thaliana; identical to SEQ ID NO: 29713
  peptide (1)..(191): Ceres Seq. ID no. 13618672
  misc_feature (1)..(191): Homolog of NCBI NO: 18418571 NR Description: expressed protein [Arabidopsis thaliana] AT4g35080/M4E13_135 [Arabidopsis thaliana]
  misc_feature (1)..(191): Homolog of NCBI NO: 7486794 NR Description: hypothetical protein M4E13.135 - Arabidopsis >gi|3115852|emb|CAA17779.1| putative protein [Arabidopsis >gi|7270459|emb|CAB80225.1| putative protein [Arabidopsis
  misc_feature (1)..(191): Homolog of NCBI NO: 18398217 NR Description: expressed protein [Arabidopsis thaliana]
  misc_feature (1)..(191): Homolog of NCBI NO: 15724154 NR Description: At2g16800/T24I21.21 [Arabidopsis thaliana]
  misc_feature (1)..(191): Homolog of NCBI NO: 21592431 NR Description: unknown [Arabidopsis thaliana]
  misc_feature (1)..(191): Homolog of NCBI NO: 34897966 NR Description: hypothetical protein~similar to Arabidopsis
  misc_feature (1)..(191): Homolog of NCBI NO: 21397272 NR Description: Hypothetical protein [Oryza sativa (japonica
  misc_feature (1)..(153): Homolog of NCBI NO: 33862611 NR Description: marine cyanobacterial conserved hypothetical marinus str. MIT 9313] >gi|33634527|emb|CAE20513.1| marine

SEQ ID NO: 106072 - DNA, 1214 bp, Arabidopsis thaliana
  misc_feature (1)..(1214): Ceres Seq. ID no. 13618673
  misc_feature: MA Experiment ID: 108434 Result: Up-regulated in Transcription
  misc_feature: MA Experiment 108434 PARAMETER Experiment Name: At_Root_Tips_cDNA_P Parameter: Tissue Value: Root Tips
  misc_feature: MA Experiment ID: 108488 Result: Up-regulated in Transcription
  misc_feature: MA Experiment ID: 108573 Result: Up-regulated in Transcription
  misc_feature: MA Experiment 108573 PARAMETER Experiment Name: At_Drought_cDNA_P Parameter: Timepoint (hr) Value: 6
  misc_feature: MA Experiment 108573 PARAMETER Experiment Name: At_Drought_cDNA_P Parameter: Tissue Value: Aerial
  misc_feature: MA Experiment 108573 PARAMETER Experiment Name: At_Drought_cDNA_P Parameter: Treatment Value: Drought vs. No Drought
  misc_feature: MA Experiment ID: 108577 Result: Up-regulated in Transcription
  misc_feature: MA Experiment 108577 PARAMETER Experiment Name: At_42deg_Heat_cDNA_P Parameter: Temperature (deg C) Value: 42 vs. 22
  misc_feature: MA Experiment 108577 PARAMETER Experiment Name: At_42deg_Heat_cDNA_P Parameter: Timepoint (hr) Value: 6
  misc_feature: MA Experiment 108577 PARAMETER Experiment Name: At_42deg_Heat_cDNA_P Parameter: Tissue Value: Aerial
  misc_feature: MA Experiment ID: 20000087 Result: Down-regulated in Transcription
  misc_feature: MA Experiment 20000087 PARAMETER Experiment Name: At_100uM_ABA_Mutants_cDNA_P Parameter: Plant Line Value: WS
  misc_feature: MA Experiment 20000087 PARAMETER Experiment Name: At_100uM_ABA_Mutants_cDNA_P Parameter: Timepoint (hr) Value: 6
  misc_feature: MA Experiment 20000087 PARAMETER Experiment Name: At_100uM_ABA_Mutants_cDNA_P Parameter: Tissue Value: Aerial
  misc_feature: MA Experiment 20000087 PARAMETER Experiment Name: At_100uM_ABA_Mutants_cDNA_P Parameter: Treatment Value: 100uM ABA vs. No Treatment
  misc_feature: MA Experiment ID: 20000090 Result: Down-regulated in Transcription
  misc_feature: MA Experiment ID: 20000093 Result: Up-regulated in Transcription
  misc_feature: MA Experiment 20000093 PARAMETER Experiment Name: At_42deg_Heat_cDNA_P Parameter: Temperature (deg C) Value: 42 vs. 22
  misc_feature: MA Experiment 20000093 PARAMETER Experiment Name: At_42deg_Heat_cDNA_P Parameter: Timepoint (hr) Value: 0.5
  misc_feature: MA Experiment 20000093 PARAMETER Experiment Name: At_42deg_Heat_cDNA_P Parameter: Tissue Value: Aerial
  misc_feature: MA Experiment ID: 20000112 Result: Up-regulated in Transcription
  misc_feature: MA Experiment 20000112 PARAMETER Experiment Name: At_42deg_Heat_cDNA_P Parameter: Temperature (deg C) Value: 42 vs. 22
  misc_feature: MA Experiment 20000112 PARAMETER Experiment Name: At_42deg_Heat_cDNA_P Parameter: Timepoint (hr) Value: 2
  misc_feature: MA Experiment 20000112 PARAMETER Experiment Name: At_42deg_Heat_cDNA_P Parameter: Tissue Value: Aerial
  misc_feature: MA Experiment ID: 20000113 Result: Up-regulated in Transcription
  misc_feature: MA Experiment 20000113 PARAMETER Experiment Name: At_42deg_Heat_cDNA_P Parameter: Temperature (deg C) Value: 42 vs. 22
  misc_feature: MA Experiment 20000113 PARAMETER Experiment Name: At_42deg_Heat_cDNA_P Parameter: Timepoint (hr) Value: 8
  misc_feature: MA Experiment 20000113 PARAMETER Experiment Name: At_42deg_Heat_cDNA_P Parameter: Tissue Value: Aerial
  misc_feature: MA Experiment ID: 20000144 Result: Up-regulated in Transcription
  misc_feature: MA Experiment 20000144 PARAMETER Experiment Name: At_42deg_Heat_cDNA_P Parameter: Temperature (deg C) Value: 42 vs. 22
  misc_feature: MA Experiment 20000144 PARAMETER Experiment Name: At_42deg_Heat_cDNA_P Parameter: Timepoint (hr) Value: 1
  misc_feature: MA Experiment 20000144 PARAMETER Experiment Name: At_42deg_Heat_cDNA_P Parameter: Tissue Value: Aerial
  misc_feature: MA Experiment ID: 20000173 Result: Up-regulated in Transcription
  misc_feature: MA Experiment 20000173 PARAMETER Experiment Name: At_42deg_Heat_P Parameter: Age (day) Value: 14
  misc_feature: MA Experiment 20000173 PARAMETER Experiment Name: At_42deg_Heat_P Parameter: Organism Value: A. thaliana
  misc_feature: MA Experiment 20000173 PARAMETER Experiment Name: At_42deg_Heat_P Parameter: Plant Line Value: WS
  misc_feature: MA Experiment 20000173 PARAMETER Experiment Name: At_42deg_Heat_P Parameter: Temperature (deg C) Value: 42 vs. 22
  misc_feature: MA Experiment 20000173 PARAMETER Experiment Name: At_42deg_Heat_P Parameter: Timepoint (hr) Value: 6
  misc_feature: MA Experiment 20000173 PARAMETER Experiment Name: At_42deg_Heat_P Parameter: Tissue Value: Aerial
  misc_feature: MA Experiment ID: 20000224 Result: Down-regulated in Transcription
  misc_feature: MA Experiment ID: 20000227 Result: Up-regulated in Transcription
  misc_feature: MA Experiment 20000227 PARAMETER Experiment Name: At_Root-Tips-vs-Tops_P Parameter: Tissue Value: Root Tips vs. Root Tops
  misc_feature: MA Experiment ID: 20000286 Result: Up-regulated in Transcription
  misc_feature: MA Experiment 20000286 PARAMETER Experiment Name: At_Open_Flower_P Parameter: Age (day) Value: 21
  misc_feature: MA Experiment 20000286 PARAMETER Experiment Name: At_Open_Flower_P Parameter: Plant Line Value: WS
  misc_feature: MA Experiment 20000286 PARAMETER Experiment Name: At_Open_Flower_P Parameter: Tissue Value: Half Open vs. Whole Plant
  misc_feature: MA Experiment ID: 20000437 Result: Down-regulated in Transcription
  misc_feature: MA Experiment 20000437 PARAMETER Experiment Name: At_Drought_P Parameter: Age (day) Value: 8
  misc_feature: MA Experiment 20000437 PARAMETER Experiment Name: At_Drought_P Parameter: Organism Value: A. thaliana
  misc_feature: MA Experiment 20000437 PARAMETER Experiment Name: At_Drought_P Parameter: Plant Line Value: WS
  misc_feature: MA Experiment 20000437 PARAMETER Experiment Name: At_Drought_P Parameter: Timepoint (hr) Value: 24
  misc_feature: MA Experiment 20000437 PARAMETER Experiment Name: At_Drought_P Parameter: Tissue Value: Whole Plant
  misc_feature: MA Experiment 20000437 PARAMETER Experiment Name: At_Drought_P Parameter: Treatment Value: Drought vs. No Drought
  misc_feature: MA Experiment ID: 20001451 Result: Up-regulated in Transcription
  misc_feature: MA Experiment 20001451 PARAMETER Experiment Name: At_Far-red-induction_P Parameter: Age (day) Value: 7
  misc_feature: MA Experiment 20001451 PARAMETER Experiment Name: At_Far-red-induction_P Parameter: Light Value: Far-red vs. White
  misc_feature: MA Experiment 20001451 PARAMETER Experiment Name: At_Far-red-induction_P Parameter: Organism Value: A. thaliana
  misc_feature: MA Experiment 20001451 PARAMETER Experiment Name: At_Far-red-induction_P Parameter: Plant Line Value: Columbia
  misc_feature: MA Experiment 20001451 PARAMETER Experiment Name: At_Far-red-induction_P Parameter: Timepoint (hr) Value: 24
  misc_feature: MA Experiment 20001451 PARAMETER Experiment Name: At_Far-red-induction_P Parameter: Tissue Value: Whole Plant
  misc_feature: MA Experiment ID: 20001555 Result: Down-regulated in Transcription
  misc_feature: MA Experiment 20001555 PARAMETER Experiment Name: At_Drought_Soil_Dry_P Parameter: Age (day) Value: 24
  misc_feature: MA Experiment 20001555 PARAMETER Experiment Name: At_Drought_Soil_Dry_P Parameter: Organism Value: A. thaliana
  misc_feature: MA Experiment 20001555 PARAMETER Experiment Name: At_Drought_Soil_Dry_P Parameter: Plant Line Value: WS
  misc_feature: MA Experiment 20001555 PARAMETER Experiment Name: At_Drought_Soil_Dry_P Parameter: Post Timepoint (hr) Value: None
  misc_feature: MA Experiment 20001555 PARAMETER Experiment Name: At_Drought_Soil_Dry_P Parameter: Post-Treatment Value: None
  misc_feature: MA Experiment 20001555 PARAMETER Experiment Name: At_Drought_Soil_Dry_P Parameter: Timepoint (day) Value: 10
  misc_feature: MA Experiment 20001555 PARAMETER Experiment Name: At_Drought_Soil_Dry_P Parameter: Treatment Value: Drought vs. No Drought
  misc_feature: MA Experiment ID: 20001556 Result: Down-regulated in Transcription
  misc_feature: MA Experiment 20001556 PARAMETER Experiment Name: At_Drought_Soil_Dry_P Parameter: Age (day) Value: 26
  misc_feature: MA Experiment 20001556 PARAMETER Experiment Name: At_Drought_Soil_Dry_P Parameter: Organism Value: A. thaliana
  misc_feature: MA Experiment 20001556 PARAMETER Experiment Name: At_Drought_Soil_Dry_P Parameter: Plant Line Value: WS
  misc_feature: MA Experiment 20001556 PARAMETER Experiment Name: At_Drought_Soil_Dry_P Parameter: Post Timepoint (hr) Value: None
  misc_feature: MA Experiment 20001556 PARAMETER Experiment Name: At_Drought_Soil_Dry_P Parameter: Post-Treatment Value: None
  misc_feature: MA Experiment 20001556 PARAMETER Experiment Name: At_Drought_Soil_Dry_P Parameter: Timepoint (day) Value: 12
  misc_feature: MA Experiment 20001556 PARAMETER Experiment Name: At_Drought_Soil_Dry_P Parameter: Treatment Value: Drought vs. No Drought
  misc_feature: MA Experiment ID: 20001558 Result: Up-regulated in Transcription
  misc_feature: MA Experiment 20001558 PARAMETER Experiment Name: At_Drought_Soil_Dry_P Parameter: Age (day) Value: 27
  misc_feature: MA Experiment 20001558 PARAMETER Experiment Name: At_Drought_Soil_Dry_P Parameter: Organism Value: A. thaliana
  misc_feature: MA Experiment 20001558 PARAMETER Experiment Name: At_Drought_Soil_Dry_P Parameter: Plant Line Value: WS
  misc_feature: MA Experiment 20001558 PARAMETER Experiment Name: At_Drought_Soil_Dry_P Parameter: Post Timepoint (hr) Value: 6
  misc_feature: MA Experiment 20001558 PARAMETER Experiment Name: At_Drought_Soil_Dry_P Parameter: Post-Treatment Value: Re-Water vs. No Drought
  misc_feature: MA Experiment 20001558 PARAMETER Experiment Name: At_Drought_Soil_Dry_P Parameter: Timepoint (day) Value: 13
  misc_feature: MA Experiment 20001558 PARAMETER Experiment Name: At_Drought_Soil_Dry_P Parameter: Treatment Value: Drought vs. No Drought
  misc_feature: MA Experiment ID: 20001757 Result: Up-regulated in Transcription
  misc_feature: MA Experiment 20001757 PARAMETER Experiment Name: At_50mM_NH4NO3_L-to-H_P Parameter: Timepoint (hr) Value: 6
  misc_feature: MA Experiment 20001757 PARAMETER Experiment Name: At_50mM_NH4NO3_L-to-H_P Parameter: Tissue Value: Leaf
  misc_feature: MA Experiment 20001757 PARAMETER Experiment Name: At_50mM_NH4NO3_L-to-H_P Parameter: Treatment Value: 50mM NH4NO3 vs 100mM Mannitol
attaactatttaatcgtactaataatgattataagcagaattatgtagactatacaaatagtacgtaataccgaaagtacccttggtttatccctggcattacaagggtttcctttttcccctttaaaatggcagaagagatacactgtcgtcgtcacacagcaccacaaactccatagctagctagagagtaaaaagaacaaagatgtcgaaagaagtgagcgaagaaggcaaaacccaccatggaaaagactacgtggatcctccaccagctcctcttctcgacatgggtgagctcaaatcctggtctttctacagagctctcatcgctgagttcatcgctacactcctcttcctctacgtcaccgtcgctactgtcatcggccacaagaagcaaaccggtccttgtgacggcgttggtttacttggtatcgcttgggctttcggtggtatgatcttcgtcctcgtctactgcaccgccggtatctctggtggtcacattaacccagctgtgactttcggtctgttcttggcccgtaaggtctctttggtgcgagctcttggttacatgatagctcagtgtcttggagccatttgtggtgtgggtttcgtgaaagctttcatgaaaactccttacaacactcttggtggaggagctaacaccgtagctgacggttacagcaaaggaactgctctcggagctgagattattggaactttcgtccttgtttacaccgttttctctgcaactgaccctaagagaagcgctcgtgactctcacatccccgttttggctccacttccaattggatttgctgtgttcatggtgcatttggctactatccccattactggaactggtatcaacccagctagaagctttggtgctgctgttatctacaacaacgagaaggcgtgggatgaccaatggatcttttgggttggtccgttcttgggagcactagctgcagcagcttaccaccaatacatattgagagcttcagcaattaaggccttgggctcgttccgaagcaacgcaaccaattaatgaaggctttttttaagataatgtcaagaaacaactttaagatttatatgctttaattattatttgttgttcttttgtgtgtaatgagagagatggtggattgatgttaattatgaaatggctcagtgacttctatttccttctttagtttttgattgtctttgtt

SEQ ID NO: 106073 - protein, 280 aa, Arabidopsis thaliana; identical to SEQ ID NO: 24848
  peptide (1)..(280): Ceres Seq. ID no. 13618674
  misc_feature (1)..(280): Homolog of NCBI NO: 15236267 NR Description: aquaporin, putative [Arabidopsis thaliana]
  misc_feature (1)..(280): Homolog of NCBI NO: 1688296 NR Description: plasma membrane intrinsic protein PIP3
  misc_feature (1)..(280): Homolog of NCBI NO: 2306917 NR Description: plasma membrane intrinsic protein [Arabidopsis
  misc_feature (1)..(280): Homolog of NCBI NO: 11119335 NR Description: aquaporin [Brassica oleracea]
  misc_feature (1)..(280): Homolog of NCBI NO: 15227302 NR Description: putative plasma membrane intrinsic protein
  misc_feature (1)..(280): Homolog of NCBI NO: 8071628 NR Description: putative aquaporin PIP2-2 [Vitis berlandieri x
  misc_feature (1)..(280): Homolog of NCBI NO: 17940742 NR Description: aquaporin-like protein [Petunia x hybrida]
  misc_feature (1)..(280): Homolog of NCBI NO: 1168480 NR Description: AQUAPORIN >gi|604477|gb|AAA86991.1| aquaporin
  misc_feature (1)..(280): Homolog of NCBI NO: 7441276 NR Description: mipE protein - common ice plant
  misc_feature (1)..(280): Homolog of NCBI NO: 7441253 NR Description: probable aquaporin - spinach

SEQ ID NO: 106074 - protein, 253 aa, Arabidopsis thaliana; identical to SEQ ID NO: 24849
  peptide (1)..(253): Ceres Seq. ID no. 13618675
  misc_feature (1)..(253): Homolog of NCBI NO: 15236267 NR Description: aquaporin, putative [Arabidopsis thaliana]
  misc_feature (1)..(253): Homolog of NCBI NO: 1688296 NR Description: plasma membrane intrinsic protein PIP3
  misc_feature (1)..(253): Homolog of NCBI NO: 2306917 NR Description: plasma membrane intrinsic protein [Arabidopsis
  misc_feature (1)..(253): Homolog of NCBI NO: 11119335 NR Description: aquaporin [Brassica oleracea]
  misc_feature (1)..(253): Homolog of NCBI NO: 15227302 NR Description: putative plasma membrane intrinsic protein
  misc_feature (1)..(253): Homolog of NCBI NO: 8071628 NR Description: putative aquaporin PIP2-2 [Vitis berlandieri x
  misc_feature (1)..(253): Homolog of NCBI NO: 17940742 NR Description: aquaporin-like protein [Petunia x hybrida]
  misc_feature (1)..(253): Homolog of NCBI NO: 1168480 NR Description: AQUAPORIN >gi|604477|gb|AAA86991.1| aquaporin
  misc_feature (1)..(253): Homolog of NCBI NO: 7441276 NR Description: mipE protein - common ice plant
  misc_feature (1)..(253): Homolog of NCBI NO: 7441253 NR Description: probable aquaporin - spinach

SEQ ID NO: 106075 - protein, 198 aa, Arabidopsis thaliana; identical to SEQ ID NO: 24850
  peptide (1)..(198): Ceres Seq. ID no. 13618676
  misc_feature (1)..(198): Homolog of NCBI NO: 15236267 NR Description: aquaporin, putative [Arabidopsis thaliana]
  misc_feature (1)..(198): Homolog of NCBI NO: 1688296 NR Description: plasma membrane intrinsic protein PIP3
  misc_feature (1)..(198): Homolog of NCBI NO: 2306917 NR Description: plasma membrane intrinsic protein [Arabidopsis
  misc_feature (1)..(198): Homolog of NCBI NO: 11119335 NR Description: aquaporin [Brassica oleracea]
  misc_feature (1)..(198): Homolog of NCBI NO: 15227302 NR Description: putative plasma membrane intrinsic protein
  misc_feature (1)..(198): Homolog of NCBI NO: 8071628 NR Description: putative aquaporin PIP2-2 [Vitis berlandieri x
  misc_feature (1)..(198): Homolog of NCBI NO: 17940742 NR Description: aquaporin-like protein [Petunia x hybrida]
  misc_feature (1)..(198): Homolog of NCBI NO: 1168480 NR Description: AQUAPORIN >gi|604477|gb|AAA86991.1| aquaporin
  misc_feature (1)..(198): Homolog of NCBI NO: 7441276 NR Description: mipE protein - common ice plant
  misc_feature (1)..(198): Homolog of NCBI NO: 7441253 NR Description: probable aquaporin - spinach

SEQ ID NO: 106076 - DNA, 1242 bp, Arabidopsis thaliana
  misc_feature (1)..(1242): Ceres Seq. ID no. 13618681
  misc_feature: MA Experiment ID: 20000440 Result: Up-regulated in Transcription
  misc_feature: MA Experiment 20000440 PARAMETER Experiment Name: At_Closed-Flower__Sub_P Parameter: Tissue Value: Closed Flower vs. Whole Plant
ttgggatttggtgtttttctccttttcttcattgaaagttgtcttcttttttaatcttctttgattaaaatgggtaatgtgacgtcaaatgtggcggccaagttcgcattcttcccgccggagccagcaacatacggcgtaacgaaggatgacgagaccgggaagctggtcttcgccggagtgtcggctgacaagaacgtggaagtccaccaactcaccacaaagtccggcaacaaagttgttgccacgttttggagacacccttttgcgagattcacgcttctctattcccatggcaatgccgctgatcttggccaaatggtcgagctattcatcgaactccgtgctcatctccgcgtcaacatcatgagttatgattattcaggatatggagcttcaacaggaaagccgtctgaattcaacacgtattatgacatagaggcagtgtacagttgcttgcggagcgattatgggatcaagcaagaggagataattctgtacggtcagtctgtaggaagcggtccaacgttgcacatggcttctcggttgaagaggcttagaggagttgttcttcacagcgccattctctctggaatcagagtcttgtatcctgtcaaaatgactctctggttcgatatattcaaaaacatagacaagattcgccatgtcaactcacaagtccttgtcatacatggcacaaatgacgagattgttgatttgtctcacgggaaacgactgtgggagctggcgaaggagaagtatgatccgttatgggtgaagggaggagggcattgcaacctcgagacttaccctgagtacatcaagcacctcaaaaagttcgtaaatgcaatggagaaactctctctaaccaatccaccacccaaacaactaactaatgagcccagtatcaccgagactaagcacaatcggtgcttgaaattcgggaaacggtagtagcagaatcacaagacaattggtttggtagatttcttccttggcatcgcatgtgcagagttatttcctcaatgtgatcaaaaccaatgctaaacacagggtcacagacaacggcgtaacagagatcatctagtgaggtatttcactgtagaatgttgccctgcttttgggtatttgatcgatgttcaatctcctgtaaaaatgtagcttcaagtttgggggtttctgtaacacatcattacttgtaggagaagcaacacagaaaagatgtaatcagcatttccttcg

SEQ ID NO: 106077 - protein, 294 aa, Arabidopsis thaliana
  peptide (1)..(294): Ceres Seq. ID no. 13618682
  misc_feature (100)..(204): Pfam Name: alpha/beta hydrolase fold Pfam Description: alpha/beta hydrolase fold
  misc_feature (1)..(294): Homolog of NCBI NO: 28393521 NR Description: unknown protein [Arabidopsis thaliana]
  misc_feature (1)..(208): Homolog of NCBI NO: 30688887 NR Description: expressed protein [Arabidopsis thaliana]
  misc_feature (190)..(294): Homolog of NCBI NO: 30688887 NR Description: expressed protein [Arabidopsis thaliana]
  misc_feature (1)..(192): Homolog of NCBI NO: 15224121 NR Description: hypothetical protein [Arabidopsis thaliana]
  misc_feature (190)..(294): Homolog of NCBI NO: 15224121 NR Description: hypothetical protein [Arabidopsis thaliana]
  misc_feature (1)..(294): Homolog of NCBI NO: 25352163 NR Description: hypothetical protein AT4g31020 [imported] - thaliana >gi|2980764|emb|CAA18191.1| putative protein thaliana] >gi|7270004|emb|CAB79820.1| putative protein
  misc_feature (1)..(282): Homolog of NCBI NO: 15241394 NR Description: expressed protein [Arabidopsis thaliana]
  misc_feature (1)..(264): Homolog of NCBI NO: 15232168 NR Description: expressed protein [Arabidopsis thaliana] unknown protein [Arabidopsis thaliana] unknown protein [Arabidopsis thaliana]
  misc_feature (1)..(277): Homolog of NCBI NO: 15230760 NR Description: hypothetical protein [Arabidopsis thaliana] contains similarity to unknown
  misc_feature (2)..(265): Homolog of NCBI NO: 34905260 NR Description: P0577B11.1 [Oryza sativa (japonica >gi|29170589|dbj|BAC57808.2| putative TPA: Cgi67 serine protease
MGNVTSNVAAKFAFFPPEPATYGVTKDDETGKLVFAGVSADKNVEVHQLTTKSGNKVVATFWRHPFARFTLLYSHGNAADLGQMVELFIELRAHLRVNIMSYDYSGYGASTGKPSEFNTYYDIEAVYSCLRSDYGIKQEEIILYGQSVGSGPTLHMASRLKRLRGVVLHSAILSGIRVLYPVKMTLWFDIFKNIDKIRHVNSQVLVIHGTNDEIVDLSHGKRLWELAKEKYDPLWVKGGGHCNLETYPEYIKHLKKFVNAMEKLSLTNPPPKQLTNEPSITETKHNRCLKFGKR

SEQ ID NO: 106078 - protein, 211 aa, Arabidopsis thaliana
  peptide (1)..(211): Ceres Seq. ID no. 13618683
  misc_feature (17)..(121): Pfam Name: alpha/beta hydrolase fold Pfam Description: alpha/beta hydrolase fold
  misc_feature (1)..(211): Homolog of NCBI NO: 28393521 NR Description: unknown protein [Arabidopsis thaliana]
  misc_feature (1)..(125): Homolog of NCBI NO: 30688887 NR Description: expressed protein [Arabidopsis thaliana]
  misc_feature (107)..(211): Homolog of NCBI NO: 30688887 NR Description: expressed protein [Arabidopsis thaliana]
  misc_feature (1)..(109): Homolog of NCBI NO: 15224121 NR Description: hypothetical protein [Arabidopsis thaliana]
  misc_feature (107)..(211): Homolog of NCBI NO: 15224121 NR Description: hypothetical protein [Arabidopsis thaliana]
  misc_feature (1)..(211): Homolog of NCBI NO: 25352163 NR Description: hypothetical protein AT4g31020 [imported] - thaliana >gi|2980764|emb|CAA18191.1| putative protein thaliana] >gi|7270004|emb|CAB79820.1| putative protein
  misc_feature (1)..(199): Homolog of NCBI NO: 15241394 NR Description: expressed protein [Arabidopsis thaliana]
  misc_feature (1)..(181): Homolog of NCBI NO: 15232168 NR Description: expressed protein [Arabidopsis thaliana] unknown protein [Arabidopsis thaliana] unknown protein [Arabidopsis thaliana]
  misc_feature (1)..(194): Homolog of NCBI NO: 15230760 NR Description: hypothetical protein [Arabidopsis thaliana] contains similarity to unknown
  misc_feature (1)..(182): Homolog of NCBI NO: 34905260 NR Description: P0577B11.1 [Oryza sativa (japonica >gi|29170589|dbj|BAC57808.2| putative TPA: Cgi67 serine protease
MVELFIELRAHLRVNIMSYDYSGYGASTGKPSEFNTYYDIEAVYSCLRSDYGIKQEEIILYGQSVGSGPTLHMASRLKRLRGVVLHSAILSGIRVLYPVKMTLWFDIFKNIDKIRHVNSQVLVIHGTNDEIVDLSHGKRLWELAKEKYDPLWVKGGGHCNLETYPEYIKHLKKFVNAMEKLSLTNPPPKQLTNEPSITETKHNRCLKFGKR

SEQ ID NO: 106079 - protein, 195 aa, Arabidopsis thaliana
  peptide (1)..(195): Ceres Seq. ID no. 13618684
  misc_feature (1)..(105): Pfam Name: alpha/beta hydrolase fold Pfam Description: alpha/beta hydrolase fold
  misc_feature (1)..(195): Homolog of NCBI NO: 28393521 NR Description: unknown protein [Arabidopsis thaliana]
  misc_feature (1)..(109): Homolog of NCBI NO: 30688887 NR Description: expressed protein [Arabidopsis thaliana]
  misc_feature (91)..(195): Homolog of NCBI NO: 30688887 NR Description: expressed protein [Arabidopsis thaliana]
  misc_feature (1)..(93): Homolog of NCBI NO: 15224121 NR Description: hypothetical protein [Arabidopsis thaliana]
  misc_feature (91)..(195): Homolog of NCBI NO: 15224121 NR Description: hypothetical protein [Arabidopsis thaliana]
  misc_feature (1)..(195): Homolog of NCBI NO: 25352163 NR Description: hypothetical protein AT4g31020 [imported] - thaliana >gi|2980764|emb|CAA18191.1| putative protein thaliana] >gi|7270004|emb|CAB79820.1| putative protein
  misc_feature (1)..(183): Homolog of NCBI NO: 15241394 NR Description: expressed protein [Arabidopsis thaliana]
  misc_feature (1)..(165): Homolog of NCBI NO: 15232168 NR Description: expressed protein [Arabidopsis thaliana] unknown protein [Arabidopsis thaliana] unknown protein [Arabidopsis thaliana]
  misc_feature (1)..(178): Homolog of NCBI NO: 15230760 NR Description: hypothetical protein [Arabidopsis thaliana] contains similarity to unknown
  misc_feature (1)..(166): Homolog of NCBI NO: 34905260 NR Description: P0577B11.1 [Oryza sativa (japonica >gi|29170589|dbj|BAC57808.2| putative TPA: Cgi67 serine protease
MSYDYSGYGASTGKPSEFNTYYDIEAVYSCLRSDYGIKQEEIILYGQSVGSGPTLHMASRLKRLRGVVLHSAILSGIRVLYPVKMTLWFDIFKNIDKIRHVNSQVLVIHGTNDEIVDLSHGKRLWELAKEKYDPLWVKGGGHCNLETYPEYIKHLKKFVNAMEKLSLTNPPPKQLTNEPSITETKHNRCLKFGKR

SEQ ID NO: 106080 - DNA, 1658 bp, Arabidopsis thaliana
  misc_feature (1)..(1658): Ceres Seq. ID no. 13618693
  misc_feature: MA Experiment ID: 20000173 Result: Down-regulated in Transcription
  misc_feature: MA Experiment 20000173 PARAMETER Experiment Name: At_42deg_Heat_P Parameter: Age (day) Value: 14
  misc_feature: MA Experiment 20000173 PARAMETER Experiment Name: At_42deg_Heat_P Parameter: Organism Value: A. thaliana
  misc_feature: MA Experiment 20000173 PARAMETER Experiment Name: At_42deg_Heat_P Parameter: Plant Line Value: WS
  misc_feature: MA Experiment 20000173 PARAMETER Experiment Name: At_42deg_Heat_P Parameter: Temperature (deg C) Value: 42 vs. 22
  misc_feature: MA Experiment 20000173 PARAMETER Experiment Name: At_42deg_Heat_P Parameter: Timepoint (hr) Value: 6
  misc_feature: MA Experiment 20000173 PARAMETER Experiment Name: At_42deg_Heat_P Parameter: Tissue Value: Aerial
  misc_feature: MA Experiment ID: 20000184 Result: Down-regulated in Transcription
  misc_feature: MA Experiment 20000184 PARAMETER Experiment Name: At_Shoots__P Parameter: Age (day) Value: 7
  misc_feature: MA Experiment 20000184 PARAMETER Experiment Name: At_Shoots__P Parameter: Tissue Value: Shoots vs. Whole Plant
  misc_feature: MA Experiment ID: 20000234 Result: Up-regulated in Transcription
  misc_feature: MA Experiment 20000234 PARAMETER Experiment Name: At_Siliques_P Parameter: Age (day) Value: 21
  misc_feature: MA Experiment 20000234 PARAMETER Experiment Name: At_Siliques_P Parameter: Organism Value: A. thaliana
  misc_feature: MA Experiment 20000234 PARAMETER Experiment Name: At_Siliques_P Parameter: Plant Line Value: WS
  misc_feature: MA Experiment 20000234 PARAMETER Experiment Name: At_Siliques_P Parameter: Tissue Value: Less Than 5mm Siliques vs. Whole Plant
  misc_feature: MA Experiment ID: 20001451 Result: Down-regulated in Transcription
  misc_feature: MA Experiment 20001451 PARAMETER Experiment Name: At_Far-red-induction_P Parameter: Age (day) Value: 7
  misc_feature: MA Experiment 20001451 PARAMETER Experiment Name: At_Far-red-induction_P Parameter: Light Value: Far-red vs. White
  misc_feature: MA Experiment 20001451 PARAMETER Experiment Name: At_Far-red-induction_P Parameter: Organism Value: A. thaliana
  misc_feature: MA Experiment 20001451 PARAMETER Experiment Name: At_Far-red-induction_P Parameter: Plant Line Value: Columbia
  misc_feature: MA Experiment 20001451 PARAMETER Experiment Name: At_Far-red-induction_P Parameter: Timepoint (hr) Value: 24
  misc_feature: MA Experiment 20001451 PARAMETER Experiment Name: At_Far-red-induction_P Parameter: Tissue Value: Whole Plant
aattcgtcgagaaccgagtgaccgtttctagtgctcacagagagagagagagagagagagagagagaggcgctgtggatttgtgggagagtagggacatcagaggattcttcgatcttcagattcttactcgacgaatccttaatcgctcacctgcagttgttcttatcctccgcttattccgtcgagtgccgtggcggccaatttcggcaactctgcgccactgatgattttgatggttagatcttttaattgattctaaagagtgagatgttaaagcagactataagatggatttgatacttcatccagtagtagcttaagaaatattgcggttatgtcagagtctcgtcaaaggcctccttttaagggcccgagatggattatcactttggttgttctggttacggttgttgtcattaccgcattcatatatcctccgcggaattctgtggcttgctatatgttttctggtcctggatgtcctttataccagcagtttttgtttgtacctactcgggaattgactgactctgaagctgctgctcaagttgtcatgaatgaaatcatgaacctacctcaatctaagacagcaaatcccaagttagctttcatgttcttaactccagggacgctgccttttgagcctctctgggaaatgtttttccgtggtcatgagaacaaattttcagtttatgtgcatgcctcaaagaaaagtcctgtacatacaagcagctattttgttggtcgagatattcacagtcacaaggttgcttggggtcagatatcaatggttgatgcagaaagaaggctattagctcatgctctcgttgatcctgataatcaacactttatattgctgtcagatagttgtgtaccgctattcgactttaactatatctataaccacttgatcttcgcgaatctcagcttcattgattgttttgaggatcctggaccacatggatctggtaggtattcacaacatatgctgcctgaggttgaaaagaaggattttcggaagggctcacagtggttttcaatgaagaggagacatgctatagtcgtcatggcggacagcctttactacacaaaattcaagctttactgtaggccaaatatggaaggacgcaactgctatgcggacgagcattattttccaactcttttcaatatgattgatccagatggaatagcaaactggtcggtcacacatgtagattggtccgagggcaaatggcatccgaagctgtacaatgcaagagacatcactccttacctcatcaggaaaatcaagtccatccaacttgcttaccatgtcacaagcgatttaaagaaagtgacgacagtaaagccgtgtctatggaaaggagagcaacgtccatgttacctatttgctcggaagtttaatcctgaaactctagaccgattgatgtatctcttccctaactacacctcgctggtttgaaaggcttatcggattctcgattgtccggtttgttctttgttaagctcttaccaaagcatacaccttgtgtgataattattaggaccattcatattgctgtgattcaaagttgggtttgagcctggcacagacaagaacaagaactgctctggtgtttttttggtttatggttaacaaaacattagcgtgct

SEQ ID NO: 106081 - protein, 376 aa, Arabidopsis thaliana
  peptide (1)..(376): Ceres Seq. ID no. 13618694
  misc_feature (124)..(234): Pfam Name: Arabidopsis protein of unknown function, DUF266 Pfam Description: Arabidopsis protein of unknown function, DUF266
  misc_feature (1)..(376): Homolog of NCBI NO: 26452247 NR Description: unknown protein [Arabidopsis thaliana] Unknown protein [Arabidopsis thaliana]
  misc_feature (17)..(373): Homolog of NCBI NO: 38346557 NR Description: OSJNBa0035M09.18 [Oryza sativa (japonica
  misc_feature (15)..(373): Homolog of NCBI NO: 38637182 NR Description: unknown protein [Oryza sativa (japonica
  misc_feature (4)..(376): Homolog of NCBI NO: 30680587 NR Description: expressed protein [Arabidopsis thaliana]
  misc_feature (1)..(376): Homolog of NCBI NO: 22329024 NR Description: expressed protein [Arabidopsis thaliana] putative protein [Arabidopsis thaliana]
  misc_feature (5)..(376): Homolog of NCBI NO: 22327910 NR Description: expressed protein [Arabidopsis thaliana] Unknown protein [Arabidopsis thaliana]
  misc_feature (5)..(376): Homolog of NCBI NO: 17065016 NR Description: Unknown protein [Arabidopsis thaliana]
  misc_feature (1)..(374): Homolog of NCBI NO: 15236024 NR Description: expressed protein [Arabidopsis thaliana]
  misc_feature (4)..(341): Homolog of NCBI NO: 7487281 NR Description: hypothetical protein T20K24.18 - Arabidopsis >gi|3176725|gb|AAD12039.1| (AC002392) unknown protein
  misc_feature (5)..(330): Homolog of NCBI NO: 8777360 NR Description: gene_id:MJB24.8~pir||T04241~strong similarity to
MSESRQRPPFKGPRWIITLVVLVTVVVITAFIYPPRNSVACYMFSGPGCPLYQQFLFVPTRELTDSEAAAQVVMNEIMNLPQSKTANPKLAFMFLTPGTLPFEPLWEMFFRGHENKFSVYVHASKKSPVHTSSYFVGRDIHSHKVAWGQISMVDAERRLLAHALVDPDNQHFILLSDSCVPLFDFNYIYNHLIFANLSFIDCFEDPGPHGSGRYSQHMLPEVEKKDFRKGSQWFSMKRRHAIVVMADSLYYTKFKLYCRPNMEGRNCYADEHYFPTLFNMIDPDGIANWSVTHVDWSEGKWHPKLYNARDITPYLIRKIKSIQLAYHVTSDLKKVTTVKPCLWKGEQRPCYLFARKFNPETLDRLMYLFPNYTSLV

SEQ ID NO: 106082 - protein, 334 aa, Arabidopsis thaliana
  peptide (1)..(334): Ceres Seq. ID no. 13618695
  misc_feature (82)..(192): Pfam Name: Arabidopsis protein of unknown function, DUF266 Pfam Description: Arabidopsis protein of unknown function, DUF266
  misc_feature (1)..(334): Homolog of NCBI NO: 26452247 NR Description: unknown protein [Arabidopsis thaliana] Unknown protein [Arabidopsis thaliana]
  misc_feature (1)..(331): Homolog of NCBI NO: 38346557 NR Description: OSJNBa0035M09.18 [Oryza sativa (japonica
  misc_feature (1)..(331): Homolog of NCBI NO: 38637182 NR Description: unknown protein [Oryza sativa (japonica
  misc_feature (1)..(334): Homolog of NCBI NO: 30680587 NR Description: expressed protein [Arabidopsis thaliana]
  misc_feature (1)..(334): Homolog of NCBI NO: 22329024 NR Description: expressed protein [Arabidopsis thaliana] putative protein [Arabidopsis thaliana]
  misc_feature (1)..(334): Homolog of NCBI NO: 22327910 NR Description: expressed protein [Arabidopsis thaliana] Unknown protein [Arabidopsis thaliana]
  misc_feature (1)..(334): Homolog of NCBI NO: 17065016 NR Description: Unknown protein [Arabidopsis thaliana]
  misc_feature (1)..(332): Homolog of NCBI NO: 15236024 NR Description: expressed protein [Arabidopsis thaliana]
  misc_feature (1)..(299): Homolog of NCBI NO: 7487281 NR Description: hypothetical protein T20K24.18 - Arabidopsis >gi|3176725|gb|AAD12039.1| (AC002392) unknown protein
  misc_feature (1)..(288): Homolog of NCBI NO: 8777360 NR Description: gene_id:MJB24.8~pir||T04241~strong similarity to
MFSGPGCPLYQQFLFVPTRELTDSEAAAQVVMNEIMNLPQSKTANPKLAFMFLTPGTLPFEPLWEMFFRGHENKFSVYVHASKKSPVHTSSYFVGRDIHSHKVAWGQISMVDAERRLLAHALVDPDNQHFILLSDSCVPLFDFNYIYNHLIFANLSFIDCFEDPGPHGSGRYSQHMLPEVEKKDFRKGSQWFSMKRRHAIVVMADSLYYTKFKLYCRPNMEGRNCYADEHYFPTLFNMIDPDGIANWSVTHVDWSEGKWHPKLYNARDITPYLIRKIKSIQLAYHVTSDLKKVTTVKPCLWKGEQRPCYLFARKFNPETLDRLMYLFPNYTSLV

SEQ ID NO: 106083 - protein, 303 aa, Arabidopsis thaliana
  peptide (1)..(303): Ceres Seq. ID no. 13618696
  misc_feature (51)..(161): Pfam Name: Arabidopsis protein of unknown function, DUF266 Pfam Description: Arabidopsis protein of unknown function, DUF266
  misc_feature (1)..(303): Homolog of NCBI NO: 26452247 NR Description: unknown protein [Arabidopsis thaliana] Unknown protein [Arabidopsis thaliana]
  misc_feature (1)..(300): Homolog of NCBI NO: 38346557 NR Description: OSJNBa0035M09.18 [Oryza sativa (japonica
  misc_feature (1)..(300): Homolog of NCBI NO: 38637182 NR Description: unknown protein [Oryza sativa (japonica
  misc_feature (1)..(303): Homolog of NCBI NO: 30680587 NR Description: expressed protein [Arabidopsis thaliana]
  misc_feature (1)..(303): Homolog of NCBI NO: 22329024 NR Description: expressed protein [Arabidopsis thaliana] putative protein [Arabidopsis thaliana]
  misc_feature (1)..(303): Homolog of NCBI NO: 22327910 NR Description: expressed protein [Arabidopsis thaliana] Unknown protein [Arabidopsis thaliana]
  misc_feature (1)..(303): Homolog of NCBI NO: 17065016 NR Description: Unknown protein [Arabidopsis thaliana]
  misc_feature (1)..(301): Homolog of NCBI NO: 15236024 NR Description: expressed protein [Arabidopsis thaliana]
  misc_feature (1)..(268): Homolog of NCBI NO: 7487281 NR Description: hypothetical protein T20K24.18 - Arabidopsis >gi|3176725|gb|AAD12039.1| (AC002392) unknown protein
  misc_feature (1)..(257): Homolog of NCBI NO: 8777360 NR Description: gene_id:MJB24.8~pir||T04241~strong similarity to
MNEIMNLPQSKTANPKLAFMFLTPGTLPFEPLWEMFFRGHENKFSVYVHASKKSPVHTSSYFVGRDIHSHKVAWGQISMVDAERRLLAHALVDPDNQHFILLSDSCVPLFDFNYIYNHLIFANLSFIDCFEDPGPHGSGRYSQHMLPEVEKKDFRKGSQWFSMKRRHAIVVMADSLYYTKFKLYCRPNMEGRNCYADEHYFPTLFNMIDPDGIANWSVTHVDWSEGKWHPKLYNARDITPYLIRKIKSIQLAYHVTSDLKKVTTVKPCLWKGEQRPCYLFARKFNPETLDRLMYLFPNYTSLV

SEQ ID NO: 106084 - DNA, 846 bp, Arabidopsis thaliana
  misc_feature (1)..(846): Ceres Seq. ID no. 13618697
  misc_feature: MA Experiment ID: 20000171 Result: Down-regulated in Transcription
  misc_feature: MA Experiment 20000171 PARAMETER Experiment Name: At_42deg_Heat_P Parameter: Age (day) Value: 14
  misc_feature: MA Experiment 20000171 PARAMETER Experiment Name: At_42deg_Heat_P Parameter: Organism Value: A. thaliana
  misc_feature: MA Experiment 20000171 PARAMETER Experiment Name: At_42deg_Heat_P Parameter: Plant Line Value: WS
  misc_feature: MA Experiment 20000171 PARAMETER Experiment Name: At_42deg_Heat_P Parameter: Temperature (deg C) Value: 42 vs. 22
  misc_feature: MA Experiment 20000171 PARAMETER Experiment Name: At_42deg_Heat_P Parameter: Timepoint (hr) Value: 1
  misc_feature: MA Experiment 20000171 PARAMETER Experiment Name: At_42deg_Heat_P Parameter: Tissue Value: Aerial
  misc_feature: MA Experiment ID: 20000182 Result: Down-regulated in Transcription
  misc_feature: MA Experiment 20000182 PARAMETER Experiment Name: At_2mM_SA_P Parameter: Age (day) Value: 14
  misc_feature: MA Experiment 20000182 PARAMETER Experiment Name: At_2mM_SA_P Parameter: Organism Value: A. thaliana
  misc_feature: MA Experiment 20000182 PARAMETER Experiment Name: At_2mM_SA_P Parameter: Plant Line Value: WS
  misc_feature: MA Experiment 20000182 PARAMETER Experiment Name: At_2mM_SA_P Parameter: Timepoint (hr) Value: 6
  misc_feature: MA Experiment 20000182 PARAMETER Experiment Name: At_2mM_SA_P Parameter: Tissue Value: Aerial
  misc_feature: MA Experiment 20000182 PARAMETER Experiment Name: At_2mM_SA_P Parameter: Treatment Value: 2mM SA vs. No Treatment
  misc_feature: MA Experiment ID: 20000227 Result: Up-regulated in Transcription
  misc_feature: MA Experiment 20000227 PARAMETER Experiment Name: At_Root-Tips-vs-Tops_P Parameter: Tissue Value: Root Tips vs. Root Tops
  misc_feature: MA Experiment ID: 20000234 Result: Up-regulated in Transcription
  misc_feature: MA Experiment 20000234 PARAMETER Experiment Name: At_Siliques_P Parameter: Age (day) Value: 21
  misc_feature: MA Experiment 20000234 PARAMETER Experiment Name: At_Siliques_P Parameter: Organism Value: A. thaliana
  misc_feature: MA Experiment 20000234 PARAMETER Experiment Name: At_Siliques_P Parameter: Plant Line Value: WS
  misc_feature: MA Experiment 20000234 PARAMETER Experiment Name: At_Siliques_P Parameter: Tissue Value: Less Than 5mm Siliques vs. Whole Plant
  misc_feature: MA Experiment ID: 20000264 Result: Up-regulated in Transcription
  misc_feature: MA Experiment 20000264 PARAMETER Experiment Name: At_Open_Flower_P Parameter: Age (day) Value: 21
  misc_feature: MA Experiment 20000264 PARAMETER Experiment Name: At_Open_Flower_P Parameter: Plant Line Value: WS
  misc_feature: MA Experiment 20000264 PARAMETER Experiment Name: At_Open_Flower_P Parameter: Tissue Value: Open Flower vs. Whole Plant
  misc_feature: MA Experiment ID: 20000265 Result: Up-regulated in Transcription
  misc_feature: MA Experiment 20000265 PARAMETER Experiment Name: At_Open_Flower_P Parameter: Age (day) Value: 21
  misc_feature: MA Experiment 20000265 PARAMETER Experiment Name: At_Open_Flower_P Parameter: Plant Line Value: WS
  misc_feature: MA Experiment 20000265 PARAMETER Experiment Name: At_Open_Flower_P Parameter: Tissue Value: Closed Flower vs. Whole Plant
  misc_feature: MA Experiment ID: 20000286 Result: Up-regulated in Transcription
  misc_feature: MA Experiment 20000286 PARAMETER Experiment Name: At_Open_Flower_P Parameter: Age (day) Value: 21
  misc_feature: MA Experiment 20000286 PARAMETER Experiment Name: At_Open_Flower_P Parameter: Plant Line Value: WS
  misc_feature: MA Experiment 20000286 PARAMETER Experiment Name: At_Open_Flower_P Parameter: Tissue Value: Half Open vs. Whole Plant
  misc_feature: MA Experiment ID: 20000436 Result: Down-regulated in Transcription
  misc_feature: MA Experiment 20000436 PARAMETER Experiment Name: At_Drought_P Parameter: Age (day) Value: 7
  misc_feature: MA Experiment 20000436 PARAMETER Experiment Name: At_Drought_P Parameter: Organism Value: A. thaliana
  misc_feature: MA Experiment 20000436 PARAMETER Experiment Name: At_Drought_P Parameter: Plant Line Value: WS
  misc_feature: MA Experiment 20000436 PARAMETER Experiment Name: At_Drought_P Parameter: Timepoint (hr) Value: 12
  misc_feature: MA Experiment 20000436 PARAMETER Experiment Name: At_Drought_P Parameter: Tissue Value: Whole Plant
  misc_feature: MA Experiment 20000436 PARAMETER Experiment Name: At_Drought_P Parameter: Treatment Value: Drought vs. No Drought
  misc_feature: MA Experiment ID: 20000437 Result: Down-regulated in Transcription
  misc_feature: MA Experiment 20000437 PARAMETER Experiment Name: At_Drought_P Parameter: Age (day) Value: 8
  misc_feature: MA Experiment 20000437 PARAMETER Experiment Name: At_Drought_P Parameter: Organism Value: A. thaliana
  misc_feature: MA Experiment 20000437 PARAMETER Experiment Name: At_Drought_P Parameter: Plant Line Value: WS
  misc_feature: MA Experiment 20000437 PARAMETER Experiment Name: At_Drought_P Parameter: Timepoint (hr) Value: 24
  misc_feature: MA Experiment 20000437 PARAMETER Experiment Name: At_Drought_P Parameter: Tissue Value: Whole Plant
  misc_feature: MA Experiment 20000437 PARAMETER Experiment Name: At_Drought_P Parameter: Treatment Value: Drought vs. No Drought
  misc_feature: MA Experiment ID: 20001558 Result: Up-regulated in Transcription
  misc_feature: MA Experiment 20001558 PARAMETER Experiment Name: At_Drought_Soil_Dry_P Parameter: Age (day) Value: 27
  misc_feature: MA Experiment 20001558 PARAMETER Experiment Name: At_Drought_Soil_Dry_P Parameter: Organism Value: A. thaliana
  misc_feature: MA Experiment 20001558 PARAMETER Experiment Name: At_Drought_Soil_Dry_P Parameter: Plant Line Value: WS
  misc_feature: MA Experiment 20001558 PARAMETER Experiment Name: At_Drought_Soil_Dry_P Parameter: Post Timepoint (hr) Value: 6
  misc_feature: MA Experiment 20001558 PARAMETER Experiment Name: At_Drought_Soil_Dry_P Parameter: Post-Treatment Value: Re-Water vs. No Drought
  misc_feature: MA Experiment 20001558 PARAMETER Experiment Name: At_Drought_Soil_Dry_P Parameter: Timepoint (day) Value: 13
  misc_feature: MA Experiment 20001558 PARAMETER Experiment Name: At_Drought_Soil_Dry_P Parameter: Treatment Value: Drought vs. No Drought
gagaagaaggagaagaagattgttaagacgaaaccctgttgctgtccgtacaatgccgccgaagaagagtaaggcagatggagaagaaaaggcgaaacctttaacgacgttggcgtcgtctagagtgactcggagcatggacagtcgaactcgaagtcagactcaacaaaacggtgctaaagcggctggatccgccactaagccggcgacgaagaaggctaagaggaagaattcagcgattgagactgggagagccaagaagggaaagaaggaagaggaagttgaagagccagaggaagccgttgaggaggaggttgagaaggaagagccagaggttgaggaccctacgagaaccaagattgttatagaacactgtaaacaatgcaatgctttcaagacaagagctattcaggtgaaggaagctttggagggagctgttcctggcgtcacggtgtctcttaatcctgaaaagccaaggcggggttgctttgagatccgggaggaaggtggccaaacattcatcagtcttttggagatgaaacgtccatttgcaccaatgaaggcacttgatatggaagaagtcatcgaggacatcataaagaaagtcaaatgaatctgttctttgtttctgcctcggtctcagtttaatcaattaggtttctgcagaagactttctagagtaatgtcagatttgttaggttcacttttattgtttcggtatgagcactgtaagtgcagtctcgtcgtttggcaatgcatgattagttgatagagaaggatctctgtagtttttggggttaactcgtatttgtaaggctagtttattattcatctcgttgcttgaag

SEQ ID NO: 106085 - protein, 203 aa, Arabidopsis thaliana
  peptide (1)..(203): Ceres Seq. ID no. 13618698
  misc_feature (18)..(203): Homolog of NCBI NO: 22329049 NR Description: expressed protein [Arabidopsis thaliana] Unknown protein [Arabidopsis thaliana]
  misc_feature (18)..(163): Homolog of NCBI NO: 7486666 NR Description: hypothetical protein F8F16.180 - Arabidopsis >gi|2827531|emb|CAA16539.1| hypothetical protein [Arabidopsis >gi|7270038|emb|CAB79854.1| hypothetical protein [Arabidopsis
  misc_feature (24)..(203): Homolog of NCBI NO: 18400547 NR Description: expressed protein [Arabidopsis thaliana]
  misc_feature (24)..(124): Homolog of NCBI NO: 22530794 NR Description: hypothetical protein [Arabidopsis thaliana]
  misc_feature (85)..(200): Homolog of NCBI NO: 33516960 NR Description: Selenoprotein H
  misc_feature (60)..(203): Homolog of NCBI NO: 7486666 NR Description: hypothetical protein F8F16.180 - Arabidopsis >gi|2827531|emb|CAA16539.1| hypothetical protein [Arabidopsis >gi|7270038|emb|CAB79854.1| hypothetical protein [Arabidopsis
  misc_feature (85)..(171): Homolog of NCBI NO: 30023834 NR Description: selenoprotein H [Danio rerio]
RRRRRRLLRRNPVAVRTMPPKKSKADGEEKAKPLTTLASSRVTRSMDSRTRSQTQQNGAKAAGSATKPATKKAKRKNSAIETGRAKKGKKEEEVEEPEEAVEEEVEKEEPEVEDPTRTKIVIEHCKQCNAFKTRAIQVKEALEGAVPGVTVSLNPEKPRRGCFEIREEGGQTFISLLEMKRPFAPMKALDMEEVIEDIIKKVK

SEQ ID NO: 106086 - protein, 186 aa, Arabidopsis thaliana
  peptide (1)..(186): Ceres Seq. ID no. 13618699
  misc_feature (1)..(186): Homolog of NCBI NO: 22329049 NR Description: expressed protein [Arabidopsis thaliana] Unknown protein [Arabidopsis thaliana]
  misc_feature (1)..(146): Homolog of NCBI NO: 7486666 NR Description: hypothetical protein F8F16.180 - Arabidopsis >gi|2827531|emb|CAA16539.1| hypothetical protein [Arabidopsis >gi|7270038|emb|CAB79854.1| hypothetical protein [Arabidopsis
  misc_feature (7)..(186): Homolog of NCBI NO: 18400547 NR Description: expressed protein [Arabidopsis thaliana]
  misc_feature (7)..(107): Homolog of NCBI NO: 22530794 NR Description: hypothetical protein [Arabidopsis thaliana]
  misc_feature (68)..(183): Homolog of NCBI NO: 33516960 NR Description: Selenoprotein H
  misc_feature (43)..(186): Homolog of NCBI NO: 7486666 NR Description: hypothetical protein F8F16.180 - Arabidopsis >gi|2827531|emb|CAA16539.1| hypothetical protein [Arabidopsis >gi|7270038|emb|CAB79854.1| hypothetical protein [Arabidopsis
  misc_feature (68)..(154): Homolog of NCBI NO: 30023834 NR Description: selenoprotein H [Danio rerio]
MPPKKSKADGEEKAKPLTTLASSRVTRSMDSRTRSQTQQNGAKAAGSATKPATKKAKRKNSAIETGRAKKGKKEEEVEEPEEAVEEEVEKEEPEVEDPTRTKIVIEHCKQCNAFKTRAIQVKEALEGAVPGVTVSLNPEKPRRGCFEIREEGGQTFISLLEMKRPFAPMKALDMEEVIEDIIKKVK

SEQ ID NO: 106087 - protein, 158 aa, Arabidopsis thaliana
  peptide (1)..(158): Ceres Seq. ID no. 13618700
  misc_feature (1)..(158): Homolog of NCBI NO: 22329049 NR Description: expressed protein [Arabidopsis thaliana] Unknown protein [Arabidopsis thaliana]
  misc_feature (1)..(118): Homolog of NCBI NO: 7486666 NR Description: hypothetical protein F8F16.180 - Arabidopsis >gi|2827531|emb|CAA16539.1| hypothetical protein [Arabidopsis >gi|7270038|emb|CAB79854.1| hypothetical protein [Arabidopsis
  misc_feature (1)..(158): Homolog of NCBI NO: 18400547 NR Description: expressed protein [Arabidopsis thaliana]
  misc_feature (1)..(79): Homolog of NCBI NO: 22530794 NR Description: hypothetical protein [Arabidopsis thaliana]
  misc_feature (40)..(155): Homolog of NCBI NO: 33516960 NR Description: Selenoprotein H
  misc_feature (15)..(158): Homolog of NCBI NO: 7486666 NR Description: hypothetical protein F8F16.180 - Arabidopsis >gi|2827531|emb|CAA16539.1| hypothetical protein [Arabidopsis >gi|7270038|emb|CAB79854.1| hypothetical protein [Arabidopsis
  misc_feature (40)..(126): Homolog of NCBI NO: 30023834 NR Description: selenoprotein H [Danio rerio]
MDSRTRSQTQQNGAKAAGSATKPATKKAKRKNSAIETGRAKKGKKEEEVEEPEEAVEEEVEKEEPEVEDPTRTKIVIEHCKQCNAFKTRAIQVKEALEGAVPGVTVSLNPEKPRRGCFEIREEGGQTFISLLEMKRPFAPMKALDMEEVIEDIIKKVK

SEQ ID NO: 106088 - DNA, 1531 bp, Arabidopsis thaliana
  misc_feature (1)..(1531): Ceres Seq. ID no. 13618711
  misc_feature: MA Experiment ID: 108434 Result: Down-regulated in Transcription
  misc_feature: MA Experiment 108434 PARAMETER Experiment Name: At_Root_Tips_cDNA_P Parameter: Tissue Value: Root Tips
  misc_feature: MA Experiment ID: 108462 Result: Up-regulated in Transcription
  misc_feature: MA Experiment 108462 PARAMETER Experiment Name: At_Germinating_Seeds_cDNA_P Parameter: Age (day) Value: 2 vs. 0
  misc_feature: MA Experiment 108462 PARAMETER Experiment Name: At_Germinating_Seeds_cDNA_P Parameter: Tissue Value: Germinating Seeds
  misc_feature: MA Experiment ID: 108463 Result: Up-regulated in Transcription
  misc_feature: MA Experiment 108463 PARAMETER Experiment Name: At_Germinating_Seeds_cDNA_P Parameter: Age (day) Value: 3 vs. 0
  misc_feature: MA Experiment 108463 PARAMETER Experiment Name: At_Germinating_Seeds_cDNA_P Parameter: Tissue Value: Germinating Seeds
  misc_feature: MA Experiment ID: 108464 Result: Up-regulated in Transcription
  misc_feature: MA Experiment 108464 PARAMETER Experiment Name: At_Germinating_Seeds_cDNA_P Parameter: Age (day) Value: 4 vs. 0
  misc_feature: MA Experiment 108464 PARAMETER Experiment Name: At_Germinating_Seeds_cDNA_P Parameter: Tissue Value: Germinating Seeds
  misc_feature: MA Experiment ID: 108469 Result: Up-regulated in Transcription
  misc_feature: MA Experiment ID: 108573 Result: Up-regulated in Transcription
  misc_feature: MA Experiment 108573 PARAMETER Experiment Name: At_Drought_cDNA_P Parameter: Timepoint (hr) Value: 6
  misc_feature: MA Experiment 108573 PARAMETER Experiment Name: At_Drought_cDNA_P Parameter: Tissue Value: Aerial
  misc_feature: MA Experiment 108573 PARAMETER Experiment Name: At_Drought_cDNA_P Parameter: Treatment Value: Drought vs. No Drought
  misc_feature: MA Experiment ID: 108585 Result: Up-regulated in Transcription
  misc_feature: MA Experiment 108585 PARAMETER Experiment Name: At_5mM_NaNP_cDNA_P Parameter: Timepoint (hr) Value: 6
  misc_feature: MA Experiment 108585 PARAMETER Experiment Name: At_5mM_NaNP_cDNA_P Parameter: Tissue Value: Aerial
  misc_feature: MA Experiment 108585 PARAMETER Experiment Name: At_5mM_NaNP_cDNA_P Parameter: Treatment Value: null
  misc_feature: MA Experiment ID: 20000111 Result: Down-regulated in Transcription
  misc_feature: MA Experiment 20000111 PARAMETER Experiment Name: At_42deg_Heat_cDNA_P Parameter: Temperature (deg C) Value: 42 vs. 22
  misc_feature: MA Experiment 20000111 PARAMETER Experiment Name: At_42deg_Heat_cDNA_P Parameter: Timepoint (hr) Value: 6
  misc_feature: MA Experiment 20000111 PARAMETER Experiment Name: At_42deg_Heat_cDNA_P Parameter: Tissue Value: Aerial
  misc_feature: MA Experiment ID: 20000182 Result: Up-regulated in Transcription
  misc_feature: MA Experiment 20000182 PARAMETER Experiment Name: At_2mM_SA_P Parameter: Age (day) Value: 14
  misc_feature: MA Experiment 20000182 PARAMETER Experiment Name: At_2mM_SA_P Parameter: Organism Value: A. thaliana
  misc_feature: MA Experiment 20000182 PARAMETER Experiment Name: At_2mM_SA_P Parameter: Plant Line Value: WS
  misc_feature: MA Experiment 20000182 PARAMETER Experiment Name: At_2mM_SA_P Parameter: Timepoint (hr) Value: 6
  misc_feature: MA Experiment 20000182 PARAMETER Experiment Name: At_2mM_SA_P Parameter: Tissue Value: Aerial
  misc_feature: MA Experiment 20000182 PARAMETER Experiment Name: At_2mM_SA_P Parameter: Treatment Value: 2mM SA vs. No Treatment
  misc_feature: MA Experiment ID: 20000184 Result: Down-regulated in Transcription
  misc_feature: MA Experiment 20000184 PARAMETER Experiment Name: At_Shoots__P Parameter: Age (day) Value: 7
  misc_feature: MA Experiment 20000184 PARAMETER Experiment Name: At_Shoots__P Parameter: Tissue Value: Shoots vs. Whole Plant
  misc_feature: MA Experiment ID: 20000436 Result: Up-regulated in Transcription
  misc_feature: MA Experiment 20000436 PARAMETER Experiment Name: At_Drought_P Parameter: Age (day) Value: 7
  misc_feature: MA Experiment 20000436 PARAMETER Experiment Name: At_Drought_P Parameter: Organism Value: A. thaliana
  misc_feature: MA Experiment 20000436 PARAMETER Experiment Name: At_Drought_P Parameter: Plant Line Value: WS
  misc_feature: MA Experiment 20000436 PARAMETER Experiment Name: At_Drought_P Parameter: Timepoint (hr) Value: 12
  misc_feature: MA Experiment 20000436 PARAMETER Experiment Name: At_Drought_P Parameter: Tissue Value: Whole Plant
  misc_feature: MA Experiment 20000436 PARAMETER Experiment Name: At_Drought_P Parameter: Treatment Value: Drought vs. No Drought
  misc_feature: MA Experiment ID: 20000437 Result: Up-regulated in Transcription
  misc_feature: MA Experiment 20000437 PARAMETER Experiment Name: At_Drought_P Parameter: Age (day) Value: 8
  misc_feature: MA Experiment 20000437 PARAMETER Experiment Name: At_Drought_P Parameter: Organism Value: A. thaliana
  misc_feature: MA Experiment 20000437 PARAMETER Experiment Name: At_Drought_P Parameter: Plant Line Value: WS
  misc_feature: MA Experiment 20000437 PARAMETER Experiment Name: At_Drought_P Parameter: Timepoint (hr) Value: 24
  misc_feature: MA Experiment 20000437 PARAMETER Experiment Name: At_Drought_P Parameter: Tissue Value: Whole Plant
  misc_feature: MA Experiment 20000437 PARAMETER Experiment Name: At_Drought_P Parameter: Treatment Value: Drought vs. No Drought
  misc_feature: MA Experiment ID: 20000438 Result: Down-regulated in Transcription
  misc_feature: MA Experiment 20000438 PARAMETER Experiment Name: At_Shoots__P Parameter: Age (day) Value: 14
  misc_feature: MA Experiment 20000438 PARAMETER Experiment Name: At_Shoots__P Parameter: Tissue Value: Shoots vs. Whole Plant
  misc_feature: MA Experiment ID: 20000445 Result: Up-regulated in Transcription
  misc_feature: MA Experiment 20000445 PARAMETER Experiment Name: At_100uM_NAA__P Parameter: Age (day) Value: 14
  misc_feature: MA Experiment 20000445 PARAMETER Experiment Name: At_100uM_NAA__P Parameter: Organism Value: A. thaliana
  misc_feature: MA Experiment 20000445 PARAMETER Experiment Name: At_100uM_NAA__P Parameter: Plant Line Value: WS
  misc_feature: MA Experiment 20000445 PARAMETER Experiment Name: At_100uM_NAA__P Parameter: Timepoint (hr) Value: 6
  misc_feature: MA Experiment 20000445 PARAMETER Experiment Name: At_100uM_NAA__P Parameter: Tissue Value: Aerial
  misc_feature: MA Experiment 20000445 PARAMETER Experiment Name: At_100uM_NAA__P Parameter: Treatment Value: 100uM NAA vs. No Treatment
  misc_feature: MA Experiment ID: 20000495 Result: Down-regulated in Transcription
  misc_feature: MA Experiment 20000495 PARAMETER Experiment Name: At_Guard_Cells_P Parameter: Harvest Date Value: 8/2/2002
  misc_feature: MA Experiment 20000495 PARAMETER Experiment Name: At_Guard_Cells_P Parameter: Organism Value: A. thaliana
  misc_feature: MA Experiment 20000495 PARAMETER Experiment Name: At_Guard_Cells_P Parameter: Tissue Value: Guard Cells vs. Leaves
  misc_feature: MA Experiment ID: 20001451 Result: Down-regulated in Transcription
  misc_feature: MA Experiment 20001451 PARAMETER Experiment Name: At_Far-red-induction_P Parameter: Age (day) Value: 7
  misc_feature: MA Experiment 20001451 PARAMETER Experiment Name: At_Far-red-induction_P Parameter: Light Value: Far-red vs. White
  misc_feature: MA Experiment 20001451 PARAMETER Experiment Name: At_Far-red-induction_P Parameter: Organism Value: A. thaliana
  misc_feature: MA Experiment 20001451 PARAMETER Experiment Name: At_Far-red-induction_P Parameter: Plant Line Value: Columbia
  misc_feature: MA Experiment 20001451 PARAMETER Experiment Name: At_Far-red-induction_P Parameter: Timepoint (hr) Value: 24
  misc_feature: MA Experiment 20001451 PARAMETER Experiment Name: At_Far-red-induction_P Parameter: Tissue Value: Whole Plant
aaaacagactttttctcttcttcttctttttggggctacgacaatctgaatttgatcccaaatcaaaactttcttcttcttcgtcttcctctaatcaaaactgtctcctaccaaaggtctttcctttctccagccagatatgtgaggaaaccaagcttctcgtacaacttcatcacctacttccttttgacgttttcaaatcttgagagagatgggtatatatctaagtactccaaaaacagacaagttctcagaagatggcgaaaatcataaactcagatatggtttatcctctatgcaaggttggcgtgcgtccatggaagatgctcatgctgcaatacttgatctcgatgataacacttccttcttgggtgtctatgatggtcatggaggtaaagttgtttctaagttctgtgccaagtatctacaccagcaggttcttagtgatgaggcgtatgcagctggagacgtagggacttctcttcaaaaagcatttttcagaatggatgagatgatgcaaggacaaagagggtggcgagagttagcagtacttggtgacaaaatcaataagttcagtgggatgattgaagggcttatatggtcaccaagaagtggggacagtgctaataaacctgatgcttgggcgtttgaggaaggtcctcattctgattttgctggacctaattctgggagcacggcatgcgtagctgttgttagagacaagcagctatttgttgcaaatgcaggtgactcacgttgtgtgatatccagaaagaatcaggcttataatctttctagagatcacaaaccagatcttgaagctgagaaagaaaggatattgaaagctggtggctttatacatgcagggcgagtcaatggaagcttaaatctatcacgagctatcggtgacatggaattcaagcagaataagtttttgccatctgaaaagcaaatagttaccgctagtccagatgttaacactgttgaactctgtgatgatgatgatttccttgttcttgcctgcgatggaatttgggattgcatgacaagccaacaactcgttgatttcatacatgaacaattgaattcagagaccaaactctcggtggtatgtgaaaaagttctcgatagatgtctggctccaaacacttcaggtggtgaaggctgtgataacatgaccatgatattggttcgattcaagaaccctactccatcagagaccgaactaaaaccagaagcaagccaggcagaaggaaaccacgatgagccgagctcatcaaactaggcccatcctcagagtcacggaagatccctctagatctagtattttggttcagattgtaaatcattttgaaagacagttatatatctcaacctgacgttgatttcagtatatcaccatttcctccgtgtgcagacttttgtctcatgagctcccataatgtagaaaggaataattggtgtaaaaatgttgttggccttaaaagaacatatcatcatgtaaataaacaaaacaataagacatttacac

SEQ ID NO: 106089 - protein, 357 aa, Arabidopsis thaliana; identical to SEQ ID NO: 21021
  peptide (1)..(357): Ceres Seq. ID no. 13618712
  misc_feature (22)..(322): Pfam Name: Protein phosphatase 2C Pfam Description: Protein phosphatase 2C
  misc_feature (1)..(357): Homolog of NCBI NO: 15236548 NR Description: protein phosphatase 2C (PP2C), putative
  misc_feature (1)..(357): Homolog of NCBI NO: 15224677 NR Description: protein phosphatase 2C (PP2C), putative
  misc_feature (1)..(347): Homolog of NCBI NO: 12003990 NR Description: protein phosphatase type-2C [Zea mays]
  misc_feature (156)..(330): Homolog of NCBI NO: 27697184 NR Description: Similar to protein phosphatase 1G (formerly 2C),
  misc_feature (1)..(120): Homolog of NCBI NO: 27697184 NR Description: Similar to protein phosphatase 1G (formerly 2C),
  misc_feature (135)..(357): Homolog of NCBI NO: 31216428 NR Description: ENSANGP00000017684 [Anopheles gambiae]
  misc_feature (1)..(119): Homolog of NCBI NO: 31216428 NR Description: ENSANGP00000017684 [Anopheles gambiae]
  misc_feature (156)..(345): Homolog of NCBI NO: 4505999 NR Description: protein phosphatase 1G; protein phosphatase 2, subunit, gamma isoform; protein phosphatase 2C gamma isoform;
  misc_feature (1)..(117): Homolog of NCBI NO: 4505999 NR Description: protein phosphatase 1G; protein phosphatase 2, subunit, gamma isoform; protein phosphatase 2C gamma isoform;
  misc_feature (156)..(345): Homolog of NCBI NO: 22219444 NR Description: protein phosphatase 1G (formerly 2C), gamma isoform [Rattus norvegicus] >gi|22087629|gb|AAM90993.1|

SEQ ID NO: 106090 - protein, 329 aa, Arabidopsis thaliana; identical to SEQ ID NO: 21022
  peptide (1)..(329): Ceres Seq. ID no. 13618713
  misc_feature (1)..(294): Pfam Name: Protein phosphatase 2C Pfam Description: Protein phosphatase 2C
  misc_feature (1)..(329): Homolog of NCBI NO: 15236548 NR Description: protein phosphatase 2C (PP2C), putative
  misc_feature (1)..(329): Homolog of NCBI NO: 15224677 NR Description: protein phosphatase 2C (PP2C), putative
  misc_feature (1)..(319): Homolog of NCBI NO: 12003990 NR Description: protein phosphatase type-2C [Zea mays]
  misc_feature (128)..(302): Homolog of NCBI NO: 27697184 NR Description: Similar to protein phosphatase 1G (formerly 2C),
  misc_feature (1)..(92): Homolog of NCBI NO: 27697184 NR Description: Similar to protein phosphatase 1G (formerly 2C),
  misc_feature (107)..(329): Homolog of NCBI NO: 31216428 NR Description: ENSANGP00000017684 [Anopheles gambiae]
  misc_feature (1)..(91): Homolog of NCBI NO: 31216428 NR Description: ENSANGP00000017684 [Anopheles gambiae]
  misc_feature (128)..(317): Homolog of NCBI NO: 4505999 NR Description: protein phosphatase 1G; protein phosphatase 2, subunit, gamma isoform; protein phosphatase 2C gamma isoform;
  misc_feature (1)..(89): Homolog of NCBI NO: 4505999 NR Description: protein phosphatase 1G; protein phosphatase 2, subunit, gamma isoform; protein phosphatase 2C gamma isoform;
  misc_feature (128)..(317): Homolog of NCBI NO: 22219444 NR Description: protein phosphatase 1G (formerly 2C), gamma isoform [Rattus norvegicus] >gi|22087629|gb|AAM90993.1|

SEQ ID NO: 106091 - protein, 322 aa, Arabidopsis thaliana; identical to SEQ ID NO: 21023
  peptide (1)..(322): Ceres Seq. ID no. 13618714
  misc_feature (1)..(287): Pfam Name: Protein phosphatase 2C Pfam Description: Protein phosphatase 2C
  misc_feature (1)..(322): Homolog of NCBI NO: 15236548 NR Description: protein phosphatase 2C (PP2C), putative
  misc_feature (1)..(322): Homolog of NCBI NO: 15224677 NR Description: protein phosphatase 2C (PP2C), putative
  misc_feature (1)..(312): Homolog of NCBI NO: 12003990 NR Description: protein phosphatase type-2C [Zea mays]
  misc_feature (121)..(295): Homolog of NCBI NO: 27697184 NR Description: Similar to protein phosphatase 1G (formerly 2C),
  misc_feature (1)..(85): Homolog of NCBI NO: 27697184 NR Description: Similar to protein phosphatase 1G (formerly 2C),
  misc_feature (100)..(322): Homolog of NCBI NO: 31216428 NR Description: ENSANGP00000017684 [Anopheles gambiae]
  misc_feature (1)..(84): Homolog of NCBI NO: 31216428 NR Description: ENSANGP00000017684 [Anopheles gambiae]
  misc_feature (121)..(310): Homolog of NCBI NO: 4505999 NR Description: protein phosphatase 1G; protein phosphatase 2, subunit, gamma isoform; protein phosphatase 2C gamma isoform;
  misc_feature (1)..(82): Homolog of NCBI NO: 4505999 NR Description: protein phosphatase 1G; protein phosphatase 2, subunit, gamma isoform; protein phosphatase 2C gamma isoform;
  misc_feature (121)..(310): Homolog of NCBI NO: 22219444 NR Description: protein phosphatase 1G (formerly 2C), gamma isoform [Rattus norvegicus] >gi|22087629|gb|AAM90993.1|

SEQ ID NO: 106092 - DNA, 1135 bp, Arabidopsis thaliana
  misc_feature (1)..(1135): Ceres Seq. ID no. 13618734
  misc_feature: MA Experiment ID: 108569 Result: Up-regulated in Transcription
  misc_feature: MA Experiment 108569 PARAMETER Experiment Name: At_0.001%_MeJA__cDNA_P Parameter: Timepoint (hr) Value: 6
  misc_feature: MA Experiment 108569 PARAMETER Experiment Name: At_0.001%_MeJA__cDNA_P Parameter: Tissue Value: Aerial
  misc_feature: MA Experiment 108569 PARAMETER Experiment Name: At_0.001%_MeJA__cDNA_P Parameter: Treatment Value: 0.001% MeJA vs. No Treatment
  misc_feature: MA Experiment ID: 108573 Result: Up-regulated in Transcription
  misc_feature: MA Experiment 108573 PARAMETER Experiment Name: At_Drought_cDNA_P Parameter: Timepoint (hr) Value: 6
  misc_feature: MA Experiment 108573 PARAMETER Experiment Name: At_Drought_cDNA_P Parameter: Tissue Value: Aerial
  misc_feature: MA Experiment 108573 PARAMETER Experiment Name: At_Drought_cDNA_P Parameter: Treatment Value: Drought vs. No Drought
  misc_feature: MA Experiment ID: 20000111 Result: Up-regulated in Transcription
  misc_feature: MA Experiment 20000111 PARAMETER Experiment Name: At_42deg_Heat_cDNA_P Parameter: Temperature (deg C) Value: 42 vs. 22
  misc_feature: MA Experiment 20000111 PARAMETER Experiment Name: At_42deg_Heat_cDNA_P Parameter: Timepoint (hr) Value: 6
  misc_feature: MA Experiment 20000111 PARAMETER Experiment Name: At_42deg_Heat_cDNA_P Parameter: Tissue Value: Aerial
  misc_feature: MA Experiment ID: 20000113 Result: Up-regulated in Transcription
  misc_feature: MA Experiment 20000113 PARAMETER Experiment Name: At_42deg_Heat_cDNA_P Parameter: Temperature (deg C) Value: 42 vs. 22
  misc_feature: MA Experiment 20000113 PARAMETER Experiment Name: At_42deg_Heat_cDNA_P Parameter: Timepoint (hr) Value: 8
  misc_feature: MA Experiment 20000113 PARAMETER Experiment Name: At_42deg_Heat_cDNA_P Parameter: Tissue Value: Aerial
  misc_feature: MA Experiment ID: 20000224 Result: Down-regulated in Transcription
acttagaaatggcttcttcgtcttcacccccggcggcgatggaggtcggagaatctacaaactggacggagcttccaccggaactgacttcagcaatcctgcaccgtcttggcgcgattgagatacttgaaaacgctcagaaagtttgcagatcttggcgtcgtgtttgtaaagacccatcgatgtggcgtaaaattgacatgcataacctcggagatttggacgacatggattacaacctcgagatcatgtgccgtcacgctgttgatcgtagccagggaggcttggttgatatcggtatttggtactttggtactgttgatctcctcaattacatcgcccataggtcgagtaatctgagaagccttagacttataaggtgttctcaaattacagacgatggatttgtcgaagcagttgtgaaacttccacttgaagaactcgagttgtcatactgctcattttcagtagagtctctcagagttgtaggccagtgttgtttaaatatgaagactttgaagctgaacaagcatcctcaaaaggagaatgacgatgatgctctagcaatcgctgaaacaatgccgaaacttcgccatctccagctttgtgggaacgggttgtcagacaccggtttaaacgctattcttgacaattgctcaaacctggaacatcttgatttacgccggtgtttcaatgttaaccttgttggggatttgcagaagcggtgttttgagagtgtcaaagttgtgagacaccctaatgactcgattcatgatatcgacattggttcatcagaagacgaagacccttatgacttctctgatatcgatctgatgtcaggtgatgatgattttgagggttactatgacttctcaggtgctagtgacttttctgactatgaccagtttgatttctagatgcatcggtttcgtgcaggtgaatttttttcgaacttgttcatgacttgttttaagttagctcatagtttcaatggattttatgtgtccttgaagtatgttaccgtttgtaatgatgtcttttgctgtttgtctttcaacaatttctaagctcagaaaagtttcaaagatggtgattgtttcatcttgcttttgacgaaagaaattgagtttattct

SEQ ID NO: 106093 - protein, 304 aa, Arabidopsis thaliana
  peptide (1)..(304): Ceres Seq. ID no. 13618735
  misc_feature (195)..(219): Pfam Name: Leucine Rich Repeat Pfam Description: Leucine Rich Repeat
  misc_feature (3)..(304): Homolog of NCBI NO: 18412947 NR Description: F-box protein family, AtFBL20 [Arabidopsis
  misc_feature (3)..(304): Homolog of NCBI NO: 21593361 NR Description: F-box protein family, AtFBL20 [Arabidopsis
  misc_feature (6)..(263): Homolog of NCBI NO: 18412953 NR Description: F-box protein family, AtFBL9/AtFBL23 [Arabidopsis
  misc_feature (3)..(296): Homolog of NCBI NO: 18412951 NR Description: F-box protein family, AtFBL22 [Arabidopsis
  misc_feature (4)..(240): Homolog of NCBI NO: 30692594 NR Description: predicted protein [Arabidopsis thaliana] contains similarity to Medicago truncatula N7 protein (GB:Y17613)
  misc_feature (17)..(274): Homolog of NCBI NO: 25376524 NR Description: N7-like protein [imported] - Arabidopsis thaliana
  misc_feature (17)..(258): Homolog of NCBI NO: 18412949 NR Description: F-box protein family, AtFBL21 [Arabidopsis
  misc_feature (79)..(255): Homolog of NCBI NO: 15237166 NR Description: nodulin-related protein [Arabidopsis thaliana]
  misc_feature (82)..(277): Homolog of NCBI NO: 15236356 NR Description: nodulin -related [Arabidopsis thaliana]
  misc_feature (16)..(299): Homolog of NCBI NO: 40253673 NR Description: putative N7 protein [Oryza sativa (japonica
LEMASSSSPPAAMEVGESTNWTELPPELTSAILHRLGAIEILENAQKVCRSWRRVCKDPSMWRKIDMHNLGDLDDMDYNLEIMCRHAVDRSQGGLVDIGIWYFGTVDLLNYIAHRSSNLRSLRLIRCSQITDDGFVEAVVKLPLEELELSYCSFSVESLRVVGQCCLNMKTLKLNKHPQKENDDDALAIAETMPKLRHLQLCGNGLSDTGLNAILDNCSNLEHLDLRRCFNVNLVGDLQKRCFESVKVVRHPNDSIHDIDIGSSEDEDPYDFSDIDLMSGDDDFEGYYDFSGASDFSDYDQFDF

SEQ ID NO: 106094 - protein, 302 aa, Arabidopsis thaliana
  peptide (1)..(302): Ceres Seq. ID no. 13618736
  misc_feature (193)..(217): Pfam Name: Leucine Rich Repeat Pfam Description: Leucine Rich Repeat
  misc_feature (1)..(302): Homolog of NCBI NO: 18412947 NR Description: F-box protein family, AtFBL20 [Arabidopsis
  misc_feature (1)..(302): Homolog of NCBI NO: 21593361 NR Description: F-box protein family, AtFBL20 [Arabidopsis
  misc_feature (4)..(261): Homolog of NCBI NO: 18412953 NR Description: F-box protein family, AtFBL9/AtFBL23 [Arabidopsis
  misc_feature (1)..(294): Homolog of NCBI NO: 18412951 NR Description: F-box protein family, AtFBL22 [Arabidopsis
  misc_feature (2)..(238): Homolog of NCBI NO: 30692594 NR Description: predicted protein [Arabidopsis thaliana] contains similarity to Medicago truncatula N7 protein (GB:Y17613)
  misc_feature (15)..(272): Homolog of NCBI NO: 25376524 NR Description: N7-like protein [imported] - Arabidopsis thaliana
  misc_feature (15)..(256): Homolog of NCBI NO: 18412949 NR Description: F-box protein family, AtFBL21 [Arabidopsis
  misc_feature (77)..(253): Homolog of NCBI NO: 15237166 NR Description: nodulin-related protein [Arabidopsis thaliana]
  misc_feature (80)..(275): Homolog of NCBI NO: 15236356 NR Description: nodulin -related [Arabidopsis thaliana]
  misc_feature (14)..(297): Homolog of NCBI NO: 40253673 NR Description: putative N7 protein [Oryza sativa (japonica
MASSSSPPAAMEVGESTNWTELPPELTSAILHRLGAIEILENAQKVCRSWRRVCKDPSMWRKIDMHNLGDLDDMDYNLEIMCRHAVDRSQGGLVDIGIWYFGTVDLLNYIAHRSSNLRSLRLIRCSQITDDGFVEAVVKLPLEELELSYCSFSVESLRVVGQCCLNMKTLKLNKHPQKENDDDALAIAETMPKLRHLQLCGNGLSDTGLNAILDNCSNLEHLDLRRCFNVNLVGDLQKRCFESVKVVRHPNDSIHDIDIGSSEDEDPYDFSDIDLMSGDDDFEGYYDFSGASDFSDYDQFDF

SEQ ID NO: 106095 - protein, 292 aa, Arabidopsis thaliana
  peptide (1)..(292): Ceres Seq. ID no. 13618737
  misc_feature (183)..(207): Pfam Name: Leucine Rich Repeat Pfam Description: Leucine Rich Repeat
  misc_feature (1)..(292): Homolog of NCBI NO: 18412947 NR Description: F-box protein family, AtFBL20 [Arabidopsis
  misc_feature (1)..(292): Homolog of NCBI NO: 21593361 NR Description: F-box protein family, AtFBL20 [Arabidopsis
  misc_feature (1)..(251): Homolog of NCBI NO: 18412953 NR Description: F-box protein family, AtFBL9/AtFBL23 [Arabidopsis
  misc_feature (1)..(284): Homolog of NCBI NO: 18412951 NR Description: F-box protein family, AtFBL22 [Arabidopsis
  misc_feature (1)..(228): Homolog of NCBI NO: 30692594 NR Description: predicted protein [Arabidopsis thaliana] contains similarity to Medicago truncatula N7 protein (GB:Y17613)
  misc_feature (5)..(262): Homolog of NCBI NO: 25376524 NR Description: N7-like protein [imported] - Arabidopsis thaliana
  misc_feature (5)..(246): Homolog of NCBI NO: 18412949 NR Description: F-box protein family, AtFBL21 [Arabidopsis
  misc_feature (67)..(243): Homolog of NCBI NO: 15237166 NR Description: nodulin-related protein [Arabidopsis thaliana]
  misc_feature (70)..(265): Homolog of NCBI NO: 15236356 NR Description: nodulin -related [Arabidopsis thaliana]
  misc_feature (4)..(287): Homolog of NCBI NO: 40253673 NR Description: putative N7 protein [Oryza sativa (japonica
MEVGESTNWTELPPELTSAILHRLGAIEILENAQKVCRSWRRVCKDPSMWRKIDMHNLGDLDDMDYNLEIMCRHAVDRSQGGLVDIGIWYFGTVDLLNYIAHRSSNLRSLRLIRCSQITDDGFVEAVVKLPLEELELSYCSFSVESLRVVGQCCLNMKTLKLNKHPQKENDDDALAIAETMPKLRHLQLCGNGLSDTGLNAILDNCSNLEHLDLRRCFNVNLVGDLQKRCFESVKVVRHPNDSIHDIDIGSSEDEDPYDFSDIDLMSGDDDFEGYYDFSGASDFSDYDQFDF

SEQ ID NO: 106096 - DNA, 1203 bp, Arabidopsis thaliana
  misc_feature (1)..(1203): Ceres Seq. ID no. 13618744
  misc_feature: MA Experiment ID: 108668 Result: Up-regulated in Transcription
  misc_feature: MA Experiment 108668 PARAMETER Experiment Name: At_2mM_SA_cDNA_P Parameter: Plant Line Value: WS
  misc_feature: MA Experiment 108668 PARAMETER Experiment Name: At_2mM_SA_cDNA_P Parameter: Timepoint (hr) Value: 6
  misc_feature: MA Experiment 108668 PARAMETER Experiment Name: At_2mM_SA_cDNA_P Parameter: Treatment Value: 2mM SA vs. No Treatment
  misc_feature: MA Experiment ID: 20000182 Result: Up-regulated in Transcription
  misc_feature: MA Experiment 20000182 PARAMETER Experiment Name: At_2mM_SA_P Parameter: Age (day) Value: 14
  misc_feature: MA Experiment 20000182 PARAMETER Experiment Name: At_2mM_SA_P Parameter: Organism Value: A. thaliana
  misc_feature: MA Experiment 20000182 PARAMETER Experiment Name: At_2mM_SA_P Parameter: Plant Line Value: WS
  misc_feature: MA Experiment 20000182 PARAMETER Experiment Name: At_2mM_SA_P Parameter: Timepoint (hr) Value: 6
  misc_feature: MA Experiment 20000182 PARAMETER Experiment Name: At_2mM_SA_P Parameter: Tissue Value: Aerial
  misc_feature: MA Experiment 20000182 PARAMETER Experiment Name: At_2mM_SA_P Parameter: Treatment Value: 2mM SA vs. No Treatment
  misc_feature: MA Experiment ID: 20000438 Result: Down-regulated in Transcription
  misc_feature: MA Experiment 20000438 PARAMETER Experiment Name: At_Shoots__P Parameter: Age (day) Value: 14
  misc_feature: MA Experiment 20000438 PARAMETER Experiment Name: At_Shoots__P Parameter: Tissue Value: Shoots vs. Whole Plant
  misc_feature: MA Experiment ID: 20000573 Result: Down-regulated in Transcription
  misc_feature: MA Experiment 20000573 PARAMETER Experiment Name: At_100uM_ABA_Mutants__P Parameter: Organism Value: A. thaliana
  misc_feature: MA Experiment 20000573 PARAMETER Experiment Name: At_100uM_ABA_Mutants__P Parameter: Plant Line Value: CS22 vs. Ler wt
  misc_feature: MA Experiment 20000573 PARAMETER Experiment Name: At_100uM_ABA_Mutants__P Parameter: Timepoint (hr) Value: N/A
  misc_feature: MA Experiment 20000573 PARAMETER Experiment Name: At_100uM_ABA_Mutants__P Parameter: Tissue Value: Whole Plant
  misc_feature: MA Experiment 20000573 PARAMETER Experiment Name: At_100uM_ABA_Mutants__P Parameter: Treatment Value: None
  misc_feature: MA Experiment ID: 20000574 Result: Down-regulated in Transcription
  misc_feature: MA Experiment 20000574 PARAMETER Experiment Name: At_100uM_ABA_Mutants__P Parameter: Organism Value: A. thaliana
  misc_feature: MA Experiment 20000574 PARAMETER Experiment Name: At_100uM_ABA_Mutants__P Parameter: Plant Line Value: CS23 vs. Ler wt
  misc_feature: MA Experiment 20000574 PARAMETER Experiment Name: At_100uM_ABA_Mutants__P Parameter: Timepoint (hr) Value: N/A
  misc_feature: MA Experiment 20000574 PARAMETER Experiment Name: At_100uM_ABA_Mutants__P Parameter: Tissue Value: Whole Plant
  misc_feature: MA Experiment 20000574 PARAMETER Experiment Name: At_100uM_ABA_Mutants__P Parameter: Treatment Value: None
accaacaacaagtctttctcacgaaaatggattctcggatttttctcgcattttccctctgttttctcttcactctccctctaatttcatctgcacctaaccgcttcctcactagatcgagtaacactagagatgggtcagtgataaagatgaaaacaagtgcttcttcttttgggtttgatccaactcgtgtcactcaactctcttggactcctagagtttttttgtatgaagggtttctttctgatgaggaatgtgatcattttatcaaattggcgaaagggaagcttgagaagtcaatggtggctgataatgattctggtgagagtgttgagagtgaagtacgcactagttctggaatgtttctctccaaacgacaggatgatatagtaagtaatgtggaggcaaaacttgctgcgtggacctttcttcccgaagagaatggtgaatccatgcaaatattgcattatgagaatggtcaaaagtatgaaccgcattttgactactttcacgaccaggctaatctagagctcggtggtcatcggattgccacagtattgatgtacttgtccaatgttgaaaagggaggagaaacagtgtttcccatgtggaagggtaaagcaactcagttgaaagacgatagctggaccgaatgtgcaaaacaaggctatgcagtgaaaccgaggaaaggggatgcattactgttcttcaatcttcacccaaatgcaaccacagattcaaatagcttacatggaagctgtccagtggttgagggagagaaatggtcagcaaccagatggattcacgttaagtcattcgaaagagcgtttaataagcaatctggatgtatggacgagaatgtgagctgcgaaaaatgggcaaaggcaggggaatgccagaagaatccaacatacatggttggttcagacaaagaccatggatattgcagaaagagttgcaaagcttgctcatcttaagaacaacaagtaaaatcaaagctcttattaaaggatcaaaatttttgtatagcgaaaaaccgggttttcgccattcgggtagataaacatatcgtcaatagaatgaaaaatttagaactatatactaaaaaaataattctgattctatgttactggtttcatgtgcaagttatgttccttatggttcataactagaccaaaacttaataaaagtcggtttatgtta

SEQ ID NO: 106097 - protein, 324 aa, Arabidopsis thaliana
  peptide (1)..(324): Ceres Seq. ID no. 13618745
  misc_feature (147)..(269): Pfam Name: 2OG-Fe(II) oxygenase superfamily Pfam Description: 2OG-Fe(II) oxygenase superfamily
  misc_feature (9)..(324): Homolog of NCBI NO: 18405808 NR Description: oxidoreductase, 2OG-Fe(II) oxygenase family
  misc_feature (9)..(324): Homolog of NCBI NO: 18086437 NR Description: AT3g28480/MFJ20_16 [Arabidopsis thaliana]
  misc_feature (43)..(324): Homolog of NCBI NO: 9294583 NR Description: prolyl 4-hydroxylase alpha subunit-like protein
  misc_feature (47)..(322): Homolog of NCBI NO: 30689216 NR Description: oxidoreductase, 2OG-Fe(II) oxygenase family
  misc_feature (68)..(322): Homolog of NCBI NO: 28393447 NR Description: putative prolyl 4-hydroxylase [Arabidopsis
  misc_feature (127)..(323): Homolog of NCBI NO: 37534316 NR Description: unknown protein [Oryza sativa (japonica
  misc_feature (59)..(126): Homolog of NCBI NO: 37534316 NR Description: unknown protein [Oryza sativa (japonica
  misc_feature (59)..(324): Homolog of NCBI NO: 29150365 NR Description: putative oxidoreductase [Oryza sativa (japonica
  misc_feature (9)..(198): Homolog of NCBI NO: 24417248 NR Description: unknown [Arabidopsis thaliana]
  misc_feature (59)..(324): Homolog of NCBI NO: 34393269 NR Description: prolyl 4-hydroxylase alpha-1 subunit
QQQVFLTKMDSRIFLAFSLCFLFTLPLISSAPNRFLTRSSNTRDGSVIKMKTSASSFGFDPTRVTQLSWTPRVFLYEGFLSDEECDHFIKLAKGKLEKSMVADNDSGESVESEVRTSSGMFLSKRQDDIVSNVEAKLAAWTFLPEENGESMQILHYENGQKYEPHFDYFHDQANLELGGHRIATVLMYLSNVEKGGETVFPMWKGKATQLKDDSWTECAKQGYAVKPRKGDALLFFNLHPNATTDSNSLHGSCPVVEGEKWSATRWIHVKSFERAFNKQSGCMDENVSCEKWAKAGECQKNPTYMVGSDKDHGYCRKSCKACSS

SEQ ID NO: 106098 - protein, 316 aa, Arabidopsis thaliana; identical to SEQ ID NO: 28039
  peptide (1)..(316): Ceres Seq. ID no. 13618746
  misc_feature (139)..(261): Pfam Name: 2OG-Fe(II) oxygenase superfamily Pfam Description: 2OG-Fe(II) oxygenase superfamily
  misc_feature (1)..(316): Homolog of NCBI NO: 18405808 NR Description: oxidoreductase, 2OG-Fe(II) oxygenase family
  misc_feature (1)..(316): Homolog of NCBI NO: 18086437 NR Description: AT3g28480/MFJ20_16 [Arabidopsis thaliana]
  misc_feature (35)..(316): Homolog of NCBI NO: 9294583 NR Description: prolyl 4-hydroxylase alpha subunit-like protein
  misc_feature (39)..(314): Homolog of NCBI NO: 30689216 NR Description: oxidoreductase, 2OG-Fe(II) oxygenase family
  misc_feature (60)..(314): Homolog of NCBI NO: 28393447 NR Description: putative prolyl 4-hydroxylase [Arabidopsis
  misc_feature (119)..(315): Homolog of NCBI NO: 37534316 NR Description: unknown protein [Oryza sativa (japonica
  misc_feature (51)..(118): Homolog of NCBI NO: 37534316 NR Description: unknown protein [Oryza sativa (japonica
  misc_feature (51)..(316): Homolog of NCBI NO: 29150365 NR Description: putative oxidoreductase [Oryza sativa (japonica
  misc_feature (1)..(190): Homolog of NCBI NO: 24417248 NR Description: unknown [Arabidopsis thaliana]
  misc_feature (51)..(316): Homolog of NCBI NO: 34393269 NR Description: prolyl 4-hydroxylase alpha-1 subunit

SEQ ID NO: 106099 - protein, 275 aa, Arabidopsis thaliana; identical to SEQ ID NO: 28040
  peptide (1)..(275): Ceres Seq. ID no. 13618747
  misc_feature (98)..(220): Pfam Name: 2OG-Fe(II) oxygenase superfamily Pfam Description: 2OG-Fe(II) oxygenase superfamily
  misc_feature (1)..(275): Homolog of NCBI NO: 18405808 NR Description: oxidoreductase, 2OG-Fe(II) oxygenase family
  misc_feature (1)..(275): Homolog of NCBI NO: 18086437 NR Description: AT3g28480/MFJ20_16 [Arabidopsis thaliana]
  misc_feature (1)..(275): Homolog of NCBI NO: 9294583 NR Description: prolyl 4-hydroxylase alpha subunit-like protein
  misc_feature (1)..(273): Homolog of NCBI NO: 30689216 NR Description: oxidoreductase, 2OG-Fe(II) oxygenase family
  misc_feature (19)..(273): Homolog of NCBI NO: 28393447 NR Description: putative prolyl 4-hydroxylase [Arabidopsis
  misc_feature (78)..(274): Homolog of NCBI NO: 37534316 NR Description: unknown protein [Oryza sativa (japonica
  misc_feature (10)..(77): Homolog of NCBI NO: 37534316 NR Description: unknown protein [Oryza sativa (japonica
  misc_feature (10)..(275): Homolog of NCBI NO: 29150365 NR Description: putative oxidoreductase [Oryza sativa (japonica
  misc_feature (1)..(149): Homolog of NCBI NO: 24417248 NR Description: unknown [Arabidopsis thaliana]
  misc_feature (10)..(275): Homolog of NCBI NO: 34393269 NR Description: prolyl 4-hydroxylase alpha-1 subunit

SEQ ID NO: 106100 - DNA, 965 bp, Arabidopsis thaliana
  misc_feature (1)..(965): Ceres Seq. ID no. 13618748
  misc_feature: MA Experiment ID: 20000355 Result: Up-regulated in Transcription
  misc_feature: MA Experiment 20000355 PARAMETER Experiment Name: At_Siliques_Sub_P Parameter: Age (day) Value: 21
  misc_feature: MA Experiment 20000355 PARAMETER Experiment Name: At_Siliques_Sub_P Parameter: Organism Value: A. thaliana
  misc_feature: MA Experiment 20000355 PARAMETER Experiment Name: At_Siliques_Sub_P Parameter: Plant Line Value: WS
  misc_feature: MA Experiment 20000355 PARAMETER Experiment Name: At_Siliques_Sub_P Parameter: Tissue Value: Less Than 5mm Siliques vs. Whole Plant
  misc_feature: MA Experiment ID: 20000440 Result: Up-regulated in Transcription
  misc_feature: MA Experiment 20000440 PARAMETER Experiment Name: At_Closed-Flower__Sub_P Parameter: Tissue Value: Closed Flower vs. Whole Plant
atggattctcaatattttcttgcattttccctttctcttctcttgattttctctcaaatttcatctttctcctttagtgttgatccaactagaatcactcaactctcttggactcctagggcatttttatacaaaggatttctctcagatgaggaatgtgatcatttgattaagttggcaaaaggaaagcttgagaagtcaatggtggtggctgatgttgattcaggtgagagtgaagacagtgaagtacgcacaagttctggaatgtttctgaccaaaagacaggatgatatagtagctaatgtcgaggctaaacttgctgcatggacctttcttcctgaggaaaatggggaagccttacaaatactgcactatgagaatggtcaaaaatatgatccgcatttcgactatttttacgacaagaaagctctagagctaggtggtcatcggatcgccaccgtactaatgtacttgtccaatgtcacaaagggtggagaaacagtgtttcccaactggaagggtaaaacacctcagctgaaagacgatagctggtcgaaatgtgcaaaacaaggctatgcagtgaaaccgaggaaaggtgacgcattattgttcttcaatcttcatctaaatggaacaacggacccaaatagcttacatggaagttgtccggtgattgagggagagaaatggtcagcaactagatggattcatgttaggtcattcggtaagaagaaacttgtgtgtgtggacgatcatgagagctgccaagaatgggcagatgcaggggaatgcgagaagaatccaatgtacatggtgggttcggaaacttcccttggattttgtagaaagagctgcaaagcttgttgatcttaagaacaacaacaagtgactagattctttcacataacgaaaaacccggtgttttgtaatgaagcatgatgatatctatatttctaatgaagtgt

SEQ ID NO: 106101 - protein, 288 aa, Arabidopsis thaliana
  peptide (1)..(288): Ceres Seq. ID no. 13618749
  misc_feature (116)..(238): Pfam Name: 2OG-Fe(II) oxygenase superfamily Pfam Description: 2OG-Fe(II) oxygenase superfamily
  misc_feature (1)..(288): Homolog of NCBI NO: 30689216 NR Description: oxidoreductase, 2OG-Fe(II) oxygenase family
  misc_feature (36)..(288): Homolog of NCBI NO: 28393447 NR Description: putative prolyl 4-hydroxylase [Arabidopsis
  misc_feature (15)..(288): Homolog of NCBI NO: 9294583 NR Description: prolyl 4-hydroxylase alpha subunit-like protein
  misc_feature (15)..(288): Homolog of NCBI NO: 18405808 NR Description: oxidoreductase, 2OG-Fe(II) oxygenase family
  misc_feature (15)..(288): Homolog of NCBI NO: 18086437 NR Description: AT3g28480/MFJ20_16 [Arabidopsis thaliana]
  misc_feature (68)..(273): Homolog of NCBI NO: 9294584 NR Description: gb|AAF08583.1~gene_id:MFJ20.18~similar to unknown
  misc_feature (28)..(288): Homolog of NCBI NO: 29150365 NR Description: putative oxidoreductase [Oryza sativa (japonica
  misc_feature (96)..(288): Homolog of NCBI NO: 37534316 NR Description: unknown protein [Oryza sativa (japonica
  misc_feature (28)..(95): Homolog of NCBI NO: 37534316 NR Description: unknown protein [Oryza sativa (japonica
  misc_feature (30)..(288): Homolog of NCBI NO: 34393269 NR Description: prolyl 4-hydroxylase alpha-1 subunit
MDSQYFLAFSLSLLLIFSQISSFSFSVDPTRITQLSWTPRAFLYKGFLSDEECDHLIKLAKGKLEKSMVVADVDSGESEDSEVRTSSGMFLTKRQDDIVANVEAKLAAWTFLPEENGEALQILHYENGQKYDPHFDYFYDKKALELGGHRIATVLMYLSNVTKGGETVFPNWKGKTPQLKDDSWSKCAKQGYAVKPRKGDALLFFNLHLNGTTDPNSLHGSCPVIEGEKWSATRWIHVRSFGKKKLVCVDDHESCQEWADAGECEKNPMYMVGSETSLGFCRKSCKAC

SEQ ID NO: 106102 - protein, 221 aa, Arabidopsis thaliana
  peptide (1)..(221): Ceres Seq. ID no. 13618750
  misc_feature (49)..(171): Pfam Name: 2OG-Fe(II) oxygenase superfamily Pfam Description: 2OG-Fe(II) oxygenase superfamily
  misc_feature (1)..(221): Homolog of NCBI NO: 30689216 NR Description: oxidoreductase, 2OG-Fe(II) oxygenase family
  misc_feature (1)..(221): Homolog of NCBI NO: 28393447 NR Description: putative prolyl 4-hydroxylase [Arabidopsis
  misc_feature (1)..(221): Homolog of NCBI NO: 9294583 NR Description: prolyl 4-hydroxylase alpha subunit-like protein
  misc_feature (1)..(221): Homolog of NCBI NO: 18405808 NR Description: oxidoreductase, 2OG-Fe(II) oxygenase family
  misc_feature (1)..(221): Homolog of NCBI NO: 18086437 NR Description: AT3g28480/MFJ20_16 [Arabidopsis thaliana]
  misc_feature (1)..(206): Homolog of NCBI NO: 9294584 NR Description: gb|AAF08583.1~gene_id:MFJ20.18~similar to unknown
  misc_feature (1)..(221): Homolog of NCBI NO: 29150365 NR Description: putative oxidoreductase [Oryza sativa (japonica
  misc_feature (29)..(221): Homolog of NCBI NO: 37534316 NR Description: unknown protein [Oryza sativa (japonica
  misc_feature (1)..(28): Homolog of NCBI NO: 37534316 NR Description: unknown protein [Oryza sativa (japonica
  misc_feature (1)..(221): Homolog of NCBI NO: 34393269 NR Description: prolyl 4-hydroxylase alpha-1 subunit
MVVADVDSGESEDSEVRTSSGMFLTKRQDDIVANVEAKLAAWTFLPEENGEALQILHYENGQKYDPHFDYFYDKKALELGGHRIATVLMYLSNVTKGGETVFPNWKGKTPQLKDDSWSKCAKQGYAVKPRKGDALLFFNLHLNGTTDPNSLHGSCPVIEGEKWSATRWIHVRSFGKKKLVCVDDHESCQEWADAGECEKNPMYMVGSETSLGFCRKSCKAC

SEQ ID NO: 106103 - protein, 200 aa, Arabidopsis thaliana
  peptide (1)..(200): Ceres Seq. ID no. 13618751
  misc_feature (28)..(150): Pfam Name: 2OG-Fe(II) oxygenase superfamily Pfam Description: 2OG-Fe(II) oxygenase superfamily
  misc_feature (1)..(200): Homolog of NCBI NO: 30689216 NR Description: oxidoreductase, 2OG-Fe(II) oxygenase family
  misc_feature (1)..(200): Homolog of NCBI NO: 28393447 NR Description: putative prolyl 4-hydroxylase [Arabidopsis
  misc_feature (1)..(200): Homolog of NCBI NO: 9294583 NR Description: prolyl 4-hydroxylase alpha subunit-like protein
  misc_feature (1)..(200): Homolog of NCBI NO: 18405808 NR Description: oxidoreductase, 2OG-Fe(II) oxygenase family
  misc_feature (1)..(200): Homolog of NCBI NO: 18086437 NR Description: AT3g28480/MFJ20_16 [Arabidopsis thaliana]
  misc_feature (1)..(185): Homolog of NCBI NO: 9294584 NR Description: gb|AAF08583.1~gene_id:MFJ20.18~similar to unknown
  misc_feature (1)..(200): Homolog of NCBI NO: 29150365 NR Description: putative oxidoreductase [Oryza sativa (japonica
  misc_feature (8)..(200): Homolog of NCBI NO: 37534316 NR Description: unknown protein [Oryza sativa (japonica
  misc_feature (1)..(200): Homolog of NCBI NO: 34393269 NR Description: prolyl 4-hydroxylase alpha-1 subunit
  misc_feature (1)..(200): Homolog of NCBI NO: 20260280 NR Description: unknown protein [Arabidopsis thaliana]
MFLTKRQDDIVANVEAKLAAWTFLPEENGEALQILHYENGQKYDPHFDYFYDKKALELGGHRIATVLMYLSNVTKGGETVFPNWKGKTPQLKDDSWSKCAKQGYAVKPRKGDALLFFNLHLNGTTDPNSLHGSCPVIEGEKWSATRWIHVRSFGKKKLVCVDDHESCQEWADAGECEKNPMYMVGSETSLGFCRKSCKAC

SEQ ID NO: 106104 - DNA, 1707 bp, Arabidopsis thaliana
  misc_feature (1)..(1707): Ceres Seq. ID no. 13618754
  misc_feature: MA Experiment ID: 108434 Result: Down-regulated in Transcription
  misc_feature: MA Experiment 108434 PARAMETER Experiment Name: At_Root_Tips_cDNA_P Parameter: Tissue Value: Root Tips
  misc_feature: MA Experiment ID: 20000185 Result: Down-regulated in Transcription
  misc_feature: MA Experiment 20000185 PARAMETER Experiment Name: At_Roots__P Parameter: Age (day) Value: 7 vs. 21
  misc_feature: MA Experiment 20000185 PARAMETER Experiment Name: At_Roots__P Parameter: Organism Value: A. thaliana
  misc_feature: MA Experiment 20000185 PARAMETER Experiment Name: At_Roots__P Parameter: Tissue Value: Roots vs. Whole Plant
  misc_feature: MA Experiment ID: 20000234 Result: Down-regulated in Transcription
  misc_feature: MA Experiment 20000234 PARAMETER Experiment Name: At_Siliques_P Parameter: Age (day) Value: 21
  misc_feature: MA Experiment 20000234 PARAMETER Experiment Name: At_Siliques_P Parameter: Organism Value: A. thaliana
  misc_feature: MA Experiment 20000234 PARAMETER Experiment Name: At_Siliques_P Parameter: Plant Line Value: WS
  misc_feature: MA Experiment 20000234 PARAMETER Experiment Name: At_Siliques_P Parameter: Tissue Value: Less Than 5mm Siliques vs. Whole Plant
  misc_feature: MA Experiment ID: 20000235 Result: Down-regulated in Transcription
  misc_feature: MA Experiment 20000235 PARAMETER Experiment Name: At_Siliques_P Parameter: Age (day) Value: 21
  misc_feature: MA Experiment 20000235 PARAMETER Experiment Name: At_Siliques_P Parameter: Organism Value: A. thaliana
  misc_feature: MA Experiment 20000235 PARAMETER Experiment Name: At_Siliques_P Parameter: Plant Line Value: WS
  misc_feature: MA Experiment 20000235 PARAMETER Experiment Name: At_Siliques_P Parameter: Tissue Value: 5-10mm Siliques vs. Whole Plant
  misc_feature: MA Experiment ID: 20000264 Result: Down-regulated in Transcription
  misc_feature: MA Experiment 20000264 PARAMETER Experiment Name: At_Open_Flower_P Parameter: Age (day) Value: 21
  misc_feature: MA Experiment 20000264 PARAMETER Experiment Name: At_Open_Flower_P Parameter: Plant Line Value: WS
  misc_feature: MA Experiment 20000264 PARAMETER Experiment Name: At_Open_Flower_P Parameter: Tissue Value: Open Flower vs. Whole Plant
  misc_feature: MA Experiment ID: 20000265 Result: Down-regulated in Transcription
  misc_feature: MA Experiment 20000265 PARAMETER Experiment Name: At_Open_Flower_P Parameter: Age (day) Value: 21
  misc_feature: MA Experiment 20000265 PARAMETER Experiment Name: At_Open_Flower_P Parameter: Plant Line Value: WS
  misc_feature: MA Experiment 20000265 PARAMETER Experiment Name: At_Open_Flower_P Parameter: Tissue Value: Closed Flower vs. Whole Plant
  misc_feature: MA Experiment ID: 20000286 Result: Down-regulated in Transcription
  misc_feature: MA Experiment 20000286 PARAMETER Experiment Name: At_Open_Flower_P Parameter: Age (day) Value: 21
  misc_feature: MA Experiment 20000286 PARAMETER Experiment Name: At_Open_Flower_P Parameter: Plant Line Value: WS
  misc_feature: MA Experiment 20000286 PARAMETER Experiment Name: At_Open_Flower_P Parameter: Tissue Value: Half Open vs. Whole Plant
  misc_feature: MA Experiment ID: 20000438 Result: Down-regulated in Transcription
  misc_feature: MA Experiment 20000438 PARAMETER Experiment Name: At_Shoots__P Parameter: Age (day) Value: 14
  misc_feature: MA Experiment 20000438 PARAMETER Experiment Name: At_Shoots__P Parameter: Tissue Value: Shoots vs. Whole Plant
  misc_feature: MA Experiment ID: 20000439 Result: Down-regulated in Transcription
  misc_feature: MA Experiment 20000439 PARAMETER Experiment Name: At_Roots__P Parameter: Age (day) Value: 14 vs. 21
  misc_feature: MA Experiment 20000439 PARAMETER Experiment Name: At_Roots__P Parameter: Organism Value: A. thaliana
  misc_feature: MA Experiment 20000439 PARAMETER Experiment Name: At_Roots__P Parameter: Tissue Value: Roots vs. Whole Plant
  misc_feature: MA Experiment ID: 20000451 Result: Up-regulated in Transcription
  misc_feature: MA Experiment 20000451 PARAMETER Experiment Name: At_CS6879_Shoots-Roots_P Parameter: Age (day) Value: 14
  misc_feature: MA Experiment 20000451 PARAMETER Experiment Name: At_CS6879_Shoots-Roots_P Parameter: Organism Value: A. thaliana
  misc_feature: MA Experiment 20000451 PARAMETER Experiment Name: At_CS6879_Shoots-Roots_P Parameter: Plant Line Value: CS6879 vs. WS
  misc_feature: MA Experiment 20000451 PARAMETER Experiment Name: At_CS6879_Shoots-Roots_P Parameter: Tissue Value: Roots
  misc_feature: MA Experiment ID: 20000573 Result: Up-regulated in Transcription
  misc_feature: MA Experiment 20000573 PARAMETER Experiment Name: At_100uM_ABA_Mutants__P Parameter: Organism Value: A. thaliana
  misc_feature: MA Experiment 20000573 PARAMETER Experiment Name: At_100uM_ABA_Mutants__P Parameter: Plant Line Value: CS22 vs. Ler wt
  misc_feature: MA Experiment 20000573 PARAMETER Experiment Name: At_100uM_ABA_Mutants__P Parameter: Timepoint (hr) Value: N/A
  misc_feature: MA Experiment 20000573 PARAMETER Experiment Name: At_100uM_ABA_Mutants__P Parameter: Tissue Value: Whole Plant
  misc_feature: MA Experiment 20000573 PARAMETER Experiment Name: At_100uM_ABA_Mutants__P Parameter: Treatment Value: None
  misc_feature: MA Experiment ID: 20000574 Result: Up-regulated in Transcription
  misc_feature: MA Experiment 20000574 PARAMETER Experiment Name: At_100uM_ABA_Mutants__P Parameter: Organism Value: A. thaliana
  misc_feature: MA Experiment 20000574 PARAMETER Experiment Name: At_100uM_ABA_Mutants__P Parameter: Plant Line Value: CS23 vs. Ler wt
  misc_feature: MA Experiment 20000574 PARAMETER Experiment Name: At_100uM_ABA_Mutants__P Parameter: Timepoint (hr) Value: N/A
  misc_feature: MA Experiment 20000574 PARAMETER Experiment Name: At_100uM_ABA_Mutants__P Parameter: Tissue Value: Whole Plant
  misc_feature: MA Experiment 20000574 PARAMETER Experiment Name: At_100uM_ABA_Mutants__P Parameter: Treatment Value: None
  misc_feature: MA Experiment ID: 20001554 Result: Down-regulated in Transcription
  misc_feature: MA Experiment 20001554 PARAMETER Experiment Name: At_Drought_Soil_Dry_P Parameter: Age (day) Value: 21
  misc_feature: MA Experiment 20001554 PARAMETER Experiment Name: At_Drought_Soil_Dry_P Parameter: Organism Value: A. thaliana
  misc_feature: MA Experiment 20001554 PARAMETER Experiment Name: At_Drought_Soil_Dry_P Parameter: Plant Line Value: WS
  misc_feature: MA Experiment 20001554 PARAMETER Experiment Name: At_Drought_Soil_Dry_P Parameter: Post Timepoint (hr) Value: None
  misc_feature: MA Experiment 20001554 PARAMETER Experiment Name: At_Drought_Soil_Dry_P Parameter: Post-Treatment Value: None
  misc_feature: MA Experiment 20001554 PARAMETER Experiment Name: At_Drought_Soil_Dry_P Parameter: Timepoint (day) Value: 7
  misc_feature: MA Experiment 20001554 PARAMETER Experiment Name: At_Drought_Soil_Dry_P Parameter: Treatment Value: Drought vs. No Drought
  misc_feature: MA Experiment ID: 20001556 Result: Down-regulated in Transcription
  misc_feature: MA Experiment 20001556 PARAMETER Experiment Name: At_Drought_Soil_Dry_P Parameter: Age (day) Value: 26
  misc_feature: MA Experiment 20001556 PARAMETER Experiment Name: At_Drought_Soil_Dry_P Parameter: Organism Value: A. thaliana
  misc_feature: MA Experiment 20001556 PARAMETER Experiment Name: At_Drought_Soil_Dry_P Parameter: Plant Line Value: WS
  misc_feature: MA Experiment 20001556 PARAMETER Experiment Name: At_Drought_Soil_Dry_P Parameter: Post Timepoint (hr) Value: None
  misc_feature: MA Experiment 20001556 PARAMETER Experiment Name: At_Drought_Soil_Dry_P Parameter: Post-Treatment Value: None
  misc_feature: MA Experiment 20001556 PARAMETER Experiment Name: At_Drought_Soil_Dry_P Parameter: Timepoint (day) Value: 12
  misc_feature: MA Experiment 20001556 PARAMETER Experiment Name: At_Drought_Soil_Dry_P Parameter: Treatment Value: Drought vs. No Drought
  misc_feature: MA Experiment ID: 20001558 Result: Down-regulated in Transcription
  misc_feature: MA Experiment 20001558 PARAMETER Experiment Name: At_Drought_Soil_Dry_P Parameter: Age (day) Value: 27
  misc_feature: MA Experiment 20001558 PARAMETER Experiment Name: At_Drought_Soil_Dry_P Parameter: Organism Value: A. thaliana
  misc_feature: MA Experiment 20001558 PARAMETER Experiment Name: At_Drought_Soil_Dry_P Parameter: Plant Line Value: WS
  misc_feature: MA Experiment 20001558 PARAMETER Experiment Name: At_Drought_Soil_Dry_P Parameter: Post Timepoint (hr) Value: 6
  misc_feature: MA Experiment 20001558 PARAMETER Experiment Name: At_Drought_Soil_Dry_P Parameter: Post-Treatment Value: Re-Water vs. No Drought
  misc_feature: MA Experiment 20001558 PARAMETER Experiment Name: At_Drought_Soil_Dry_P Parameter: Timepoint (day) Value: 13
  misc_feature: MA Experiment 20001558 PARAMETER Experiment Name: At_Drought_Soil_Dry_P Parameter: Treatment Value: Drought vs. No Drought
  misc_feature: MA Experiment ID: 20001757 Result: Down-regulated in Transcription
  misc_feature: MA Experiment 20001757 PARAMETER Experiment Name: At_50mM_NH4NO3_L-to-H_P Parameter: Timepoint (hr) Value: 6
  misc_feature: MA Experiment 20001757 PARAMETER Experiment Name: At_50mM_NH4NO3_L-to-H_P Parameter: Tissue Value: Leaf
  misc_feature: MA Experiment 20001757 PARAMETER Experiment Name: At_50mM_NH4NO3_L-to-H_P Parameter: Treatment Value: 50mM NH4NO3 vs 100mM Mannitol
  misc_feature: MA Experiment ID: 20001904 Result: Down-regulated in Transcription
  misc_feature: MA Experiment 20001904 PARAMETER Experiment Name: At_Drought_Reproduction_P Parameter: Age (day) Value: 37
  misc_feature: MA Experiment 20001904 PARAMETER Experiment Name: At_Drought_Reproduction_P Parameter: Organism Value: A. thaliana
  misc_feature: MA Experiment 20001904 PARAMETER Experiment Name: At_Drought_Reproduction_P Parameter: Plant Line Value: WS
  misc_feature: MA Experiment 20001904 PARAMETER Experiment Name: At_Drought_Reproduction_P Parameter: Timepoint (day) Value: 7
  misc_feature: MA Experiment 20001904 PARAMETER Experiment Name: At_Drought_Reproduction_P Parameter: Tissue Value: Rosettes
  misc_feature: MA Experiment 20001904 PARAMETER Experiment Name: At_Drought_Reproduction_P Parameter: Treatment Value: Drought vs. No Drought
atcttcttcccccataacactcttcttctctcatcaaaatctctaactcaaaccttcctttgatcccaagaaatctcttccaaagccctaagccaaaagcttcaagagaaaaaatggcgatgatgggtcagttatggactaacacaggctctgctcttgcaacactaatgtttgtatacacaatcttcaaacaattcttccctctcttcggaccccagttggaaccattcctttatagactcttcggtcgcttctacccttacatccaaataacattccatgaatacagcggagagcatttcaagagaagcgaagcctacttggggatccagagctatctaagcaaagactcttctgctagagcaaagaaactcaaagccaacacaactaaaggaagcaaatctattgttcttagcatggatgataaggaagagatcactgacgattttgagggcattagggtttggtggcagtcgaagaaagagggagctactaggcaatctttctcgttttaccctgaagctaatgagaagagatattacatgttaaggttccacagacgtgaccgagaagtaatcatagagaggtatcttgagcatgttatgagagaagggaagacgatagagcaaaagaacagagagaggaagctttattcgaatactccgggtcagagccatggaaacaacagtaagtggagtcatgtaacctttgagcatccagctacgtttgatactctagctatggaagagaataagaaggaagagatcaagagtgatctgatcaagtttagtaagagtaaagattattacaagaagatcggaaaagcgtggaagagagggtatcttttgtttggaccacccgggactgggaagtctacaatgatcgcagcgatggctaatttcttggagtatgatgtttatgatcttgagttgacaacggttaaggataatacacatctgagaaggttattgattgagacttcagcgaaatcgattattgtgattgaagatatcgattgttcgcttaatctaacggggcagagaaagaagaaggaggaggaagaggaagatggagacgataagaacacgattgagaagaagatgatgatgaagaatgaaggtgagaataaagagagtaaagttactttatcagggctactaaatttcattgatggtttatggtcagcttgtggtggtgagaggatcattgtattcactacaaactttgtggacaagttagatccggctttgattaggaaaggaagaatggataagcatatagagatgtcgtattgttgtttcgaagcgtttaaggtattggctaagaactatttggatgtggaagagagtgagatgtttgaggagataaagaggttgcttgaggttgaagaaatcaagatgacaccggcggatgttggggagaatctgttaccgaagtcagaaaaggaaggaggtgagacttgtttgaagagattgatcgaagcgttgaaggaagagaaggaggaagcgaagaagaaggtcgaggaagaggaggaagagaagcagaggaaaaaggaaaaggtgaaagaaatagaggcagagaaagagaagaagaaaaagattgaagaagagaattgagtttgaaggaaatttgttggattgtagtatctaactgaaataattgtagtctgattggttcatcttatgaatgttttgtgtttcatttagc

SEQ ID NO: 106105 - protein, 500 aa, Arabidopsis thaliana; identical to SEQ ID NO: 21168
  peptide (1)..(500): Ceres Seq. ID no. 13618755
  misc_feature (242)..(435): Pfam Name: ATPase family associated with various cellular Pfam Description: ATPase family associated with various cellular
  misc_feature (1)..(500): Homolog of NCBI NO: 15233037 NR Description: AAA-type ATPase family [Arabidopsis thaliana]
  misc_feature (1)..(499): Homolog of NCBI NO: 15242536 NR Description: AAA-type ATPase family [Arabidopsis thaliana]
  misc_feature (1)..(499): Homolog of NCBI NO: 15233010 NR Description: expressed protein [Arabidopsis thaliana]
  misc_feature (5)..(498): Homolog of NCBI NO: 15233016 NR Description: AAA-type ATPase family [Arabidopsis thaliana]
  misc_feature (1)..(495): Homolog of NCBI NO: 9294102 NR Description: contains similarity to AAA-type
  misc_feature (15)..(495): Homolog of NCBI NO: 15233012 NR Description: AAA-type ATPase family [Arabidopsis thaliana]
  misc_feature (3)..(486): Homolog of NCBI NO: 9294274 NR Description: mitochondrial protein-like [Arabidopsis thaliana]
  misc_feature (4)..(486): Homolog of NCBI NO: 15233040 NR Description: AAA-type ATPase family [Arabidopsis thaliana]
  misc_feature (10)..(479): Homolog of NCBI NO: 15233039 NR Description: AAA-type ATPase family [Arabidopsis thaliana]
  misc_feature (192)..(475): Homolog of NCBI NO: 29150369 NR Description: putative AAA-type ATPase [Oryza sativa (japonica

SEQ ID NO: 106106 - protein, 498 aa, Arabidopsis thaliana; identical to SEQ ID NO: 21169
  peptide (1)..(498): Ceres Seq. ID no. 13618756
  misc_feature (240)..(433): Pfam Name: ATPase family associated with various cellular Pfam Description: ATPase family associated with various cellular
  misc_feature (1)..(498): Homolog of NCBI NO: 15233037 NR Description: AAA-type ATPase family [Arabidopsis thaliana]
  misc_feature (1)..(497): Homolog of NCBI NO: 15242536 NR Description: AAA-type ATPase family [Arabidopsis thaliana]
  misc_feature (1)..(497): Homolog of NCBI NO: 15233010 NR Description: expressed protein [Arabidopsis thaliana]
  misc_feature (3)..(496): Homolog of NCBI NO: 15233016 NR Description: AAA-type ATPase family [Arabidopsis thaliana]
  misc_feature (1)..(493): Homolog of NCBI NO: 9294102 NR Description: contains similarity to AAA-type
  misc_feature (13)..(493): Homolog of NCBI NO: 15233012 NR Description: AAA-type ATPase family [Arabidopsis thaliana]
  misc_feature (1)..(484): Homolog of NCBI NO: 9294274 NR Description: mitochondrial protein-like [Arabidopsis thaliana]
  misc_feature (2)..(484): Homolog of NCBI NO: 15233040 NR Description: AAA-type ATPase family [Arabidopsis thaliana]
  misc_feature (8)..(477): Homolog of NCBI NO: 15233039 NR Description: AAA-type ATPase family [Arabidopsis thaliana]
  misc_feature (190)..(473): Homolog of NCBI NO: 29150369 NR Description: putative AAA-type ATPase [Oryza sativa (japonica

SEQ ID NO: 106107 - protein, 497 aa, Arabidopsis thaliana; identical to SEQ ID NO: 21170
  peptide (1)..(497): Ceres Seq. ID no. 13618757
  misc_feature (239)..(432): Pfam Name: ATPase family associated with various cellular Pfam Description: ATPase family associated with various cellular
  misc_feature (1)..(497): Homolog of NCBI NO: 15233037 NR Description: AAA-type ATPase family [Arabidopsis thaliana]
  misc_feature (1)..(496): Homolog of NCBI NO: 15242536 NR Description: AAA-type ATPase family [Arabidopsis thaliana]
  misc_feature (1)..(496): Homolog of NCBI NO: 15233010 NR Description: expressed protein [Arabidopsis thaliana]
  misc_feature (2)..(495): Homolog of NCBI NO: 15233016 NR Description: AAA-type ATPase family [Arabidopsis thaliana]
  misc_feature (1)..(492): Homolog of NCBI NO: 9294102 NR Description: contains similarity to AAA-type
  misc_feature (12)..(492): Homolog of NCBI NO: 15233012 NR Description: AAA-type ATPase family [Arabidopsis thaliana]
  misc_feature (1)..(483): Homolog of NCBI NO: 9294274 NR Description: mitochondrial protein-like [Arabidopsis thaliana]
  misc_feature (1)..(483): Homolog of NCBI NO: 15233040 NR Description: AAA-type ATPase family [Arabidopsis thaliana]
  misc_feature (7)..(476): Homolog of NCBI NO: 15233039 NR Description: AAA-type ATPase family [Arabidopsis thaliana]
  misc_feature (189)..(472): Homolog of NCBI NO: 29150369 NR Description: putative AAA-type ATPase [Oryza sativa (japonica

SEQ ID NO: 106108 - DNA, 950 bp, Arabidopsis thaliana
  misc_feature (1)..(950): Ceres Seq. ID no. 13618779
  misc_feature: MA Experiment ID: 108434 Result: Down-regulated in Transcription
  misc_feature: MA Experiment 108434 PARAMETER Experiment Name: At_Root_Tips_cDNA_P Parameter: Tissue Value: Root Tips
  misc_feature: MA Experiment ID: 108577 Result: Down-regulated in Transcription
  misc_feature: MA Experiment 108577 PARAMETER Experiment Name: At_42deg_Heat_cDNA_P Parameter: Temperature (deg C) Value: 42 vs. 22
  misc_feature: MA Experiment 108577 PARAMETER Experiment Name: At_42deg_Heat_cDNA_P Parameter: Timepoint (hr) Value: 6
  misc_feature: MA Experiment 108577 PARAMETER Experiment Name: At_42deg_Heat_cDNA_P Parameter: Tissue Value: Aerial
  misc_feature: MA Experiment ID: 108668 Result: Up-regulated in Transcription
  misc_feature: MA Experiment 108668 PARAMETER Experiment Name: At_2mM_SA_cDNA_P Parameter: Plant Line Value: WS
  misc_feature: MA Experiment 108668 PARAMETER Experiment Name: At_2mM_SA_cDNA_P Parameter: Timepoint (hr) Value: 6
  misc_feature: MA Experiment 108668 PARAMETER Experiment Name: At_2mM_SA_cDNA_P Parameter: Treatment Value: 2mM SA vs. No Treatment
  misc_feature: MA Experiment ID: 20000087 Result: Up-regulated in Transcription
  misc_feature: MA Experiment 20000087 PARAMETER Experiment Name: At_100uM_ABA_Mutants_cDNA_P Parameter: Plant Line Value: WS
  misc_feature: MA Experiment 20000087 PARAMETER Experiment Name: At_100uM_ABA_Mutants_cDNA_P Parameter: Timepoint (hr) Value: 6
  misc_feature: MA Experiment 20000087 PARAMETER Experiment Name: At_100uM_ABA_Mutants_cDNA_P Parameter: Tissue Value: Aerial
  misc_feature: MA Experiment 20000087 PARAMETER Experiment Name: At_100uM_ABA_Mutants_cDNA_P Parameter: Treatment Value: 100uM ABA vs. No Treatment
  misc_feature: MA Experiment ID: 20000111 Result: Down-regulated in Transcription
  misc_feature: MA Experiment 20000111 PARAMETER Experiment Name: At_42deg_Heat_cDNA_P Parameter: Temperature (deg C) Value: 42 vs. 22
  misc_feature: MA Experiment 20000111 PARAMETER Experiment Name: At_42deg_Heat_cDNA_P Parameter: Timepoint (hr) Value: 6
  misc_feature: MA Experiment 20000111 PARAMETER Experiment Name: At_42deg_Heat_cDNA_P Parameter: Tissue Value: Aerial
  misc_feature: MA Experiment ID: 20000113 Result: Down-regulated in Transcription
  misc_feature: MA Experiment 20000113 PARAMETER Experiment Name: At_42deg_Heat_cDNA_P Parameter: Temperature (deg C) Value: 42 vs. 22
  misc_feature: MA Experiment 20000113 PARAMETER Experiment Name: At_42deg_Heat_cDNA_P Parameter: Timepoint (hr) Value: 8
  misc_feature: MA Experiment 20000113 PARAMETER Experiment Name: At_42deg_Heat_cDNA_P Parameter: Tissue Value: Aerial
  misc_feature: MA Experiment ID: 20000173 Result: Down-regulated in Transcription
  misc_feature: MA Experiment 20000173 PARAMETER Experiment Name: At_42deg_Heat_P Parameter: Age (day) Value: 14
  misc_feature: MA Experiment 20000173 PARAMETER Experiment Name: At_42deg_Heat_P Parameter: Organism Value: A. thaliana
  misc_feature: MA Experiment 20000173 PARAMETER Experiment Name: At_42deg_Heat_P Parameter: Plant Line Value: WS
  misc_feature: MA Experiment 20000173 PARAMETER Experiment Name: At_42deg_Heat_P Parameter: Temperature (deg C) Value: 42 vs. 22
  misc_feature: MA Experiment 20000173 PARAMETER Experiment Name: At_42deg_Heat_P Parameter: Timepoint (hr) Value: 6
  misc_feature: MA Experiment 20000173 PARAMETER Experiment Name: At_42deg_Heat_P Parameter: Tissue Value: Aerial
  misc_feature: MA Experiment ID: 20000184 Result: Down-regulated in Transcription
  misc_feature: MA Experiment 20000184 PARAMETER Experiment Name: At_Shoots__P Parameter: Age (day) Value: 7
  misc_feature: MA Experiment 20000184 PARAMETER Experiment Name: At_Shoots__P Parameter: Tissue Value: Shoots vs. Whole Plant
  misc_feature: MA Experiment ID: 20000438 Result: Down-regulated in Transcription
  misc_feature: MA Experiment 20000438 PARAMETER Experiment Name: At_Shoots__P Parameter: Age (day) Value: 14
  misc_feature: MA Experiment 20000438 PARAMETER Experiment Name: At_Shoots__P Parameter: Tissue Value: Shoots vs. Whole Plant
  misc_feature: MA Experiment ID: 20000495 Result: Down-regulated in Transcription
  misc_feature: MA Experiment 20000495 PARAMETER Experiment Name: At_Guard_Cells_P Parameter: Harvest Date Value: 8/2/2002
  misc_feature: MA Experiment 20000495 PARAMETER Experiment Name: At_Guard_Cells_P Parameter: Organism Value: A. thaliana
  misc_feature: MA Experiment 20000495 PARAMETER Experiment Name: At_Guard_Cells_P Parameter: Tissue Value: Guard Cells vs. Leaves
aatcttcatttcttgagagatccaaaaaaagaatcagaaagaagaagaagaagactccaaaaacgatgccgtattacaccaacgacgacaatgacgtcgacgatttcaccgaatacgatccgatgccttatagtggaggctacgacatcaccgtgacatacggccgttcaattccaccgtccgacgagacttgttaccctctctcctctctctccggcgacgcctttgagtatcagcgacctaatttctcttctaaccacgattcttctgcttatgacgaccaagctcttaaaaccgagtacagtagctatgcacgacccggacccgttggatctggatctgattttggccggaaacctaattctggatatggagggagaacggaggttgagtatggccggaaaactgaatcggagcatggatctggctatggtggaagaattgagagcgattacgtgaagcctagctatggcggtcacgaggatgatggtgacgatggtcacaaaaaacatagtggtaaggattatgatgatggagatgagaagagtaagaagaaggagaaggagaagaagaaggataagaagaaagatggtaataactctgaagatgatgagtttaagaagaagaagaagaaagagcagtacaaggagcatcatgatgatgatgattatgatgagaagaagaagaagaagaaagactataatgatgatgatgagaagaagaagaagaagcattataatgatgatgatgatgagaagaagaagaagcataattacaatgatgatgatgatgagaagaagaagaagaaggagtatcatgatgatgaggataagaagaagaagaagcactatgataatgatgatgatgagaagaagaagaagaaggatcatcgtgatgatgatgatgagaagaagaagaagaaggataagcaccacaagggacatgactaa

SEQ ID NO: 106109 - protein, 315 aa, Arabidopsis thaliana
  peptide (1)..(315): Ceres Seq. ID no. 13618780
  misc_feature (176)..(310): Pfam Name: Chromadorea ALT protein Pfam Description: Chromadorea ALT protein
  misc_feature (22)..(315): Homolog of NCBI NO: 15228587 NR Description: glycine-rich protein [Arabidopsis thaliana]
  misc_feature (22)..(263): Homolog of NCBI NO: 21928162 NR Description: AT3g29075/MXE2_1 [Arabidopsis thaliana]
  misc_feature (22)..(289): Homolog of NCBI NO: 9758332 NR Description: gene_id:MIJ24.6~ref|NP_013897.1~similar to protein [Arabidopsis thaliana] >gi|16604364|gb|AAL24188.1| [Arabidopsis thaliana] >gi|23308191|gb|AAN18065.1|
  misc_feature (22)..(289): Homolog of NCBI NO: 24417262 NR Description: unknown [Arabidopsis thaliana]
  misc_feature (159)..(312): Homolog of NCBI NO: 17558378 NR Description: Putative protein, with 4 coiled coil-4 domains, specific [Caenorhabditis elegans] >gi|7496941|pir||T34137
  misc_feature (160)..(315): Homolog of NCBI NO: 17558378 NR Description: Putative protein, with 4 coiled coil-4 domains, specific [Caenorhabditis elegans] >gi|7496941|pir||T34137
  misc_feature (111)..(315): Homolog of NCBI NO: 39594465 NR Description: Hypothetical protein CBG19125 [Caenorhabditis
  misc_feature (160)..(309): Homolog of NCBI NO: 39594465 NR Description: Hypothetical protein CBG19125 [Caenorhabditis
  misc_feature (131)..(315): Homolog of NCBI NO: 17558378 NR Description: Putative protein, with 4 coiled coil-4 domains, specific [Caenorhabditis elegans] >gi|7496941|pir||T34137
  misc_feature (100)..(315): Homolog of NCBI NO: 17558378 NR Description: Putative protein, with 4 coiled coil-4 domains, specific [Caenorhabditis elegans] >gi|7496941|pir||T34137
SSFLERSKKRIRKKKKKTPKTMPYYTNDDNDVDDFTEYDPMPYSGGYDITVTYGRSIPPSDETCYPLSSLSGDAFEYQRPNFSSNHDSSAYDDQALKTEYSSYARPGPVGSGSDFGRKPNSGYGGRTEVEYGRKTESEHGSGYGGRIESDYVKPSYGGHEDDGDDGHKKHSGKDYDDGDEKSKKKEKEKKKDKKKDGNNSEDDEFKKKKKKEQYKEHHDDDDYDEKKKKKKDYNDDDEKKKKKHYNDDDDEKKKKHNYNDDDDEKKKKKEYHDDEDKKKKKHYDNDDDEKKKKKDHRDDDDEKKKKKDKHHKGHD

SEQ ID NO: 106110 - protein, 294 aa, Arabidopsis thaliana; identical to SEQ ID NO: 84942
  peptide (1)..(294): Ceres Seq. ID no. 13618781
  misc_feature (155)..(289): Pfam Name: Chromadorea ALT protein Pfam Description: Chromadorea ALT protein
  misc_feature (1)..(294): Homolog of NCBI NO: 15228587 NR Description: glycine-rich protein [Arabidopsis thaliana]
  misc_feature (1)..(242): Homolog of NCBI NO: 21928162 NR Description: AT3g29075/MXE2_1 [Arabidopsis thaliana]
  misc_feature (1)..(268): Homolog of NCBI NO: 9758332 NR Description: gene_id:MIJ24.6~ref|NP_013897.1~similar to protein [Arabidopsis thaliana] >gi|16604364|gb|AAL24188.1| [Arabidopsis thaliana] >gi|23308191|gb|AAN18065.1|
  misc_feature (1)..(268): Homolog of NCBI NO: 24417262 NR Description: unknown [Arabidopsis thaliana]
  misc_feature (138)..(291): Homolog of NCBI NO: 17558378 NR Description: Putative protein, with 4 coiled coil-4 domains, specific [Caenorhabditis elegans] >gi|7496941|pir||T34137
  misc_feature (139)..(294): Homolog of NCBI NO: 17558378 NR Description: Putative protein, with 4 coiled coil-4 domains, specific [Caenorhabditis elegans] >gi|7496941|pir||T34137
  misc_feature (90)..(294): Homolog of NCBI NO: 39594465 NR Description: Hypothetical protein CBG19125 [Caenorhabditis
  misc_feature (139)..(288): Homolog of NCBI NO: 39594465 NR Description: Hypothetical protein CBG19125 [Caenorhabditis
  misc_feature (110)..(294): Homolog of NCBI NO: 17558378 NR Description: Putative protein, with 4 coiled coil-4 domains, specific [Caenorhabditis elegans] >gi|7496941|pir||T34137
  misc_feature (79)..(294): Homolog of NCBI NO: 17558378 NR Description: Putative protein, with 4 coiled coil-4 domains, specific [Caenorhabditis elegans] >gi|7496941|pir||T34137

SEQ ID NO: 106111 - protein, 275 aa, Arabidopsis thaliana; identical to SEQ ID NO: 84943
  peptide (1)..(275): Ceres Seq. ID no. 13618782
  misc_feature (136)..(270): Pfam Name: Chromadorea ALT protein Pfam Description: Chromadorea ALT protein
  misc_feature (1)..(275): Homolog of NCBI NO: 15228587 NR Description: glycine-rich protein [Arabidopsis thaliana]
  misc_feature (1)..(223): Homolog of NCBI NO: 21928162 NR Description: AT3g29075/MXE2_1 [Arabidopsis thaliana]
  misc_feature (1)..(249): Homolog of NCBI NO: 9758332 NR Description: gene_id:MIJ24.6~ref|NP_013897.1~similar to protein [Arabidopsis thaliana] >gi|16604364|gb|AAL24188.1| [Arabidopsis thaliana] >gi|23308191|gb|AAN18065.1|
  misc_feature (1)..(249): Homolog of NCBI NO: 24417262 NR Description: unknown [Arabidopsis thaliana]
  misc_feature (119)..(272): Homolog of NCBI NO: 17558378 NR Description: Putative protein, with 4 coiled coil-4 domains, specific [Caenorhabditis elegans] >gi|7496941|pir||T34137
  misc_feature (120)..(275): Homolog of NCBI NO: 17558378 NR Description: Putative protein, with 4 coiled coil-4 domains, specific [Caenorhabditis elegans] >gi|7496941|pir||T34137
  misc_feature (71)..(275): Homolog of NCBI NO: 39594465 NR Description: Hypothetical protein CBG19125 [Caenorhabditis
  misc_feature (120)..(269): Homolog of NCBI NO: 39594465 NR Description: Hypothetical protein CBG19125 [Caenorhabditis
  misc_feature (91)..(275): Homolog of NCBI NO: 17558378 NR Description: Putative protein, with 4 coiled coil-4 domains, specific [Caenorhabditis elegans] >gi|7496941|pir||T34137
  misc_feature (60)..(275): Homolog of NCBI NO: 17558378 NR Description: Putative protein, with 4 coiled coil-4 domains, specific [Caenorhabditis elegans] >gi|7496941|pir||T34137

SEQ ID NO: 106112 - DNA, 1002 bp, Arabidopsis thaliana
  misc_feature (1)..(1002): Ceres Seq. ID no. 13618790
  misc_feature: MA Experiment ID: 20000180 Result: Up-regulated in Transcription
  misc_feature: MA Experiment 20000180 PARAMETER Experiment Name: At_Germinating_Seeds_P Parameter: Age (hr) Value: 24 vs. 0
  misc_feature: MA Experiment 20000180 PARAMETER Experiment Name: At_Germinating_Seeds_P Parameter: Tissue Value: Germinating Seeds
  misc_feature: MA Experiment ID: 20000182 Result: Down-regulated in Transcription
  misc_feature: MA Experiment 20000182 PARAMETER Experiment Name: At_2mM_SA_P Parameter: Age (day) Value: 14
  misc_feature: MA Experiment 20000182 PARAMETER Experiment Name: At_2mM_SA_P Parameter: Organism Value: A. thaliana
  misc_feature: MA Experiment 20000182 PARAMETER Experiment Name: At_2mM_SA_P Parameter: Plant Line Value: WS
  misc_feature: MA Experiment 20000182 PARAMETER Experiment Name: At_2mM_SA_P Parameter: Timepoint (hr) Value: 6
  misc_feature: MA Experiment 20000182 PARAMETER Experiment Name: At_2mM_SA_P Parameter: Tissue Value: Aerial
  misc_feature: MA Experiment 20000182 PARAMETER Experiment Name: At_2mM_SA_P Parameter: Treatment Value: 2mM SA vs. No Treatment
  misc_feature: MA Experiment ID: 20000184 Result: Up-regulated in Transcription
  misc_feature: MA Experiment 20000184 PARAMETER Experiment Name: At_Shoots__P Parameter: Age (day) Value: 7
  misc_feature: MA Experiment 20000184 PARAMETER Experiment Name: At_Shoots__P Parameter: Tissue Value: Shoots vs. Whole Plant
  misc_feature: MA Experiment ID: 20000185 Result: Up-regulated in Transcription
  misc_feature: MA Experiment 20000185 PARAMETER Experiment Name: At_Roots__P Parameter: Age (day) Value: 7 vs. 21
  misc_feature: MA Experiment 20000185 PARAMETER Experiment Name: At_Roots__P Parameter: Organism Value: A. thaliana
  misc_feature: MA Experiment 20000185 PARAMETER Experiment Name: At_Roots__P Parameter: Tissue Value: Roots vs. Whole Plant
  misc_feature: MA Experiment ID: 20000286 Result: Down-regulated in Transcription
  misc_feature: MA Experiment 20000286 PARAMETER Experiment Name: At_Open_Flower_P Parameter: Age (day) Value: 21
  misc_feature: MA Experiment 20000286 PARAMETER Experiment Name: At_Open_Flower_P Parameter: Plant Line Value: WS
  misc_feature: MA Experiment 20000286 PARAMETER Experiment Name: At_Open_Flower_P Parameter: Tissue Value: Half Open vs. Whole Plant
  misc_feature: MA Experiment ID: 20000439 Result: Up-regulated in Transcription
  misc_feature: MA Experiment 20000439 PARAMETER Experiment Name: At_Roots__P Parameter: Age (day) Value: 14 vs. 21
  misc_feature: MA Experiment 20000439 PARAMETER Experiment Name: At_Roots__P Parameter: Organism Value: A. thaliana
  misc_feature: MA Experiment 20000439 PARAMETER Experiment Name: At_Roots__P Parameter: Tissue Value: Roots vs. Whole Plant
  misc_feature: MA Experiment ID: 20000452 Result: Up-regulated in Transcription
  misc_feature: MA Experiment 20000452 PARAMETER Experiment Name: At_CS6879_Shoots-Roots_P Parameter: Age (day) Value: 14
  misc_feature: MA Experiment 20000452 PARAMETER Experiment Name: At_CS6879_Shoots-Roots_P Parameter: Organism Value: A. thaliana
  misc_feature: MA Experiment 20000452 PARAMETER Experiment Name: At_CS6879_Shoots-Roots_P Parameter: Plant Line Value: CS6879 vs. WS
  misc_feature: MA Experiment 20000452 PARAMETER Experiment Name: At_CS6879_Shoots-Roots_P Parameter: Tissue Value: Shoots
  misc_feature: MA Experiment ID: 20000453 Result: Up-regulated in Transcription
  misc_feature: MA Experiment 20000453 PARAMETER Experiment Name: At_100uM_ABA_P Parameter: Age (day) Value: 15
  misc_feature: MA Experiment 20000453 PARAMETER Experiment Name: At_100uM_ABA_P Parameter: Organism Value: A. thaliana
  misc_feature: MA Experiment 20000453 PARAMETER Experiment Name: At_100uM_ABA_P Parameter: Plant Line Value: WS
  misc_feature: MA Experiment 20000453 PARAMETER Experiment Name: At_100uM_ABA_P Parameter: Timepoint (hr) Value: 24
  misc_feature: MA Experiment 20000453 PARAMETER Experiment Name: At_100uM_ABA_P Parameter: Tissue Value: Aerial
  misc_feature: MA Experiment 20000453 PARAMETER Experiment Name: At_100uM_ABA_P Parameter: Treatment Value: 100uM ABA vs. No Treatment
  misc_feature: MA Experiment ID: 20000456 Result: Up-regulated in Transcription
  misc_feature: MA Experiment 20000456 PARAMETER Experiment Name: At_100uM_BA_P Parameter: Age (day) Value: 14
  misc_feature: MA Experiment 20000456 PARAMETER Experiment Name: At_100uM_BA_P Parameter: Organism Value: A. thaliana
  misc_feature: MA Experiment 20000456 PARAMETER Experiment Name: At_100uM_BA_P Parameter: Plant Line Value: WS
  misc_feature: MA Experiment 20000456 PARAMETER Experiment Name: At_100uM_BA_P Parameter: Timepoint (hr) Value: 6
  misc_feature: MA Experiment 20000456 PARAMETER Experiment Name: At_100uM_BA_P Parameter: Tissue Value: Aerial
  misc_feature: MA Experiment 20000456 PARAMETER Experiment Name: At_100uM_BA_P Parameter: Treatment Value: 100uM BA vs. No Treatment
  misc_feature: MA Experiment ID: 20000460 Result: Down-regulated in Transcription
  misc_feature: MA Experiment 20000460 PARAMETER Experiment Name: At_10percent_PEG_P Parameter: Age (day) Value: 12
  misc_feature: MA Experiment 20000460 PARAMETER Experiment Name: At_10percent_PEG_P Parameter: Organism Value: A. thaliana
  misc_feature: MA Experiment 20000460 PARAMETER Experiment Name: At_10percent_PEG_P Parameter: Plant Line Value: WS
  misc_feature: MA Experiment 20000460 PARAMETER Experiment Name: At_10percent_PEG_P Parameter: Timepoint (day) Value: 12
  misc_feature: MA Experiment 20000460 PARAMETER Experiment Name: At_10percent_PEG_P Parameter: Tissue Value: Whole Plant
  misc_feature: MA Experiment 20000460 PARAMETER Experiment Name: At_10percent_PEG_P Parameter: Treatment Value: 10percent PEG vs. No Treatment
  misc_feature: MA Experiment ID: 20000527 Result: Down-regulated in Transcription
  misc_feature: MA Experiment 20000527 PARAMETER Experiment Name: At_10percent_PEG_P Parameter: Age (day) Value: 20
  misc_feature: MA Experiment 20000527 PARAMETER Experiment Name: At_10percent_PEG_P Parameter: Organism Value: A. thaliana
  misc_feature: MA Experiment 20000527 PARAMETER Experiment Name: At_10percent_PEG_P Parameter: Plant Line Value: WS
  misc_feature: MA Experiment 20000527 PARAMETER Experiment Name: At_10percent_PEG_P Parameter: Timepoint (day) Value: 20
  misc_feature: MA Experiment 20000527 PARAMETER Experiment Name: At_10percent_PEG_P Parameter: Tissue Value: Whole Plant
  misc_feature: MA Experiment 20000527 PARAMETER Experiment Name: At_10percent_PEG_P Parameter: Treatment Value: 10percent PEG vs. No Treatment
  misc_feature: MA Experiment ID: 20000576 Result: Down-regulated in Transcription
  misc_feature: MA Experiment 20000576 PARAMETER Experiment Name: At_100uM_ABA_Mutants__P Parameter: Organism Value: A. thaliana
  misc_feature: MA Experiment 20000576 PARAMETER Experiment Name: At_100uM_ABA_Mutants__P Parameter: Plant Line Value: CS23
  misc_feature: MA Experiment 20000576 PARAMETER Experiment Name: At_100uM_ABA_Mutants__P Parameter: Timepoint (hr) Value: 6
  misc_feature: MA Experiment 20000576 PARAMETER Experiment Name: At_100uM_ABA_Mutants__P Parameter: Tissue Value: Whole Plant
  misc_feature: MA Experiment 20000576 PARAMETER Experiment Name: At_100uM_ABA_Mutants__P Parameter: Treatment Value: 1uM ABA vs. No Treatment
  misc_feature: MA Experiment ID: 20001905 Result: Up-regulated in Transcription
  misc_feature: MA Experiment 20001905 PARAMETER Experiment Name: At_Drought_Reproduction_P Parameter: Age (day) Value: 40
  misc_feature: MA Experiment 20001905 PARAMETER Experiment Name: At_Drought_Reproduction_P Parameter: Organism Value: A. thaliana
  misc_feature: MA Experiment 20001905 PARAMETER Experiment Name: At_Drought_Reproduction_P Parameter: Plant Line Value: WS
  misc_feature: MA Experiment 20001905 PARAMETER Experiment Name: At_Drought_Reproduction_P Parameter: Timepoint (day) Value: 10
  misc_feature: MA Experiment 20001905 PARAMETER Experiment Name: At_Drought_Reproduction_P Parameter: Tissue Value: Rosettes
  misc_feature: MA Experiment 20001905 PARAMETER Experiment Name: At_Drought_Reproduction_P Parameter: Treatment Value: Drought vs. No Drought
attcaatttttggtggtcttttcaaaagtggaaatacaacaaaacaatgtcgggacttagaagattggatggcaagatcgcaattataacaggcggagctagtgggattggagctgaagcggttaggttgttcacggaccatggagctaaagtggtcatcgtggacatacaagaagagcttggccaaaacctcgccgtttcgatagggctagacaaagcaagtttttaccgttgtaatgtaaccgacgagacggatgtcgagaacgccgttaagttcaccgttgaaaaacacggaaagcttgacgttctgtttagtaacgccggggtcttggaagcgtttggaagcgttcttgatttggatcttgaggcgtttgatcgaacgatggcggttaacgttcgcggtgcggctgcgtttatcaaacacgcggcacgttcgatggtggctagtggtactcgtggctccattgtatgtacgacgagtattgcggcagagataggtggtccgggacctcatagttacacggcttctaagcacgcgcttctcgggctgatccgatcagcgtgtgctggactggggcagtacggtattagagtcaacggtgttgcaccgtatggggttgccacggggatgactagcgcctacaatgaggaagcggtgaagatgcttgaagaatatggtgaagccctagggaatctcaaaggtgtggtgcttaaagctcgccacatcgcagaagcagctttgtttttggcttctgatgattcggtttatattagcggtcagaatctggtggttgatggtggttttagcgtcgttaagctcatgaccacgtgagaaacaactaaaaaatgagggcatagactctcttgacactttcattttatttcttgaataaaaattgaatttataagtactttcgatcattgtgttgtatgttaggctcttgagtttatataaaccttgagtttaatagtttactttttcttttagtttctcaattctat

SEQ ID NO: 106113 - protein, 276 aa, Arabidopsis thaliana
  peptide (1)..(276): Ceres Seq. ID no. 13618791
  misc_feature (1)..(276): Homolog of NCBI NO: 9293918 NR Description: alcohol dehydrogenase-like protein [Arabidopsis
  misc_feature (29)..(276): Homolog of NCBI NO: 22331405 NR Description: short-chain dehydrogenase/reductase family
  misc_feature (16)..(273): Homolog of NCBI NO: 15228656 NR Description: short-chain dehydrogenase/reductase family
  misc_feature (16)..(272): Homolog of NCBI NO: 15226503 NR Description: short-chain dehydrogenase/reductase family [Arabidopsis thaliana] >gi|7431088|pir||T02175 probable alcohol
  misc_feature (16)..(272): Homolog of NCBI NO: 15226500 NR Description: short-chain dehydrogenase/reductase family [Arabidopsis thaliana] >gi|7431089|pir||T02176 probable alcohol
  misc_feature (16)..(272): Homolog of NCBI NO: 18407273 NR Description: short-chain dehydrogenase/reductase family [Arabidopsis thaliana] >gi|13878113|gb|AAK44134.1|AF370319_1 alcohol dehydrogenase [Arabidopsis thaliana]
  misc_feature (21)..(272): Homolog of NCBI NO: 7431087 NR Description: probable alcohol dehydrogenase [imported] -
  misc_feature (16)..(272): Homolog of NCBI NO: 15983819 NR Description: 3-beta-hydroxysteroiddehydrogenase [Digitalis
  misc_feature (128)..(276): Homolog of NCBI NO: 28416591 NR Description: At3g29250 [Arabidopsis thaliana]
  misc_feature (16)..(273): Homolog of NCBI NO: 7981382 NR Description: putative alcohol dehydrogenase [Lycopersicon
FNFWWSFQKWKYNKTMSGLRRLDGKIAIITGGASGIGAEAVRLFTDHGAKVVIVDIQEELGQNLAVSIGLDKASFYRCNVTDETDVENAVKFTVEKHGKLDVLFSNAGVLEAFGSVLDLDLEAFDRTMAVNVRGAAAFIKHAARSMVASGTRGSIVCTTSIAAEIGGPGPHSYTASKHALLGLIRSACAGLGQYGIRVNGVAPYGVATGMTSAYNEEAVKMLEEYGEALGNLKGVVLKARHIAEAALFLASDDSVYISGQNLVVDGGFSVVKLMTT

SEQ ID NO: 106114 - protein, 261 aa, Arabidopsis thaliana
  peptide (1)..(261): Ceres Seq. ID no. 13618792
  misc_feature (1)..(261): Homolog of NCBI NO: 9293918 NR Description: alcohol dehydrogenase-like protein [Arabidopsis
  misc_feature (14)..(261): Homolog of NCBI NO: 22331405 NR Description: short-chain dehydrogenase/reductase family
  misc_feature (1)..(258): Homolog of NCBI NO: 15228656 NR Description: short-chain dehydrogenase/reductase family
  misc_feature (1)..(257): Homolog of NCBI NO: 15226503 NR Description: short-chain dehydrogenase/reductase family [Arabidopsis thaliana] >gi|7431088|pir||T02175 probable alcohol
  misc_feature (1)..(257): Homolog of NCBI NO: 15226500 NR Description: short-chain dehydrogenase/reductase family [Arabidopsis thaliana] >gi|7431089|pir||T02176 probable alcohol
  misc_feature (1)..(257): Homolog of NCBI NO: 18407273 NR Description: short-chain dehydrogenase/reductase family [Arabidopsis thaliana] >gi|13878113|gb|AAK44134.1|AF370319_1 alcohol dehydrogenase [Arabidopsis thaliana]
  misc_feature (6)..(257): Homolog of NCBI NO: 7431087 NR Description: probable alcohol dehydrogenase [imported] -
  misc_feature (1)..(257): Homolog of NCBI NO: 15983819 NR Description: 3-beta-hydroxysteroiddehydrogenase [Digitalis
  misc_feature (113)..(261): Homolog of NCBI NO: 28416591 NR Description: At3g29250 [Arabidopsis thaliana]
  misc_feature (1)..(258): Homolog of NCBI NO: 7981382 NR Description: putative alcohol dehydrogenase [Lycopersicon
MSGLRRLDGKIAIITGGASGIGAEAVRLFTDHGAKVVIVDIQEELGQNLAVSIGLDKASFYRCNVTDETDVENAVKFTVEKHGKLDVLFSNAGVLEAFGSVLDLDLEAFDRTMAVNVRGAAAFIKHAARSMVASGTRGSIVCTTSIAAEIGGPGPHSYTASKHALLGLIRSACAGLGQYGIRVNGVAPYGVATGMTSAYNEEAVKMLEEYGEALGNLKGVVLKARHIAEAALFLASDDSVYISGQNLVVDGGFSVVKLMTT

SEQ ID NO: 106115 - protein, 149 aa, Arabidopsis thaliana
  peptide (1)..(149): Ceres Seq. ID no. 13618793
  misc_feature (1)..(149): Homolog of NCBI NO: 9293918 NR Description: alcohol dehydrogenase-like protein [Arabidopsis
  misc_feature (1)..(149): Homolog of NCBI NO: 22331405 NR Description: short-chain dehydrogenase/reductase family
  misc_feature (1)..(146): Homolog of NCBI NO: 15228656 NR Description: short-chain dehydrogenase/reductase family
  misc_feature (1)..(145): Homolog of NCBI NO: 15226503 NR Description: short-chain dehydrogenase/reductase family [Arabidopsis thaliana] >gi|7431088|pir||T02175 probable alcohol
  misc_feature (1)..(145): Homolog of NCBI NO: 15226500 NR Description: short-chain dehydrogenase/reductase family [Arabidopsis thaliana] >gi|7431089|pir||T02176 probable alcohol
  misc_feature (1)..(145): Homolog of NCBI NO: 18407273 NR Description: short-chain dehydrogenase/reductase family [Arabidopsis thaliana] >gi|13878113|gb|AAK44134.1|AF370319_1 alcohol dehydrogenase [Arabidopsis thaliana]
  misc_feature (1)..(145): Homolog of NCBI NO: 7431087 NR Description: probable alcohol dehydrogenase [imported] -
  misc_feature (1)..(145): Homolog of NCBI NO: 15983819 NR Description: 3-beta-hydroxysteroiddehydrogenase [Digitalis
  misc_feature (1)..(149): Homolog of NCBI NO: 28416591 NR Description: At3g29250 [Arabidopsis thaliana]
  misc_feature (1)..(146): Homolog of NCBI NO: 7981382 NR Description: putative alcohol dehydrogenase [Lycopersicon
MAVNVRGAAAFIKHAARSMVASGTRGSIVCTTSIAAEIGGPGPHSYTASKHALLGLIRSACAGLGQYGIRVNGVAPYGVATGMTSAYNEEAVKMLEEYGEALGNLKGVVLKARHIAEAALFLASDDSVYISGQNLVVDGGFSVVKLMTT

SEQ ID NO: 106116 - DNA, 625 bp, Arabidopsis thaliana
  misc_feature (1)..(625): Ceres Seq. ID no. 13618794
  misc_feature: MA Experiment ID: 108434 Result: Up-regulated in Transcription
  misc_feature: MA Experiment 108434 PARAMETER Experiment Name: At_Root_Tips_cDNA_P Parameter: Tissue Value: Root Tips
  misc_feature: MA Experiment ID: 108463 Result: Down-regulated in Transcription
  misc_feature: MA Experiment 108463 PARAMETER Experiment Name: At_Germinating_Seeds_cDNA_P Parameter: Age (day) Value: 3 vs. 0
  misc_feature: MA Experiment 108463 PARAMETER Experiment Name: At_Germinating_Seeds_cDNA_P Parameter: Tissue Value: Germinating Seeds
  misc_feature: MA Experiment ID: 108464 Result: Down-regulated in Transcription
  misc_feature: MA Experiment 108464 PARAMETER Experiment Name: At_Germinating_Seeds_cDNA_P Parameter: Age (day) Value: 4 vs. 0
  misc_feature: MA Experiment 108464 PARAMETER Experiment Name: At_Germinating_Seeds_cDNA_P Parameter: Tissue Value: Germinating Seeds
  misc_feature: MA Experiment ID: 108594 Result: Up-regulated in Transcription
  misc_feature: MA Experiment 108594 PARAMETER Experiment Name: At_Ler-rhl_Root_cDNA_P Parameter: Plant Line Value: null
  misc_feature: MA Experiment ID: 20000227 Result: Up-regulated in Transcription
  misc_feature: MA Experiment 20000227 PARAMETER Experiment Name: At_Root-Tips-vs-Tops_P Parameter: Tissue Value: Root Tips vs. Root Tops
  misc_feature: MA Experiment ID: 20000234 Result: Up-regulated in Transcription
  misc_feature: MA Experiment 20000234 PARAMETER Experiment Name: At_Siliques_P Parameter: Age (day) Value: 21
  misc_feature: MA Experiment 20000234 PARAMETER Experiment Name: At_Siliques_P Parameter: Organism Value: A. thaliana
  misc_feature: MA Experiment 20000234 PARAMETER Experiment Name: At_Siliques_P Parameter: Plant Line Value: WS
  misc_feature: MA Experiment 20000234 PARAMETER Experiment Name: At_Siliques_P Parameter: Tissue Value: Less Than 5mm Siliques vs. Whole Plant
  misc_feature: MA Experiment ID: 20000264 Result: Up-regulated in Transcription
  misc_feature: MA Experiment 20000264 PARAMETER Experiment Name: At_Open_Flower_P Parameter: Age (day) Value: 21
  misc_feature: MA Experiment 20000264 PARAMETER Experiment Name: At_Open_Flower_P Parameter: Plant Line Value: WS
  misc_feature: MA Experiment 20000264 PARAMETER Experiment Name: At_Open_Flower_P Parameter: Tissue Value: Open Flower vs. Whole Plant
  misc_feature: MA Experiment ID: 20000265 Result: Up-regulated in Transcription
  misc_feature: MA Experiment 20000265 PARAMETER Experiment Name: At_Open_Flower_P Parameter: Age (day) Value: 21
  misc_feature: MA Experiment 20000265 PARAMETER Experiment Name: At_Open_Flower_P Parameter: Plant Line Value: WS
  misc_feature: MA Experiment 20000265 PARAMETER Experiment Name: At_Open_Flower_P Parameter: Tissue Value: Closed Flower vs. Whole Plant
atggatgaaggaagagaaggagagatagagaagaagaagaagaaagatgaagaaggagaagtgaaggaaggagtagcatcaatagctttgttaccatgtgggactatctctggtcatttcattcagatgcctagctctatctgttatggcctccatggcactgaactagcttgtgagactgagtgtagccgcggtgaggattatcggttgatcaaactcactatcatagactacaatagaaagaaggaacaaacagttgtagtggagtgcaaaggccatgatgctgctcgaattaatgatgtcgagcatgctcacgggtgggaggaagatgtgataggattagtcgaagaaaaacacgggaagaagaaagtatcggtttcgttcgagtgtgagacattgaaggcagatgaagcagcagaggaccatatcagacagtttatgcccaaattagctggacttgatgctgttattaacattggaccgatgaagatttccgggcttgattttgctgcggtggaagagggacacataaactaagacagcttaactctttctttttgtgtatacatcatatttgaatgctctttgagtctttgtttcatatcgtagaacacaattaacgctt

SEQ ID NO: 106117 - protein, 178 aa, Arabidopsis thaliana
  peptide (1)..(178): Ceres Seq. ID no. 13618795
  misc_feature (1)..(178): Homolog of NCBI NO: 15228659 NR Description: hypothetical protein [Arabidopsis thaliana]
  misc_feature (43)..(156): Homolog of NCBI NO: 11994768 NR Description: gene_id:MMF24.3~unknown protein [Arabidopsis
MDEGREGEIEKKKKKDEEGEVKEGVASIALLPCGTISGHFIQMPSSICYGLHGTELACETECSRGEDYRLIKLTIIDYNRKKEQTVVVECKGHDAARINDVEHAHGWEEDVIGLVEEKHGKKKVSVSFECETLKADEAAEDHIRQFMPKLAGLDAVINIGPMKISGLDFAAVEEGHIN

SEQ ID NO: 106118 - protein, 136 aa, Arabidopsis thaliana
  peptide (1)..(136): Ceres Seq. ID no. 13618796
  misc_feature (1)..(136): Homolog of NCBI NO: 15228659 NR Description: hypothetical protein [Arabidopsis thaliana]
  misc_feature (1)..(114): Homolog of NCBI NO: 11994768 NR Description: gene_id:MMF24.3~unknown protein [Arabidopsis
MPSSICYGLHGTELACETECSRGEDYRLIKLTIIDYNRKKEQTVVVECKGHDAARINDVEHAHGWEEDVIGLVEEKHGKKKVSVSFECETLKADEAAEDHIRQFMPKLAGLDAVINIGPMKISGLDFAAVEEGHIN

SEQ ID NO: 106119 - DNA, 1611 bp, Arabidopsis thaliana
  misc_feature (1)..(1611): Ceres Seq. ID no. 13618800
  misc_feature: MA Experiment ID: 108434 Result: Down-regulated in Transcription
  misc_feature: MA Experiment 108434 PARAMETER Experiment Name: At_Root_Tips_cDNA_P Parameter: Tissue Value: Root Tips
  misc_feature: MA Experiment ID: 108463 Result: Up-regulated in Transcription
  misc_feature: MA Experiment 108463 PARAMETER Experiment Name: At_Germinating_Seeds_cDNA_P Parameter: Age (day) Value: 3 vs. 0
  misc_feature: MA Experiment 108463 PARAMETER Experiment Name: At_Germinating_Seeds_cDNA_P Parameter: Tissue Value: Germinating Seeds
  misc_feature: MA Experiment ID: 108464 Result: Up-regulated in Transcription
  misc_feature: MA Experiment 108464 PARAMETER Experiment Name: At_Germinating_Seeds_cDNA_P Parameter: Age (day) Value: 4 vs. 0
  misc_feature: MA Experiment 108464 PARAMETER Experiment Name: At_Germinating_Seeds_cDNA_P Parameter: Tissue Value: Germinating Seeds
  misc_feature: MA Experiment ID: 108577 Result: Down-regulated in Transcription
  misc_feature: MA Experiment 108577 PARAMETER Experiment Name: At_42deg_Heat_cDNA_P Parameter: Temperature (deg C) Value: 42 vs. 22
  misc_feature: MA Experiment 108577 PARAMETER Experiment Name: At_42deg_Heat_cDNA_P Parameter: Timepoint (hr) Value: 6
  misc_feature: MA Experiment 108577 PARAMETER Experiment Name: At_42deg_Heat_cDNA_P Parameter: Tissue Value: Aerial
  misc_feature: MA Experiment ID: 20000030 Result: Up-regulated in Transcription
  misc_feature: MA Experiment 20000030 PARAMETER Experiment Name: At_CS6630_Roots_cDNA_P Parameter: Plant Line Value: CS6630 vs. WS
  misc_feature: MA Experiment 20000030 PARAMETER Experiment Name: At_CS6630_Roots_cDNA_P Parameter: Tissue Value: Roots
  misc_feature: MA Experiment ID: 20000069 Result: Up-regulated in Transcription
  misc_feature: MA Experiment 20000069 PARAMETER Experiment Name: At_100uM_ABA_Mutants_cDNA_P Parameter: Plant Line Value: CS23
  misc_feature: MA Experiment 20000069 PARAMETER Experiment Name: At_100uM_ABA_Mutants_cDNA_P Parameter: Timepoint (hr) Value: 6
  misc_feature: MA Experiment 20000069 PARAMETER Experiment Name: At_100uM_ABA_Mutants_cDNA_P Parameter: Tissue Value: Aerial
  misc_feature: MA Experiment 20000069 PARAMETER Experiment Name: At_100uM_ABA_Mutants_cDNA_P Parameter: Treatment Value: 100uM ABA vs. No Treatment
  misc_feature: MA Experiment ID: 20000071 Result: Up-regulated in Transcription
  misc_feature: MA Experiment 20000071 PARAMETER Experiment Name: At_100uM_ABA_Mutants_cDNA_P Parameter: Plant Line Value: CS8104
  misc_feature: MA Experiment 20000071 PARAMETER Experiment Name: At_100uM_ABA_Mutants_cDNA_P Parameter: Timepoint (hr) Value: 6
  misc_feature: MA Experiment 20000071 PARAMETER Experiment Name: At_100uM_ABA_Mutants_cDNA_P Parameter: Tissue Value: Aerial
  misc_feature: MA Experiment 20000071 PARAMETER Experiment Name: At_100uM_ABA_Mutants_cDNA_P Parameter: Treatment Value: 100uM ABA vs. No Treatment
  misc_feature: MA Experiment ID: 20000072 Result: Up-regulated in Transcription
  misc_feature: MA Experiment 20000072 PARAMETER Experiment Name: At_100uM_ABA_Mutants_cDNA_P Parameter: Plant Line Value: CS8105
  misc_feature: MA Experiment 20000072 PARAMETER Experiment Name: At_100uM_ABA_Mutants_cDNA_P Parameter: Timepoint (hr) Value: 6
  misc_feature: MA Experiment 20000072 PARAMETER Experiment Name: At_100uM_ABA_Mutants_cDNA_P Parameter: Tissue Value: Aerial
  misc_feature: MA Experiment 20000072 PARAMETER Experiment Name: At_100uM_ABA_Mutants_cDNA_P Parameter: Treatment Value: 100uM ABA vs. No Treatment
  misc_feature: MA Experiment ID: 20000111 Result: Down-regulated in Transcription
  misc_feature: MA Experiment 20000111 PARAMETER Experiment Name: At_42deg_Heat_cDNA_P Parameter: Temperature (deg C) Value: 42 vs. 22
  misc_feature: MA Experiment 20000111 PARAMETER Experiment Name: At_42deg_Heat_cDNA_P Parameter: Timepoint (hr) Value: 6
  misc_feature: MA Experiment 20000111 PARAMETER Experiment Name: At_42deg_Heat_cDNA_P Parameter: Tissue Value: Aerial
  misc_feature: MA Experiment ID: 20000171 Result: Down-regulated in Transcription
  misc_feature: MA Experiment 20000171 PARAMETER Experiment Name: At_42deg_Heat_P Parameter: Age (day) Value: 14
  misc_feature: MA Experiment 20000171 PARAMETER Experiment Name: At_42deg_Heat_P Parameter: Organism Value: A. thaliana
  misc_feature: MA Experiment 20000171 PARAMETER Experiment Name: At_42deg_Heat_P Parameter: Plant Line Value: WS
  misc_feature: MA Experiment 20000171 PARAMETER Experiment Name: At_42deg_Heat_P Parameter: Temperature (deg C) Value: 42 vs. 22
  misc_feature: MA Experiment 20000171 PARAMETER Experiment Name: At_42deg_Heat_P Parameter: Timepoint (hr) Value: 1
  misc_feature: MA Experiment 20000171 PARAMETER Experiment Name: At_42deg_Heat_P Parameter: Tissue Value: Aerial
  misc_feature: MA Experiment ID: 20000173 Result: Down-regulated in Transcription
  misc_feature: MA Experiment 20000173 PARAMETER Experiment Name: At_42deg_Heat_P Parameter: Age (day) Value: 14
  misc_feature: MA Experiment 20000173 PARAMETER Experiment Name: At_42deg_Heat_P Parameter: Organism Value: A. thaliana
  misc_feature: MA Experiment 20000173 PARAMETER Experiment Name: At_42deg_Heat_P Parameter: Plant Line Value: WS
  misc_feature: MA Experiment 20000173 PARAMETER Experiment Name: At_42deg_Heat_P Parameter: Temperature (deg C) Value: 42 vs. 22
  misc_feature: MA Experiment 20000173 PARAMETER Experiment Name: At_42deg_Heat_P Parameter: Timepoint (hr) Value: 6
  misc_feature: MA Experiment 20000173 PARAMETER Experiment Name: At_42deg_Heat_P Parameter: Tissue Value: Aerial
  misc_feature: MA Experiment ID: 20000180 Result: Up-regulated in Transcription
  misc_feature: MA Experiment 20000180 PARAMETER Experiment Name: At_Germinating_Seeds_P Parameter: Age (hr) Value: 24 vs. 0
  misc_feature: MA Experiment 20000180 PARAMETER Experiment Name: At_Germinating_Seeds_P Parameter: Tissue Value: Germinating Seeds
  misc_feature: MA Experiment ID: 20000184 Result: Down-regulated in Transcription
  misc_feature: MA Experiment 20000184 PARAMETER Experiment Name: At_Shoots__P Parameter: Age (day) Value: 7
  misc_feature: MA Experiment 20000184 PARAMETER Experiment Name: At_Shoots__P Parameter: Tissue Value: Shoots vs. Whole Plant
  misc_feature: MA Experiment ID: 20000185 Result: Down-regulated in Transcription
  misc_feature: MA Experiment 20000185 PARAMETER Experiment Name: At_Roots__P Parameter: Age (day) Value: 7 vs. 21
  misc_feature: MA Experiment 20000185 PARAMETER Experiment Name: At_Roots__P Parameter: Organism Value: A. thaliana
  misc_feature: MA Experiment 20000185 PARAMETER Experiment Name: At_Roots__P Parameter: Tissue Value: Roots vs. Whole Plant
  misc_feature: MA Experiment ID: 20000234 Result: Down-regulated in Transcription
  misc_feature: MA Experiment 20000234 PARAMETER Experiment Name: At_Siliques_P Parameter: Age (day) Value: 21
  misc_feature: MA Experiment 20000234 PARAMETER Experiment Name: At_Siliques_P Parameter: Organism Value: A. thaliana
  misc_feature: MA Experiment 20000234 PARAMETER Experiment Name: At_Siliques_P Parameter: Plant Line Value: WS
  misc_feature: MA Experiment 20000234 PARAMETER Experiment Name: At_Siliques_P Parameter: Tissue Value: Less Than 5mm Siliques vs. Whole Plant
  misc_feature: MA Experiment ID: 20000235 Result: Down-regulated in Transcription
  misc_feature: MA Experiment 20000235 PARAMETER Experiment Name: At_Siliques_P Parameter: Age (day) Value: 21
  misc_feature: MA Experiment 20000235 PARAMETER Experiment Name: At_Siliques_P Parameter: Organism Value: A. thaliana
  misc_feature: MA Experiment 20000235 PARAMETER Experiment Name: At_Siliques_P Parameter: Plant Line Value: WS
  misc_feature: MA Experiment 20000235 PARAMETER Experiment Name: At_Siliques_P Parameter: Tissue Value: 5-10mm Siliques vs. Whole Plant
  misc_feature: MA Experiment ID: 20000265 Result: Down-regulated in Transcription
  misc_feature: MA Experiment 20000265 PARAMETER Experiment Name: At_Open_Flower_P Parameter: Age (day) Value: 21
  misc_feature: MA Experiment 20000265 PARAMETER Experiment Name: At_Open_Flower_P Parameter: Plant Line Value: WS
  misc_feature: MA Experiment 20000265 PARAMETER Experiment Name: At_Open_Flower_P Parameter: Tissue Value: Closed Flower vs. Whole Plant
  misc_feature: MA Experiment ID: 20000438 Result: Down-regulated in Transcription
  misc_feature: MA Experiment 20000438 PARAMETER Experiment Name: At_Shoots__P Parameter: Age (day) Value: 14
  misc_feature: MA Experiment 20000438 PARAMETER Experiment Name: At_Shoots__P Parameter: Tissue Value: Shoots vs. Whole Plant
  misc_feature: MA Experiment ID: 20000439 Result: Down-regulated in Transcription
  misc_feature: MA Experiment 20000439 PARAMETER Experiment Name: At_Roots__P Parameter: Age (day) Value: 14 vs. 21
  misc_feature: MA Experiment 20000439 PARAMETER Experiment Name: At_Roots__P Parameter: Organism Value: A. thaliana
  misc_feature: MA Experiment 20000439 PARAMETER Experiment Name: At_Roots__P Parameter: Tissue Value: Roots vs. Whole Plant
  misc_feature: MA Experiment ID: 20000455 Result: Up-regulated in Transcription
  misc_feature: MA Experiment 20000455 PARAMETER Experiment Name: At_100uM_ABA_P Parameter: Age (day) Value: 16
  misc_feature: MA Experiment 20000455 PARAMETER Experiment Name: At_100uM_ABA_P Parameter: Organism Value: A. thaliana
  misc_feature: MA Experiment 20000455 PARAMETER Experiment Name: At_100uM_ABA_P Parameter: Plant Line Value: WS
  misc_feature: MA Experiment 20000455 PARAMETER Experiment Name: At_100uM_ABA_P Parameter: Timepoint (hr) Value: 48
  misc_feature: MA Experiment 20000455 PARAMETER Experiment Name: At_100uM_ABA_P Parameter: Tissue Value: Aerial
  misc_feature: MA Experiment 20000455 PARAMETER Experiment Name: At_100uM_ABA_P Parameter: Treatment Value: 100uM ABA vs. No Treatment
  misc_feature: MA Experiment ID: 20000495 Result: Down-regulated in Transcription
  misc_feature: MA Experiment 20000495 PARAMETER Experiment Name: At_Guard_Cells_P Parameter: Harvest Date Value: 8/2/2002
  misc_feature: MA Experiment 20000495 PARAMETER Experiment Name: At_Guard_Cells_P Parameter: Organism Value: A. thaliana
  misc_feature: MA Experiment 20000495 PARAMETER Experiment Name: At_Guard_Cells_P Parameter: Tissue Value: Guard Cells vs. Leaves
  misc_feature: MA Experiment ID: 20000496 Result: Down-regulated in Transcription
  misc_feature: MA Experiment 20000496 PARAMETER Experiment Name: At_Guard_Cells_P Parameter: Harvest Date Value: 7/19/2002
  misc_feature: MA Experiment 20000496 PARAMETER Experiment Name: At_Guard_Cells_P Parameter: Organism Value: Canola
  misc_feature: MA Experiment 20000496 PARAMETER Experiment Name: At_Guard_Cells_P Parameter: Tissue Value: Guard Cells vs. Leaves
  misc_feature: MA Experiment ID: 20001248 Result: Down-regulated in Transcription
  misc_feature: MA Experiment 20001248 PARAMETER Experiment Name: At_Far-red-induction_P Parameter: Age (day) Value: 7
  misc_feature: MA Experiment 20001248 PARAMETER Experiment Name: At_Far-red-induction_P Parameter: Light Value: Far-red vs. White
  misc_feature: MA Experiment 20001248 PARAMETER Experiment Name: At_Far-red-induction_P Parameter: Organism Value: A. thaliana
  misc_feature: MA Experiment 20001248 PARAMETER Experiment Name: At_Far-red-induction_P Parameter: Plant Line Value: Columbia
  misc_feature: MA Experiment 20001248 PARAMETER Experiment Name: At_Far-red-induction_P Parameter: Timepoint (hr) Value: 4
  misc_feature: MA Experiment 20001248 PARAMETER Experiment Name: At_Far-red-induction_P Parameter: Tissue Value: Whole Plant
  misc_feature: MA Experiment ID: 20001451 Result: Down-regulated in Transcription
  misc_feature: MA Experiment 20001451 PARAMETER Experiment Name: At_Far-red-induction_P Parameter: Age (day) Value: 7
  misc_feature: MA Experiment 20001451 PARAMETER Experiment Name: At_Far-red-induction_P Parameter: Light Value: Far-red vs. White
  misc_feature: MA Experiment 20001451 PARAMETER Experiment Name: At_Far-red-induction_P Parameter: Organism Value: A. thaliana
  misc_feature: MA Experiment 20001451 PARAMETER Experiment Name: At_Far-red-induction_P Parameter: Plant Line Value: Columbia
  misc_feature: MA Experiment 20001451 PARAMETER Experiment Name: At_Far-red-induction_P Parameter: Timepoint (hr) Value: 24
  misc_feature: MA Experiment 20001451 PARAMETER Experiment Name: At_Far-red-induction_P Parameter: Tissue Value: Whole Plant
  misc_feature: MA Experiment ID: 20001560 Result: Down-regulated in Transcription
  misc_feature: MA Experiment 20001560 PARAMETER Experiment Name: At_Drought_Soil_Dry_P Parameter: Age (day) Value: 28
  misc_feature: MA Experiment 20001560 PARAMETER Experiment Name: At_Drought_Soil_Dry_P Parameter: Organism Value: A. thaliana
  misc_feature: MA Experiment 20001560 PARAMETER Experiment Name: At_Drought_Soil_Dry_P Parameter: Plant Line Value: WS
  misc_feature: MA Experiment 20001560 PARAMETER Experiment Name: At_Drought_Soil_Dry_P Parameter: Post Timepoint (hr) Value: None
  misc_feature: MA Experiment 20001560 PARAMETER Experiment Name: At_Drought_Soil_Dry_P Parameter: Post-Treatment Value: None
  misc_feature: MA Experiment 20001560 PARAMETER Experiment Name: At_Drought_Soil_Dry_P Parameter: Timepoint (day) Value: 14
  misc_feature: MA Experiment 20001560 PARAMETER Experiment Name: At_Drought_Soil_Dry_P Parameter: Treatment Value: Drought vs. No Drought
atcgataaccaaataaaaaatggcgatctctttcctctgtgtttttctcatcaccttcgtttcgttaatcttttttgccaagaaaatcaaacgatcaaaatggaatcttcctccaagccctcccaagtttccggtcatcgggaacttacatcagattggagaattgcctcacaggtcacttcaacatctcgccgaaagatacggacctgtgatgcttcttcactttgggtttgtccctataactgtggtctcatcgagagaagccgctgaagaagtgcttagaactcatgacctagactgttgcagcaggcctaagcttgtcgggacaaggttactctcgcgggattttaaagatatcggttttacgccatacggtaacgagtggaaggcgcggcgtaagtttgccctgcgtgagcttttctgtttgaaaaaggttcagtcctttaggcatatccgagaggaagaatgtaactttctggtcaagcaactgtcggaatctgcggttgatcgctctccggtcgatttgagcaaatcccttttctggctaaccgctagtatcctttttagagttgccttaggacagaattttcacgagagcgattttatcgataaagaaaagatcgaagagctcgtgttcgaagctgagactgccctagcaagtttcacttgttctgatttcttccctgttgccggacttggatggctcgttgattggttttccggacaacacaagagactcaacgatgttttttacaagctcgatgctctgtttcaacatgtcatagatgatcatttaaatcctggaagatcaaaagagcacgaagacatcatcgattcaatgttggatgtgattcataaacaaggagaggacagttccttagagctcacaatagatcatatcaaggggtttctcgcgaatatatttcttgcagggatagacacaggggccatcaccatgatatgggcagtgacggagctcgttaaaaacccgaaactgataaagaaagttcaaggcgatatccgagaacaacttggcagcaataaggagagaatcaccgaggaagatatcgagaaagttccttacttgaagatggtaatcaaagaaacattcaggttacacccagcagctcctcttatacttccaagggaaacaatggctcacatcaaagttcaagggtatgatattcctcccaagaggaggatcttggtcaatgtttcggcaataggaagagatcccaaactctggacaaacccgaaagagtttgaccctgagaggtttatggatagctttgttgattataggggacaacattacgagctcttaccatttgggtccggtcgaaggatatgtcccgggatgccaatggggattgctgccgtcgaattgggactcttgaacttactttacttcttcgattggaagttgcctgatgggatgacacataaagatatcgatactgaagaagctggtactcttacaatagtcaagaaagtacctctcaagctcgttccagttcgagttcagtgatcagaccaaactccaaaccttttgaataaatatatcatgcaaatcatgtaagcttctctgatgatgtatgaagtatatttttc

SEQ ID NO: 106120 - protein, 502 aa, Arabidopsis thaliana; identical to SEQ ID NO: 37033
  peptide (1)..(502): Ceres Seq. ID no. 13618801
  misc_feature (31)..(496): Pfam Name: Cytochrome P450 Pfam Description: Cytochrome P450
  misc_feature (1)..(502): Homolog of NCBI NO: 15231520 NR Description: cytochrome P450 71B19 [Arabidopsis thaliana] Cytochrome P450 71B19 >gi|11994436|dbj|BAB02438.1| cytochrome [Arabidopsis thaliana] >gi|26451925|dbj|BAC43055.1| putative
  misc_feature (1)..(502): Homolog of NCBI NO: 21554748 NR Description: cytochrome P450, putative [Arabidopsis thaliana]
  misc_feature (1)..(502): Homolog of NCBI NO: 15231522 NR Description: cytochrome P450 71B20 [Arabidopsis thaliana] Cytochrome P450 71B20 >gi|11994437|dbj|BAB02439.1| cytochrome [Arabidopsis thaliana] >gi|15810463|gb|AAL07119.1| putative
  misc_feature (1)..(502): Homolog of NCBI NO: 16226474 NR Description: AT3g26180/MTC11_8 [Arabidopsis thaliana]
  misc_feature (1)..(501): Homolog of NCBI NO: 15231517 NR Description: cytochrome p450 family [Arabidopsis thaliana] Cytochrome P450 71B17 >gi|11994434|dbj|BAB02436.1| cytochrome
  misc_feature (1)..(502): Homolog of NCBI NO: 15231516 NR Description: cytochrome P450 71B16 [Arabidopsis thaliana] Cytochrome P450 71B16 >gi|11994433|dbj|BAB02435.1| cytochrome
  misc_feature (34)..(252): Homolog of NCBI NO: 11994435 NR Description: cytochrome P450 [Arabidopsis thaliana]
  misc_feature (300)..(502): Homolog of NCBI NO: 11994435 NR Description: cytochrome P450 [Arabidopsis thaliana]
  misc_feature (1)..(498): Homolog of NCBI NO: 15231525 NR Description: cytochrome P450 71B22 [Arabidopsis thaliana] Cytochrome P450 71B22 >gi|11994439|dbj|BAB02441.1| cytochrome [Arabidopsis thaliana] >gi|13430718|gb|AAK25981.1|AF360271_1
  misc_feature (6)..(500): Homolog of NCBI NO: 15222174 NR Description: cytochrome P450 family [Arabidopsis thaliana]

SEQ ID NO: 106121 - protein, 438 aa, Arabidopsis thaliana; identical to SEQ ID NO: 37034
  peptide (1)..(438): Ceres Seq. ID no. 13618802
  misc_feature (1)..(432): Pfam Name: Cytochrome P450 Pfam Description: Cytochrome P450
  misc_feature (1)..(438): Homolog of NCBI NO: 15231520 NR Description: cytochrome P450 71B19 [Arabidopsis thaliana] Cytochrome P450 71B19 >gi|11994436|dbj|BAB02438.1| cytochrome [Arabidopsis thaliana] >gi|26451925|dbj|BAC43055.1| putative
  misc_feature (1)..(438): Homolog of NCBI NO: 21554748 NR Description: cytochrome P450, putative [Arabidopsis thaliana]
  misc_feature (1)..(438): Homolog of NCBI NO: 15231522 NR Description: cytochrome P450 71B20 [Arabidopsis thaliana] Cytochrome P450 71B20 >gi|11994437|dbj|BAB02439.1| cytochrome [Arabidopsis thaliana] >gi|15810463|gb|AAL07119.1| putative
  misc_feature (1)..(438): Homolog of NCBI NO: 16226474 NR Description: AT3g26180/MTC11_8 [Arabidopsis thaliana]
  misc_feature (1)..(437): Homolog of NCBI NO: 15231517 NR Description: cytochrome p450 family [Arabidopsis thaliana] Cytochrome P450 71B17 >gi|11994434|dbj|BAB02436.1| cytochrome
  misc_feature (1)..(438): Homolog of NCBI NO: 15231516 NR Description: cytochrome P450 71B16 [Arabidopsis thaliana] Cytochrome P450 71B16 >gi|11994433|dbj|BAB02435.1| cytochrome
  misc_feature (1)..(188): Homolog of NCBI NO: 11994435 NR Description: cytochrome P450 [Arabidopsis thaliana]
  misc_feature (236)..(438): Homolog of NCBI NO: 11994435 NR Description: cytochrome P450 [Arabidopsis thaliana]
  misc_feature (1)..(434): Homolog of NCBI NO: 15231525 NR Description: cytochrome P450 71B22 [Arabidopsis thaliana] Cytochrome P450 71B22 >gi|11994439|dbj|BAB02441.1| cytochrome [Arabidopsis thaliana] >gi|13430718|gb|AAK25981.1|AF360271_1
  misc_feature (1)..(436): Homolog of NCBI NO: 15222174 NR Description: cytochrome P450 family [Arabidopsis thaliana]

SEQ ID NO: 106122 - DNA, 1607 bp, Arabidopsis thaliana
  misc_feature (1)..(1607): Ceres Seq. ID no. 13618803
  misc_feature: MA Experiment ID: 108435 Result: Down-regulated in Transcription
  misc_feature: MA Experiment 108435 PARAMETER Experiment Name: At_stm_Mutants_cDNA_P Parameter: Plant Line Value: wt Landsburg vs stm
  misc_feature: MA Experiment 108435 PARAMETER Experiment Name: At_stm_Mutants_cDNA_P Parameter: Tissue Value: Shoot Apical Meristem Region
  misc_feature: MA Experiment ID: 108461 Result: Up-regulated in Transcription
  misc_feature: MA Experiment 108461 PARAMETER Experiment Name: At_Germinating_Seeds_cDNA_P Parameter: Age (day) Value: 1 vs. 0
  misc_feature: MA Experiment 108461 PARAMETER Experiment Name: At_Germinating_Seeds_cDNA_P Parameter: Tissue Value: Germinating Seeds
  misc_feature: MA Experiment ID: 108463 Result: Up-regulated in Transcription
  misc_feature: MA Experiment 108463 PARAMETER Experiment Name: At_Germinating_Seeds_cDNA_P Parameter: Age (day) Value: 3 vs. 0
  misc_feature: MA Experiment 108463 PARAMETER Experiment Name: At_Germinating_Seeds_cDNA_P Parameter: Tissue Value: Germinating Seeds
  misc_feature: MA Experiment ID: 108464 Result: Up-regulated in Transcription
  misc_feature: MA Experiment 108464 PARAMETER Experiment Name: At_Germinating_Seeds_cDNA_P Parameter: Age (day) Value: 4 vs. 0
  misc_feature: MA Experiment 108464 PARAMETER Experiment Name: At_Germinating_Seeds_cDNA_P Parameter: Tissue Value: Germinating Seeds
  misc_feature: MA Experiment ID: 108561 Result: Up-regulated in Transcription
  misc_feature: MA Experiment 108561 PARAMETER Experiment Name: At_100uM_ABA_cDNA_P Parameter: Timepoint (hr) Value: 6
  misc_feature: MA Experiment 108561 PARAMETER Experiment Name: At_100uM_ABA_cDNA_P Parameter: Tissue Value: Aerial
  misc_feature: MA Experiment 108561 PARAMETER Experiment Name: At_100uM_ABA_cDNA_P Parameter: Treatment Value: 100uM ABA vs. No Treatment
  misc_feature: MA Experiment ID: 108585 Result: Down-regulated in Transcription
  misc_feature: MA Experiment 108585 PARAMETER Experiment Name: At_5mM_NaNP_cDNA_P Parameter: Timepoint (hr) Value: 6
  misc_feature: MA Experiment 108585 PARAMETER Experiment Name: At_5mM_NaNP_cDNA_P Parameter: Tissue Value: Aerial
  misc_feature: MA Experiment 108585 PARAMETER Experiment Name: At_5mM_NaNP_cDNA_P Parameter: Treatment Value: null
  misc_feature: MA Experiment ID: 108605 Result: Up-regulated in Transcription
  misc_feature: MA Experiment 108605 PARAMETER Experiment Name: At_100uM_ABA_cDNA_P Parameter: Timepoint (hr) Value: 6
  misc_feature: MA Experiment 108605 PARAMETER Experiment Name: At_100uM_ABA_cDNA_P Parameter: Tissue Value: Aerial
  misc_feature: MA Experiment 108605 PARAMETER Experiment Name: At_100uM_ABA_cDNA_P Parameter: Treatment Value: 100uM ABA vs. No Treatment
  misc_feature: MA Experiment ID: 108607 Result: Up-regulated in Transcription
  misc_feature: MA Experiment 108607 PARAMETER Experiment Name: At_100uM_ABA_cDNA_P Parameter: Timepoint (hr) Value: 4
  misc_feature: MA Experiment 108607 PARAMETER Experiment Name: At_100uM_ABA_cDNA_P Parameter: Tissue Value: Aerial
  misc_feature: MA Experiment 108607 PARAMETER Experiment Name: At_100uM_ABA_cDNA_P Parameter: Treatment Value: 100uM ABA vs. No Treatment
  misc_feature: MA Experiment ID: 20000030 Result: Up-regulated in Transcription
  misc_feature: MA Experiment 20000030 PARAMETER Experiment Name: At_CS6630_Roots_cDNA_P Parameter: Plant Line Value: CS6630 vs. WS
  misc_feature: MA Experiment 20000030 PARAMETER Experiment Name: At_CS6630_Roots_cDNA_P Parameter: Tissue Value: Roots
  misc_feature: MA Experiment ID: 20000068 Result: Up-regulated in Transcription
  misc_feature: MA Experiment ID: 20000069 Result: Up-regulated in Transcription
  misc_feature: MA Experiment 20000069 PARAMETER Experiment Name: At_100uM_ABA_Mutants_cDNA_P Parameter: Plant Line Value: CS23
  misc_feature: MA Experiment 20000069 PARAMETER Experiment Name: At_100uM_ABA_Mutants_cDNA_P Parameter: Timepoint (hr) Value: 6
  misc_feature: MA Experiment 20000069 PARAMETER Experiment Name: At_100uM_ABA_Mutants_cDNA_P Parameter: Tissue Value: Aerial
  misc_feature: MA Experiment 20000069 PARAMETER Experiment Name: At_100uM_ABA_Mutants_cDNA_P Parameter: Treatment Value: 100uM ABA vs. No Treatment
  misc_feature: MA Experiment ID: 20000070 Result: Up-regulated in Transcription
  misc_feature: MA Experiment 20000070 PARAMETER Experiment Name: At_100uM_ABA_Mutants_cDNA_P Parameter: Plant Line Value: CS24
  misc_feature: MA Experiment 20000070 PARAMETER Experiment Name: At_100uM_ABA_Mutants_cDNA_P Parameter: Timepoint (hr) Value: 6
  misc_feature: MA Experiment 20000070 PARAMETER Experiment Name: At_100uM_ABA_Mutants_cDNA_P Parameter: Tissue Value: Aerial
  misc_feature: MA Experiment 20000070 PARAMETER Experiment Name: At_100uM_ABA_Mutants_cDNA_P Parameter: Treatment Value: 100uM ABA vs. No Treatment
  misc_feature: MA Experiment ID: 20000071 Result: Up-regulated in Transcription
  misc_feature: MA Experiment 20000071 PARAMETER Experiment Name: At_100uM_ABA_Mutants_cDNA_P Parameter: Plant Line Value: CS8104
  misc_feature: MA Experiment 20000071 PARAMETER Experiment Name: At_100uM_ABA_Mutants_cDNA_P Parameter: Timepoint (hr) Value: 6
  misc_feature: MA Experiment 20000071 PARAMETER Experiment Name: At_100uM_ABA_Mutants_cDNA_P Parameter: Tissue Value: Aerial
  misc_feature: MA Experiment 20000071 PARAMETER Experiment Name: At_100uM_ABA_Mutants_cDNA_P Parameter: Treatment Value: 100uM ABA vs. No Treatment
  misc_feature: MA Experiment ID: 20000072 Result: Up-regulated in Transcription
  misc_feature: MA Experiment 20000072 PARAMETER Experiment Name: At_100uM_ABA_Mutants_cDNA_P Parameter: Plant Line Value: CS8105
  misc_feature: MA Experiment 20000072 PARAMETER Experiment Name: At_100uM_ABA_Mutants_cDNA_P Parameter: Timepoint (hr) Value: 6
  misc_feature: MA Experiment 20000072 PARAMETER Experiment Name: At_100uM_ABA_Mutants_cDNA_P Parameter: Tissue Value: Aerial
  misc_feature: MA Experiment 20000072 PARAMETER Experiment Name: At_100uM_ABA_Mutants_cDNA_P Parameter: Treatment Value: 100uM ABA vs. No Treatment
  misc_feature: MA Experiment ID: 20000088 Result: Up-regulated in Transcription
  misc_feature: MA Experiment 20000088 PARAMETER Experiment Name: At_100uM_ABA_Mutants_cDNA_P Parameter: Plant Line Value: Landsberg
  misc_feature: MA Experiment 20000088 PARAMETER Experiment Name: At_100uM_ABA_Mutants_cDNA_P Parameter: Timepoint (hr) Value: 6
  misc_feature: MA Experiment 20000088 PARAMETER Experiment Name: At_100uM_ABA_Mutants_cDNA_P Parameter: Tissue Value: Aerial
  misc_feature: MA Experiment 20000088 PARAMETER Experiment Name: At_100uM_ABA_Mutants_cDNA_P Parameter: Treatment Value: 100uM ABA vs. No Treatment
  misc_feature: MA Experiment ID: 20000089 Result: Up-regulated in Transcription
  misc_feature: MA Experiment ID: 20000117 Result: Up-regulated in Transcription
  misc_feature: MA Experiment 20000117 PARAMETER Experiment Name: At_100uM_ABA_Mutants_cDNA_P Parameter: Plant Line Value: Columbia
  misc_feature: MA Experiment 20000117 PARAMETER Experiment Name: At_100uM_ABA_Mutants_cDNA_P Parameter: Timepoint (hr) Value: 6
  misc_feature: MA Experiment 20000117 PARAMETER Experiment Name: At_100uM_ABA_Mutants_cDNA_P Parameter: Tissue Value: Aerial
  misc_feature: MA Experiment 20000117 PARAMETER Experiment Name: At_100uM_ABA_Mutants_cDNA_P Parameter: Treatment Value: 100uM ABA vs. No Treatment
  misc_feature: MA Experiment ID: 20000169 Result: Up-regulated in Transcription
  misc_feature: MA Experiment 20000169 PARAMETER Experiment Name: At_100uM_ABA_P Parameter: Age (day) Value: 14
  misc_feature: MA Experiment 20000169 PARAMETER Experiment Name: At_100uM_ABA_P Parameter: Organism Value: A. thaliana
  misc_feature: MA Experiment 20000169 PARAMETER Experiment Name: At_100uM_ABA_P Parameter: Plant Line Value: WS
  misc_feature: MA Experiment 20000169 PARAMETER Experiment Name: At_100uM_ABA_P Parameter: Timepoint (hr) Value: 6
  misc_feature: MA Experiment 20000169 PARAMETER Experiment Name: At_100uM_ABA_P Parameter: Tissue Value: Aerial
  misc_feature: MA Experiment 20000169 PARAMETER Experiment Name: At_100uM_ABA_P Parameter: Treatment Value: 100uM ABA vs. No Treatment
  misc_feature: MA Experiment ID: 20000173 Result: Down-regulated in Transcription
  misc_feature: MA Experiment 20000173 PARAMETER Experiment Name: At_42deg_Heat_P Parameter: Age (day) Value: 14
  misc_feature: MA Experiment 20000173 PARAMETER Experiment Name: At_42deg_Heat_P Parameter: Organism Value: A. thaliana
  misc_feature: MA Experiment 20000173 PARAMETER Experiment Name: At_42deg_Heat_P Parameter: Plant Line Value: WS
  misc_feature: MA Experiment 20000173 PARAMETER Experiment Name: At_42deg_Heat_P Parameter: Temperature (deg C) Value: 42 vs. 22
  misc_feature: MA Experiment 20000173 PARAMETER Experiment Name: At_42deg_Heat_P Parameter: Timepoint (hr) Value: 6
  misc_feature: MA Experiment 20000173 PARAMETER Experiment Name: At_42deg_Heat_P Parameter: Tissue Value: Aerial
  misc_feature: MA Experiment ID: 20000184 Result: Down-regulated in Transcription
  misc_feature: MA Experiment 20000184 PARAMETER Experiment Name: At_Shoots__P Parameter: Age (day) Value: 7
  misc_feature: MA Experiment 20000184 PARAMETER Experiment Name: At_Shoots__P Parameter: Tissue Value: Shoots vs. Whole Plant
  misc_feature: MA Experiment ID: 20000185 Result: Up-regulated in Transcription
  misc_feature: MA Experiment 20000185 PARAMETER Experiment Name: At_Roots__P Parameter: Age (day) Value: 7 vs. 21
  misc_feature: MA Experiment 20000185 PARAMETER Experiment Name: At_Roots__P Parameter: Organism Value: A. thaliana
  misc_feature: MA Experiment 20000185 PARAMETER Experiment Name: At_Roots__P Parameter: Tissue Value: Roots vs. Whole Plant
  misc_feature: MA Experiment ID: 20000224 Result: Up-regulated in Transcription
  misc_feature: MA Experiment ID: 20000227 Result: Down-regulated in Transcription
  misc_feature: MA Experiment 20000227 PARAMETER Experiment Name: At_Root-Tips-vs-Tops_P Parameter: Tissue Value: Root Tips vs. Root Tops
  misc_feature: MA Experiment ID: 20000234 Result: Down-regulated in Transcription
  misc_feature: MA Experiment 20000234 PARAMETER Experiment Name: At_Siliques_P Parameter: Age (day) Value: 21
  misc_feature: MA Experiment 20000234 PARAMETER Experiment Name: At_Siliques_P Parameter: Organism Value: A. thaliana
  misc_feature: MA Experiment 20000234 PARAMETER Experiment Name: At_Siliques_P Parameter: Plant Line Value: WS
  misc_feature: MA Experiment 20000234 PARAMETER Experiment Name: At_Siliques_P Parameter: Tissue Value: Less Than 5mm Siliques vs. Whole Plant
  misc_feature: MA Experiment ID: 20000235 Result: Down-regulated in Transcription
  misc_feature: MA Experiment 20000235 PARAMETER Experiment Name: At_Siliques_P Parameter: Age (day) Value: 21
  misc_feature: MA Experiment 20000235 PARAMETER Experiment Name: At_Siliques_P Parameter: Organism Value: A. thaliana
  misc_feature: MA Experiment 20000235 PARAMETER Experiment Name: At_Siliques_P Parameter: Plant Line Value: WS
  misc_feature: MA Experiment 20000235 PARAMETER Experiment Name: At_Siliques_P Parameter: Tissue Value: 5-10mm Siliques vs. Whole Plant
  misc_feature: MA Experiment ID: 20000265 Result: Down-regulated in Transcription
  misc_feature: MA Experiment 20000265 PARAMETER Experiment Name: At_Open_Flower_P Parameter: Age (day) Value: 21
  misc_feature: MA Experiment 20000265 PARAMETER Experiment Name: At_Open_Flower_P Parameter: Plant Line Value: WS
  misc_feature: MA Experiment 20000265 PARAMETER Experiment Name: At_Open_Flower_P Parameter: Tissue Value: Closed Flower vs. Whole Plant
  misc_feature: MA Experiment ID: 20000268 Result: Up-regulated in Transcription
  misc_feature: MA Experiment 20000268 PARAMETER Experiment Name: At_100mM_NaCl__P Parameter: Age (day) Value: 14
  misc_feature: MA Experiment 20000268 PARAMETER Experiment Name: At_100mM_NaCl__P Parameter: Organism Value: A. thaliana
  misc_feature: MA Experiment 20000268 PARAMETER Experiment Name: At_100mM_NaCl__P Parameter: Plant Line Value: WS
  misc_feature: MA Experiment 20000268 PARAMETER Experiment Name: At_100mM_NaCl__P Parameter: Timepoint (hr) Value: 6
  misc_feature: MA Experiment 20000268 PARAMETER Experiment Name: At_100mM_NaCl__P Parameter: Tissue Value: Whole Plant
  misc_feature: MA Experiment 20000268 PARAMETER Experiment Name: At_100mM_NaCl__P Parameter: Treatment Value: 100mM NaCl vs. No Treatment
  misc_feature: MA Experiment ID: 20000286 Result: Down-regulated in Transcription
  misc_feature: MA Experiment 20000286 PARAMETER Experiment Name: At_Open_Flower_P Parameter: Age (day) Value: 21
  misc_feature: MA Experiment 20000286 PARAMETER Experiment Name: At_Open_Flower_P Parameter: Plant Line Value: WS
  misc_feature: MA Experiment 20000286 PARAMETER Experiment Name: At_Open_Flower_P Parameter: Tissue Value: Half Open vs. Whole Plant
  misc_feature: MA Experiment ID: 20000436 Result: Up-regulated in Transcription
  misc_feature: MA Experiment 20000436 PARAMETER Experiment Name: At_Drought_P Parameter: Age (day) Value: 7
  misc_feature: MA Experiment 20000436 PARAMETER Experiment Name: At_Drought_P Parameter: Organism Value: A. thaliana
  misc_feature: MA Experiment 20000436 PARAMETER Experiment Name: At_Drought_P Parameter: Plant Line Value: WS
  misc_feature: MA Experiment 20000436 PARAMETER Experiment Name: At_Drought_P Parameter: Timepoint (hr) Value: 12
  misc_feature: MA Experiment 20000436 PARAMETER Experiment Name: At_Drought_P Parameter: Tissue Value: Whole Plant
  misc_feature: MA Experiment 20000436 PARAMETER Experiment Name: At_Drought_P Parameter: Treatment Value: Drought vs. No Drought
  misc_feature: MA Experiment ID: 20000437 Result: Up-regulated in Transcription
  misc_feature: MA Experiment 20000437 PARAMETER Experiment Name: At_Drought_P Parameter: Age (day) Value: 8
  misc_feature: MA Experiment 20000437 PARAMETER Experiment Name: At_Drought_P Parameter: Organism Value: A. thaliana
  misc_feature: MA Experiment 20000437 PARAMETER Experiment Name: At_Drought_P Parameter: Plant Line Value: WS
  misc_feature: MA Experiment 20000437 PARAMETER Experiment Name: At_Drought_P Parameter: Timepoint (hr) Value: 24
  misc_feature: MA Experiment 20000437 PARAMETER Experiment Name: At_Drought_P Parameter: Tissue Value: Whole Plant
  misc_feature: MA Experiment 20000437 PARAMETER Experiment Name: At_Drought_P Parameter: Treatment Value: Drought vs. No Drought
  misc_feature: MA Experiment ID: 20000438 Result: Up-regulated in Transcription
  misc_feature: MA Experiment 20000438 PARAMETER Experiment Name: At_Shoots__P Parameter: Age (day) Value: 14
  misc_feature: MA Experiment 20000438 PARAMETER Experiment Name: At_Shoots__P Parameter: Tissue Value: Shoots vs. Whole Plant
  misc_feature: MA Experiment ID: 20000439 Result: Up-regulated in Transcription
  misc_feature: MA Experiment 20000439 PARAMETER Experiment Name: At_Roots__P Parameter: Age (day) Value: 14 vs. 21
  misc_feature: MA Experiment 20000439 PARAMETER Experiment Name: At_Roots__P Parameter: Organism Value: A. thaliana
  misc_feature: MA Experiment 20000439 PARAMETER Experiment Name: At_Roots__P Parameter: Tissue Value: Roots vs. Whole Plant
  misc_feature: MA Experiment ID: 20000451 Result: Up-regulated in Transcription
  misc_feature: MA Experiment 20000451 PARAMETER Experiment Name: At_CS6879_Shoots-Roots_P Parameter: Age (day) Value: 14
  misc_feature: MA Experiment 20000451 PARAMETER Experiment Name: At_CS6879_Shoots-Roots_P Parameter: Organism Value: A. thaliana
  misc_feature: MA Experiment 20000451 PARAMETER Experiment Name: At_CS6879_Shoots-Roots_P Parameter: Plant Line Value: CS6879 vs. WS
  misc_feature: MA Experiment 20000451 PARAMETER Experiment Name: At_CS6879_Shoots-Roots_P Parameter: Tissue Value: Roots
  misc_feature: MA Experiment ID: 20000453 Result: Up-regulated in Transcription
  misc_feature: MA Experiment 20000453 PARAMETER Experiment Name: At_100uM_ABA_P Parameter: Age (day) Value: 15
  misc_feature: MA Experiment 20000453 PARAMETER Experiment Name: At_100uM_ABA_P Parameter: Organism Value: A. thaliana
  misc_feature: MA Experiment 20000453 PARAMETER Experiment Name: At_100uM_ABA_P Parameter: Plant Line Value: WS
  misc_feature: MA Experiment 20000453 PARAMETER Experiment Name: At_100uM_ABA_P Parameter: Timepoint (hr) Value: 24
  misc_feature: MA Experiment 20000453 PARAMETER Experiment Name: At_100uM_ABA_P Parameter: Tissue Value: Aerial
  misc_feature: MA Experiment 20000453 PARAMETER Experiment Name: At_100uM_ABA_P Parameter: Treatment Value: 100uM ABA vs. No Treatment
  misc_feature: MA Experiment ID: 20000455 Result: Up-regulated in Transcription
  misc_feature: MA Experiment 20000455 PARAMETER Experiment Name: At_100uM_ABA_P Parameter: Age (day) Value: 16
  misc_feature: MA Experiment 20000455 PARAMETER Experiment Name: At_100uM_ABA_P Parameter: Organism Value: A. thaliana
  misc_feature: MA Experiment 20000455 PARAMETER Experiment Name: At_100uM_ABA_P Parameter: Plant Line Value: WS
  misc_feature: MA Experiment 20000455 PARAMETER Experiment Name: At_100uM_ABA_P Parameter: Timepoint (hr) Value: 48
  misc_feature: MA Experiment 20000455 PARAMETER Experiment Name: At_100uM_ABA_P Parameter: Tissue Value: Aerial
  misc_feature: MA Experiment 20000455 PARAMETER Experiment Name: At_100uM_ABA_P Parameter: Treatment Value: 100uM ABA vs. No Treatment
  misc_feature: MA Experiment ID: 20000573 Result: Down-regulated in Transcription
  misc_feature: MA Experiment 20000573 PARAMETER Experiment Name: At_100uM_ABA_Mutants__P Parameter: Organism Value: A. thaliana
  misc_feature: MA Experiment 20000573 PARAMETER Experiment Name: At_100uM_ABA_Mutants__P Parameter: Plant Line Value: CS22 vs. Ler wt
  misc_feature: MA Experiment 20000573 PARAMETER Experiment Name: At_100uM_ABA_Mutants__P Parameter: Timepoint (hr) Value: N/A
  misc_feature: MA Experiment 20000573 PARAMETER Experiment Name: At_100uM_ABA_Mutants__P Parameter: Tissue Value: Whole Plant
  misc_feature: MA Experiment 20000573 PARAMETER Experiment Name: At_100uM_ABA_Mutants__P Parameter: Treatment Value: None
  misc_feature: MA Experiment ID: 20000574 Result: Down-regulated in Transcription
  misc_feature: MA Experiment 20000574 PARAMETER Experiment Name: At_100uM_ABA_Mutants__P Parameter: Organism Value: A. thaliana
  misc_feature: MA Experiment 20000574 PARAMETER Experiment Name: At_100uM_ABA_Mutants__P Parameter: Plant Line Value: CS23 vs. Ler wt
  misc_feature: MA Experiment 20000574 PARAMETER Experiment Name: At_100uM_ABA_Mutants__P Parameter: Timepoint (hr) Value: N/A
  misc_feature: MA Experiment 20000574 PARAMETER Experiment Name: At_100uM_ABA_Mutants__P Parameter: Tissue Value: Whole Plant
  misc_feature: MA Experiment 20000574 PARAMETER Experiment Name: At_100uM_ABA_Mutants__P Parameter: Treatment Value: None
  misc_feature: MA Experiment ID: 20000606 Result: Down-regulated in Transcription
  misc_feature: MA Experiment 20000606 PARAMETER Experiment Name: At_CS8548_Mutant_P Parameter: Age (day) Value: 14
  misc_feature: MA Experiment 20000606 PARAMETER Experiment Name: At_CS8548_Mutant_P Parameter: Plant Line Value: CS8548 vs. wt
  misc_feature: MA Experiment 20000606 PARAMETER Experiment Name: At_CS8548_Mutant_P Parameter: Tissue Value: Whole Plant
  misc_feature: MA Experiment ID: 20000794 Result: Down-regulated in Transcription
  misc_feature: MA Experiment 20000794 PARAMETER Experiment Name: At_Petals_P Parameter: Age (day) Value: 23-25 days
  misc_feature: MA Experiment 20000794 PARAMETER Experiment Name: At_Petals_P Parameter: Plant Line Value: WS
  misc_feature: MA Experiment 20000794 PARAMETER Experiment Name: At_Petals_P Parameter: Tissue Value: Petals vs. Whole plant
  misc_feature: MA Experiment ID: 20001247 Result: Down-regulated in Transcription
  misc_feature: MA Experiment 20001247 PARAMETER Experiment Name: At_Far-red-induction_P Parameter: Age (day) Value: 7
  misc_feature: MA Experiment 20001247 PARAMETER Experiment Name: At_Far-red-induction_P Parameter: Light Value: Far-red vs. White
  misc_feature: MA Experiment 20001247 PARAMETER Experiment Name: At_Far-red-induction_P Parameter: Organism Value: A. thaliana
  misc_feature: MA Experiment 20001247 PARAMETER Experiment Name: At_Far-red-induction_P Parameter: Plant Line Value: Columbia
  misc_feature: MA Experiment 20001247 PARAMETER Experiment Name: At_Far-red-induction_P Parameter: Timepoint (hr) Value: 1
  misc_feature: MA Experiment 20001247 PARAMETER Experiment Name: At_Far-red-induction_P Parameter: Tissue Value: Whole Plant
  misc_feature: MA Experiment ID: 20001248 Result: Down-regulated in Transcription
  misc_feature: MA Experiment 20001248 PARAMETER Experiment Name: At_Far-red-induction_P Parameter: Age (day) Value: 7
  misc_feature: MA Experiment 20001248 PARAMETER Experiment Name: At_Far-red-induction_P Parameter: Light Value: Far-red vs. White
  misc_feature: MA Experiment 20001248 PARAMETER Experiment Name: At_Far-red-induction_P Parameter: Organism Value: A. thaliana
  misc_feature: MA Experiment 20001248 PARAMETER Experiment Name: At_Far-red-induction_P Parameter: Plant Line Value: Columbia
  misc_feature: MA Experiment 20001248 PARAMETER Experiment Name: At_Far-red-induction_P Parameter: Timepoint (hr) Value: 4
  misc_feature: MA Experiment 20001248 PARAMETER Experiment Name: At_Far-red-induction_P Parameter: Tissue Value: Whole Plant
  misc_feature: MA Experiment ID: 20001451 Result: Down-regulated in Transcription
  misc_feature: MA Experiment 20001451 PARAMETER Experiment Name: At_Far-red-induction_P Parameter: Age (day) Value: 7
  misc_feature: MA Experiment 20001451 PARAMETER Experiment Name: At_Far-red-induction_P Parameter: Light Value: Far-red vs. White
  misc_feature: MA Experiment 20001451 PARAMETER Experiment Name: At_Far-red-induction_P Parameter: Organism Value: A. thaliana
  misc_feature: MA Experiment 20001451 PARAMETER Experiment Name: At_Far-red-induction_P Parameter: Plant Line Value: Columbia
  misc_feature: MA Experiment 20001451 PARAMETER Experiment Name: At_Far-red-induction_P Parameter: Timepoint (hr) Value: 24
  misc_feature: MA Experiment 20001451 PARAMETER Experiment Name: At_Far-red-induction_P Parameter: Tissue Value: Whole Plant
  misc_feature: MA Experiment ID: 20001554 Result: Up-regulated in Transcription
  misc_feature: MA Experiment 20001554 PARAMETER Experiment Name: At_Drought_Soil_Dry_P Parameter: Age (day) Value: 21
  misc_feature: MA Experiment 20001554 PARAMETER Experiment Name: At_Drought_Soil_Dry_P Parameter: Organism Value: A. thaliana
  misc_feature: MA Experiment 20001554 PARAMETER Experiment Name: At_Drought_Soil_Dry_P Parameter: Plant Line Value: WS
  misc_feature: MA Experiment 20001554 PARAMETER Experiment Name: At_Drought_Soil_Dry_P Parameter: Post Timepoint (hr) Value: None
  misc_feature: MA Experiment 20001554 PARAMETER Experiment Name: At_Drought_Soil_Dry_P Parameter: Post-Treatment Value: None
  misc_feature: MA Experiment 20001554 PARAMETER Experiment Name: At_Drought_Soil_Dry_P Parameter: Timepoint (day) Value: 7
  misc_feature: MA Experiment 20001554 PARAMETER Experiment Name: At_Drought_Soil_Dry_P Parameter: Treatment Value: Drought vs. No Drought
  misc_feature: MA Experiment ID: 20001555 Result: Up-regulated in Transcription
  misc_feature: MA Experiment 20001555 PARAMETER Experiment Name: At_Drought_Soil_Dry_P Parameter: Age (day) Value: 24
  misc_feature: MA Experiment 20001555 PARAMETER Experiment Name: At_Drought_Soil_Dry_P Parameter: Organism Value: A. thaliana
  misc_feature: MA Experiment 20001555 PARAMETER Experiment Name: At_Drought_Soil_Dry_P Parameter: Plant Line Value: WS
  misc_feature: MA Experiment 20001555 PARAMETER Experiment Name: At_Drought_Soil_Dry_P Parameter: Post Timepoint (hr) Value: None
  misc_feature: MA Experiment 20001555 PARAMETER Experiment Name: At_Drought_Soil_Dry_P Parameter: Post-Treatment Value: None
  misc_feature: MA Experiment 20001555 PARAMETER Experiment Name: At_Drought_Soil_Dry_P Parameter: Timepoint (day) Value: 10
  misc_feature: MA Experiment 20001555 PARAMETER Experiment Name: At_Drought_Soil_Dry_P Parameter: Treatment Value: Drought vs. No Drought
  misc_feature: MA Experiment ID: 20001559 Result: Up-regulated in Transcription
  misc_feature: MA Experiment 20001559 PARAMETER Experiment Name: At_Drought_Soil_Dry_P Parameter: Age (day) Value: 28
  misc_feature: MA Experiment 20001559 PARAMETER Experiment Name: At_Drought_Soil_Dry_P Parameter: Organism Value: A. thaliana
  misc_feature: MA Experiment 20001559 PARAMETER Experiment Name: At_Drought_Soil_Dry_P Parameter: Plant Line Value: WS
  misc_feature: MA Experiment 20001559 PARAMETER Experiment Name: At_Drought_Soil_Dry_P Parameter: Post Timepoint (hr) Value: 29
  misc_feature: MA Experiment 20001559 PARAMETER Experiment Name: At_Drought_Soil_Dry_P Parameter: Post-Treatment Value: Re-Water vs. No Drought
  misc_feature: MA Experiment 20001559 PARAMETER Experiment Name: At_Drought_Soil_Dry_P Parameter: Timepoint (day) Value: 14
  misc_feature: MA Experiment 20001559 PARAMETER Experiment Name: At_Drought_Soil_Dry_P Parameter: Treatment Value: Drought vs. No Drought
  misc_feature: MA Experiment ID: 20001906 Result: Up-regulated in Transcription
  misc_feature: MA Experiment 20001906 PARAMETER Experiment Name: At_Drought_Reproduction_P Parameter: Age (day) Value: 35
  misc_feature: MA Experiment 20001906 PARAMETER Experiment Name: At_Drought_Reproduction_P Parameter: Organism Value: A. thaliana
  misc_feature: MA Experiment 20001906 PARAMETER Experiment Name: At_Drought_Reproduction_P Parameter: Plant Line Value: WS
  misc_feature: MA Experiment 20001906 PARAMETER Experiment Name: At_Drought_Reproduction_P Parameter: Timepoint (day) Value: 5
  misc_feature: MA Experiment 20001906 PARAMETER Experiment Name: At_Drought_Reproduction_P Parameter: Tissue Value: Siliques
  misc_feature: MA Experiment 20001906 PARAMETER Experiment Name: At_Drought_Reproduction_P Parameter: Treatment Value: Drought vs. No Drought
  misc_feature: MA Experiment ID: 20001911 Result: Up-regulated in Transcription
  misc_feature: MA Experiment 20001911 PARAMETER Experiment Name: At_Drought_Reproduction_P Parameter: Age (day) Value: 40
  misc_feature: MA Experiment 20001911 PARAMETER Experiment Name: At_Drought_Reproduction_P Parameter: Organism Value: A. thaliana
  misc_feature: MA Experiment 20001911 PARAMETER Experiment Name: At_Drought_Reproduction_P Parameter: Plant Line Value: WS
  misc_feature: MA Experiment 20001911 PARAMETER Experiment Name: At_Drought_Reproduction_P Parameter: Timepoint (day) Value: 10
  misc_feature: MA Experiment 20001911 PARAMETER Experiment Name: At_Drought_Reproduction_P Parameter: Tissue Value: Flowers
  misc_feature: MA Experiment 20001911 PARAMETER Experiment Name: At_Drought_Reproduction_P Parameter: Treatment Value: Drought vs. No Drought
taaaacaaaataacatacaaatggatagcatttggattctatcacttctcttcttcatcatctttcttcttctggccgccttcaaacgcaaaaatcatgggaaacatcgacgaataccatctcctcctggttttccaatcatcggaaacttacatcagctcggagaattacaacatcagtctctatggaagctctcaaagaagtatggccctgtgatgcttttgaagcttggaaaagtccccacactcatactttcttcatcagaaacagcaaaacaagctctaagagactatgatctccattgttgtagccgtccttccttagcaggaggaagagagctctcttacaacaatctagatatgtcttcatctccttataatgaatattggaaggaactaaggaagctctgcagtcaagaactctttagtgctaataaaattcaatcgattcaacctattaaggacgaggaggtcaagaaagttatcgattcaatcgcggaatcatcttctctaaagaatccggttaacttgagcaagacgtttcttgctttaactacaagtgtagtatgcaaggcagcatttggtgtgagttttgagggaagtgtgctcaacagtgatagattcaataagttagtccgagatactttcgagatgttgggaagcttctctgcctcagattttattccgtatgtcggatggatcatcgataagttcaatggtttacaagggtggagaaagaaaagctttcgagatcttgatgcgttctatgaacaaatttttgatctgcataaggaagagaaggaagtaggaagtgaagatttagtggatgtgctcttgaggttggagaaagaagaaattgttgttggaaatggcaagctcacaagaaatcatatcaaagcaattttgatgaacattcttttaggaggaatcgatacttctgcaataacaatgacatgggcaatggcagaacttgctaaaaaccctagagtgatgaagaaagttcaagcagaaatcagaaaccaaatcaagaacaaagaaagaatcagctttgatgacactgataagctcgagtacttgaaaatggtgatcaaagaaacatggaggttacatcctccaacacctcttctcctcccaagagatgtaatcactgaatttgagatcaatggctacacgattcctgccaaaacacggcttcatgtgaatgtttgggctatcgggcgtgatcctgatacatggaaagatccagaaatgtttctccccgaaaggtttaatgatagtaacattgatgcaaaaggacagaactttgagttgttgtcgtttgggagtggtaggagaatttgtcctggactgtacatgggaacaacaatggtggagtttggcctagctaatatgttgtatcattttgattggaagttaccagaaggcatggtagtcgaagatatcgatatggaagaagctcctggacttactgtgagcaaaaaaagtgagcttgtacttgttccagtgaagtatttagaccattgattcacgtgaattagttcttcatcgattgtactatgaataagaacgaaatgataatgataattttcaatgtaatattttttttct

SEQ ID NO: 106123 - protein, 506 aa, Arabidopsis thaliana
  peptide (1)..(506): Ceres Seq. ID no. 13618804
  misc_feature (7)..(506): Homolog of NCBI NO: 15231537 NR Description: cytochrome p450 71B26 [Arabidopsis thaliana] Cytochrome P450 71B26 >gi|11994450|dbj|BAB02452.1| cytochrome [Arabidopsis thaliana] >gi|22136028|gb|AAM91596.1| cytochrome
  misc_feature (7)..(505): Homolog of NCBI NO: 15231538 NR Description: cytochrome P450 family [Arabidopsis thaliana] Cytochrome P450 71B34 >gi|9294288|dbj|BAB02190.1| cytochrome P450
  misc_feature (7)..(500): Homolog of NCBI NO: 15231539 NR Description: cytochrome P450 family [Arabidopsis thaliana] Cytochrome P450 71B35 >gi|9294289|dbj|BAB02191.1| cytochrome P450
  misc_feature (7)..(505): Homolog of NCBI NO: 15231542 NR Description: cytochrome p450 family [Arabidopsis thaliana]
  misc_feature (7)..(506): Homolog of NCBI NO: 15231541 NR Description: cytochrome P450 71B36 [Arabidopsis thaliana] Cytochrome P450 71B36 >gi|9294290|dbj|BAB02192.1| cytochrome P450
  misc_feature (7)..(505): Homolog of NCBI NO: 9294291 NR Description: cytochrome p450 [Arabidopsis thaliana]
  misc_feature (7)..(506): Homolog of NCBI NO: 15227003 NR Description: cytochrome P450 family [Arabidopsis thaliana] Cytochrome P450 71B9 >gi|20197089|gb|AAC18928.2| putative
  misc_feature (7)..(506): Homolog of NCBI NO: 18175891 NR Description: putative cytochrome P450 protein [Arabidopsis
  misc_feature (7)..(506): Homolog of NCBI NO: 7430672 NR Description: probable cytochrome P450 At2g02580 [imported] -
  misc_feature (7)..(247): Homolog of NCBI NO: 9294287 NR Description: cytochrome P450 [Arabidopsis thaliana]
KQNNIQMDSIWILSLLFFIIFLLLAAFKRKNHGKHRRIPSPPGFPIIGNLHQLGELQHQSLWKLSKKYGPVMLLKLGKVPTLILSSSETAKQALRDYDLHCCSRPSLAGGRELSYNNLDMSSSPYNEYWKELRKLCSQELFSANKIQSIQPIKDEEVKKVIDSIAESSSLKNPVNLSKTFLALTTSVVCKAAFGVSFEGSVLNSDRFNKLVRDTFEMLGSFSASDFIPYVGWIIDKFNGLQGWRKKSFRDLDAFYEQIFDLHKEEKEVGSEDLVDVLLRLEKEEIVVGNGKLTRNHIKAILMNILLGGIDTSAITMTWAMAELAKNPRVMKKVQAEIRNQIKNKERISFDDTDKLEYLKMVIKETWRLHPPTPLLLPRDVITEFEINGYTIPAKTRLHVNVWAIGRDPDTWKDPEMFLPERFNDSNIDAKGQNFELLSFGSGRRICPGLYMGTTMVEFGLANMLYHFDWKLPEGMVVEDIDMEEAPGLTVSKKSELVLVPVKYLDH

SEQ ID NO: 106124 - protein, 500 aa, Arabidopsis thaliana; identical to SEQ ID NO: 38278
  peptide (1)..(500): Ceres Seq. ID no. 13618805
  misc_feature (1)..(500): Homolog of NCBI NO: 15231537 NR Description: cytochrome p450 71B26 [Arabidopsis thaliana] Cytochrome P450 71B26 >gi|11994450|dbj|BAB02452.1| cytochrome [Arabidopsis thaliana] >gi|22136028|gb|AAM91596.1| cytochrome
  misc_feature (1)..(499): Homolog of NCBI NO: 15231538 NR Description: cytochrome P450 family [Arabidopsis thaliana] Cytochrome P450 71B34 >gi|9294288|dbj|BAB02190.1| cytochrome P450
  misc_feature (1)..(494): Homolog of NCBI NO: 15231539 NR Description: cytochrome P450 family [Arabidopsis thaliana] Cytochrome P450 71B35 >gi|9294289|dbj|BAB02191.1| cytochrome P450
  misc_feature (1)..(499): Homolog of NCBI NO: 15231542 NR Description: cytochrome p450 family [Arabidopsis thaliana]
  misc_feature (1)..(500): Homolog of NCBI NO: 15231541 NR Description: cytochrome P450 71B36 [Arabidopsis thaliana] Cytochrome P450 71B36 >gi|9294290|dbj|BAB02192.1| cytochrome P450
  misc_feature (1)..(499): Homolog of NCBI NO: 9294291 NR Description: cytochrome p450 [Arabidopsis thaliana]
  misc_feature (1)..(500): Homolog of NCBI NO: 15227003 NR Description: cytochrome P450 family [Arabidopsis thaliana] Cytochrome P450 71B9 >gi|20197089|gb|AAC18928.2| putative
  misc_feature (1)..(500): Homolog of NCBI NO: 18175891 NR Description: putative cytochrome P450 protein [Arabidopsis
  misc_feature (1)..(500): Homolog of NCBI NO: 7430672 NR Description: probable cytochrome P450 At2g02580 [imported] -
  misc_feature (1)..(241): Homolog of NCBI NO: 9294287 NR Description: cytochrome P450 [Arabidopsis thaliana]

SEQ ID NO: 106125 - protein, 435 aa, Arabidopsis thaliana; identical to SEQ ID NO: 38279
  peptide (1)..(435): Ceres Seq. ID no. 13618806
  misc_feature (1)..(435): Homolog of NCBI NO: 15231537 NR Description: cytochrome p450 71B26 [Arabidopsis thaliana] Cytochrome P450 71B26 >gi|11994450|dbj|BAB02452.1| cytochrome [Arabidopsis thaliana] >gi|22136028|gb|AAM91596.1| cytochrome
  misc_feature (1)..(434): Homolog of NCBI NO: 15231538 NR Description: cytochrome P450 family [Arabidopsis thaliana] Cytochrome P450 71B34 >gi|9294288|dbj|BAB02190.1| cytochrome P450
  misc_feature (1)..(429): Homolog of NCBI NO: 15231539 NR Description: cytochrome P450 family [Arabidopsis thaliana] Cytochrome P450 71B35 >gi|9294289|dbj|BAB02191.1| cytochrome P450
  misc_feature (1)..(434): Homolog of NCBI NO: 15231542 NR Description: cytochrome p450 family [Arabidopsis thaliana]
  misc_feature (1)..(435): Homolog of NCBI NO: 15231541 NR Description: cytochrome P450 71B36 [Arabidopsis thaliana] Cytochrome P450 71B36 >gi|9294290|dbj|BAB02192.1| cytochrome P450
  misc_feature (1)..(434): Homolog of NCBI NO: 9294291 NR Description: cytochrome p450 [Arabidopsis thaliana]
  misc_feature (1)..(435): Homolog of NCBI NO: 15227003 NR Description: cytochrome P450 family [Arabidopsis thaliana] Cytochrome P450 71B9 >gi|20197089|gb|AAC18928.2| putative
  misc_feature (1)..(435): Homolog of NCBI NO: 18175891 NR Description: putative cytochrome P450 protein [Arabidopsis
  misc_feature (1)..(435): Homolog of NCBI NO: 7430672 NR Description: probable cytochrome P450 At2g02580 [imported] -
  misc_feature (1)..(176): Homolog of NCBI NO: 9294287 NR Description: cytochrome P450 [Arabidopsis thaliana]

SEQ ID NO: 106126 - DNA, 674 bp, Arabidopsis thaliana
  misc_feature (1)..(674): Ceres Seq. ID no. 13618807
  misc_feature: MA Experiment ID: 20000307 Result: Up-regulated in Transcription
  misc_feature: MA Experiment 20000307 PARAMETER Experiment Name: At_Germinating_Seeds_Sub_P Parameter: Age (hr) Value: 24 vs. 0
  misc_feature: MA Experiment 20000307 PARAMETER Experiment Name: At_Germinating_Seeds_Sub_P Parameter: Organism Value: A. thaliana
  misc_feature: MA Experiment 20000307 PARAMETER Experiment Name: At_Germinating_Seeds_Sub_P Parameter: Plant Line Value: WS
  misc_feature: MA Experiment 20000307 PARAMETER Experiment Name: At_Germinating_Seeds_Sub_P Parameter: Tissue Value: Germinating Seeds
  misc_feature: MA Experiment ID: 20000314 Result: Down-regulated in Transcription
  misc_feature: MA Experiment 20000314 PARAMETER Experiment Name: At_14day_Shoots-Roots_Sub_P Parameter: Age (day) Value: 14
  misc_feature: MA Experiment 20000314 PARAMETER Experiment Name: At_14day_Shoots-Roots_Sub_P Parameter: Organism Value: A. thaliana
  misc_feature: MA Experiment 20000314 PARAMETER Experiment Name: At_14day_Shoots-Roots_Sub_P Parameter: Plant Line Value: WS
  misc_feature: MA Experiment 20000314 PARAMETER Experiment Name: At_14day_Shoots-Roots_Sub_P Parameter: Tissue Value: Roots vs. Whole Plant
  misc_feature: MA Experiment ID: 20000315 Result: Down-regulated in Transcription
  misc_feature: MA Experiment 20000315 PARAMETER Experiment Name: At_14day_Shoots-Roots_Sub_P Parameter: Age (day) Value: 14
  misc_feature: MA Experiment 20000315 PARAMETER Experiment Name: At_14day_Shoots-Roots_Sub_P Parameter: Organism Value: A. thaliana
  misc_feature: MA Experiment 20000315 PARAMETER Experiment Name: At_14day_Shoots-Roots_Sub_P Parameter: Plant Line Value: WS
  misc_feature: MA Experiment 20000315 PARAMETER Experiment Name: At_14day_Shoots-Roots_Sub_P Parameter: Tissue Value: Shoots vs. Whole Plant
  misc_feature: MA Experiment ID: 20000328 Result: Down-regulated in Transcription
  misc_feature: MA Experiment 20000328 PARAMETER Experiment Name: At_42deg_Heat_Sub_P Parameter: Age (day) Value: 14
  misc_feature: MA Experiment 20000328 PARAMETER Experiment Name: At_42deg_Heat_Sub_P Parameter: Organism Value: A. thaliana
  misc_feature: MA Experiment 20000328 PARAMETER Experiment Name: At_42deg_Heat_Sub_P Parameter: Plant Line Value: WS
  misc_feature: MA Experiment 20000328 PARAMETER Experiment Name: At_42deg_Heat_Sub_P Parameter: Temperature (deg C) Value: 42 vs. 22
  misc_feature: MA Experiment 20000328 PARAMETER Experiment Name: At_42deg_Heat_Sub_P Parameter: Timepoint (hr) Value: 6
  misc_feature: MA Experiment 20000328 PARAMETER Experiment Name: At_42deg_Heat_Sub_P Parameter: Tissue Value: Aerial
  misc_feature: MA Experiment ID: 20000347 Result: Up-regulated in Transcription
  misc_feature: MA Experiment 20000347 PARAMETER Experiment Name: At_2mM_SA_Sub_P Parameter: Age (day) Value: 14
  misc_feature: MA Experiment 20000347 PARAMETER Experiment Name: At_2mM_SA_Sub_P Parameter: Organism Value: A. thaliana
  misc_feature: MA Experiment 20000347 PARAMETER Experiment Name: At_2mM_SA_Sub_P Parameter: Plant Line Value: WS
  misc_feature: MA Experiment 20000347 PARAMETER Experiment Name: At_2mM_SA_Sub_P Parameter: Timepoint (hr) Value: 6
  misc_feature: MA Experiment 20000347 PARAMETER Experiment Name: At_2mM_SA_Sub_P Parameter: Tissue Value: Aerial
  misc_feature: MA Experiment 20000347 PARAMETER Experiment Name: At_2mM_SA_Sub_P Parameter: Treatment Value: 2mM SA vs. No Treatment
  misc_feature: MA Experiment ID: 20000355 Result: Down-regulated in Transcription
  misc_feature: MA Experiment 20000355 PARAMETER Experiment Name: At_Siliques_Sub_P Parameter: Age (day) Value: 21
  misc_feature: MA Experiment 20000355 PARAMETER Experiment Name: At_Siliques_Sub_P Parameter: Organism Value: A. thaliana
  misc_feature: MA Experiment 20000355 PARAMETER Experiment Name: At_Siliques_Sub_P Parameter: Plant Line Value: WS
  misc_feature: MA Experiment 20000355 PARAMETER Experiment Name: At_Siliques_Sub_P Parameter: Tissue Value: Less Than 5mm Siliques vs. Whole Plant
  misc_feature: MA Experiment ID: 20000440 Result: Down-regulated in Transcription
  misc_feature: MA Experiment 20000440 PARAMETER Experiment Name: At_Closed-Flower__Sub_P Parameter: Tissue Value: Closed Flower vs. Whole Plant
atggctttgaagacggcgacgagtggtatgtggatgacggatgattgcaagaaatcgttcatggagatgaaatggaagaaagtgcatagatacgtcgtttacaaactcgaggagaagtctcggaaagtcaccgtcgacaaggttggtgccgccggcgagagctacgacgatctcgctgcttctttgccggaggatgactgtcgttacgccgtgtttgatttcgattacgtcaccgtcgataactgtcgtatgagcaagatcttcttcataacttggtcgccggaggcttcaaggataagggagaagatgatgtacgcgacgtcgaagagcggactgagaagagtgttggatggtgttcactacgagcttcaagccaccgacccaaccgagatgggatttgataaaatccaggaccgggccaaatgatcacaacacataactggagttatatcgtcagtaactagctgttcttaacagttatgacttatgagcagcaattaattatctattaatgttatttagtgcttaacctcttccctttggttgtcaaacaaaatgatttacttctattttgttgacaatagtactaaactattattagtgtttcagtttaattgttgttgtttagttttttaaaaactatgttgaatgttattttgtctctttttgtcact

SEQ ID NO: 106127 - protein, 141 aa, Arabidopsis thaliana
  peptide (1)..(141): Ceres Seq. ID no. 13618808
  misc_feature (14)..(141): Pfam Name: Cofilin/tropomyosin-type actin-binding protein Pfam Description: Cofilin/tropomyosin-type actin-binding protein
  misc_feature (12)..(141): Homolog of NCBI NO: 15236233 NR Description: actin depolymerizing factor - like protein
  misc_feature (1)..(141): Homolog of NCBI NO: 18398187 NR Description: actin depolymerizing factor 5 [Arabidopsis
  misc_feature (10)..(141): Homolog of NCBI NO: 25295742 NR Description: actin depolymerizing factor 5 [imported] -
  misc_feature (8)..(141): Homolog of NCBI NO: 7330254 NR Description: actin depolymerizing factor [Elaeis guineensis]
  misc_feature (6)..(140): Homolog of NCBI NO: 32363121 NR Description: Actin-depolymerizing factor (ADF)
  misc_feature (6)..(140): Homolog of NCBI NO: 4566614 NR Description: actin depolymerizing factor [Populus x canescens]
  misc_feature (3)..(140): Homolog of NCBI NO: 17366768 NR Description: Actin-depolymerizing factor 1 (ADF 1)
  misc_feature (6)..(140): Homolog of NCBI NO: 24745620 NR Description: actin depolymerizing factor 6 [Solanum tuberosum]
  misc_feature (3)..(139): Homolog of NCBI NO: 30697300 NR Description: actin depolymerizing factor 4 - like protein
  misc_feature (3)..(140): Homolog of NCBI NO: 38345587 NR Description: OSJNBb0012E24.5 [Oryza sativa (japonica
MALKTATSGMWMTDDCKKSFMEMKWKKVHRYVVYKLEEKSRKVTVDKVGAAGESYDDLAASLPEDDCRYAVFDFDYVTVDNCRMSKIFFITWSPEASRIREKMMYATSKSGLRRVLDGVHYELQATDPTEMGFDKIQDRAK

SEQ ID NO: 106128 - protein, 132 aa, Arabidopsis thaliana
  peptide (1)..(132): Ceres Seq. ID no. 13618809
  misc_feature (5)..(132): Pfam Name: Cofilin/tropomyosin-type actin-binding protein Pfam Description: Cofilin/tropomyosin-type actin-binding protein
  misc_feature (3)..(132): Homolog of NCBI NO: 15236233 NR Description: actin depolymerizing factor - like protein
  misc_feature (1)..(132): Homolog of NCBI NO: 18398187 NR Description: actin depolymerizing factor 5 [Arabidopsis
  misc_feature (1)..(132): Homolog of NCBI NO: 25295742 NR Description: actin depolymerizing factor 5 [imported] -
  misc_feature (1)..(132): Homolog of NCBI NO: 7330254 NR Description: actin depolymerizing factor [Elaeis guineensis]
  misc_feature (1)..(131): Homolog of NCBI NO: 32363121 NR Description: Actin-depolymerizing factor (ADF)
  misc_feature (1)..(131): Homolog of NCBI NO: 4566614 NR Description: actin depolymerizing factor [Populus x canescens]
  misc_feature (1)..(131): Homolog of NCBI NO: 17366768 NR Description: Actin-depolymerizing factor 1 (ADF 1)
  misc_feature (1)..(131): Homolog of NCBI NO: 24745620 NR Description: actin depolymerizing factor 6 [Solanum tuberosum]
  misc_feature (1)..(130): Homolog of NCBI NO: 30697300 NR Description: actin depolymerizing factor 4 - like protein
  misc_feature (1)..(131): Homolog of NCBI NO: 38345587 NR Description: OSJNBb0012E24.5 [Oryza sativa (japonica
MWMTDDCKKSFMEMKWKKVHRYVVYKLEEKSRKVTVDKVGAAGESYDDLAASLPEDDCRYAVFDFDYVTVDNCRMSKIFFITWSPEASRIREKMMYATSKSGLRRVLDGVHYELQATDPTEMGFDKIQDRAK

SEQ ID NO: 106129 - protein, 130 aa, Arabidopsis thaliana; identical to SEQ ID NO: 73917
  peptide (1)..(130): Ceres Seq. ID no. 13618810
  misc_feature (3)..(130): Pfam Name: Cofilin/tropomyosin-type actin-binding protein Pfam Description: Cofilin/tropomyosin-type actin-binding protein
  misc_feature (1)..(130): Homolog of NCBI NO: 15236233 NR Description: actin depolymerizing factor - like protein
  misc_feature (1)..(130): Homolog of NCBI NO: 18398187 NR Description: actin depolymerizing factor 5 [Arabidopsis
  misc_feature (1)..(130): Homolog of NCBI NO: 25295742 NR Description: actin depolymerizing factor 5 [imported] -
  misc_feature (1)..(130): Homolog of NCBI NO: 7330254 NR Description: actin depolymerizing factor [Elaeis guineensis]
  misc_feature (1)..(129): Homolog of NCBI NO: 32363121 NR Description: Actin-depolymerizing factor (ADF)
  misc_feature (1)..(129): Homolog of NCBI NO: 4566614 NR Description: actin depolymerizing factor [Populus x canescens]
  misc_feature (1)..(129): Homolog of NCBI NO: 17366768 NR Description: Actin-depolymerizing factor 1 (ADF 1)
  misc_feature (1)..(129): Homolog of NCBI NO: 24745620 NR Description: actin depolymerizing factor 6 [Solanum tuberosum]
  misc_feature (1)..(128): Homolog of NCBI NO: 30697300 NR Description: actin depolymerizing factor 4 - like protein
  misc_feature (1)..(129): Homolog of NCBI NO: 38345587 NR Description: OSJNBb0012E24.5 [Oryza sativa (japonica

SEQ ID NO: 106130 - DNA, 908 bp, Arabidopsis thaliana
  misc_feature (1)..(908): Ceres Seq. ID no. 13618823
  misc_feature: MA Experiment ID: 108488 Result: Down-regulated in Transcription
  misc_feature: MA Experiment ID: 108595 Result: Down-regulated in Transcription
  misc_feature: MA Experiment 108595 PARAMETER Experiment Name: At_Ler-pi_Ovule_cDNA_P Parameter: Plant Line Value: null
  misc_feature: MA Experiment ID: 20000227 Result: Down-regulated in Transcription
  misc_feature: MA Experiment 20000227 PARAMETER Experiment Name: At_Root-Tips-vs-Tops_P Parameter: Tissue Value: Root Tips vs. Root Tops
  misc_feature: MA Experiment ID: 20001559 Result: Down-regulated in Transcription
  misc_feature: MA Experiment 20001559 PARAMETER Experiment Name: At_Drought_Soil_Dry_P Parameter: Age (day) Value: 28
  misc_feature: MA Experiment 20001559 PARAMETER Experiment Name: At_Drought_Soil_Dry_P Parameter: Organism Value: A. thaliana
  misc_feature: MA Experiment 20001559 PARAMETER Experiment Name: At_Drought_Soil_Dry_P Parameter: Plant Line Value: WS
  misc_feature: MA Experiment 20001559 PARAMETER Experiment Name: At_Drought_Soil_Dry_P Parameter: Post Timepoint (hr) Value: 29
  misc_feature: MA Experiment 20001559 PARAMETER Experiment Name: At_Drought_Soil_Dry_P Parameter: Post-Treatment Value: Re-Water vs. No Drought
  misc_feature: MA Experiment 20001559 PARAMETER Experiment Name: At_Drought_Soil_Dry_P Parameter: Timepoint (day) Value: 14
  misc_feature: MA Experiment 20001559 PARAMETER Experiment Name: At_Drought_Soil_Dry_P Parameter: Treatment Value: Drought vs. No Drought
aaccatatcttccgatttctcttatctctctgaagccacaaatctccagattcattcgtcgtctcggttaaggttagacggagaagaagatacaacaaatatggcggttagtatgaaacaaatgtcgttggtcgtctctgctttgggcgtcttatcctttgttttgggagttatcgccgagaacaagaagcctgcgtctgggactccaataagtggaaaaggagtagttatctgcaaatacccatctgatccaactgttgccttgggatacctttctgctgcttttctccttgcctgcactgtagcaggatacaaatccttgttcatctcttacaagggaaagtctgttcctaactctgtcttgttcaaaagcaccagcttctctgtgttcttcaacattgccttgataacatctggactggccttgtctctgttgctctggccaaccattacagaacaacttcacttgacccgtaatgttcaccgaaacttagaaaccagttgccccacggctaagaccggtctgcttggtggaggtgcctttgtgtctttggactcgtgccttttctggttggttgctctgatgctcgctgataacgcccgtgaagaccattttgatgaagttgaaagcagaagcatcgatgggaactcttcctccagggatgtgaatctcaagattgatgcttgagagaatgatatgcttttattggtattgggtataagaagggtttttcatttgttttctacttgtttgattaggaaaataataatttgtttcttctgttgttttttttttttttaatgattggctagaatgttatgaaacccatctctgcaccttgatgcattgtgattcataagctgtatctgtgaaaaataatcttttggttatatctcttacatttgac

SEQ ID NO: 106131 - protein, 228 aa, Arabidopsis thaliana
  peptide (1)..(228): Ceres Seq. ID no. 13618824
  misc_feature (34)..(228): Homolog of NCBI NO: 15235839 NR Description: expressed protein [Arabidopsis thaliana]
  misc_feature (34)..(223): Homolog of NCBI NO: 8099143 NR Description: hypothetical protein [Oryza sativa]
TISSDFSYLSEATNLQIHSSSRLRLDGEEDTTNMAVSMKQMSLVVSALGVLSFVLGVIAENKKPASGTPISGKGVVICKYPSDPTVALGYLSAAFLLACTVAGYKSLFISYKGKSVPNSVLFKSTSFSVFFNIALITSGLALSLLLWPTITEQLHLTRNVHRNLETSCPTAKTGLLGGGAFVSLDSCLFWLVALMLADNAREDHFDEVESRSIDGNSSSRDVNLKIDA

SEQ ID NO: 106132 - protein, 195 aa, Arabidopsis thaliana
  peptide (1)..(195): Ceres Seq. ID no. 13618825
  misc_feature (1)..(195): Homolog of NCBI NO: 15235839 NR Description: expressed protein [Arabidopsis thaliana]
  misc_feature (1)..(190): Homolog of NCBI NO: 8099143 NR Description: hypothetical protein [Oryza sativa]
MAVSMKQMSLVVSALGVLSFVLGVIAENKKPASGTPISGKGVVICKYPSDPTVALGYLSAAFLLACTVAGYKSLFISYKGKSVPNSVLFKSTSFSVFFNIALITSGLALSLLLWPTITEQLHLTRNVHRNLETSCPTAKTGLLGGGAFVSLDSCLFWLVALMLADNAREDHFDEVESRSIDGNSSSRDVNLKIDA

SEQ ID NO: 106133 - protein, 191 aa, Arabidopsis thaliana; identical to SEQ ID NO: 27974
  peptide (1)..(191): Ceres Seq. ID no. 13618826
  misc_feature (1)..(191): Homolog of NCBI NO: 15235839 NR Description: expressed protein [Arabidopsis thaliana]
  misc_feature (1)..(186): Homolog of NCBI NO: 8099143 NR Description: hypothetical protein [Oryza sativa]

SEQ ID NO: 106134 - DNA, 1794 bp, Arabidopsis thaliana
  misc_feature (1)..(1794): Ceres Seq. ID no. 13618836
  misc_feature: MA Experiment ID: 108434 Result: Up-regulated in Transcription
  misc_feature: MA Experiment 108434 PARAMETER Experiment Name: At_Root_Tips_cDNA_P Parameter: Tissue Value: Root Tips
  misc_feature: MA Experiment ID: 108461 Result: Up-regulated in Transcription
  misc_feature: MA Experiment 108461 PARAMETER Experiment Name: At_Germinating_Seeds_cDNA_P Parameter: Age (day) Value: 1 vs. 0
  misc_feature: MA Experiment 108461 PARAMETER Experiment Name: At_Germinating_Seeds_cDNA_P Parameter: Tissue Value: Germinating Seeds
  misc_feature: MA Experiment ID: 108462 Result: Up-regulated in Transcription
  misc_feature: MA Experiment 108462 PARAMETER Experiment Name: At_Germinating_Seeds_cDNA_P Parameter: Age (day) Value: 2 vs. 0
  misc_feature: MA Experiment 108462 PARAMETER Experiment Name: At_Germinating_Seeds_cDNA_P Parameter: Tissue Value: Germinating Seeds
  misc_feature: MA Experiment ID: 20000179 Result: Up-regulated in Transcription
  misc_feature: MA Experiment 20000179 PARAMETER Experiment Name: At_Germinating_Seeds_P Parameter: Age (hr) Value: 6 vs. 0
  misc_feature: MA Experiment 20000179 PARAMETER Experiment Name: At_Germinating_Seeds_P Parameter: Tissue Value: Germinating Seeds
  misc_feature: MA Experiment ID: 20000180 Result: Up-regulated in Transcription
  misc_feature: MA Experiment 20000180 PARAMETER Experiment Name: At_Germinating_Seeds_P Parameter: Age (hr) Value: 24 vs. 0
  misc_feature: MA Experiment 20000180 PARAMETER Experiment Name: At_Germinating_Seeds_P Parameter: Tissue Value: Germinating Seeds
  misc_feature: MA Experiment ID: 20000794 Result: Up-regulated in Transcription
  misc_feature: MA Experiment 20000794 PARAMETER Experiment Name: At_Petals_P Parameter: Age (day) Value: 23-25 days
  misc_feature: MA Experiment 20000794 PARAMETER Experiment Name: At_Petals_P Parameter: Plant Line Value: WS
  misc_feature: MA Experiment 20000794 PARAMETER Experiment Name: At_Petals_P Parameter: Tissue Value: Petals vs. Whole plant
  misc_feature: MA Experiment ID: 20001451 Result: Down-regulated in Transcription
  misc_feature: MA Experiment 20001451 PARAMETER Experiment Name: At_Far-red-induction_P Parameter: Age (day) Value: 7
  misc_feature: MA Experiment 20001451 PARAMETER Experiment Name: At_Far-red-induction_P Parameter: Light Value: Far-red vs. White
  misc_feature: MA Experiment 20001451 PARAMETER Experiment Name: At_Far-red-induction_P Parameter: Organism Value: A. thaliana
  misc_feature: MA Experiment 20001451 PARAMETER Experiment Name: At_Far-red-induction_P Parameter: Plant Line Value: Columbia
  misc_feature: MA Experiment 20001451 PARAMETER Experiment Name: At_Far-red-induction_P Parameter: Timepoint (hr) Value: 24
  misc_feature: MA Experiment 20001451 PARAMETER Experiment Name: At_Far-red-induction_P Parameter: Tissue Value: Whole Plant
  misc_feature: MA Experiment ID: 20001556 Result: Up-regulated in Transcription
  misc_feature: MA Experiment 20001556 PARAMETER Experiment Name: At_Drought_Soil_Dry_P Parameter: Age (day) Value: 26
  misc_feature: MA Experiment 20001556 PARAMETER Experiment Name: At_Drought_Soil_Dry_P Parameter: Organism Value: A. thaliana
  misc_feature: MA Experiment 20001556 PARAMETER Experiment Name: At_Drought_Soil_Dry_P Parameter: Plant Line Value: WS
  misc_feature: MA Experiment 20001556 PARAMETER Experiment Name: At_Drought_Soil_Dry_P Parameter: Post Timepoint (hr) Value: None
  misc_feature: MA Experiment 20001556 PARAMETER Experiment Name: At_Drought_Soil_Dry_P Parameter: Post-Treatment Value: None
  misc_feature: MA Experiment 20001556 PARAMETER Experiment Name: At_Drought_Soil_Dry_P Parameter: Timepoint (day) Value: 12
  misc_feature: MA Experiment 20001556 PARAMETER Experiment Name: At_Drought_Soil_Dry_P Parameter: Treatment Value: Drought vs. No Drought
actctttcaacttttaaacataatcctaaatgactatcttacccctatcaagacaagcctgagaagtgagaacaacttcgtagacatcgtcgtgtctctctctcgttgaatccttgttaatctttttcttcaatctctcgatctgatcgttatcgaaaccgcgcgattctaaccaagtccagttaattttgtgctccatagcgattccatggcttctttaatgttatctctcggttccacttctctgttaccgcgcgagattaacaaggataagctaaagcttggaacttctgcttcgaacccgttcctaaaagcaaagtcttttagcagagtgactatgacggttgcagtgaagccttctcgtttcgagggtataactatggctccaccagaccctattcttggagtcagtgaagcattcaaagctgacactaacgggatgaaactcaatcttggtgttggtgcttatcgtactgaggaactccagccttatgtgcttaatgttgttaaaaaggcggagaatttgatgttggagagaggagataacaaagagtatcttccaattgaggggttggcagcattcaacaaggctactgctgagttgctatttggagctggtcatcctgttattaaggaacaaagagtagcaacaattcagggtctttcgggaacaggttcactgcgattagcagcggctcttatagagcgttatttccctggagcaaaagttgtgatctcatcaccaacctggggtaatcacaagaatatcttcaatgatgccaaagttccgtggtccgaataccgctactatgatccaaaaacaattggtttggattttgagggaatgatagcagatataaaggaagctccagaaggatccttcatcttgcttcacggatgtgctcacaacccaactggaattgacccaacaccagaacagtgggtaaaaattgctgatgtcattcaggaaaagaaccatatcccatttttcgatgttgcataccagggctttgctagtggaagccttgatgaagatgcagcatctgtgagattatttgctgagcggggaatggagttttttgttgctcagtcatatagtaaaaatttaggtttgtatgcagaaagaattggggcaatcaatgtcgtgtgctcctcagctgatgctgctacaagggtcaagagccagttgaaaaggattgctcggcctatgtactcgaatccaccagttcatggggcgagaatcgtggccaatgtagtgggtgatgtaactatgttcagtgaatggaaagcagagatggaaatgatggcaggaagaataaagacggttagacaagagctgtatgatagcctcgtttcaaaagacaagagcgggaaggactggtccttcattctgaagcaaattggcatgttctctttcaccggcctaaacaaagctcagagcgataacatgacggacaaatggcatgtgtatatgactaaagacgggaggatatcattggccggattatctctggccaaatgcgagtatcttgctgatgcgatcatcgactcataccataacgtaagctgagcttccatctcagtagatgacaataagaaacagttttatataccctttttagcttcttcttgatctttgattgaaaccagatggctaaattaataagctagcatcacactatgattgctagacaattttcaaggaaacttttgatttgatcgtgtttgacaggccttgttgtattgggagactcccatcgagttatagaagaacttgttacgattgtattttac

SEQ ID NO: 106135 - protein, 453 aa, Arabidopsis thaliana; identical to SEQ ID NO: 39108
  peptide (1)..(453): Ceres Seq. ID no. 13618837
  misc_feature (131)..(449): Pfam Name: Aminotransferase class I and II Pfam Description: Aminotransferase class I and II
  misc_feature (1)..(453): Homolog of NCBI NO: 15236129 NR Description: aspartate aminotransferase, chloroplast A/AAT1/Asp5) [Arabidopsis thaliana] >gi|30689228|ref|NP_849483.1| aminotransferase, chloroplast (transaminase A/AAT1/Asp5)
  misc_feature (1)..(453): Homolog of NCBI NO: 531555 NR Description: aspartate aminotransferase [Arabidopsis thaliana]
  misc_feature (1)..(453): Homolog of NCBI NO: 21618222 NR Description: aspartate aminotransferase [Arabidopsis thaliana]
  misc_feature (1)..(453): Homolog of NCBI NO: 1076500 NR Description: aspartate transaminase (EC 2.6.1.1) - alfalfa
  misc_feature (1)..(453): Homolog of NCBI NO: 445118 NR Description: Asp aminotransferase
  misc_feature (1)..(453): Homolog of NCBI NO: 25990362 NR Description: aspartate aminotransferase [Phaseolus vulgaris]
  misc_feature (2)..(453): Homolog of NCBI NO: 2605932 NR Description: aspartate aminotransferase [Lotus corniculatus]
  misc_feature (1)..(453): Homolog of NCBI NO: 485495 NR Description: aspartate transaminase (EC 2.6.1.1) AAT5

SEQ ID NO: 106136 - protein, 449 aa, Arabidopsis thaliana; identical to SEQ ID NO: 39109
  peptide (1)..(449): Ceres Seq. ID no. 13618838
  misc_feature (127)..(445): Pfam Name: Aminotransferase class I and II Pfam Description: Aminotransferase class I and II
  misc_feature (1)..(449): Homolog of NCBI NO: 15236129 NR Description: aspartate aminotransferase, chloroplast A/AAT1/Asp5) [Arabidopsis thaliana] >gi|30689228|ref|NP_849483.1| aminotransferase, chloroplast (transaminase A/AAT1/Asp5)
  misc_feature (1)..(449): Homolog of NCBI NO: 531555 NR Description: aspartate aminotransferase [Arabidopsis thaliana]
  misc_feature (1)..(449): Homolog of NCBI NO: 21618222 NR Description: aspartate aminotransferase [Arabidopsis thaliana]
  misc_feature (1)..(449): Homolog of NCBI NO: 1076500 NR Description: aspartate transaminase (EC 2.6.1.1) - alfalfa
  misc_feature (1)..(449): Homolog of NCBI NO: 445118 NR Description: Asp aminotransferase
  misc_feature (1)..(449): Homolog of NCBI NO: 25990362 NR Description: aspartate aminotransferase [Phaseolus vulgaris]
  misc_feature (1)..(449): Homolog of NCBI NO: 2605932 NR Description: aspartate aminotransferase [Lotus corniculatus]
  misc_feature (1)..(449): Homolog of NCBI NO: 485495 NR Description: aspartate transaminase (EC 2.6.1.1) AAT5

SEQ ID NO: 106137 - protein, 410 aa, Arabidopsis thaliana; identical to SEQ ID NO: 39110
  peptide (1)..(410): Ceres Seq. ID no. 13618839
  misc_feature (88)..(406): Pfam Name: Aminotransferase class I and II Pfam Description: Aminotransferase class I and II
  misc_feature (1)..(410): Homolog of NCBI NO: 15236129 NR Description: aspartate aminotransferase, chloroplast A/AAT1/Asp5) [Arabidopsis thaliana] >gi|30689228|ref|NP_849483.1| aminotransferase, chloroplast (transaminase A/AAT1/Asp5)
  misc_feature (1)..(410): Homolog of NCBI NO: 531555 NR Description: aspartate aminotransferase [Arabidopsis thaliana]
  misc_feature (1)..(410): Homolog of NCBI NO: 21618222 NR Description: aspartate aminotransferase [Arabidopsis thaliana]
  misc_feature (1)..(410): Homolog of NCBI NO: 1076500 NR Description: aspartate transaminase (EC 2.6.1.1) - alfalfa
  misc_feature (1)..(410): Homolog of NCBI NO: 445118 NR Description: Asp aminotransferase
  misc_feature (1)..(410): Homolog of NCBI NO: 25990362 NR Description: aspartate aminotransferase [Phaseolus vulgaris]
  misc_feature (1)..(410): Homolog of NCBI NO: 2605932 NR Description: aspartate aminotransferase [Lotus corniculatus]
  misc_feature (1)..(410): Homolog of NCBI NO: 485495 NR Description: aspartate transaminase (EC 2.6.1.1) AAT5

SEQ ID NO: 106138 - DNA, 810 bp, Arabidopsis thaliana
  misc_feature (1)..(810): Ceres Seq. ID no. 13618840
  misc_feature: MA Experiment ID: 108434 Result: Up-regulated in Transcription
  misc_feature: MA Experiment 108434 PARAMETER Experiment Name: At_Root_Tips_cDNA_P Parameter: Tissue Value: Root Tips
  misc_feature: MA Experiment ID: 108462 Result: Down-regulated in Transcription
  misc_feature: MA Experiment 108462 PARAMETER Experiment Name: At_Germinating_Seeds_cDNA_P Parameter: Age (day) Value: 2 vs. 0
  misc_feature: MA Experiment 108462 PARAMETER Experiment Name: At_Germinating_Seeds_cDNA_P Parameter: Tissue Value: Germinating Seeds
  misc_feature: MA Experiment ID: 108463 Result: Down-regulated in Transcription
  misc_feature: MA Experiment 108463 PARAMETER Experiment Name: At_Germinating_Seeds_cDNA_P Parameter: Age (day) Value: 3 vs. 0
  misc_feature: MA Experiment 108463 PARAMETER Experiment Name: At_Germinating_Seeds_cDNA_P Parameter: Tissue Value: Germinating Seeds
  misc_feature: MA Experiment ID: 108464 Result: Down-regulated in Transcription
  misc_feature: MA Experiment 108464 PARAMETER Experiment Name: At_Germinating_Seeds_cDNA_P Parameter: Age (day) Value: 4 vs. 0
  misc_feature: MA Experiment 108464 PARAMETER Experiment Name: At_Germinating_Seeds_cDNA_P Parameter: Tissue Value: Germinating Seeds
  misc_feature: MA Experiment ID: 108579 Result: Down-regulated in Transcription
  misc_feature: MA Experiment 108579 PARAMETER Experiment Name: At_4deg_Cold_cDNA_P Parameter: Temperature (deg C) Value: 4 vs. 22
  misc_feature: MA Experiment 108579 PARAMETER Experiment Name: At_4deg_Cold_cDNA_P Parameter: Timepoint (hr) Value: 6
  misc_feature: MA Experiment 108579 PARAMETER Experiment Name: At_4deg_Cold_cDNA_P Parameter: Tissue Value: Aerial
  misc_feature: MA Experiment ID: 20000224 Result: Down-regulated in Transcription
  misc_feature: MA Experiment ID: 20000451 Result: Down-regulated in Transcription
  misc_feature: MA Experiment 20000451 PARAMETER Experiment Name: At_CS6879_Shoots-Roots_P Parameter: Age (day) Value: 14
  misc_feature: MA Experiment 20000451 PARAMETER Experiment Name: At_CS6879_Shoots-Roots_P Parameter: Organism Value: A. thaliana
  misc_feature: MA Experiment 20000451 PARAMETER Experiment Name: At_CS6879_Shoots-Roots_P Parameter: Plant Line Value: CS6879 vs. WS
  misc_feature: MA Experiment 20000451 PARAMETER Experiment Name: At_CS6879_Shoots-Roots_P Parameter: Tissue Value: Roots
  misc_feature: MA Experiment ID: 20000452 Result: Down-regulated in Transcription
  misc_feature: MA Experiment 20000452 PARAMETER Experiment Name: At_CS6879_Shoots-Roots_P Parameter: Age (day) Value: 14
  misc_feature: MA Experiment 20000452 PARAMETER Experiment Name: At_CS6879_Shoots-Roots_P Parameter: Organism Value: A. thaliana
  misc_feature: MA Experiment 20000452 PARAMETER Experiment Name: At_CS6879_Shoots-Roots_P Parameter: Plant Line Value: CS6879 vs. WS
  misc_feature: MA Experiment 20000452 PARAMETER Experiment Name: At_CS6879_Shoots-Roots_P Parameter: Tissue Value: Shoots
gagttggaccagtcggaggattagggtttcaacggagactcactagtcgatctccgatcctttcttctacccgcccgaaatccgtcgaaacttctcttctttaccattgatttgcctcgtctcagctcaattctcttccgttgctgcttcgtttagttgttgcttcgcttcagtactctggtggtgggagagatgaatcacggccaacaatctggtgaggcaaagcatgaagatgatgctgctcttacagagttccttgcttctctgatggattatactcctactattcctgatgatttagtggagcactacttggctaagagtggatttcagtgccccgacgtacgattgataaggctagttgctgtggctacacaaaagtttgttgcagatgttgccagtgacgcccttcagcattgcaaggctagaccagcaccagttgtgaaagacaaaaaacagcaaaaggataagcgtttggtattgacaatggaagatctttcaaaagctttgcgtgagtatggtgtgaacgtgaagcatccagaatattttgctgatagcccttcgactggaatggaccctgcaacaagggacgaatagaaaccaggaattcctcaaaatctttgcctagtaaggacggtcatgtgtctcagatccctgattctctgttgtgtttcagttaaaaacaaaactcacttgtcttgctagtcctcaattactacattacatgtatattcgtttgttgtttgttctctggtgatttttggggttctacatcacttatccaccattcttgcaagtctccaagtcgtg

SEQ ID NO: 106139 - protein, 134 aa, Arabidopsis thaliana; identical to SEQ ID NO: 36011
  peptide (1)..(134): Ceres Seq. ID no. 13618841
  misc_feature (30)..(80): Pfam Name: Transcription initiation factor TFIID 23-30kDa subunit Pfam Description: Transcription initiation factor TFIID 23-30kDa
  misc_feature (1)..(134): Homolog of NCBI NO: 15236059 NR Description: Transcription factor II homolog [Arabidopsis >gi|30689137|ref|NP_849481.1| Transcription factor II homolog thaliana] >gi|7488383|pir||T05098 transcription factor IID 30K
  misc_feature (1)..(134): Homolog of NCBI NO: 26450720 NR Description: putative transcription factor II [Arabidopsis
  misc_feature (7)..(119): Homolog of NCBI NO: 9910576 NR Description: TAF10 RNA polymerase II, TATA box binding protein
  misc_feature (7)..(119): Homolog of NCBI NO: 26338586 NR Description: unnamed protein product [Mus musculus]
  misc_feature (7)..(119): Homolog of NCBI NO: 21619259 NR Description: Ilk protein [Mus musculus]
  misc_feature (7)..(119): Homolog of NCBI NO: 34859827 NR Description: similar to Ilk protein [Rattus norvegicus]
  misc_feature (18)..(119): Homolog of NCBI NO: 5454106 NR Description: TBP-related factor 10; TATA box binding protein associated factor, RNA polymerase II; TAF10 RNA polymerase II,
  misc_feature (7)..(119): Homolog of NCBI NO: 20863106 NR Description: similar to Transcription initiation factor TFIID
  misc_feature (18)..(119): Homolog of NCBI NO: 2136293 NR Description: transcription factor IID 30k chain - human
  misc_feature (1)..(118): Homolog of NCBI NO: 17137648 NR Description: TBP-associated factor 10b CG3069-PA [Drosophila

SEQ ID NO: 106140 - protein, 109 aa, Arabidopsis thaliana; identical to SEQ ID NO: 36012
  peptide (1)..(109): Ceres Seq. ID no. 13618842
  misc_feature (5)..(55): Pfam Name: Transcription initiation factor TFIID 23-30kDa subunit Pfam Description: Transcription initiation factor TFIID 23-30kDa
  misc_feature (1)..(109): Homolog of NCBI NO: 15236059 NR Description: Transcription factor II homolog [Arabidopsis >gi|30689137|ref|NP_849481.1| Transcription factor II homolog thaliana] >gi|7488383|pir||T05098 transcription factor IID 30K
  misc_feature (1)..(109): Homolog of NCBI NO: 26450720 NR Description: putative transcription factor II [Arabidopsis
  misc_feature (1)..(94): Homolog of NCBI NO: 9910576 NR Description: TAF10 RNA polymerase II, TATA box binding protein
  misc_feature (1)..(94): Homolog of NCBI NO: 26338586 NR Description: unnamed protein product [Mus musculus]
  misc_feature (1)..(94): Homolog of NCBI NO: 21619259 NR Description: Ilk protein [Mus musculus]
  misc_feature (1)..(94): Homolog of NCBI NO: 34859827 NR Description: similar to Ilk protein [Rattus norvegicus]
  misc_feature (1)..(94): Homolog of NCBI NO: 5454106 NR Description: TBP-related factor 10; TATA box binding protein associated factor, RNA polymerase II; TAF10 RNA polymerase II,
  misc_feature (1)..(94): Homolog of NCBI NO: 20863106 NR Description: similar to Transcription initiation factor TFIID
  misc_feature (1)..(94): Homolog of NCBI NO: 2136293 NR Description: transcription factor IID 30k chain - human
  misc_feature (1)..(93): Homolog of NCBI NO: 17137648 NR Description: TBP-associated factor 10b CG3069-PA [Drosophila

SEQ ID NO: 106141 - DNA, 1449 bp, Arabidopsis thaliana
  misc_feature (1)..(1449): Ceres Seq. ID no. 13618847
  misc_feature: MA Experiment ID: 108595 Result: Down-regulated in Transcription
  misc_feature: MA Experiment 108595 PARAMETER Experiment Name: At_Ler-pi_Ovule_cDNA_P Parameter: Plant Line Value: null
  misc_feature: MA Experiment ID: 20000180 Result: Down-regulated in Transcription
  misc_feature: MA Experiment 20000180 PARAMETER Experiment Name: At_Germinating_Seeds_P Parameter: Age (hr) Value: 24 vs. 0
  misc_feature: MA Experiment 20000180 PARAMETER Experiment Name: At_Germinating_Seeds_P Parameter: Tissue Value: Germinating Seeds
  misc_feature: MA Experiment ID: 20001557 Result: Up-regulated in Transcription
  misc_feature: MA Experiment 20001557 PARAMETER Experiment Name: At_Drought_Soil_Dry_P Parameter: Age (day) Value: 27
  misc_feature: MA Experiment 20001557 PARAMETER Experiment Name: At_Drought_Soil_Dry_P Parameter: Organism Value: A. thaliana
  misc_feature: MA Experiment 20001557 PARAMETER Experiment Name: At_Drought_Soil_Dry_P Parameter: Plant Line Value: WS
  misc_feature: MA Experiment 20001557 PARAMETER Experiment Name: At_Drought_Soil_Dry_P Parameter: Post Timepoint (hr) Value: 3
  misc_feature: MA Experiment 20001557 PARAMETER Experiment Name: At_Drought_Soil_Dry_P Parameter: Post-Treatment Value: Re-Water vs. No Drought
  misc_feature: MA Experiment 20001557 PARAMETER Experiment Name: At_Drought_Soil_Dry_P Parameter: Timepoint (day) Value: 13
  misc_feature: MA Experiment 20001557 PARAMETER Experiment Name: At_Drought_Soil_Dry_P Parameter: Treatment Value: Drought vs. No Drought
aaaagtaaaaccctaaaatctcaacgaaagggacgaccaattgttcgacgattggtcatggggaaaaccggaatccaattgttcgacgattcgaggaatgggtttttctccgtttccgatttaggattcgattcgagcctaaacagctctaattaccacccaattggtgggttattcgccagcgttaatcagactaatccattcgcatccctctcgtcctcggatctttccaacagaggcaacaacagcttctctacccagctcaatgatctctacaccaagtatatgccgggaaaagaggaggaggaagaagtagttaatggcgagaagaggaagaggaagaagaaaggtgggctcacactgaagattaagatcgctaatccttcgttgcggcggctattaagcggagcagtagctggagcggtgtcgagaacggtggttgcgccgttggagacaatcaggacgcatctaatggtgggaagtggaggaaactccagcactgaagtgttcagtgatatcatgaagcatgaaggttggactggtctcttcaggggcaatttggtcaatgtcattcgtgttgcacctgctcgagccgtcgagctttttgtattcgagaccgtaaacaagaaattgtcgccgccacatggacaagaatcgaaaatcccaattccagcttctttactggctggtgcctgtgctggagttagccagacactcttgacataccctcttgaactagtcaagactcgccttacaattcagagaggtgtttacaaagggatttttgatgcgtttctcaaaatcatacgcgaggaaggacccacagaactctacaggggtcttgctcctagccttattggagttgttccatacgcagctacaaattactttgcatatgattctttgagaaaagcataccggagtttttcaaagcaggagaagattggaaacattgagactcttttgataggttctttagcaggtgcactatcgagcactgcaactttccctcttgaagtggcccggaagcatatgcaggtgggagctgttagcgggagggttgtgtacaagaacatgttgcacgctctggtgaccatacttgagcatgaaggtattctcggttggtacaaagggcttggaccgagttgcttgaagttggttcctgctgctggaatctccttcatgtgttatgaagcttgcaagaagatactcatcgagaacaaccaagaagcttgattttggaattgtatggattcgtggcaaattttaaggattgatcagagaaacacattgtggatactaattgggttcattttacaccacttgagatttcacaaattagtattgaggggggattaaaagattcactctacctttttgtttgaactttacgttttcaatttttgattgatctgattctgattcaaataagagtttacacaatatctc

SEQ ID NO: 106142 - protein, 411 aa, Arabidopsis thaliana; identical to SEQ ID NO: 28871
  peptide (1)..(411): Ceres Seq. ID no. 13618848
  misc_feature (20)..(411): Homolog of NCBI NO: 15236783 NR Description: mitochondrial carrier protein family [Arabidopsis
  misc_feature (58)..(410): Homolog of NCBI NO: 4138581 NR Description: mitochondrial energy transfer protein [Solanum
  misc_feature (98)..(410): Homolog of NCBI NO: 231654 NR Description: Brittle-1 protein, chloroplast precursor
  misc_feature (228)..(408): Homolog of NCBI NO: 15231083 NR Description: mitochondrial carrier protein family [Arabidopsis >gi|9293980|dbj|BAB01883.1| contains similarity to membrane [Arabidopsis thaliana] >gi|29029108|gb|AAO64933.1| At3g20240
  misc_feature (228)..(408): Homolog of NCBI NO: 21537282 NR Description: mitochondrial carrier protein, putative
  misc_feature (131)..(221): Homolog of NCBI NO: 15231083 NR Description: mitochondrial carrier protein family [Arabidopsis >gi|9293980|dbj|BAB01883.1| contains similarity to membrane [Arabidopsis thaliana] >gi|29029108|gb|AAO64933.1| At3g20240
  misc_feature (131)..(221): Homolog of NCBI NO: 21537282 NR Description: mitochondrial carrier protein, putative
  misc_feature (128)..(402): Homolog of NCBI NO: 6746567 NR Description: hydrogenosomal membrane protein 31 precursor
  misc_feature (125)..(405): Homolog of NCBI NO: 32405390 NR Description: hypothetical protein [Neurospora crassa]
  misc_feature (101)..(404): Homolog of NCBI NO: 34877651 NR Description: similar to CG4241-PA [Rattus norvegicus]

SEQ ID NO: 106143 - protein, 392 aa, Arabidopsis thaliana; identical to SEQ ID NO: 28872
  peptide (1)..(392): Ceres Seq. ID no. 13618849
  misc_feature (1)..(392): Homolog of NCBI NO: 15236783 NR Description: mitochondrial carrier protein family [Arabidopsis
  misc_feature (39)..(391): Homolog of NCBI NO: 4138581 NR Description: mitochondrial energy transfer protein [Solanum
  misc_feature (79)..(391): Homolog of NCBI NO: 231654 NR Description: Brittle-1 protein, chloroplast precursor
  misc_feature (209)..(389): Homolog of NCBI NO: 15231083 NR Description: mitochondrial carrier protein family [Arabidopsis >gi|9293980|dbj|BAB01883.1| contains similarity to membrane [Arabidopsis thaliana] >gi|29029108|gb|AAO64933.1| At3g20240
  misc_feature (209)..(389): Homolog of NCBI NO: 21537282 NR Description: mitochondrial carrier protein, putative
  misc_feature (112)..(202): Homolog of NCBI NO: 15231083 NR Description: mitochondrial carrier protein family [Arabidopsis >gi|9293980|dbj|BAB01883.1| contains similarity to membrane [Arabidopsis thaliana] >gi|29029108|gb|AAO64933.1| At3g20240
  misc_feature (112)..(202): Homolog of NCBI NO: 21537282 NR Description: mitochondrial carrier protein, putative
  misc_feature (109)..(383): Homolog of NCBI NO: 6746567 NR Description: hydrogenosomal membrane protein 31 precursor
  misc_feature (106)..(386): Homolog of NCBI NO: 32405390 NR Description: hypothetical protein [Neurospora crassa]
  misc_feature (82)..(385): Homolog of NCBI NO: 34877651 NR Description: similar to CG4241-PA [Rattus norvegicus]

SEQ ID NO: 106144 - protein, 316 aa, Arabidopsis thaliana; identical to SEQ ID NO: 28873
  peptide (1)..(316): Ceres Seq. ID no. 13618850
  misc_feature (1)..(316): Homolog of NCBI NO: 15236783 NR Description: mitochondrial carrier protein family [Arabidopsis
  misc_feature (1)..(315): Homolog of NCBI NO: 4138581 NR Description: mitochondrial energy transfer protein [Solanum
  misc_feature (3)..(315): Homolog of NCBI NO: 231654 NR Description: Brittle-1 protein, chloroplast precursor
  misc_feature (133)..(313): Homolog of NCBI NO: 15231083 NR Description: mitochondrial carrier protein family [Arabidopsis >gi|9293980|dbj|BAB01883.1| contains similarity to membrane [Arabidopsis thaliana] >gi|29029108|gb|AAO64933.1| At3g20240
  misc_feature (133)..(313): Homolog of NCBI NO: 21537282 NR Description: mitochondrial carrier protein, putative
  misc_feature (36)..(126): Homolog of NCBI NO: 15231083 NR Description: mitochondrial carrier protein family [Arabidopsis >gi|9293980|dbj|BAB01883.1| contains similarity to membrane [Arabidopsis thaliana] >gi|29029108|gb|AAO64933.1| At3g20240
  misc_feature (36)..(126): Homolog of NCBI NO: 21537282 NR Description: mitochondrial carrier protein, putative
  misc_feature (33)..(307): Homolog of NCBI NO: 6746567 NR Description: hydrogenosomal membrane protein 31 precursor
  misc_feature (30)..(310): Homolog of NCBI NO: 32405390 NR Description: hypothetical protein [Neurospora crassa]
  misc_feature (6)..(309): Homolog of NCBI NO: 34877651 NR Description: similar to CG4241-PA [Rattus norvegicus]

SEQ ID NO: 106145 - DNA, 1296 bp, Arabidopsis thaliana
  misc_feature (1)..(1296): Ceres Seq. ID no. 13618851
  misc_feature: MA Experiment ID: 108464 Result: Down-regulated in Transcription
  misc_feature: MA Experiment 108464 PARAMETER Experiment Name: At_Germinating_Seeds_cDNA_P Parameter: Age (day) Value: 4 vs. 0
  misc_feature: MA Experiment 108464 PARAMETER Experiment Name: At_Germinating_Seeds_cDNA_P Parameter: Tissue Value: Germinating Seeds
  misc_feature: MA Experiment ID: 108489 Result: Down-regulated in Transcription
  misc_feature: MA Experiment ID: 108573 Result: Down-regulated in Transcription
  misc_feature: MA Experiment 108573 PARAMETER Experiment Name: At_Drought_cDNA_P Parameter: Timepoint (hr) Value: 6
  misc_feature: MA Experiment 108573 PARAMETER Experiment Name: At_Drought_cDNA_P Parameter: Tissue Value: Aerial
  misc_feature: MA Experiment 108573 PARAMETER Experiment Name: At_Drought_cDNA_P Parameter: Treatment Value: Drought vs. No Drought
  misc_feature: MA Experiment ID: 20000069 Result: Up-regulated in Transcription
  misc_feature: MA Experiment 20000069 PARAMETER Experiment Name: At_100uM_ABA_Mutants_cDNA_P Parameter: Plant Line Value: CS23
  misc_feature: MA Experiment 20000069 PARAMETER Experiment Name: At_100uM_ABA_Mutants_cDNA_P Parameter: Timepoint (hr) Value: 6
  misc_feature: MA Experiment 20000069 PARAMETER Experiment Name: At_100uM_ABA_Mutants_cDNA_P Parameter: Tissue Value: Aerial
  misc_feature: MA Experiment 20000069 PARAMETER Experiment Name: At_100uM_ABA_Mutants_cDNA_P Parameter: Treatment Value: 100uM ABA vs. No Treatment
  misc_feature: MA Experiment ID: 20000070 Result: Up-regulated in Transcription
  misc_feature: MA Experiment 20000070 PARAMETER Experiment Name: At_100uM_ABA_Mutants_cDNA_P Parameter: Plant Line Value: CS24
  misc_feature: MA Experiment 20000070 PARAMETER Experiment Name: At_100uM_ABA_Mutants_cDNA_P Parameter: Timepoint (hr) Value: 6
  misc_feature: MA Experiment 20000070 PARAMETER Experiment Name: At_100uM_ABA_Mutants_cDNA_P Parameter: Tissue Value: Aerial
  misc_feature: MA Experiment 20000070 PARAMETER Experiment Name: At_100uM_ABA_Mutants_cDNA_P Parameter: Treatment Value: 100uM ABA vs. No Treatment
  misc_feature: MA Experiment ID: 20000071 Result: Up-regulated in Transcription
  misc_feature: MA Experiment 20000071 PARAMETER Experiment Name: At_100uM_ABA_Mutants_cDNA_P Parameter: Plant Line Value: CS8104
  misc_feature: MA Experiment 20000071 PARAMETER Experiment Name: At_100uM_ABA_Mutants_cDNA_P Parameter: Timepoint (hr) Value: 6
  misc_feature: MA Experiment 20000071 PARAMETER Experiment Name: At_100uM_ABA_Mutants_cDNA_P Parameter: Tissue Value: Aerial
  misc_feature: MA Experiment 20000071 PARAMETER Experiment Name: At_100uM_ABA_Mutants_cDNA_P Parameter: Treatment Value: 100uM ABA vs. No Treatment
  misc_feature: MA Experiment ID: 20000086 Result: Up-regulated in Transcription
  misc_feature: MA Experiment 20000086 PARAMETER Experiment Name: At_100uM_ABA_Mutants_cDNA_P Parameter: Plant Line Value: CS22
  misc_feature: MA Experiment 20000086 PARAMETER Experiment Name: At_100uM_ABA_Mutants_cDNA_P Parameter: Timepoint (hr) Value: 6
  misc_feature: MA Experiment 20000086 PARAMETER Experiment Name: At_100uM_ABA_Mutants_cDNA_P Parameter: Tissue Value: Aerial
  misc_feature: MA Experiment 20000086 PARAMETER Experiment Name: At_100uM_ABA_Mutants_cDNA_P Parameter: Treatment Value: 100uM ABA vs. No Treatment
  misc_feature: MA Experiment ID: 20000088 Result: Up-regulated in Transcription
  misc_feature: MA Experiment 20000088 PARAMETER Experiment Name: At_100uM_ABA_Mutants_cDNA_P Parameter: Plant Line Value: Landsberg
  misc_feature: MA Experiment 20000088 PARAMETER Experiment Name: At_100uM_ABA_Mutants_cDNA_P Parameter: Timepoint (hr) Value: 6
  misc_feature: MA Experiment 20000088 PARAMETER Experiment Name: At_100uM_ABA_Mutants_cDNA_P Parameter: Tissue Value: Aerial
  misc_feature: MA Experiment 20000088 PARAMETER Experiment Name: At_100uM_ABA_Mutants_cDNA_P Parameter: Treatment Value: 100uM ABA vs. No Treatment
  misc_feature: MA Experiment ID: 20000090 Result: Up-regulated in Transcription
  misc_feature: MA Experiment ID: 20000111 Result: Down-regulated in Transcription
  misc_feature: MA Experiment 20000111 PARAMETER Experiment Name: At_42deg_Heat_cDNA_P Parameter: Temperature (deg C) Value: 42 vs. 22
  misc_feature: MA Experiment 20000111 PARAMETER Experiment Name: At_42deg_Heat_cDNA_P Parameter: Timepoint (hr) Value: 6
  misc_feature: MA Experiment 20000111 PARAMETER Experiment Name: At_42deg_Heat_cDNA_P Parameter: Tissue Value: Aerial
  misc_feature: MA Experiment ID: 20000112 Result: Down-regulated in Transcription
  misc_feature: MA Experiment 20000112 PARAMETER Experiment Name: At_42deg_Heat_cDNA_P Parameter: Temperature (deg C) Value: 42 vs. 22
  misc_feature: MA Experiment 20000112 PARAMETER Experiment Name: At_42deg_Heat_cDNA_P Parameter: Timepoint (hr) Value: 2
  misc_feature: MA Experiment 20000112 PARAMETER Experiment Name: At_42deg_Heat_cDNA_P Parameter: Tissue Value: Aerial
  misc_feature: MA Experiment ID: 20000113 Result: Down-regulated in Transcription
  misc_feature: MA Experiment 20000113 PARAMETER Experiment Name: At_42deg_Heat_cDNA_P Parameter: Temperature (deg C) Value: 42 vs. 22
  misc_feature: MA Experiment 20000113 PARAMETER Experiment Name: At_42deg_Heat_cDNA_P Parameter: Timepoint (hr) Value: 8
  misc_feature: MA Experiment 20000113 PARAMETER Experiment Name: At_42deg_Heat_cDNA_P Parameter: Tissue Value: Aerial
  misc_feature: MA Experiment ID: 20000117 Result: Up-regulated in Transcription
  misc_feature: MA Experiment 20000117 PARAMETER Experiment Name: At_100uM_ABA_Mutants_cDNA_P Parameter: Plant Line Value: Columbia
  misc_feature: MA Experiment 20000117 PARAMETER Experiment Name: At_100uM_ABA_Mutants_cDNA_P Parameter: Timepoint (hr) Value: 6
  misc_feature: MA Experiment 20000117 PARAMETER Experiment Name: At_100uM_ABA_Mutants_cDNA_P Parameter: Tissue Value: Aerial
  misc_feature: MA Experiment 20000117 PARAMETER Experiment Name: At_100uM_ABA_Mutants_cDNA_P Parameter: Treatment Value: 100uM ABA vs. No Treatment
  misc_feature: MA Experiment ID: 20000173 Result: Down-regulated in Transcription
  misc_feature: MA Experiment 20000173 PARAMETER Experiment Name: At_42deg_Heat_P Parameter: Age (day) Value: 14
  misc_feature: MA Experiment 20000173 PARAMETER Experiment Name: At_42deg_Heat_P Parameter: Organism Value: A. thaliana
  misc_feature: MA Experiment 20000173 PARAMETER Experiment Name: At_42deg_Heat_P Parameter: Plant Line Value: WS
  misc_feature: MA Experiment 20000173 PARAMETER Experiment Name: At_42deg_Heat_P Parameter: Temperature (deg C) Value: 42 vs. 22
  misc_feature: MA Experiment 20000173 PARAMETER Experiment Name: At_42deg_Heat_P Parameter: Timepoint (hr) Value: 6
  misc_feature: MA Experiment 20000173 PARAMETER Experiment Name: At_42deg_Heat_P Parameter: Tissue Value: Aerial
  misc_feature: MA Experiment ID: 20000179 Result: Up-regulated in Transcription
  misc_feature: MA Experiment 20000179 PARAMETER Experiment Name: At_Germinating_Seeds_P Parameter: Age (hr) Value: 6 vs. 0
  misc_feature: MA Experiment 20000179 PARAMETER Experiment Name: At_Germinating_Seeds_P Parameter: Tissue Value: Germinating Seeds
  misc_feature: MA Experiment ID: 20000182 Result: Down-regulated in Transcription
  misc_feature: MA Experiment 20000182 PARAMETER Experiment Name: At_2mM_SA_P Parameter: Age (day) Value: 14
  misc_feature: MA Experiment 20000182 PARAMETER Experiment Name: At_2mM_SA_P Parameter: Organism Value: A. thaliana
  misc_feature: MA Experiment 20000182 PARAMETER Experiment Name: At_2mM_SA_P Parameter: Plant Line Value: WS
  misc_feature: MA Experiment 20000182 PARAMETER Experiment Name: At_2mM_SA_P Parameter: Timepoint (hr) Value: 6
  misc_feature: MA Experiment 20000182 PARAMETER Experiment Name: At_2mM_SA_P Parameter: Tissue Value: Aerial
  misc_feature: MA Experiment 20000182 PARAMETER Experiment Name: At_2mM_SA_P Parameter: Treatment Value: 2mM SA vs. No Treatment
  misc_feature: MA Experiment ID: 20000184 Result: Down-regulated in Transcription
  misc_feature: MA Experiment 20000184 PARAMETER Experiment Name: At_Shoots__P Parameter: Age (day) Value: 7
  misc_feature: MA Experiment 20000184 PARAMETER Experiment Name: At_Shoots__P Parameter: Tissue Value: Shoots vs. Whole Plant
  misc_feature: MA Experiment ID: 20000185 Result: Down-regulated in Transcription
  misc_feature: MA Experiment 20000185 PARAMETER Experiment Name: At_Roots__P Parameter: Age (day) Value: 7 vs. 21
  misc_feature: MA Experiment 20000185 PARAMETER Experiment Name: At_Roots__P Parameter: Organism Value: A. thaliana
  misc_feature: MA Experiment 20000185 PARAMETER Experiment Name: At_Roots__P Parameter: Tissue Value: Roots vs. Whole Plant
  misc_feature: MA Experiment ID: 20000224 Result: Up-regulated in Transcription
  misc_feature: MA Experiment ID: 20000437 Result: Up-regulated in Transcription
  misc_feature: MA Experiment 20000437 PARAMETER Experiment Name: At_Drought_P Parameter: Age (day) Value: 8
  misc_feature: MA Experiment 20000437 PARAMETER Experiment Name: At_Drought_P Parameter: Organism Value: A. thaliana
  misc_feature: MA Experiment 20000437 PARAMETER Experiment Name: At_Drought_P Parameter: Plant Line Value: WS
  misc_feature: MA Experiment 20000437 PARAMETER Experiment Name: At_Drought_P Parameter: Timepoint (hr) Value: 24
  misc_feature: MA Experiment 20000437 PARAMETER Experiment Name: At_Drought_P Parameter: Tissue Value: Whole Plant
  misc_feature: MA Experiment 20000437 PARAMETER Experiment Name: At_Drought_P Parameter: Treatment Value: Drought vs. No Drought
  misc_feature: MA Experiment ID: 20000438 Result: Down-regulated in Transcription
  misc_feature: MA Experiment 20000438 PARAMETER Experiment Name: At_Shoots__P Parameter: Age (day) Value: 14
  misc_feature: MA Experiment 20000438 PARAMETER Experiment Name: At_Shoots__P Parameter: Tissue Value: Shoots vs. Whole Plant
  misc_feature: MA Experiment ID: 20000439 Result: Down-regulated in Transcription
  misc_feature: MA Experiment 20000439 PARAMETER Experiment Name: At_Roots__P Parameter: Age (day) Value: 14 vs. 21
  misc_feature: MA Experiment 20000439 PARAMETER Experiment Name: At_Roots__P Parameter: Organism Value: A. thaliana
  misc_feature: MA Experiment 20000439 PARAMETER Experiment Name: At_Roots__P Parameter: Tissue Value: Roots vs. Whole Plant
  misc_feature: MA Experiment ID: 20000443 Result: Down-regulated in Transcription
  misc_feature: MA Experiment 20000443 PARAMETER Experiment Name: At_1uM_BR-BRZ__P Parameter: Tissue Value: Shoot Apices
  misc_feature: MA Experiment 20000443 PARAMETER Experiment Name: At_1uM_BR-BRZ__P Parameter: Treatment Value: 1uM BRZ vs. No Treatment
  misc_feature: MA Experiment ID: 20000452 Result: Up-regulated in Transcription
  misc_feature: MA Experiment 20000452 PARAMETER Experiment Name: At_CS6879_Shoots-Roots_P Parameter: Age (day) Value: 14
  misc_feature: MA Experiment 20000452 PARAMETER Experiment Name: At_CS6879_Shoots-Roots_P Parameter: Organism Value: A. thaliana
  misc_feature: MA Experiment 20000452 PARAMETER Experiment Name: At_CS6879_Shoots-Roots_P Parameter: Plant Line Value: CS6879 vs. WS
  misc_feature: MA Experiment 20000452 PARAMETER Experiment Name: At_CS6879_Shoots-Roots_P Parameter: Tissue Value: Shoots
  misc_feature: MA Experiment ID: 20000709 Result: Down-regulated in Transcription
  misc_feature: MA Experiment 20000709 PARAMETER Experiment Name: At_15mM_NH4NO3_L-to-H_P Parameter: Age (hr) Value: 14
  misc_feature: MA Experiment 20000709 PARAMETER Experiment Name: At_15mM_NH4NO3_L-to-H_P Parameter: Organism Value: A. thaliana
  misc_feature: MA Experiment 20000709 PARAMETER Experiment Name: At_15mM_NH4NO3_L-to-H_P Parameter: Plant Line Value: WS
  misc_feature: MA Experiment 20000709 PARAMETER Experiment Name: At_15mM_NH4NO3_L-to-H_P Parameter: Timepoint (hr) Value: 4
  misc_feature: MA Experiment 20000709 PARAMETER Experiment Name: At_15mM_NH4NO3_L-to-H_P Parameter: Tissue Value: Aerial
  misc_feature: MA Experiment 20000709 PARAMETER Experiment Name: At_15mM_NH4NO3_L-to-H_P Parameter: Treatment Value: 15mM NH4NO3 vs. 30mM Mannitol
  misc_feature: MA Experiment ID: 20000794 Result: Down-regulated in Transcription
  misc_feature: MA Experiment 20000794 PARAMETER Experiment Name: At_Petals_P Parameter: Age (day) Value: 23-25 days
  misc_feature: MA Experiment 20000794 PARAMETER Experiment Name: At_Petals_P Parameter: Plant Line Value: WS
  misc_feature: MA Experiment 20000794 PARAMETER Experiment Name: At_Petals_P Parameter: Tissue Value: Petals vs. Whole plant
  misc_feature: MA Experiment ID: 20001247 Result: Down-regulated in Transcription
  misc_feature: MA Experiment 20001247 PARAMETER Experiment Name: At_Far-red-induction_P Parameter: Age (day) Value: 7
  misc_feature: MA Experiment 20001247 PARAMETER Experiment Name: At_Far-red-induction_P Parameter: Light Value: Far-red vs. White
  misc_feature: MA Experiment 20001247 PARAMETER Experiment Name: At_Far-red-induction_P Parameter: Organism Value: A. thaliana
  misc_feature: MA Experiment 20001247 PARAMETER Experiment Name: At_Far-red-induction_P Parameter: Plant Line Value: Columbia
  misc_feature: MA Experiment 20001247 PARAMETER Experiment Name: At_Far-red-induction_P Parameter: Timepoint (hr) Value: 1
  misc_feature: MA Experiment 20001247 PARAMETER Experiment Name: At_Far-red-induction_P Parameter: Tissue Value: Whole Plant
  misc_feature: MA Experiment ID: 20001451 Result: Down-regulated in Transcription
  misc_feature: MA Experiment 20001451 PARAMETER Experiment Name: At_Far-red-induction_P Parameter: Age (day) Value: 7
  misc_feature: MA Experiment 20001451 PARAMETER Experiment Name: At_Far-red-induction_P Parameter: Light Value: Far-red vs. White
  misc_feature: MA Experiment 20001451 PARAMETER Experiment Name: At_Far-red-induction_P Parameter: Organism Value: A. thaliana
  misc_feature: MA Experiment 20001451 PARAMETER Experiment Name: At_Far-red-induction_P Parameter: Plant Line Value: Columbia
  misc_feature: MA Experiment 20001451 PARAMETER Experiment Name: At_Far-red-induction_P Parameter: Timepoint (hr) Value: 24
  misc_feature: MA Experiment 20001451 PARAMETER Experiment Name: At_Far-red-induction_P Parameter: Tissue Value: Whole Plant
  misc_feature: MA Experiment ID: 20001556 Result: Up-regulated in Transcription
  misc_feature: MA Experiment 20001556 PARAMETER Experiment Name: At_Drought_Soil_Dry_P Parameter: Age (day) Value: 26
  misc_feature: MA Experiment 20001556 PARAMETER Experiment Name: At_Drought_Soil_Dry_P Parameter: Organism Value: A. thaliana
  misc_feature: MA Experiment 20001556 PARAMETER Experiment Name: At_Drought_Soil_Dry_P Parameter: Plant Line Value: WS
  misc_feature: MA Experiment 20001556 PARAMETER Experiment Name: At_Drought_Soil_Dry_P Parameter: Post Timepoint (hr) Value: None
  misc_feature: MA Experiment 20001556 PARAMETER Experiment Name: At_Drought_Soil_Dry_P Parameter: Post-Treatment Value: None
  misc_feature: MA Experiment 20001556 PARAMETER Experiment Name: At_Drought_Soil_Dry_P Parameter: Timepoint (day) Value: 12
  misc_feature: MA Experiment 20001556 PARAMETER Experiment Name: At_Drought_Soil_Dry_P Parameter: Treatment Value: Drought vs. No Drought
  misc_feature: MA Experiment ID: 20001558 Result: Down-regulated in Transcription
  misc_feature: MA Experiment 20001558 PARAMETER Experiment Name: At_Drought_Soil_Dry_P Parameter: Age (day) Value: 27
  misc_feature: MA Experiment 20001558 PARAMETER Experiment Name: At_Drought_Soil_Dry_P Parameter: Organism Value: A. thaliana
  misc_feature: MA Experiment 20001558 PARAMETER Experiment Name: At_Drought_Soil_Dry_P Parameter: Plant Line Value: WS
  misc_feature: MA Experiment 20001558 PARAMETER Experiment Name: At_Drought_Soil_Dry_P Parameter: Post Timepoint (hr) Value: 6
  misc_feature: MA Experiment 20001558 PARAMETER Experiment Name: At_Drought_Soil_Dry_P Parameter: Post-Treatment Value: Re-Water vs. No Drought
  misc_feature: MA Experiment 20001558 PARAMETER Experiment Name: At_Drought_Soil_Dry_P Parameter: Timepoint (day) Value: 13
  misc_feature: MA Experiment 20001558 PARAMETER Experiment Name: At_Drought_Soil_Dry_P Parameter: Treatment Value: Drought vs. No Drought
  misc_feature: MA Experiment ID: 20001559 Result: Up-regulated in Transcription
  misc_feature: MA Experiment 20001559 PARAMETER Experiment Name: At_Drought_Soil_Dry_P Parameter: Age (day) Value: 28
  misc_feature: MA Experiment 20001559 PARAMETER Experiment Name: At_Drought_Soil_Dry_P Parameter: Organism Value: A. thaliana
  misc_feature: MA Experiment 20001559 PARAMETER Experiment Name: At_Drought_Soil_Dry_P Parameter: Plant Line Value: WS
  misc_feature: MA Experiment 20001559 PARAMETER Experiment Name: At_Drought_Soil_Dry_P Parameter: Post Timepoint (hr) Value: 29
  misc_feature: MA Experiment 20001559 PARAMETER Experiment Name: At_Drought_Soil_Dry_P Parameter: Post-Treatment Value: Re-Water vs. No Drought
  misc_feature: MA Experiment 20001559 PARAMETER Experiment Name: At_Drought_Soil_Dry_P Parameter: Timepoint (day) Value: 14
  misc_feature: MA Experiment 20001559 PARAMETER Experiment Name: At_Drought_Soil_Dry_P Parameter: Treatment Value: Drought vs. No Drought
  misc_feature: MA Experiment ID: 20001757 Result: Down-regulated in Transcription
  misc_feature: MA Experiment 20001757 PARAMETER Experiment Name: At_50mM_NH4NO3_L-to-H_P Parameter: Timepoint (hr) Value: 6
  misc_feature: MA Experiment 20001757 PARAMETER Experiment Name: At_50mM_NH4NO3_L-to-H_P Parameter: Tissue Value: Leaf
  misc_feature: MA Experiment 20001757 PARAMETER Experiment Name: At_50mM_NH4NO3_L-to-H_P Parameter: Treatment Value: 50mM NH4NO3 vs 100mM Mannitol
  misc_feature: MA Experiment ID: 20001905 Result: Down-regulated in Transcription
  misc_feature: MA Experiment 20001905 PARAMETER Experiment Name: At_Drought_Reproduction_P Parameter: Age (day) Value: 40
  misc_feature: MA Experiment 20001905 PARAMETER Experiment Name: At_Drought_Reproduction_P Parameter: Organism Value: A. thaliana
  misc_feature: MA Experiment 20001905 PARAMETER Experiment Name: At_Drought_Reproduction_P Parameter: Plant Line Value: WS
  misc_feature: MA Experiment 20001905 PARAMETER Experiment Name: At_Drought_Reproduction_P Parameter: Timepoint (day) Value: 10
  misc_feature: MA Experiment 20001905 PARAMETER Experiment Name: At_Drought_Reproduction_P Parameter: Tissue Value: Rosettes
  misc_feature: MA Experiment 20001905 PARAMETER Experiment Name: At_Drought_Reproduction_P Parameter: Treatment Value: Drought vs. No Drought
atgtctttgatcgtcatttatttcagatgttcagtctcacctctgctgggattcgggtgcattcaaagagatcattcttcttcttcttcttctttgaagatgctaatatcgcctccgatcaaagccaatgatccaaaatctcgacttgttttacatgcagtatcagagtcaaaatccagctcagagatgagtggtgttgcaaaggatgaagagaaatctgatgaatatagccaagacatgactcaagctatgggtgctgttctaacttacaggcacgagttaggaatgaactacaactttattcgtccagatctaattgttggatcctgcttacagacccctgaagatgttgacaagcttcgtaaaattggagttaaaaccatattttgcttgcaacaagatccagacctggaatattttggagtagacataagcagcatccaagcctatgctaagaaatatagtgatattcagcatattcgctgtgaaattagagactttgatgcatttgatttgagaatgcgtcttccagccgtggttggtactctttacaaagctgttaagcgaaatggaggagttacatatgtgcactgcactgctggaatgggaagggctcctgctgttgcgttgacatacatgttctgggtgcaaggctataagcttatggaagctcataaattacttatgagcaaaaggtcgtgctttccgaagctggatgctatcagaaatgcaacaattgatattcttacaggactcaagaggaagactgttactctgacactgaaagataaggggttctccagagtagaaatttctggccttgacattggatggggacagaggatacctctaacactggacaagggaacaggattctggatcctaaagagagaactgcctgaaggacagtttgaatataaatacatcatagatggtgaatggacacacaatgaggccgaaccgtttataggacctaacaaagacggccataccaacaattacgctaaagtagtggacgatccaacaagtgtggatggtacaactcgggagagactatcgagcgaagaccctgagctgttggaggaagaacgctcgaaactaatccagttcttggagacttgttctgaggcagaagtttgagagttgagagcatccgactagactatgtgaatgtacaacttactagtaacaataaaatgcttcatgttagtaatacatacagttacgcttatagcagcaaaagaaaaaaacatgaagttagtagtactatgttcaagtataatatatagtttaaaa

SEQ ID NO: 106146 - protein, 379 aa, Arabidopsis thaliana
  peptide (1)..(379): Ceres Seq. ID no. 13618852
  misc_feature (97)..(247): Pfam Name: Dual specificity phosphatase, catalytic domain Pfam Description: Dual specificity phosphatase, catalytic domain
  misc_feature (9)..(379): Homolog of NCBI NO: 18409505 NR Description: expressed protein [Arabidopsis thaliana] PTPKIS1 [Arabidopsis thaliana] >gi|11595504|emb|CAC18328.1|
  misc_feature (9)..(379): Homolog of NCBI NO: 21536905 NR Description: unknown [Arabidopsis thaliana]
  misc_feature (9)..(379): Homolog of NCBI NO: 16612246 NR Description: AT3g52180/F4F15_290 [Arabidopsis thaliana]
  misc_feature (9)..(265): Homolog of NCBI NO: 11288831 NR Description: hypothetical protein F4F15.290 - Arabidopsis >gi|4678947|emb|CAB41338.1| putative protein [Arabidopsis
  misc_feature (281)..(379): Homolog of NCBI NO: 11288831 NR Description: hypothetical protein F4F15.290 - Arabidopsis >gi|4678947|emb|CAB41338.1| putative protein [Arabidopsis
  misc_feature (9)..(378): Homolog of NCBI NO: 14970762 NR Description: protein tyrosine phosphatase [Lycopersicon
  misc_feature (139)..(337): Homolog of NCBI NO: 11544661 NR Description: PTPKIS1 (truncated form) [Arabidopsis thaliana]
  misc_feature (210)..(300): Homolog of NCBI NO: 34902388 NR Description: Unknown protein [Oryza sativa (japonica
  misc_feature (301)..(372): Homolog of NCBI NO: 34902388 NR Description: Unknown protein [Oryza sativa (japonica
  misc_feature (40)..(87): Homolog of NCBI NO: 34902388 NR Description: Unknown protein [Oryza sativa (japonica
MSLIVIYFRCSVSPLLGFGCIQRDHSSSSSSLKMLISPPIKANDPKSRLVLHAVSESKSSSEMSGVAKDEEKSDEYSQDMTQAMGAVLTYRHELGMNYNFIRPDLIVGSCLQTPEDVDKLRKIGVKTIFCLQQDPDLEYFGVDISSIQAYAKKYSDIQHIRCEIRDFDAFDLRMRLPAVVGTLYKAVKRNGGVTYVHCTAGMGRAPAVALTYMFWVQGYKLMEAHKLLMSKRSCFPKLDAIRNATIDILTGLKRKTVTLTLKDKGFSRVEISGLDIGWGQRIPLTLDKGTGFWILKRELPEGQFEYKYIIDGEWTHNEAEPFIGPNKDGHTNNYAKVVDDPTSVDGTTRERLSSEDPELLEEERSKLIQFLETCSEAEV

SEQ ID NO: 106147 - protein, 346 aa, Arabidopsis thaliana; identical to SEQ ID NO: 40525
  peptide (1)..(346): Ceres Seq. ID no. 13618853
  misc_feature (64)..(214): Pfam Name: Dual specificity phosphatase, catalytic domain Pfam Description: Dual specificity phosphatase, catalytic domain
  misc_feature (1)..(346): Homolog of NCBI NO: 18409505 NR Description: expressed protein [Arabidopsis thaliana] PTPKIS1 [Arabidopsis thaliana] >gi|11595504|emb|CAC18328.1|
  misc_feature (1)..(346): Homolog of NCBI NO: 21536905 NR Description: unknown [Arabidopsis thaliana]
  misc_feature (1)..(346): Homolog of NCBI NO: 16612246 NR Description: AT3g52180/F4F15_290 [Arabidopsis thaliana]
  misc_feature (1)..(232): Homolog of NCBI NO: 11288831 NR Description: hypothetical protein F4F15.290 - Arabidopsis >gi|4678947|emb|CAB41338.1| putative protein [Arabidopsis
  misc_feature (248)..(346): Homolog of NCBI NO: 11288831 NR Description: hypothetical protein F4F15.290 - Arabidopsis >gi|4678947|emb|CAB41338.1| putative protein [Arabidopsis
  misc_feature (1)..(345): Homolog of NCBI NO: 14970762 NR Description: protein tyrosine phosphatase [Lycopersicon
  misc_feature (106)..(304): Homolog of NCBI NO: 11544661 NR Description: PTPKIS1 (truncated form) [Arabidopsis thaliana]
  misc_feature (177)..(267): Homolog of NCBI NO: 34902388 NR Description: Unknown protein [Oryza sativa (japonica
  misc_feature (268)..(339): Homolog of NCBI NO: 34902388 NR Description: Unknown protein [Oryza sativa (japonica
  misc_feature (7)..(54): Homolog of NCBI NO: 34902388 NR Description: Unknown protein [Oryza sativa (japonica

SEQ ID NO: 106148 - protein, 317 aa, Arabidopsis thaliana; identical to SEQ ID NO: 40526
  peptide (1)..(317): Ceres Seq. ID no. 13618854
  misc_feature (35)..(185): Pfam Name: Dual specificity phosphatase, catalytic domain Pfam Description: Dual specificity phosphatase, catalytic domain
  misc_feature (1)..(317): Homolog of NCBI NO: 18409505 NR Description: expressed protein [Arabidopsis thaliana] PTPKIS1 [Arabidopsis thaliana] >gi|11595504|emb|CAC18328.1|
  misc_feature (1)..(317): Homolog of NCBI NO: 21536905 NR Description: unknown [Arabidopsis thaliana]
  misc_feature (1)..(317): Homolog of NCBI NO: 16612246 NR Description: AT3g52180/F4F15_290 [Arabidopsis thaliana]
  misc_feature (1)..(203): Homolog of NCBI NO: 11288831 NR Description: hypothetical protein F4F15.290 - Arabidopsis >gi|4678947|emb|CAB41338.1| putative protein [Arabidopsis
  misc_feature (219)..(317): Homolog of NCBI NO: 11288831 NR Description: hypothetical protein F4F15.290 - Arabidopsis >gi|4678947|emb|CAB41338.1| putative protein [Arabidopsis
  misc_feature (1)..(316): Homolog of NCBI NO: 14970762 NR Description: protein tyrosine phosphatase [Lycopersicon
  misc_feature (77)..(275): Homolog of NCBI NO: 11544661 NR Description: PTPKIS1 (truncated form) [Arabidopsis thaliana]
  misc_feature (148)..(238): Homolog of NCBI NO: 34902388 NR Description: Unknown protein [Oryza sativa (japonica
  misc_feature (239)..(310): Homolog of NCBI NO: 34902388 NR Description: Unknown protein [Oryza sativa (japonica
  misc_feature (1)..(25): Homolog of NCBI NO: 34902388 NR Description: Unknown protein [Oryza sativa (japonica

SEQ ID NO: 106149 - DNA, 1423 bp, Arabidopsis thaliana
  misc_feature (1)..(1423): Ceres Seq. ID no. 13618855
  misc_feature: MA Experiment ID: 108433 Result: Down-regulated in Transcription
  misc_feature: MA Experiment 108433 PARAMETER Experiment Name: At_rhl_Mutant2_cDNA_P Parameter: Age (day) Value: 7
  misc_feature: MA Experiment 108433 PARAMETER Experiment Name: At_rhl_Mutant2_cDNA_P Parameter: Organism Value: A. thaliana
  misc_feature: MA Experiment 108433 PARAMETER Experiment Name: At_rhl_Mutant2_cDNA_P Parameter: Plant Line Value: rhl Mutant vs. wt landsburg
  misc_feature: MA Experiment 108433 PARAMETER Experiment Name: At_rhl_Mutant2_cDNA_P Parameter: Tissue Value: Roots
  misc_feature: MA Experiment ID: 108462 Result: Down-regulated in Transcription
  misc_feature: MA Experiment 108462 PARAMETER Experiment Name: At_Germinating_Seeds_cDNA_P Parameter: Age (day) Value: 2 vs. 0
  misc_feature: MA Experiment 108462 PARAMETER Experiment Name: At_Germinating_Seeds_cDNA_P Parameter: Tissue Value: Germinating Seeds
  misc_feature: MA Experiment ID: 108463 Result: Down-regulated in Transcription
  misc_feature: MA Experiment 108463 PARAMETER Experiment Name: At_Germinating_Seeds_cDNA_P Parameter: Age (day) Value: 3 vs. 0
  misc_feature: MA Experiment 108463 PARAMETER Experiment Name: At_Germinating_Seeds_cDNA_P Parameter: Tissue Value: Germinating Seeds
  misc_feature: MA Experiment ID: 108464 Result: Down-regulated in Transcription
  misc_feature: MA Experiment 108464 PARAMETER Experiment Name: At_Germinating_Seeds_cDNA_P Parameter: Age (day) Value: 4 vs. 0
  misc_feature: MA Experiment 108464 PARAMETER Experiment Name: At_Germinating_Seeds_cDNA_P Parameter: Tissue Value: Germinating Seeds
  misc_feature: MA Experiment ID: 108488 Result: Down-regulated in Transcription
  misc_feature: MA Experiment ID: 108572 Result: Down-regulated in Transcription
  misc_feature: MA Experiment 108572 PARAMETER Experiment Name: At_Drought_cDNA_P Parameter: Timepoint (hr) Value: 1
  misc_feature: MA Experiment 108572 PARAMETER Experiment Name: At_Drought_cDNA_P Parameter: Tissue Value: Aerial
  misc_feature: MA Experiment 108572 PARAMETER Experiment Name: At_Drought_cDNA_P Parameter: Treatment Value: Drought vs. No Drought
  misc_feature: MA Experiment ID: 20000113 Result: Down-regulated in Transcription
  misc_feature: MA Experiment 20000113 PARAMETER Experiment Name: At_42deg_Heat_cDNA_P Parameter: Temperature (deg C) Value: 42 vs. 22
  misc_feature: MA Experiment 20000113 PARAMETER Experiment Name: At_42deg_Heat_cDNA_P Parameter: Timepoint (hr) Value: 8
  misc_feature: MA Experiment 20000113 PARAMETER Experiment Name: At_42deg_Heat_cDNA_P Parameter: Tissue Value: Aerial
  misc_feature: MA Experiment ID: 20000173 Result: Down-regulated in Transcription
  misc_feature: MA Experiment 20000173 PARAMETER Experiment Name: At_42deg_Heat_P Parameter: Age (day) Value: 14
  misc_feature: MA Experiment 20000173 PARAMETER Experiment Name: At_42deg_Heat_P Parameter: Organism Value: A. thaliana
  misc_feature: MA Experiment 20000173 PARAMETER Experiment Name: At_42deg_Heat_P Parameter: Plant Line Value: WS
  misc_feature: MA Experiment 20000173 PARAMETER Experiment Name: At_42deg_Heat_P Parameter: Temperature (deg C) Value: 42 vs. 22
  misc_feature: MA Experiment 20000173 PARAMETER Experiment Name: At_42deg_Heat_P Parameter: Timepoint (hr) Value: 6
  misc_feature: MA Experiment 20000173 PARAMETER Experiment Name: At_42deg_Heat_P Parameter: Tissue Value: Aerial
  misc_feature: MA Experiment ID: 20000180 Result: Down-regulated in Transcription
  misc_feature: MA Experiment 20000180 PARAMETER Experiment Name: At_Germinating_Seeds_P Parameter: Age (hr) Value: 24 vs. 0
  misc_feature: MA Experiment 20000180 PARAMETER Experiment Name: At_Germinating_Seeds_P Parameter: Tissue Value: Germinating Seeds
  misc_feature: MA Experiment ID: 20000439 Result: Up-regulated in Transcription
  misc_feature: MA Experiment 20000439 PARAMETER Experiment Name: At_Roots__P Parameter: Age (day) Value: 14 vs. 21
  misc_feature: MA Experiment 20000439 PARAMETER Experiment Name: At_Roots__P Parameter: Organism Value: A. thaliana
  misc_feature: MA Experiment 20000439 PARAMETER Experiment Name: At_Roots__P Parameter: Tissue Value: Roots vs. Whole Plant
  misc_feature: MA Experiment ID: 20000527 Result: Down-regulated in Transcription
  misc_feature: MA Experiment 20000527 PARAMETER Experiment Name: At_10percent_PEG_P Parameter: Age (day) Value: 20
  misc_feature: MA Experiment 20000527 PARAMETER Experiment Name: At_10percent_PEG_P Parameter: Organism Value: A. thaliana
  misc_feature: MA Experiment 20000527 PARAMETER Experiment Name: At_10percent_PEG_P Parameter: Plant Line Value: WS
  misc_feature: MA Experiment 20000527 PARAMETER Experiment Name: At_10percent_PEG_P Parameter: Timepoint (day) Value: 20
  misc_feature: MA Experiment 20000527 PARAMETER Experiment Name: At_10percent_PEG_P Parameter: Tissue Value: Whole Plant
  misc_feature: MA Experiment 20000527 PARAMETER Experiment Name: At_10percent_PEG_P Parameter: Treatment Value: 10percent PEG vs. No Treatment
aattttctgtctatatatatattaaggatccaaattagggagagaccaaagaggaaattaataacaatcaatccaacaacgaatggagattgaagaagcgagtcgtgaaagtggacatgttgtgtgcggatcatggattcgtcgcccgaagaaagtaaactgggttcttatcgctaaagcttccaaacgccgtggctcatctgtttcttctcctgctctcctcaacatcttctcttttgaccccattactgcttctctttcctcctctcctttggcaacacacacgcttaaggatagtgatggtgatcctgtggctgtttcagtgcaccctggtggggattactttgtttgctcaacctccaaaggtggttgcaagttatttgagcttgtcggaggagcaacaggtattacgatcttagccaaagaactccttcctctccaaaatgctggactacaaaagtgtatggccttcagctttgatgggtctaaattagctgttgggggagtggatggatgtcttagaattatggagtggccaaacctaagtgtaattttggatgagccaaaggcacacaaatccatccgggacatggattttagtcttgactcagagttcttagctacaacatcaactgatggatcagctagaatatggaaagcagaagatggttttcctttgtctactttggaacgtagtggggatgaaaatattgaactgtgccgtttctctaaagacggaacaaaaccttttttgttttgtgctgctcaaagaggtgatacgcctatggtcaatgtttatgacattagtacatggaagaagcttgggttcaagaagctgtcaaggaagactgcatcgacaatggcagtgagcttggacgggaaatatattgctttgggtgggaaagatggagatgtatctgttgctgaagttaagacaatggaaatctaccactacagtaagaggctgcatcttggtcaatccattgcttcacttgagttctgccccagtgaaagggttatgctgacaacttctagcgaatggggagagatggtgaccaaactcactgtaccaaaggagtggaaagagtggcagatatatgcactgctgttttgcttgttcatggcatcagtgatagctgcatacgtattcttcgagaactcagattcgttttggaagttaccaatgggaaaagatcaaaaaagaccaaagattagtctatttggaggttcctcctccacgccttctgaggatcatagtaggtggaacttggacctatagaaagattatgtaactttcctctgctttttcttctttcttccttatcttgttgcagcgtttttttttgtttttttcctttcttctgattttgctctgacaaatacctgttgattaattgatttatttacagacaattactgttgc

SEQ ID NO: 106150 - protein, 398 aa, Arabidopsis thaliana; identical to SEQ ID NO: 41856
  peptide (1)..(398): Ceres Seq. ID no. 13618856
  misc_feature (1)..(398): Homolog of NCBI NO: 18409509 NR Description: transducin / WD-40 repeat protein family
  misc_feature (128)..(398): Homolog of NCBI NO: 26450470 NR Description: unknown protein [Arabidopsis thaliana]
  misc_feature (11)..(394): Homolog of NCBI NO: 34394605 NR Description: transducin / WD-40 repeat protein-like [Oryza
  misc_feature (11)..(359): Homolog of NCBI NO: 34897162 NR Description: putative membrane protein [Oryza sativa (japonica group)] >gi|28209528|gb|AAO37546.1| putative membrane protein
  misc_feature (44)..(348): Homolog of NCBI NO: 8777388 NR Description: protein transport protein SEC12p-like
  misc_feature (38)..(354): Homolog of NCBI NO: 11358859 NR Description: St12p protein [imported] - Arabidopsis thaliana
  misc_feature (38)..(354): Homolog of NCBI NO: 15226281 NR Description: SEC12p protein / St12p protein [Arabidopsis
  misc_feature (44)..(345): Homolog of NCBI NO: 18423177 NR Description: St12p protein [Arabidopsis thaliana] St12p protein [Arabidopsis thaliana] >gi|9758764|dbj|BAB09140.1|
  misc_feature (38)..(317): Homolog of NCBI NO: 322598 NR Description: St12p protein - Arabidopsis thaliana
  misc_feature (38)..(231): Homolog of NCBI NO: 17473926 NR Description: putative protein transport protein SEC12p

SEQ ID NO: 106151 - protein, 271 aa, Arabidopsis thaliana; identical to SEQ ID NO: 41857
  peptide (1)..(271): Ceres Seq. ID no. 13618857
  misc_feature (1)..(271): Homolog of NCBI NO: 18409509 NR Description: transducin / WD-40 repeat protein family
  misc_feature (1)..(271): Homolog of NCBI NO: 26450470 NR Description: unknown protein [Arabidopsis thaliana]
  misc_feature (1)..(267): Homolog of NCBI NO: 34394605 NR Description: transducin / WD-40 repeat protein-like [Oryza
  misc_feature (1)..(232): Homolog of NCBI NO: 34897162 NR Description: putative membrane protein [Oryza sativa (japonica group)] >gi|28209528|gb|AAO37546.1| putative membrane protein
  misc_feature (1)..(221): Homolog of NCBI NO: 8777388 NR Description: protein transport protein SEC12p-like
  misc_feature (1)..(227): Homolog of NCBI NO: 11358859 NR Description: St12p protein [imported] - Arabidopsis thaliana
  misc_feature (1)..(227): Homolog of NCBI NO: 15226281 NR Description: SEC12p protein / St12p protein [Arabidopsis
  misc_feature (1)..(218): Homolog of NCBI NO: 18423177 NR Description: St12p protein [Arabidopsis thaliana] St12p protein [Arabidopsis thaliana] >gi|9758764|dbj|BAB09140.1|
  misc_feature (1)..(190): Homolog of NCBI NO: 322598 NR Description: St12p protein - Arabidopsis thaliana
  misc_feature (1)..(104): Homolog of NCBI NO: 17473926 NR Description: putative protein transport protein SEC12p

SEQ ID NO: 106152 - protein, 250 aa, Arabidopsis thaliana; identical to SEQ ID NO: 41858
  peptide (1)..(250): Ceres Seq. ID no. 13618858
  misc_feature (1)..(250): Homolog of NCBI NO: 18409509 NR Description: transducin / WD-40 repeat protein family
  misc_feature (1)..(250): Homolog of NCBI NO: 26450470 NR Description: unknown protein [Arabidopsis thaliana]
  misc_feature (1)..(246): Homolog of NCBI NO: 34394605 NR Description: transducin / WD-40 repeat protein-like [Oryza
  misc_feature (1)..(211): Homolog of NCBI NO: 34897162 NR Description: putative membrane protein [Oryza sativa (japonica group)] >gi|28209528|gb|AAO37546.1| putative membrane protein
  misc_feature (1)..(200): Homolog of NCBI NO: 8777388 NR Description: protein transport protein SEC12p-like
  misc_feature (1)..(206): Homolog of NCBI NO: 11358859 NR Description: St12p protein [imported] - Arabidopsis thaliana
  misc_feature (1)..(206): Homolog of NCBI NO: 15226281 NR Description: SEC12p protein / St12p protein [Arabidopsis
  misc_feature (1)..(197): Homolog of NCBI NO: 18423177 NR Description: St12p protein [Arabidopsis thaliana] St12p protein [Arabidopsis thaliana] >gi|9758764|dbj|BAB09140.1|
  misc_feature (1)..(169): Homolog of NCBI NO: 322598 NR Description: St12p protein - Arabidopsis thaliana
  misc_feature (1)..(83): Homolog of NCBI NO: 17473926 NR Description: putative protein transport protein SEC12p

SEQ ID NO: 106153 - DNA, 861 bp, Arabidopsis thaliana
  misc_feature (1)..(861): Ceres Seq. ID no. 13618865
  misc_feature: MA Experiment ID: 108434 Result: Up-regulated in Transcription
  misc_feature: MA Experiment 108434 PARAMETER Experiment Name: At_Root_Tips_cDNA_P Parameter: Tissue Value: Root Tips
agggattctagggctttccttcattggtcagatcagacgacgttttacatcttcttcttcttcctcttcgatattcgtcagtgtgtgtattttggggaaaactttgtgagcaaagagcgagaaaatgagcggagccggtaagaaaatcgcggatgtggctttcaaagcttcaaggactatcgattgggatggtatggctaaggtccttgtcacagatgaggctcgtagagagttctctaaccttcgtcgtgctttcgatgaggttaacacacagctccagaccaaatttagtcaggaacctgaacctatagattgggattactataggaagggtattggagctggcattgttgacaagtacaaggaagcttatgacagcattgagattccaaagtacgttgacaaagttactcctgaatacaagccaaagtttgatgctttgttggtggaactgaaagaagcagaacagaaatcgctcaaggagtctgaacggttggagaaagaaattgctgatgtccaagagatcagcaaaaagctcagcaccatgactgcagatgagtactttgagaagcacccggaactcaaaaagaagtttgatgacgaaatccgtaatgacaactggggatactgatcatgtttctccatctccggcttggaaagaaaactctctttctctttctctgttctcttactgtgattttgtgagccaatcataacaataataagtacaccattcacttaagcagtgttgagatcttcattccaaggaagataaacgcatttggttttagttatcaatttcacaaattgtttcgtttcgttcttcagtgaataataagagtcaaaaaaattatcattgtc

SEQ ID NO: 106154 - protein, 168 aa, Arabidopsis thaliana; identical to SEQ ID NO: 20821
  peptide (1)..(168): Ceres Seq. ID no. 13618866
  misc_feature (1)..(168): Homolog of NCBI NO: 15231176 NR Description: expressed protein [Arabidopsis thaliana]
  misc_feature (24)..(168): Homolog of NCBI NO: 17939851 NR Description: mitochondrial F0 ATP synthase D chain
  misc_feature (1)..(168): Homolog of NCBI NO: 32352148 NR Description: hypothetical protein [Oryza sativa (japonica

SEQ ID NO: 106155 - protein, 145 aa, Arabidopsis thaliana; identical to SEQ ID NO: 20822
  peptide (1)..(145): Ceres Seq. ID no. 13618867
  misc_feature (1)..(145): Homolog of NCBI NO: 15231176 NR Description: expressed protein [Arabidopsis thaliana]
  misc_feature (1)..(145): Homolog of NCBI NO: 17939851 NR Description: mitochondrial F0 ATP synthase D chain
  misc_feature (1)..(145): Homolog of NCBI NO: 32352148 NR Description: hypothetical protein [Oryza sativa (japonica

SEQ ID NO: 106156 - DNA, 1301 bp, Arabidopsis thaliana
  misc_feature (1)..(1301): Ceres Seq. ID no. 13618876
  misc_feature: MA Experiment ID: 108434 Result: Down-regulated in Transcription
  misc_feature: MA Experiment 108434 PARAMETER Experiment Name: At_Root_Tips_cDNA_P Parameter: Tissue Value: Root Tips
  misc_feature: MA Experiment ID: 108461 Result: Up-regulated in Transcription
  misc_feature: MA Experiment 108461 PARAMETER Experiment Name: At_Germinating_Seeds_cDNA_P Parameter: Age (day) Value: 1 vs. 0
  misc_feature: MA Experiment 108461 PARAMETER Experiment Name: At_Germinating_Seeds_cDNA_P Parameter: Tissue Value: Germinating Seeds
  misc_feature: MA Experiment ID: 108462 Result: Up-regulated in Transcription
  misc_feature: MA Experiment 108462 PARAMETER Experiment Name: At_Germinating_Seeds_cDNA_P Parameter: Age (day) Value: 2 vs. 0
  misc_feature: MA Experiment 108462 PARAMETER Experiment Name: At_Germinating_Seeds_cDNA_P Parameter: Tissue Value: Germinating Seeds
  misc_feature: MA Experiment ID: 108463 Result: Up-regulated in Transcription
  misc_feature: MA Experiment 108463 PARAMETER Experiment Name: At_Germinating_Seeds_cDNA_P Parameter: Age (day) Value: 3 vs. 0
  misc_feature: MA Experiment 108463 PARAMETER Experiment Name: At_Germinating_Seeds_cDNA_P Parameter: Tissue Value: Germinating Seeds
  misc_feature: MA Experiment ID: 108464 Result: Up-regulated in Transcription
  misc_feature: MA Experiment 108464 PARAMETER Experiment Name: At_Germinating_Seeds_cDNA_P Parameter: Age (day) Value: 4 vs. 0
  misc_feature: MA Experiment 108464 PARAMETER Experiment Name: At_Germinating_Seeds_cDNA_P Parameter: Tissue Value: Germinating Seeds
  misc_feature: MA Experiment ID: 108469 Result: Up-regulated in Transcription
  misc_feature: MA Experiment ID: 108579 Result: Up-regulated in Transcription
  misc_feature: MA Experiment 108579 PARAMETER Experiment Name: At_4deg_Cold_cDNA_P Parameter: Temperature (deg C) Value: 4 vs. 22
  misc_feature: MA Experiment 108579 PARAMETER Experiment Name: At_4deg_Cold_cDNA_P Parameter: Timepoint (hr) Value: 6
  misc_feature: MA Experiment 108579 PARAMETER Experiment Name: At_4deg_Cold_cDNA_P Parameter: Tissue Value: Aerial
  misc_feature: MA Experiment ID: 108585 Result: Up-regulated in Transcription
  misc_feature: MA Experiment 108585 PARAMETER Experiment Name: At_5mM_NaNP_cDNA_P Parameter: Timepoint (hr) Value: 6
  misc_feature: MA Experiment 108585 PARAMETER Experiment Name: At_5mM_NaNP_cDNA_P Parameter: Tissue Value: Aerial
  misc_feature: MA Experiment 108585 PARAMETER Experiment Name: At_5mM_NaNP_cDNA_P Parameter: Treatment Value: null
  misc_feature: MA Experiment ID: 108595 Result: Up-regulated in Transcription
  misc_feature: MA Experiment 108595 PARAMETER Experiment Name: At_Ler-pi_Ovule_cDNA_P Parameter: Plant Line Value: null
  misc_feature: MA Experiment ID: 108668 Result: Up-regulated in Transcription
  misc_feature: MA Experiment 108668 PARAMETER Experiment Name: At_2mM_SA_cDNA_P Parameter: Plant Line Value: WS
  misc_feature: MA Experiment 108668 PARAMETER Experiment Name: At_2mM_SA_cDNA_P Parameter: Timepoint (hr) Value: 6
  misc_feature: MA Experiment 108668 PARAMETER Experiment Name: At_2mM_SA_cDNA_P Parameter: Treatment Value: 2mM SA vs. No Treatment
  misc_feature: MA Experiment ID: 20000069 Result: Up-regulated in Transcription
  misc_feature: MA Experiment 20000069 PARAMETER Experiment Name: At_100uM_ABA_Mutants_cDNA_P Parameter: Plant Line Value: CS23
  misc_feature: MA Experiment 20000069 PARAMETER Experiment Name: At_100uM_ABA_Mutants_cDNA_P Parameter: Timepoint (hr) Value: 6
  misc_feature: MA Experiment 20000069 PARAMETER Experiment Name: At_100uM_ABA_Mutants_cDNA_P Parameter: Tissue Value: Aerial
  misc_feature: MA Experiment 20000069 PARAMETER Experiment Name: At_100uM_ABA_Mutants_cDNA_P Parameter: Treatment Value: 100uM ABA vs. No Treatment
  misc_feature: MA Experiment ID: 20000070 Result: Up-regulated in Transcription
  misc_feature: MA Experiment 20000070 PARAMETER Experiment Name: At_100uM_ABA_Mutants_cDNA_P Parameter: Plant Line Value: CS24
  misc_feature: MA Experiment 20000070 PARAMETER Experiment Name: At_100uM_ABA_Mutants_cDNA_P Parameter: Timepoint (hr) Value: 6
  misc_feature: MA Experiment 20000070 PARAMETER Experiment Name: At_100uM_ABA_Mutants_cDNA_P Parameter: Tissue Value: Aerial
  misc_feature: MA Experiment 20000070 PARAMETER Experiment Name: At_100uM_ABA_Mutants_cDNA_P Parameter: Treatment Value: 100uM ABA vs. No Treatment
  misc_feature: MA Experiment ID: 20000072 Result: Up-regulated in Transcription
  misc_feature: MA Experiment 20000072 PARAMETER Experiment Name: At_100uM_ABA_Mutants_cDNA_P Parameter: Plant Line Value: CS8105
  misc_feature: MA Experiment 20000072 PARAMETER Experiment Name: At_100uM_ABA_Mutants_cDNA_P Parameter: Timepoint (hr) Value: 6
  misc_feature: MA Experiment 20000072 PARAMETER Experiment Name: At_100uM_ABA_Mutants_cDNA_P Parameter: Tissue Value: Aerial
  misc_feature: MA Experiment 20000072 PARAMETER Experiment Name: At_100uM_ABA_Mutants_cDNA_P Parameter: Treatment Value: 100uM ABA vs. No Treatment
  misc_feature: MA Experiment ID: 20000090 Result: Up-regulated in Transcription
  misc_feature: MA Experiment ID: 20000111 Result: Down-regulated in Transcription
  misc_feature: MA Experiment 20000111 PARAMETER Experiment Name: At_42deg_Heat_cDNA_P Parameter: Temperature (deg C) Value: 42 vs. 22
  misc_feature: MA Experiment 20000111 PARAMETER Experiment Name: At_42deg_Heat_cDNA_P Parameter: Timepoint (hr) Value: 6
  misc_feature: MA Experiment 20000111 PARAMETER Experiment Name: At_42deg_Heat_cDNA_P Parameter: Tissue Value: Aerial
  misc_feature: MA Experiment ID: 20000113 Result: Down-regulated in Transcription
  misc_feature: MA Experiment 20000113 PARAMETER Experiment Name: At_42deg_Heat_cDNA_P Parameter: Temperature (deg C) Value: 42 vs. 22
  misc_feature: MA Experiment 20000113 PARAMETER Experiment Name: At_42deg_Heat_cDNA_P Parameter: Timepoint (hr) Value: 8
  misc_feature: MA Experiment 20000113 PARAMETER Experiment Name: At_42deg_Heat_cDNA_P Parameter: Tissue Value: Aerial
  misc_feature: MA Experiment ID: 20000144 Result: Down-regulated in Transcription
  misc_feature: MA Experiment 20000144 PARAMETER Experiment Name: At_42deg_Heat_cDNA_P Parameter: Temperature (deg C) Value: 42 vs. 22
  misc_feature: MA Experiment 20000144 PARAMETER Experiment Name: At_42deg_Heat_cDNA_P Parameter: Timepoint (hr) Value: 1
  misc_feature: MA Experiment 20000144 PARAMETER Experiment Name: At_42deg_Heat_cDNA_P Parameter: Tissue Value: Aerial
  misc_feature: MA Experiment ID: 20000182 Result: Up-regulated in Transcription
  misc_feature: MA Experiment 20000182 PARAMETER Experiment Name: At_2mM_SA_P Parameter: Age (day) Value: 14
  misc_feature: MA Experiment 20000182 PARAMETER Experiment Name: At_2mM_SA_P Parameter: Organism Value: A. thaliana
  misc_feature: MA Experiment 20000182 PARAMETER Experiment Name: At_2mM_SA_P Parameter: Plant Line Value: WS
  misc_feature: MA Experiment 20000182 PARAMETER Experiment Name: At_2mM_SA_P Parameter: Timepoint (hr) Value: 6
  misc_feature: MA Experiment 20000182 PARAMETER Experiment Name: At_2mM_SA_P Parameter: Tissue Value: Aerial
  misc_feature: MA Experiment 20000182 PARAMETER Experiment Name: At_2mM_SA_P Parameter: Treatment Value: 2mM SA vs. No Treatment
  misc_feature: MA Experiment ID: 20000184 Result: Down-regulated in Transcription
  misc_feature: MA Experiment 20000184 PARAMETER Experiment Name: At_Shoots__P Parameter: Age (day) Value: 7
  misc_feature: MA Experiment 20000184 PARAMETER Experiment Name: At_Shoots__P Parameter: Tissue Value: Shoots vs. Whole Plant
  misc_feature: MA Experiment ID: 20000185 Result: Down-regulated in Transcription
  misc_feature: MA Experiment 20000185 PARAMETER Experiment Name: At_Roots__P Parameter: Age (day) Value: 7 vs. 21
  misc_feature: MA Experiment 20000185 PARAMETER Experiment Name: At_Roots__P Parameter: Organism Value: A. thaliana
  misc_feature: MA Experiment 20000185 PARAMETER Experiment Name: At_Roots__P Parameter: Tissue Value: Roots vs. Whole Plant
  misc_feature: MA Experiment ID: 20000213 Result: Up-regulated in Transcription
  misc_feature: MA Experiment 20000213 PARAMETER Experiment Name: At_4deg_Cold_P Parameter: Timepoint (hr) Value: 2
  misc_feature: MA Experiment ID: 20000224 Result: Down-regulated in Transcription
  misc_feature: MA Experiment ID: 20000227 Result: Down-regulated in Transcription
  misc_feature: MA Experiment 20000227 PARAMETER Experiment Name: At_Root-Tips-vs-Tops_P Parameter: Tissue Value: Root Tips vs. Root Tops
  misc_feature: MA Experiment ID: 20000234 Result: Down-regulated in Transcription
  misc_feature: MA Experiment 20000234 PARAMETER Experiment Name: At_Siliques_P Parameter: Age (day) Value: 21
  misc_feature: MA Experiment 20000234 PARAMETER Experiment Name: At_Siliques_P Parameter: Organism Value: A. thaliana
  misc_feature: MA Experiment 20000234 PARAMETER Experiment Name: At_Siliques_P Parameter: Plant Line Value: WS
  misc_feature: MA Experiment 20000234 PARAMETER Experiment Name: At_Siliques_P Parameter: Tissue Value: Less Than 5mm Siliques vs. Whole Plant
  misc_feature: MA Experiment ID: 20000235 Result: Down-regulated in Transcription
  misc_feature: MA Experiment 20000235 PARAMETER Experiment Name: At_Siliques_P Parameter: Age (day) Value: 21
  misc_feature: MA Experiment 20000235 PARAMETER Experiment Name: At_Siliques_P Parameter: Organism Value: A. thaliana
  misc_feature: MA Experiment 20000235 PARAMETER Experiment Name: At_Siliques_P Parameter: Plant Line Value: WS
  misc_feature: MA Experiment 20000235 PARAMETER Experiment Name: At_Siliques_P Parameter: Tissue Value: 5-10mm Siliques vs. Whole Plant
  misc_feature: MA Experiment ID: 20000264 Result: Down-regulated in Transcription
  misc_feature: MA Experiment 20000264 PARAMETER Experiment Name: At_Open_Flower_P Parameter: Age (day) Value: 21
  misc_feature: MA Experiment 20000264 PARAMETER Experiment Name: At_Open_Flower_P Parameter: Plant Line Value: WS
  misc_feature: MA Experiment 20000264 PARAMETER Experiment Name: At_Open_Flower_P Parameter: Tissue Value: Open Flower vs. Whole Plant
  misc_feature: MA Experiment ID: 20000265 Result: Down-regulated in Transcription
  misc_feature: MA Experiment 20000265 PARAMETER Experiment Name: At_Open_Flower_P Parameter: Age (day) Value: 21
  misc_feature: MA Experiment 20000265 PARAMETER Experiment Name: At_Open_Flower_P Parameter: Plant Line Value: WS
  misc_feature: MA Experiment 20000265 PARAMETER Experiment Name: At_Open_Flower_P Parameter: Tissue Value: Closed Flower vs. Whole Plant
  misc_feature: MA Experiment ID: 20000286 Result: Down-regulated in Transcription
  misc_feature: MA Experiment 20000286 PARAMETER Experiment Name: At_Open_Flower_P Parameter: Age (day) Value: 21
  misc_feature: MA Experiment 20000286 PARAMETER Experiment Name: At_Open_Flower_P Parameter: Plant Line Value: WS
  misc_feature: MA Experiment 20000286 PARAMETER Experiment Name: At_Open_Flower_P Parameter: Tissue Value: Half Open vs. Whole Plant
  misc_feature: MA Experiment ID: 20000438 Result: Down-regulated in Transcription
  misc_feature: MA Experiment 20000438 PARAMETER Experiment Name: At_Shoots__P Parameter: Age (day) Value: 14
  misc_feature: MA Experiment 20000438 PARAMETER Experiment Name: At_Shoots__P Parameter: Tissue Value: Shoots vs. Whole Plant
  misc_feature: MA Experiment ID: 20000439 Result: Down-regulated in Transcription
  misc_feature: MA Experiment 20000439 PARAMETER Experiment Name: At_Roots__P Parameter: Age (day) Value: 14 vs. 21
  misc_feature: MA Experiment 20000439 PARAMETER Experiment Name: At_Roots__P Parameter: Organism Value: A. thaliana
  misc_feature: MA Experiment 20000439 PARAMETER Experiment Name: At_Roots__P Parameter: Tissue Value: Roots vs. Whole Plant
  misc_feature: MA Experiment ID: 20000441 Result: Up-regulated in Transcription
  misc_feature: MA Experiment 20000441 PARAMETER Experiment Name: At_1uM_BR-BRZ__P Parameter: Tissue Value: Shoot Apices
  misc_feature: MA Experiment 20000441 PARAMETER Experiment Name: At_1uM_BR-BRZ__P Parameter: Treatment Value: 1uM BR vs. No Treatment
  misc_feature: MA Experiment ID: 20000443 Result: Up-regulated in Transcription
  misc_feature: MA Experiment 20000443 PARAMETER Experiment Name: At_1uM_BR-BRZ__P Parameter: Tissue Value: Shoot Apices
  misc_feature: MA Experiment 20000443 PARAMETER Experiment Name: At_1uM_BR-BRZ__P Parameter: Treatment Value: 1uM BRZ vs. No Treatment
  misc_feature: MA Experiment ID: 20000460 Result: Up-regulated in Transcription
  misc_feature: MA Experiment 20000460 PARAMETER Experiment Name: At_10percent_PEG_P Parameter: Age (day) Value: 12
  misc_feature: MA Experiment 20000460 PARAMETER Experiment Name: At_10percent_PEG_P Parameter: Organism Value: A. thaliana
  misc_feature: MA Experiment 20000460 PARAMETER Experiment Name: At_10percent_PEG_P Parameter: Plant Line Value: WS
  misc_feature: MA Experiment 20000460 PARAMETER Experiment Name: At_10percent_PEG_P Parameter: Timepoint (day) Value: 12
  misc_feature: MA Experiment 20000460 PARAMETER Experiment Name: At_10percent_PEG_P Parameter: Tissue Value: Whole Plant
  misc_feature: MA Experiment 20000460 PARAMETER Experiment Name: At_10percent_PEG_P Parameter: Treatment Value: 10percent PEG vs. No Treatment
  misc_feature: MA Experiment ID: 20000495 Result: Down-regulated in Transcription
  misc_feature: MA Experiment 20000495 PARAMETER Experiment Name: At_Guard_Cells_P Parameter: Harvest Date Value: 8/2/2002
  misc_feature: MA Experiment 20000495 PARAMETER Experiment Name: At_Guard_Cells_P Parameter: Organism Value: A. thaliana
  misc_feature: MA Experiment 20000495 PARAMETER Experiment Name: At_Guard_Cells_P Parameter: Tissue Value: Guard Cells vs. Leaves
  misc_feature: MA Experiment ID: 20000496 Result: Down-regulated in Transcription
  misc_feature: MA Experiment 20000496 PARAMETER Experiment Name: At_Guard_Cells_P Parameter: Harvest Date Value: 7/19/2002
  misc_feature: MA Experiment 20000496 PARAMETER Experiment Name: At_Guard_Cells_P Parameter: Organism Value: Canola
  misc_feature: MA Experiment 20000496 PARAMETER Experiment Name: At_Guard_Cells_P Parameter: Tissue Value: Guard Cells vs. Leaves
  misc_feature: MA Experiment ID: 20000527 Result: Up-regulated in Transcription
  misc_feature: MA Experiment 20000527 PARAMETER Experiment Name: At_10percent_PEG_P Parameter: Age (day) Value: 20
  misc_feature: MA Experiment 20000527 PARAMETER Experiment Name: At_10percent_PEG_P Parameter: Organism Value: A. thaliana
  misc_feature: MA Experiment 20000527 PARAMETER Experiment Name: At_10percent_PEG_P Parameter: Plant Line Value: WS
  misc_feature: MA Experiment 20000527 PARAMETER Experiment Name: At_10percent_PEG_P Parameter: Timepoint (day) Value: 20
  misc_feature: MA Experiment 20000527 PARAMETER Experiment Name: At_10percent_PEG_P Parameter: Tissue Value: Whole Plant
  misc_feature: MA Experiment 20000527 PARAMETER Experiment Name: At_10percent_PEG_P Parameter: Treatment Value: 10percent PEG vs. No Treatment
  misc_feature: MA Experiment ID: 20000794 Result: Down-regulated in Transcription
  misc_feature: MA Experiment 20000794 PARAMETER Experiment Name: At_Petals_P Parameter: Age (day) Value: 23-25 days
  misc_feature: MA Experiment 20000794 PARAMETER Experiment Name: At_Petals_P Parameter: Plant Line Value: WS
  misc_feature: MA Experiment 20000794 PARAMETER Experiment Name: At_Petals_P Parameter: Tissue Value: Petals vs. Whole plant
  misc_feature: MA Experiment ID: 20001247 Result: Up-regulated in Transcription
  misc_feature: MA Experiment 20001247 PARAMETER Experiment Name: At_Far-red-induction_P Parameter: Age (day) Value: 7
  misc_feature: MA Experiment 20001247 PARAMETER Experiment Name: At_Far-red-induction_P Parameter: Light Value: Far-red vs. White
  misc_feature: MA Experiment 20001247 PARAMETER Experiment Name: At_Far-red-induction_P Parameter: Organism Value: A. thaliana
  misc_feature: MA Experiment 20001247 PARAMETER Experiment Name: At_Far-red-induction_P Parameter: Plant Line Value: Columbia
  misc_feature: MA Experiment 20001247 PARAMETER Experiment Name: At_Far-red-induction_P Parameter: Timepoint (hr) Value: 1
  misc_feature: MA Experiment 20001247 PARAMETER Experiment Name: At_Far-red-induction_P Parameter: Tissue Value: Whole Plant
  misc_feature: MA Experiment ID: 20001248 Result: Up-regulated in Transcription
  misc_feature: MA Experiment 20001248 PARAMETER Experiment Name: At_Far-red-induction_P Parameter: Age (day) Value: 7
  misc_feature: MA Experiment 20001248 PARAMETER Experiment Name: At_Far-red-induction_P Parameter: Light Value: Far-red vs. White
  misc_feature: MA Experiment 20001248 PARAMETER Experiment Name: At_Far-red-induction_P Parameter: Organism Value: A. thaliana
  misc_feature: MA Experiment 20001248 PARAMETER Experiment Name: At_Far-red-induction_P Parameter: Plant Line Value: Columbia
  misc_feature: MA Experiment 20001248 PARAMETER Experiment Name: At_Far-red-induction_P Parameter: Timepoint (hr) Value: 4
  misc_feature: MA Experiment 20001248 PARAMETER Experiment Name: At_Far-red-induction_P Parameter: Tissue Value: Whole Plant
  misc_feature: MA Experiment ID: 20001554 Result: Down-regulated in Transcription
  misc_feature: MA Experiment 20001554 PARAMETER Experiment Name: At_Drought_Soil_Dry_P Parameter: Age (day) Value: 21
  misc_feature: MA Experiment 20001554 PARAMETER Experiment Name: At_Drought_Soil_Dry_P Parameter: Organism Value: A. thaliana
  misc_feature: MA Experiment 20001554 PARAMETER Experiment Name: At_Drought_Soil_Dry_P Parameter: Plant Line Value: WS
  misc_feature: MA Experiment 20001554 PARAMETER Experiment Name: At_Drought_Soil_Dry_P Parameter: Post Timepoint (hr) Value: None
  misc_feature: MA Experiment 20001554 PARAMETER Experiment Name: At_Drought_Soil_Dry_P Parameter: Post-Treatment Value: None
  misc_feature: MA Experiment 20001554 PARAMETER Experiment Name: At_Drought_Soil_Dry_P Parameter: Timepoint (day) Value: 7
  misc_feature: MA Experiment 20001554 PARAMETER Experiment Name: At_Drought_Soil_Dry_P Parameter: Treatment Value: Drought vs. No Drought
  misc_feature: MA Experiment ID: 20001555 Result: Down-regulated in Transcription
  misc_feature: MA Experiment 20001555 PARAMETER Experiment Name: At_Drought_Soil_Dry_P Parameter: Age (day) Value: 24
  misc_feature: MA Experiment 20001555 PARAMETER Experiment Name: At_Drought_Soil_Dry_P Parameter: Organism Value: A. thaliana
  misc_feature: MA Experiment 20001555 PARAMETER Experiment Name: At_Drought_Soil_Dry_P Parameter: Plant Line Value: WS
  misc_feature: MA Experiment 20001555 PARAMETER Experiment Name: At_Drought_Soil_Dry_P Parameter: Post Timepoint (hr) Value: None
  misc_feature: MA Experiment 20001555 PARAMETER Experiment Name: At_Drought_Soil_Dry_P Parameter: Post-Treatment Value: None
  misc_feature: MA Experiment 20001555 PARAMETER Experiment Name: At_Drought_Soil_Dry_P Parameter: Timepoint (day) Value: 10
  misc_feature: MA Experiment 20001555 PARAMETER Experiment Name: At_Drought_Soil_Dry_P Parameter: Treatment Value: Drought vs. No Drought
  misc_feature: MA Experiment ID: 20001556 Result: Down-regulated in Transcription
  misc_feature: MA Experiment 20001556 PARAMETER Experiment Name: At_Drought_Soil_Dry_P Parameter: Age (day) Value: 26
  misc_feature: MA Experiment 20001556 PARAMETER Experiment Name: At_Drought_Soil_Dry_P Parameter: Organism Value: A. thaliana
  misc_feature: MA Experiment 20001556 PARAMETER Experiment Name: At_Drought_Soil_Dry_P Parameter: Plant Line Value: WS
  misc_feature: MA Experiment 20001556 PARAMETER Experiment Name: At_Drought_Soil_Dry_P Parameter: Post Timepoint (hr) Value: None
  misc_feature: MA Experiment 20001556 PARAMETER Experiment Name: At_Drought_Soil_Dry_P Parameter: Post-Treatment Value: None
  misc_feature: MA Experiment 20001556 PARAMETER Experiment Name: At_Drought_Soil_Dry_P Parameter: Timepoint (day) Value: 12
  misc_feature: MA Experiment 20001556 PARAMETER Experiment Name: At_Drought_Soil_Dry_P Parameter: Treatment Value: Drought vs. No Drought
  misc_feature: MA Experiment ID: 20001558 Result: Down-regulated in Transcription
  misc_feature: MA Experiment 20001558 PARAMETER Experiment Name: At_Drought_Soil_Dry_P Parameter: Age (day) Value: 27
  misc_feature: MA Experiment 20001558 PARAMETER Experiment Name: At_Drought_Soil_Dry_P Parameter: Organism Value: A. thaliana
  misc_feature: MA Experiment 20001558 PARAMETER Experiment Name: At_Drought_Soil_Dry_P Parameter: Plant Line Value: WS
  misc_feature: MA Experiment 20001558 PARAMETER Experiment Name: At_Drought_Soil_Dry_P Parameter: Post Timepoint (hr) Value: 6
  misc_feature: MA Experiment 20001558 PARAMETER Experiment Name: At_Drought_Soil_Dry_P Parameter: Post-Treatment Value: Re-Water vs. No Drought
  misc_feature: MA Experiment 20001558 PARAMETER Experiment Name: At_Drought_Soil_Dry_P Parameter: Timepoint (day) Value: 13
  misc_feature: MA Experiment 20001558 PARAMETER Experiment Name: At_Drought_Soil_Dry_P Parameter: Treatment Value: Drought vs. No Drought
  misc_feature: MA Experiment ID: 20001559 Result: Down-regulated in Transcription
  misc_feature: MA Experiment 20001559 PARAMETER Experiment Name: At_Drought_Soil_Dry_P Parameter: Age (day) Value: 28
  misc_feature: MA Experiment 20001559 PARAMETER Experiment Name: At_Drought_Soil_Dry_P Parameter: Organism Value: A. thaliana
  misc_feature: MA Experiment 20001559 PARAMETER Experiment Name: At_Drought_Soil_Dry_P Parameter: Plant Line Value: WS
  misc_feature: MA Experiment 20001559 PARAMETER Experiment Name: At_Drought_Soil_Dry_P Parameter: Post Timepoint (hr) Value: 29
  misc_feature: MA Experiment 20001559 PARAMETER Experiment Name: At_Drought_Soil_Dry_P Parameter: Post-Treatment Value: Re-Water vs. No Drought
  misc_feature: MA Experiment 20001559 PARAMETER Experiment Name: At_Drought_Soil_Dry_P Parameter: Timepoint (day) Value: 14
  misc_feature: MA Experiment 20001559 PARAMETER Experiment Name: At_Drought_Soil_Dry_P Parameter: Treatment Value: Drought vs. No Drought
  misc_feature: MA Experiment ID: 20001560 Result: Down-regulated in Transcription
  misc_feature: MA Experiment 20001560 PARAMETER Experiment Name: At_Drought_Soil_Dry_P Parameter: Age (day) Value: 28
  misc_feature: MA Experiment 20001560 PARAMETER Experiment Name: At_Drought_Soil_Dry_P Parameter: Organism Value: A. thaliana
  misc_feature: MA Experiment 20001560 PARAMETER Experiment Name: At_Drought_Soil_Dry_P Parameter: Plant Line Value: WS
  misc_feature: MA Experiment 20001560 PARAMETER Experiment Name: At_Drought_Soil_Dry_P Parameter: Post Timepoint (hr) Value: None
  misc_feature: MA Experiment 20001560 PARAMETER Experiment Name: At_Drought_Soil_Dry_P Parameter: Post-Treatment Value: None
  misc_feature: MA Experiment 20001560 PARAMETER Experiment Name: At_Drought_Soil_Dry_P Parameter: Timepoint (day) Value: 14
  misc_feature: MA Experiment 20001560 PARAMETER Experiment Name: At_Drought_Soil_Dry_P Parameter: Treatment Value: Drought vs. No Drought
  misc_feature: MA Experiment ID: 20001760 Result: Down-regulated in Transcription
  misc_feature: MA Experiment 20001760 PARAMETER Experiment Name: At_50mM_NH4NO3_L-to-H_P Parameter: Timepoint (hr) Value: 2
  misc_feature: MA Experiment 20001760 PARAMETER Experiment Name: At_50mM_NH4NO3_L-to-H_P Parameter: Tissue Value: Siliques
  misc_feature: MA Experiment 20001760 PARAMETER Experiment Name: At_50mM_NH4NO3_L-to-H_P Parameter: Treatment Value: 50mM NH4NO3 vs 100mM Mannitol
  misc_feature: MA Experiment ID: 20001773 Result: Down-regulated in Transcription
  misc_feature: MA Experiment 20001773 PARAMETER Experiment Name: At_Far-red-enriched-adult_P Parameter: Age (day) Value: 30
  misc_feature: MA Experiment 20001773 PARAMETER Experiment Name: At_Far-red-enriched-adult_P Parameter: Light Value: Far-red enriched vs. White
  misc_feature: MA Experiment 20001773 PARAMETER Experiment Name: At_Far-red-enriched-adult_P Parameter: Organism Value: A. thaliana
  misc_feature: MA Experiment 20001773 PARAMETER Experiment Name: At_Far-red-enriched-adult_P Parameter: Plant Line Value: Columbia
  misc_feature: MA Experiment 20001773 PARAMETER Experiment Name: At_Far-red-enriched-adult_P Parameter: Timepoint (hr) Value: 48
  misc_feature: MA Experiment 20001773 PARAMETER Experiment Name: At_Far-red-enriched-adult_P Parameter: Tissue Value: Aerial
  misc_feature: MA Experiment ID: 20001904 Result: Down-regulated in Transcription
  misc_feature: MA Experiment 20001904 PARAMETER Experiment Name: At_Drought_Reproduction_P Parameter: Age (day) Value: 37
  misc_feature: MA Experiment 20001904 PARAMETER Experiment Name: At_Drought_Reproduction_P Parameter: Organism Value: A. thaliana
  misc_feature: MA Experiment 20001904 PARAMETER Experiment Name: At_Drought_Reproduction_P Parameter: Plant Line Value: WS
  misc_feature: MA Experiment 20001904 PARAMETER Experiment Name: At_Drought_Reproduction_P Parameter: Timepoint (day) Value: 7
  misc_feature: MA Experiment 20001904 PARAMETER Experiment Name: At_Drought_Reproduction_P Parameter: Tissue Value: Rosettes
  misc_feature: MA Experiment 20001904 PARAMETER Experiment Name: At_Drought_Reproduction_P Parameter: Treatment Value: Drought vs. No Drought
  misc_feature: MA Experiment ID: 20001907 Result: Down-regulated in Transcription
  misc_feature: MA Experiment 20001907 PARAMETER Experiment Name: At_Drought_Reproduction_P Parameter: Age (day) Value: 37
  misc_feature: MA Experiment 20001907 PARAMETER Experiment Name: At_Drought_Reproduction_P Parameter: Organism Value: A. thaliana
  misc_feature: MA Experiment 20001907 PARAMETER Experiment Name: At_Drought_Reproduction_P Parameter: Plant Line Value: WS
  misc_feature: MA Experiment 20001907 PARAMETER Experiment Name: At_Drought_Reproduction_P Parameter: Timepoint (day) Value: 7
  misc_feature: MA Experiment 20001907 PARAMETER Experiment Name: At_Drought_Reproduction_P Parameter: Tissue Value: Siliques
  misc_feature: MA Experiment 20001907 PARAMETER Experiment Name: At_Drought_Reproduction_P Parameter: Treatment Value: Drought vs. No Drought
ccatatttgactcgtcaatataaatacaattgtaacaaacagattttgatcaaaagattttacttttctcaattcctttcaactttcaaaatcgaagatctcttaagccatgaacgatcttctctccggctcgtttaaaacctccgtcgcggacggttcatcgccgccgcactcacacaacatcgagatgtcaaaagcgaaagtctccggcggaagttgccacggtggtaacaacctagacacgttcttcctcgacgtggaggttgtaaacgaagaccttaaagagctagatcgtctctgtcacaacctccgatcgagcaacgaacagagcaagacgcttcataacgctaacgcggtgaaggagctgaagaagaagatggacgctgacgtcactgctgcgcttaagacggcgaggcgcttgaaaggaaacctcgaggctttagatcgggctaatgaagtcaaccgaagtttaccggaaagtggaccgggttcgtcgtcggaccggcaaagaacttcggtggttaacgggttgaggaagaagctgaaggatgagatggaaaaatttagtcgagtgagagaaacgatcacgaatgagtacaaagagacggttgggagaatgtgcttcaccgtcaccggcgaatatcccgacgaagctaccctcgagcgtctcatctccacaggtgaaagtgaaacatttttgcagaaagcgattcaagaacaaggtcgtggtaggattttggacactattaacgagatacaggagaggcacgacgcagtgaaagatattgagaagagtttgaatgagttgcaccaagtgtttcttgatatggctgtgttggttgagcatcagggtgcacagcttgatgacattgaaggcaacgtcaaacgagctaactcgcttgttcggtctggtgcggaccggcttgttaaggcacggttttatcagaagaacacacggaagtggacttgctttgccattttgctattgctcattattgtggttttaattgtggtgtttactgttaagccttgggagagtaatggtgggggaggtggaggtgcacctcgtcaagctactccggttcaagctcagccaccgccacctccggctgtgaatcggcggctactacgctaaataattttttttttgaggttccctctgtctatgcatgagcatatctatgttttgaagattgttttttattttacagtattttgtctttaatgtttttgtaatgttttggttggttaaactctgtgtatatataatgcgatcaccacatttctttgttttattatgg

SEQ ID NO: 106157 - protein, 341 aa, Arabidopsis thaliana
  peptide (1)..(341): Ceres Seq. ID no. 13618877
  misc_feature (218)..(280): Pfam Name: SNARE domain Pfam Description: SNARE domain
  misc_feature (1)..(341): Homolog of NCBI NO: 15231205 NR Description: syntaxin of plants SYP122 [Arabidopsis thaliana]
  misc_feature (1)..(341): Homolog of NCBI NO: 11358871 NR Description: syntaxin synt4 [imported] - Arabidopsis thaliana
  misc_feature (1)..(341): Homolog of NCBI NO: 15229865 NR Description: syntaxin of plants SYP121 [Arabidopsis thaliana]
  misc_feature (1)..(309): Homolog of NCBI NO: 4206787 NR Description: syntaxin-related protein Nt-syr1 [Nicotiana
  misc_feature (1)..(302): Homolog of NCBI NO: 15219900 NR Description: syntaxin of plants SYP124 [Arabidopsis thaliana]
  misc_feature (1)..(302): Homolog of NCBI NO: 15220328 NR Description: syntaxin of plants SYP125 [Arabidopsis thaliana]
  misc_feature (1)..(305): Homolog of NCBI NO: 15236285 NR Description: syntaxin of plants SYP123 [Arabidopsis thaliana]
  misc_feature (1)..(310): Homolog of NCBI NO: 18415701 NR Description: syntaxin of plants SYP132 [Arabidopsis thaliana] Syntaxin 132 (AtSYP132) >gi|17380724|gb|AAL36192.1| putative [Arabidopsis thaliana] >gi|21436145|gb|AAM51319.1| putative
  misc_feature (1)..(310): Homolog of NCBI NO: 11358872 NR Description: syntaxin-like protein - Arabidopsis thaliana
  misc_feature (1)..(312): Homolog of NCBI NO: 15228637 NR Description: syntaxin of plants SYP131 [Arabidopsis thaliana]
MNDLLSGSFKTSVADGSSPPHSHNIEMSKAKVSGGSCHGGNNLDTFFLDVEVVNEDLKELDRLCHNLRSSNEQSKTLHNANAVKELKKKMDADVTAALKTARRLKGNLEALDRANEVNRSLPESGPGSSSDRQRTSVVNGLRKKLKDEMEKFSRVRETITNEYKETVGRMCFTVTGEYPDEATLERLISTGESETFLQKAIQEQGRGRILDTINEIQERHDAVKDIEKSLNELHQVFLDMAVLVEHQGAQLDDIEGNVKRANSLVRSGADRLVKARFYQKNTRKWTCFAILLLLIIVVLIVVFTVKPWESNGGGGGGAPRQATPVQAQPPPPPAVNRRLLR

SEQ ID NO: 106158 - protein, 315 aa, Arabidopsis thaliana
  peptide (1)..(315): Ceres Seq. ID no. 13618878
  misc_feature (192)..(254): Pfam Name: SNARE domain Pfam Description: SNARE domain
  misc_feature (1)..(315): Homolog of NCBI NO: 15231205 NR Description: syntaxin of plants SYP122 [Arabidopsis thaliana]
  misc_feature (1)..(315): Homolog of NCBI NO: 11358871 NR Description: syntaxin synt4 [imported] - Arabidopsis thaliana
  misc_feature (1)..(315): Homolog of NCBI NO: 15229865 NR Description: syntaxin of plants SYP121 [Arabidopsis thaliana]
  misc_feature (1)..(283): Homolog of NCBI NO: 4206787 NR Description: syntaxin-related protein Nt-syr1 [Nicotiana
  misc_feature (1)..(276): Homolog of NCBI NO: 15219900 NR Description: syntaxin of plants SYP124 [Arabidopsis thaliana]
  misc_feature (1)..(276): Homolog of NCBI NO: 15220328 NR Description: syntaxin of plants SYP125 [Arabidopsis thaliana]
  misc_feature (1)..(279): Homolog of NCBI NO: 15236285 NR Description: syntaxin of plants SYP123 [Arabidopsis thaliana]
  misc_feature (1)..(284): Homolog of NCBI NO: 18415701 NR Description: syntaxin of plants SYP132 [Arabidopsis thaliana] Syntaxin 132 (AtSYP132) >gi|17380724|gb|AAL36192.1| putative [Arabidopsis thaliana] >gi|21436145|gb|AAM51319.1| putative
  misc_feature (1)..(284): Homolog of NCBI NO: 11358872 NR Description: syntaxin-like protein - Arabidopsis thaliana
  misc_feature (1)..(286): Homolog of NCBI NO: 15228637 NR Description: syntaxin of plants SYP131 [Arabidopsis thaliana]
MSKAKVSGGSCHGGNNLDTFFLDVEVVNEDLKELDRLCHNLRSSNEQSKTLHNANAVKELKKKMDADVTAALKTARRLKGNLEALDRANEVNRSLPESGPGSSSDRQRTSVVNGLRKKLKDEMEKFSRVRETITNEYKETVGRMCFTVTGEYPDEATLERLISTGESETFLQKAIQEQGRGRILDTINEIQERHDAVKDIEKSLNELHQVFLDMAVLVEHQGAQLDDIEGNVKRANSLVRSGADRLVKARFYQKNTRKWTCFAILLLLIIVVLIVVFTVKPWESNGGGGGGAPRQATPVQAQPPPPPAVNRRLLR

SEQ ID NO: 106159 - protein, 252 aa, Arabidopsis thaliana
  peptide (1)..(252): Ceres Seq. ID no. 13618879
  misc_feature (129)..(191): Pfam Name: SNARE domain Pfam Description: SNARE domain
  misc_feature (1)..(252): Homolog of NCBI NO: 15231205 NR Description: syntaxin of plants SYP122 [Arabidopsis thaliana]
  misc_feature (1)..(252): Homolog of NCBI NO: 11358871 NR Description: syntaxin synt4 [imported] - Arabidopsis thaliana
  misc_feature (1)..(252): Homolog of NCBI NO: 15229865 NR Description: syntaxin of plants SYP121 [Arabidopsis thaliana]
  misc_feature (1)..(220): Homolog of NCBI NO: 4206787 NR Description: syntaxin-related protein Nt-syr1 [Nicotiana
  misc_feature (1)..(213): Homolog of NCBI NO: 15219900 NR Description: syntaxin of plants SYP124 [Arabidopsis thaliana]
  misc_feature (1)..(213): Homolog of NCBI NO: 15220328 NR Description: syntaxin of plants SYP125 [Arabidopsis thaliana]
  misc_feature (1)..(216): Homolog of NCBI NO: 15236285 NR Description: syntaxin of plants SYP123 [Arabidopsis thaliana]
  misc_feature (1)..(221): Homolog of NCBI NO: 18415701 NR Description: syntaxin of plants SYP132 [Arabidopsis thaliana] Syntaxin 132 (AtSYP132) >gi|17380724|gb|AAL36192.1| putative [Arabidopsis thaliana] >gi|21436145|gb|AAM51319.1| putative
  misc_feature (1)..(221): Homolog of NCBI NO: 11358872 NR Description: syntaxin-like protein - Arabidopsis thaliana
  misc_feature (1)..(223): Homolog of NCBI NO: 15228637 NR Description: syntaxin of plants SYP131 [Arabidopsis thaliana]
MDADVTAALKTARRLKGNLEALDRANEVNRSLPESGPGSSSDRQRTSVVNGLRKKLKDEMEKFSRVRETITNEYKETVGRMCFTVTGEYPDEATLERLISTGESETFLQKAIQEQGRGRILDTINEIQERHDAVKDIEKSLNELHQVFLDMAVLVEHQGAQLDDIEGNVKRANSLVRSGADRLVKARFYQKNTRKWTCFAILLLLIIVVLIVVFTVKPWESNGGGGGGAPRQATPVQAQPPPPPAVNRRLLR

SEQ ID NO: 106160 - DNA, 645 bp, Arabidopsis thaliana
  misc_feature (1)..(645): Ceres Seq. ID no. 13618899
  misc_feature: MA Experiment ID: 108434 Result: Up-regulated in Transcription
  misc_feature: MA Experiment 108434 PARAMETER Experiment Name: At_Root_Tips_cDNA_P Parameter: Tissue Value: Root Tips
  misc_feature: MA Experiment ID: 20000179 Result: Down-regulated in Transcription
  misc_feature: MA Experiment 20000179 PARAMETER Experiment Name: At_Germinating_Seeds_P Parameter: Age (hr) Value: 6 vs. 0
  misc_feature: MA Experiment 20000179 PARAMETER Experiment Name: At_Germinating_Seeds_P Parameter: Tissue Value: Germinating Seeds
  misc_feature: MA Experiment ID: 20001451 Result: Up-regulated in Transcription
  misc_feature: MA Experiment 20001451 PARAMETER Experiment Name: At_Far-red-induction_P Parameter: Age (day) Value: 7
  misc_feature: MA Experiment 20001451 PARAMETER Experiment Name: At_Far-red-induction_P Parameter: Light Value: Far-red vs. White
  misc_feature: MA Experiment 20001451 PARAMETER Experiment Name: At_Far-red-induction_P Parameter: Organism Value: A. thaliana
  misc_feature: MA Experiment 20001451 PARAMETER Experiment Name: At_Far-red-induction_P Parameter: Plant Line Value: Columbia
  misc_feature: MA Experiment 20001451 PARAMETER Experiment Name: At_Far-red-induction_P Parameter: Timepoint (hr) Value: 24
  misc_feature: MA Experiment 20001451 PARAMETER Experiment Name: At_Far-red-induction_P Parameter: Tissue Value: Whole Plant
ctgcaaagctttagtgcttcatagagcaaaggagaaaaaaaatggtgaactatgtgctcaaaatcaccgctgatctcgagaatctcactaatctccagccttccggtggctgcgacgattccaacttcccttacctcttcaagttgaaatgtgaaagatgtggagaggtgactccgaaagaaacatgtgtgactttgaatgagacttttactcctccgggaggtaggggtacttgtcatcttgttcagaagtgtaagttctgtggaagggaagggaatgtgactatgattccgggcaaaggtcgacctttaactctggaagattctgaggctggagaacatgcccctcttatggtgtttgactgtcgtggctatgaacccattgatttcggatttggtggatattggaaagctcaagctgaatctggaaccaaatttgatgagattgatttgtcgagcggggaggaattcacagagtacgatgagaagggagaatgcccagtaatgatatcgaatttccgtgcaagcttcagcgtcaccaagtgaagttggtctctgttgtctattttctgattccctacacacttggtgtatgtaaaaaccatggggattatcatttctcaagttctaataaaattctcttttt

SEQ ID NO: 106161 - protein, 167 aa, Arabidopsis thaliana; identical to SEQ ID NO: 28135
  peptide (1)..(167): Ceres Seq. ID no. 13618900
  misc_feature (1)..(167): Pfam Name: Eukaryotic protein of unknown function (DUF866) Pfam Description: Eukaryotic protein of unknown function (DUF866)
  misc_feature (1)..(167): Homolog of NCBI NO: 18418118 NR Description: expressed protein [Arabidopsis thaliana] unknown [Arabidopsis thaliana] >gi|27754522|gb|AAO22708.1| protein [Arabidopsis thaliana] >gi|28394077|gb|AAO42446.1|
  misc_feature (1)..(167): Homolog of NCBI NO: 7486215 NR Description: hypothetical protein F26P21.50 - Arabidopsis >gi|3688174|emb|CAA21202.1| putative protein [Arabidopsis >gi|7270240|emb|CAB80010.1| putative protein [Arabidopsis
  misc_feature (1)..(165): Homolog of NCBI NO: 34914208 NR Description: OSJNBb0049O23.17 [Oryza sativa (japonica
  misc_feature (1)..(151): Homolog of NCBI NO: 8923541 NR Description: hypothetical protein FLJ20580 [Homo sapiens] unnamed protein product [Homo sapiens]
  misc_feature (6)..(167): Homolog of NCBI NO: 7503539 NR Description: hypothetical protein F46B6.3 - Caenorhabditis
  misc_feature (1)..(151): Homolog of NCBI NO: 26328397 NR Description: unnamed protein product [Mus musculus]
  misc_feature (1)..(149): Homolog of NCBI NO: 27715611 NR Description: similar to hypothetical protein FLJ20580 [Homo
  misc_feature (6)..(151): Homolog of NCBI NO: 21539639 NR Description: RIKEN cDNA 0610037L13 [Mus musculus] unnamed protein product [Mus musculus]
  misc_feature (1)..(151): Homolog of NCBI NO: 26341300 NR Description: unnamed protein product [Mus musculus]
  misc_feature (4)..(160): Homolog of NCBI NO: 32418144 NR Description: hypothetical protein [Neurospora crassa]

SEQ ID NO: 106162 - protein, 86 aa, Arabidopsis thaliana
  peptide (1)..(86): Ceres Seq. ID no. 13618901
  misc_feature (1)..(86): Pfam Name: Eukaryotic protein of unknown function (DUF866) Pfam Description: Eukaryotic protein of unknown function (DUF866)
  misc_feature (1)..(86): Homolog of NCBI NO: 18418118 NR Description: expressed protein [Arabidopsis thaliana] unknown [Arabidopsis thaliana] >gi|27754522|gb|AAO22708.1| protein [Arabidopsis thaliana] >gi|28394077|gb|AAO42446.1|
  misc_feature (1)..(86): Homolog of NCBI NO: 7486215 NR Description: hypothetical protein F26P21.50 - Arabidopsis >gi|3688174|emb|CAA21202.1| putative protein [Arabidopsis >gi|7270240|emb|CAB80010.1| putative protein [Arabidopsis
  misc_feature (1)..(84): Homolog of NCBI NO: 34914208 NR Description: OSJNBb0049O23.17 [Oryza sativa (japonica
  misc_feature (1)..(70): Homolog of NCBI NO: 8923541 NR Description: hypothetical protein FLJ20580 [Homo sapiens] unnamed protein product [Homo sapiens]
  misc_feature (1)..(86): Homolog of NCBI NO: 7503539 NR Description: hypothetical protein F46B6.3 - Caenorhabditis
  misc_feature (1)..(70): Homolog of NCBI NO: 26328397 NR Description: unnamed protein product [Mus musculus]
  misc_feature (1)..(68): Homolog of NCBI NO: 27715611 NR Description: similar to hypothetical protein FLJ20580 [Homo
  misc_feature (1)..(70): Homolog of NCBI NO: 21539639 NR Description: RIKEN cDNA 0610037L13 [Mus musculus] unnamed protein product [Mus musculus]
  misc_feature (1)..(70): Homolog of NCBI NO: 26341300 NR Description: unnamed protein product [Mus musculus]
  misc_feature (1)..(79): Homolog of NCBI NO: 32418144 NR Description: hypothetical protein [Neurospora crassa]
MIPGKGRPLTLEDSEAGEHAPLMVFDCRGYEPIDFGFGGYWKAQAESGTKFDEIDLSSGEEFTEYDEKGECPVMISNFRASFSVTK

SEQ ID NO: 106163 - DNA, 1407 bp, Arabidopsis thaliana
  misc_feature (1)..(1407): Ceres Seq. ID no. 13618906
  misc_feature: MA Experiment ID: 108435 Result: Down-regulated in Transcription
  misc_feature: MA Experiment 108435 PARAMETER Experiment Name: At_stm_Mutants_cDNA_P Parameter: Plant Line Value: wt Landsburg vs stm
  misc_feature: MA Experiment 108435 PARAMETER Experiment Name: At_stm_Mutants_cDNA_P Parameter: Tissue Value: Shoot Apical Meristem Region
  misc_feature: MA Experiment ID: 108462 Result: Up-regulated in Transcription
  misc_feature: MA Experiment 108462 PARAMETER Experiment Name: At_Germinating_Seeds_cDNA_P Parameter: Age (day) Value: 2 vs. 0
  misc_feature: MA Experiment 108462 PARAMETER Experiment Name: At_Germinating_Seeds_cDNA_P Parameter: Tissue Value: Germinating Seeds
  misc_feature: MA Experiment ID: 108463 Result: Up-regulated in Transcription
  misc_feature: MA Experiment 108463 PARAMETER Experiment Name: At_Germinating_Seeds_cDNA_P Parameter: Age (day) Value: 3 vs. 0
  misc_feature: MA Experiment 108463 PARAMETER Experiment Name: At_Germinating_Seeds_cDNA_P Parameter: Tissue Value: Germinating Seeds
  misc_feature: MA Experiment ID: 108464 Result: Up-regulated in Transcription
  misc_feature: MA Experiment 108464 PARAMETER Experiment Name: At_Germinating_Seeds_cDNA_P Parameter: Age (day) Value: 4 vs. 0
  misc_feature: MA Experiment 108464 PARAMETER Experiment Name: At_Germinating_Seeds_cDNA_P Parameter: Tissue Value: Germinating Seeds
  misc_feature: MA Experiment ID: 108561 Result: Down-regulated in Transcription
  misc_feature: MA Experiment 108561 PARAMETER Experiment Name: At_100uM_ABA_cDNA_P Parameter: Timepoint (hr) Value: 6
  misc_feature: MA Experiment 108561 PARAMETER Experiment Name: At_100uM_ABA_cDNA_P Parameter: Tissue Value: Aerial
  misc_feature: MA Experiment 108561 PARAMETER Experiment Name: At_100uM_ABA_cDNA_P Parameter: Treatment Value: 100uM ABA vs. No Treatment
  misc_feature: MA Experiment ID: 108576 Result: Down-regulated in Transcription
  misc_feature: MA Experiment 108576 PARAMETER Experiment Name: At_42deg_Heat_cDNA_P Parameter: Temperature (deg C) Value: 42 vs. 22
  misc_feature: MA Experiment 108576 PARAMETER Experiment Name: At_42deg_Heat_cDNA_P Parameter: Timepoint (hr) Value: 1
  misc_feature: MA Experiment 108576 PARAMETER Experiment Name: At_42deg_Heat_cDNA_P Parameter: Tissue Value: Aerial
  misc_feature: MA Experiment ID: 108577 Result: Down-regulated in Transcription
  misc_feature: MA Experiment 108577 PARAMETER Experiment Name: At_42deg_Heat_cDNA_P Parameter: Temperature (deg C) Value: 42 vs. 22
  misc_feature: MA Experiment 108577 PARAMETER Experiment Name: At_42deg_Heat_cDNA_P Parameter: Timepoint (hr) Value: 6
  misc_feature: MA Experiment 108577 PARAMETER Experiment Name: At_42deg_Heat_cDNA_P Parameter: Tissue Value: Aerial
  misc_feature: MA Experiment ID: 108595 Result: Down-regulated in Transcription
  misc_feature: MA Experiment 108595 PARAMETER Experiment Name: At_Ler-pi_Ovule_cDNA_P Parameter: Plant Line Value: null
  misc_feature: MA Experiment ID: 108668 Result: Down-regulated in Transcription
  misc_feature: MA Experiment 108668 PARAMETER Experiment Name: At_2mM_SA_cDNA_P Parameter: Plant Line Value: WS
  misc_feature: MA Experiment 108668 PARAMETER Experiment Name: At_2mM_SA_cDNA_P Parameter: Timepoint (hr) Value: 6
  misc_feature: MA Experiment 108668 PARAMETER Experiment Name: At_2mM_SA_cDNA_P Parameter: Treatment Value: 2mM SA vs. No Treatment
  misc_feature: MA Experiment ID: 20000069 Result: Down-regulated in Transcription
  misc_feature: MA Experiment 20000069 PARAMETER Experiment Name: At_100uM_ABA_Mutants_cDNA_P Parameter: Plant Line Value: CS23
  misc_feature: MA Experiment 20000069 PARAMETER Experiment Name: At_100uM_ABA_Mutants_cDNA_P Parameter: Timepoint (hr) Value: 6
  misc_feature: MA Experiment 20000069 PARAMETER Experiment Name: At_100uM_ABA_Mutants_cDNA_P Parameter: Tissue Value: Aerial
  misc_feature: MA Experiment 20000069 PARAMETER Experiment Name: At_100uM_ABA_Mutants_cDNA_P Parameter: Treatment Value: 100uM ABA vs. No Treatment
  misc_feature: MA Experiment ID: 20000070 Result: Down-regulated in Transcription
  misc_feature: MA Experiment 20000070 PARAMETER Experiment Name: At_100uM_ABA_Mutants_cDNA_P Parameter: Plant Line Value: CS24
  misc_feature: MA Experiment 20000070 PARAMETER Experiment Name: At_100uM_ABA_Mutants_cDNA_P Parameter: Timepoint (hr) Value: 6
  misc_feature: MA Experiment 20000070 PARAMETER Experiment Name: At_100uM_ABA_Mutants_cDNA_P Parameter: Tissue Value: Aerial
  misc_feature: MA Experiment 20000070 PARAMETER Experiment Name: At_100uM_ABA_Mutants_cDNA_P Parameter: Treatment Value: 100uM ABA vs. No Treatment
  misc_feature: MA Experiment ID: 20000071 Result: Down-regulated in Transcription
  misc_feature: MA Experiment 20000071 PARAMETER Experiment Name: At_100uM_ABA_Mutants_cDNA_P Parameter: Plant Line Value: CS8104
  misc_feature: MA Experiment 20000071 PARAMETER Experiment Name: At_100uM_ABA_Mutants_cDNA_P Parameter: Timepoint (hr) Value: 6
  misc_feature: MA Experiment 20000071 PARAMETER Experiment Name: At_100uM_ABA_Mutants_cDNA_P Parameter: Tissue Value: Aerial
  misc_feature: MA Experiment 20000071 PARAMETER Experiment Name: At_100uM_ABA_Mutants_cDNA_P Parameter: Treatment Value: 100uM ABA vs. No Treatment
  misc_feature: MA Experiment ID: 20000072 Result: Down-regulated in Transcription
  misc_feature: MA Experiment 20000072 PARAMETER Experiment Name: At_100uM_ABA_Mutants_cDNA_P Parameter: Plant Line Value: CS8105
  misc_feature: MA Experiment 20000072 PARAMETER Experiment Name: At_100uM_ABA_Mutants_cDNA_P Parameter: Timepoint (hr) Value: 6
  misc_feature: MA Experiment 20000072 PARAMETER Experiment Name: At_100uM_ABA_Mutants_cDNA_P Parameter: Tissue Value: Aerial
  misc_feature: MA Experiment 20000072 PARAMETER Experiment Name: At_100uM_ABA_Mutants_cDNA_P Parameter: Treatment Value: 100uM ABA vs. No Treatment
  misc_feature: MA Experiment ID: 20000087 Result: Down-regulated in Transcription
  misc_feature: MA Experiment 20000087 PARAMETER Experiment Name: At_100uM_ABA_Mutants_cDNA_P Parameter: Plant Line Value: WS
  misc_feature: MA Experiment 20000087 PARAMETER Experiment Name: At_100uM_ABA_Mutants_cDNA_P Parameter: Timepoint (hr) Value: 6
  misc_feature: MA Experiment 20000087 PARAMETER Experiment Name: At_100uM_ABA_Mutants_cDNA_P Parameter: Tissue Value: Aerial
  misc_feature: MA Experiment 20000087 PARAMETER Experiment Name: At_100uM_ABA_Mutants_cDNA_P Parameter: Treatment Value: 100uM ABA vs. No Treatment
  misc_feature: MA Experiment ID: 20000088 Result: Down-regulated in Transcription
  misc_feature: MA Experiment 20000088 PARAMETER Experiment Name: At_100uM_ABA_Mutants_cDNA_P Parameter: Plant Line Value: Landsberg
  misc_feature: MA Experiment 20000088 PARAMETER Experiment Name: At_100uM_ABA_Mutants_cDNA_P Parameter: Timepoint (hr) Value: 6
  misc_feature: MA Experiment 20000088 PARAMETER Experiment Name: At_100uM_ABA_Mutants_cDNA_P Parameter: Tissue Value: Aerial
  misc_feature: MA Experiment 20000088 PARAMETER Experiment Name: At_100uM_ABA_Mutants_cDNA_P Parameter: Treatment Value: 100uM ABA vs. No Treatment
  misc_feature: MA Experiment ID: 20000093 Result: Down-regulated in Transcription
  misc_feature: MA Experiment 20000093 PARAMETER Experiment Name: At_42deg_Heat_cDNA_P Parameter: Temperature (deg C) Value: 42 vs. 22
  misc_feature: MA Experiment 20000093 PARAMETER Experiment Name: At_42deg_Heat_cDNA_P Parameter: Timepoint (hr) Value: 0.5
  misc_feature: MA Experiment 20000093 PARAMETER Experiment Name: At_42deg_Heat_cDNA_P Parameter: Tissue Value: Aerial
  misc_feature: MA Experiment ID: 20000111 Result: Down-regulated in Transcription
  misc_feature: MA Experiment 20000111 PARAMETER Experiment Name: At_42deg_Heat_cDNA_P Parameter: Temperature (deg C) Value: 42 vs. 22
  misc_feature: MA Experiment 20000111 PARAMETER Experiment Name: At_42deg_Heat_cDNA_P Parameter: Timepoint (hr) Value: 6
  misc_feature: MA Experiment 20000111 PARAMETER Experiment Name: At_42deg_Heat_cDNA_P Parameter: Tissue Value: Aerial
  misc_feature: MA Experiment ID: 20000112 Result: Down-regulated in Transcription
  misc_feature: MA Experiment 20000112 PARAMETER Experiment Name: At_42deg_Heat_cDNA_P Parameter: Temperature (deg C) Value: 42 vs. 22
  misc_feature: MA Experiment 20000112 PARAMETER Experiment Name: At_42deg_Heat_cDNA_P Parameter: Timepoint (hr) Value: 2
  misc_feature: MA Experiment 20000112 PARAMETER Experiment Name: At_42deg_Heat_cDNA_P Parameter: Tissue Value: Aerial
  misc_feature: MA Experiment ID: 20000113 Result: Down-regulated in Transcription
  misc_feature: MA Experiment 20000113 PARAMETER Experiment Name: At_42deg_Heat_cDNA_P Parameter: Temperature (deg C) Value: 42 vs. 22
  misc_feature: MA Experiment 20000113 PARAMETER Experiment Name: At_42deg_Heat_cDNA_P Parameter: Timepoint (hr) Value: 8
  misc_feature: MA Experiment 20000113 PARAMETER Experiment Name: At_42deg_Heat_cDNA_P Parameter: Tissue Value: Aerial
  misc_feature: MA Experiment ID: 20000117 Result: Down-regulated in Transcription
  misc_feature: MA Experiment 20000117 PARAMETER Experiment Name: At_100uM_ABA_Mutants_cDNA_P Parameter: Plant Line Value: Columbia
  misc_feature: MA Experiment 20000117 PARAMETER Experiment Name: At_100uM_ABA_Mutants_cDNA_P Parameter: Timepoint (hr) Value: 6
  misc_feature: MA Experiment 20000117 PARAMETER Experiment Name: At_100uM_ABA_Mutants_cDNA_P Parameter: Tissue Value: Aerial
  misc_feature: MA Experiment 20000117 PARAMETER Experiment Name: At_100uM_ABA_Mutants_cDNA_P Parameter: Treatment Value: 100uM ABA vs. No Treatment
  misc_feature: MA Experiment ID: 20000144 Result: Down-regulated in Transcription
  misc_feature: MA Experiment 20000144 PARAMETER Experiment Name: At_42deg_Heat_cDNA_P Parameter: Temperature (deg C) Value: 42 vs. 22
  misc_feature: MA Experiment 20000144 PARAMETER Experiment Name: At_42deg_Heat_cDNA_P Parameter: Timepoint (hr) Value: 1
  misc_feature: MA Experiment 20000144 PARAMETER Experiment Name: At_42deg_Heat_cDNA_P Parameter: Tissue Value: Aerial
  misc_feature: MA Experiment ID: 20000314 Result: Down-regulated in Transcription
  misc_feature: MA Experiment 20000314 PARAMETER Experiment Name: At_14day_Shoots-Roots_Sub_P Parameter: Age (day) Value: 14
  misc_feature: MA Experiment 20000314 PARAMETER Experiment Name: At_14day_Shoots-Roots_Sub_P Parameter: Organism Value: A. thaliana
  misc_feature: MA Experiment 20000314 PARAMETER Experiment Name: At_14day_Shoots-Roots_Sub_P Parameter: Plant Line Value: WS
  misc_feature: MA Experiment 20000314 PARAMETER Experiment Name: At_14day_Shoots-Roots_Sub_P Parameter: Tissue Value: Roots vs. Whole Plant
  misc_feature: MA Experiment ID: 20000315 Result: Up-regulated in Transcription
  misc_feature: MA Experiment 20000315 PARAMETER Experiment Name: At_14day_Shoots-Roots_Sub_P Parameter: Age (day) Value: 14
  misc_feature: MA Experiment 20000315 PARAMETER Experiment Name: At_14day_Shoots-Roots_Sub_P Parameter: Organism Value: A. thaliana
  misc_feature: MA Experiment 20000315 PARAMETER Experiment Name: At_14day_Shoots-Roots_Sub_P Parameter: Plant Line Value: WS
  misc_feature: MA Experiment 20000315 PARAMETER Experiment Name: At_14day_Shoots-Roots_Sub_P Parameter: Tissue Value: Shoots vs. Whole Plant
  misc_feature: MA Experiment ID: 20000328 Result: Down-regulated in Transcription
  misc_feature: MA Experiment 20000328 PARAMETER Experiment Name: At_42deg_Heat_Sub_P Parameter: Age (day) Value: 14
  misc_feature: MA Experiment 20000328 PARAMETER Experiment Name: At_42deg_Heat_Sub_P Parameter: Organism Value: A. thaliana
  misc_feature: MA Experiment 20000328 PARAMETER Experiment Name: At_42deg_Heat_Sub_P Parameter: Plant Line Value: WS
  misc_feature: MA Experiment 20000328 PARAMETER Experiment Name: At_42deg_Heat_Sub_P Parameter: Temperature (deg C) Value: 42 vs. 22
  misc_feature: MA Experiment 20000328 PARAMETER Experiment Name: At_42deg_Heat_Sub_P Parameter: Timepoint (hr) Value: 6
  misc_feature: MA Experiment 20000328 PARAMETER Experiment Name: At_42deg_Heat_Sub_P Parameter: Tissue Value: Aerial
  misc_feature: MA Experiment ID: 20000347 Result: Down-regulated in Transcription
  misc_feature: MA Experiment 20000347 PARAMETER Experiment Name: At_2mM_SA_Sub_P Parameter: Age (day) Value: 14
  misc_feature: MA Experiment 20000347 PARAMETER Experiment Name: At_2mM_SA_Sub_P Parameter: Organism Value: A. thaliana
  misc_feature: MA Experiment 20000347 PARAMETER Experiment Name: At_2mM_SA_Sub_P Parameter: Plant Line Value: WS
  misc_feature: MA Experiment 20000347 PARAMETER Experiment Name: At_2mM_SA_Sub_P Parameter: Timepoint (hr) Value: 6
  misc_feature: MA Experiment 20000347 PARAMETER Experiment Name: At_2mM_SA_Sub_P Parameter: Tissue Value: Aerial
  misc_feature: MA Experiment 20000347 PARAMETER Experiment Name: At_2mM_SA_Sub_P Parameter: Treatment Value: 2mM SA vs. No Treatment
  misc_feature: MA Experiment ID: 20000355 Result: Up-regulated in Transcription
  misc_feature: MA Experiment 20000355 PARAMETER Experiment Name: At_Siliques_Sub_P Parameter: Age (day) Value: 21
  misc_feature: MA Experiment 20000355 PARAMETER Experiment Name: At_Siliques_Sub_P Parameter: Organism Value: A. thaliana
  misc_feature: MA Experiment 20000355 PARAMETER Experiment Name: At_Siliques_Sub_P Parameter: Plant Line Value: WS
  misc_feature: MA Experiment 20000355 PARAMETER Experiment Name: At_Siliques_Sub_P Parameter: Tissue Value: Less Than 5mm Siliques vs. Whole Plant
aacatttcatagtattacaaaacaacgccaaaagtcaaaaggtttcgctttctagatcatgtccacatttctcctaacatggattattatgaccgtcgcgttaagcgtaacgctttttcttatgccgcaacaaacaaatgcggctagagcgttcttcgtgtttggcgactcactcgtggacagtggtaataacaattacttagtcaccactgctcgtgccgattctccaccgtatggaatcgattatccgactggtcgaccaaccggtcgtttctccaacggcttgaacctccctgacatcatcagtgaacaaattggatctgagcctacattaccaattcttagccctgaactcactggagagaagctattgatcggagctaactttgcctctgccggcattggaattctcaacgatactggcgttcaatttttgaacatactaaggatcggtaggcaattcgagctgttccaagagtatcaagagagagtgagtgagattataggttcagacaaaacgcaacagcttgtaaatggggctctcgtcctcatgactctcggcggcaatgatttcgtcaacaactacttcttccccatctctactagaagacgccaatcatctctcggtgaatttagccagcttctcatctccgaatacaagaaaatcctgacgagtctttatgagttgggagcaaggagggtgatggtgacgggaacaggacctttgggttgcgtaccagcggagcttgcctcatcgggaagtgtgaatggagaatgtgcacccgaggcgcaacaggctgcagcaatcttcaatcctcttttagttcaaatgcttcaaggacttaaccgtgagattggttctgatgttttcatcggggctaatgcctttaacacgaatgcggatttcatcaacaatccccaaagatttggttttgtgacgtcaaaagtagcatgttgtggacaaggagcatacaacgggcaaggcgtttgcaccccattgtcgactttatgctctgaccgcaatgcctatgctttctgggaccctttccacccgaccgagaaagccacccgactcatcgtccaacaaatcatgactggttcggttgagtacatgaaccccatgaaccttagtactattatggctttagactccagaatataattaaggatgcaatcttttacagaatctatttccagtttttctcgtatgataaaatatcgcgagtctgccaaacaatggtaaggaactaaggattctatttttccaaattatggttttcttagtttctctctaatgctaatggggagtctctgtctcggctctgtcttttctgttatgtttcaattttgtggttagttgccacttctttcttacgaaggctttataaaactttgtcaattttacac

SEQ ID NO: 106164 - protein, 367 aa, Arabidopsis thaliana; identical to SEQ ID NO: 25704
  peptide (1)..(367): Ceres Seq. ID no. 13618907
  misc_feature (32)..(344): Pfam Name: GDSL-like Lipase/Acylhydrolase Pfam Description: GDSL-like Lipase/Acylhydrolase
  misc_feature (1)..(367): Homolog of NCBI NO: 15235421 NR Description: GDSL-motif lipase/hydrolase protein [Arabidopsis
  misc_feature (17)..(365): Homolog of NCBI NO: 15229265 NR Description: GDSL-motif lipase/hydrolase protein [Arabidopsis
  misc_feature (15)..(365): Homolog of NCBI NO: 15242808 NR Description: GDSL-motif lipase/hydrolase protein [Arabidopsis
  misc_feature (5)..(366): Homolog of NCBI NO: 32489520 NR Description: OSJNBa0043L24.11 [Oryza sativa (japonica
  misc_feature (10)..(365): Homolog of NCBI NO: 28071322 NR Description: P0705A05.30 [Oryza sativa (japonica
  misc_feature (11)..(365): Homolog of NCBI NO: 22758315 NR Description: putative early nodulin gene (Enod) related
  misc_feature (11)..(365): Homolog of NCBI NO: 37535146 NR Description: putative early nodulin gene (Enod) related
  misc_feature (10)..(363): Homolog of NCBI NO: 15238814 NR Description: GDSL-motif lipase/hydrolase protein [Arabidopsis
  misc_feature (28)..(189): Homolog of NCBI NO: 37789825 NR Description: putative GDSL-motif lipase [Vitis vinifera]
  misc_feature (3)..(360): Homolog of NCBI NO: 15227849 NR Description: GDSL-motif lipase/hydrolase protein [Arabidopsis

SEQ ID NO: 106165 - protein, 357 aa, Arabidopsis thaliana; identical to SEQ ID NO: 25705
  peptide (1)..(357): Ceres Seq. ID no. 13618908
  misc_feature (22)..(334): Pfam Name: GDSL-like Lipase/Acylhydrolase Pfam Description: GDSL-like Lipase/Acylhydrolase
  misc_feature (1)..(357): Homolog of NCBI NO: 15235421 NR Description: GDSL-motif lipase/hydrolase protein [Arabidopsis
  misc_feature (7)..(355): Homolog of NCBI NO: 15229265 NR Description: GDSL-motif lipase/hydrolase protein [Arabidopsis
  misc_feature (5)..(355): Homolog of NCBI NO: 15242808 NR Description: GDSL-motif lipase/hydrolase protein [Arabidopsis
  misc_feature (1)..(356): Homolog of NCBI NO: 32489520 NR Description: OSJNBa0043L24.11 [Oryza sativa (japonica
  misc_feature (1)..(355): Homolog of NCBI NO: 28071322 NR Description: P0705A05.30 [Oryza sativa (japonica
  misc_feature (1)..(355): Homolog of NCBI NO: 22758315 NR Description: putative early nodulin gene (Enod) related
  misc_feature (1)..(355): Homolog of NCBI NO: 37535146 NR Description: putative early nodulin gene (Enod) related
  misc_feature (1)..(353): Homolog of NCBI NO: 15238814 NR Description: GDSL-motif lipase/hydrolase protein [Arabidopsis
  misc_feature (18)..(179): Homolog of NCBI NO: 37789825 NR Description: putative GDSL-motif lipase [Vitis vinifera]
  misc_feature (1)..(350): Homolog of NCBI NO: 15227849 NR Description: GDSL-motif lipase/hydrolase protein [Arabidopsis

SEQ ID NO: 106166 - protein, 346 aa, Arabidopsis thaliana; identical to SEQ ID NO: 25706
  peptide (1)..(346): Ceres Seq. ID no. 13618909
  misc_feature (11)..(323): Pfam Name: GDSL-like Lipase/Acylhydrolase Pfam Description: GDSL-like Lipase/Acylhydrolase
  misc_feature (1)..(346): Homolog of NCBI NO: 15235421 NR Description: GDSL-motif lipase/hydrolase protein [Arabidopsis
  misc_feature (1)..(344): Homolog of NCBI NO: 15229265 NR Description: GDSL-motif lipase/hydrolase protein [Arabidopsis
  misc_feature (1)..(344): Homolog of NCBI NO: 15242808 NR Description: GDSL-motif lipase/hydrolase protein [Arabidopsis
  misc_feature (1)..(345): Homolog of NCBI NO: 32489520 NR Description: OSJNBa0043L24.11 [Oryza sativa (japonica
  misc_feature (1)..(344): Homolog of NCBI NO: 28071322 NR Description: P0705A05.30 [Oryza sativa (japonica
  misc_feature (1)..(344): Homolog of NCBI NO: 22758315 NR Description: putative early nodulin gene (Enod) related
  misc_feature (1)..(344): Homolog of NCBI NO: 37535146 NR Description: putative early nodulin gene (Enod) related
  misc_feature (1)..(342): Homolog of NCBI NO: 15238814 NR Description: GDSL-motif lipase/hydrolase protein [Arabidopsis
  misc_feature (7)..(168): Homolog of NCBI NO: 37789825 NR Description: putative GDSL-motif lipase [Vitis vinifera]
  misc_feature (1)..(339): Homolog of NCBI NO: 15227849 NR Description: GDSL-motif lipase/hydrolase protein [Arabidopsis

SEQ ID NO: 106167 - DNA, 1504 bp, Arabidopsis thaliana
  misc_feature (1)..(1504): Ceres Seq. ID no. 13618910
  misc_feature: MA Experiment ID: 20000180 Result: Up-regulated in Transcription
  misc_feature: MA Experiment 20000180 PARAMETER Experiment Name: At_Germinating_Seeds_P Parameter: Age (hr) Value: 24 vs. 0
  misc_feature: MA Experiment 20000180 PARAMETER Experiment Name: At_Germinating_Seeds_P Parameter: Tissue Value: Germinating Seeds
  misc_feature: MA Experiment ID: 20000184 Result: Up-regulated in Transcription
  misc_feature: MA Experiment 20000184 PARAMETER Experiment Name: At_Shoots__P Parameter: Age (day) Value: 7
  misc_feature: MA Experiment 20000184 PARAMETER Experiment Name: At_Shoots__P Parameter: Tissue Value: Shoots vs. Whole Plant
  misc_feature: MA Experiment ID: 20000234 Result: Up-regulated in Transcription
  misc_feature: MA Experiment 20000234 PARAMETER Experiment Name: At_Siliques_P Parameter: Age (day) Value: 21
  misc_feature: MA Experiment 20000234 PARAMETER Experiment Name: At_Siliques_P Parameter: Organism Value: A. thaliana
  misc_feature: MA Experiment 20000234 PARAMETER Experiment Name: At_Siliques_P Parameter: Plant Line Value: WS
  misc_feature: MA Experiment 20000234 PARAMETER Experiment Name: At_Siliques_P Parameter: Tissue Value: Less Than 5mm Siliques vs. Whole Plant
  misc_feature: MA Experiment ID: 20000235 Result: Up-regulated in Transcription
  misc_feature: MA Experiment 20000235 PARAMETER Experiment Name: At_Siliques_P Parameter: Age (day) Value: 21
  misc_feature: MA Experiment 20000235 PARAMETER Experiment Name: At_Siliques_P Parameter: Organism Value: A. thaliana
  misc_feature: MA Experiment 20000235 PARAMETER Experiment Name: At_Siliques_P Parameter: Plant Line Value: WS
  misc_feature: MA Experiment 20000235 PARAMETER Experiment Name: At_Siliques_P Parameter: Tissue Value: 5-10mm Siliques vs. Whole Plant
  misc_feature: MA Experiment ID: 20000264 Result: Up-regulated in Transcription
  misc_feature: MA Experiment 20000264 PARAMETER Experiment Name: At_Open_Flower_P Parameter: Age (day) Value: 21
  misc_feature: MA Experiment 20000264 PARAMETER Experiment Name: At_Open_Flower_P Parameter: Plant Line Value: WS
  misc_feature: MA Experiment 20000264 PARAMETER Experiment Name: At_Open_Flower_P Parameter: Tissue Value: Open Flower vs. Whole Plant
  misc_feature: MA Experiment ID: 20000265 Result: Up-regulated in Transcription
  misc_feature: MA Experiment 20000265 PARAMETER Experiment Name: At_Open_Flower_P Parameter: Age (day) Value: 21
  misc_feature: MA Experiment 20000265 PARAMETER Experiment Name: At_Open_Flower_P Parameter: Plant Line Value: WS
  misc_feature: MA Experiment 20000265 PARAMETER Experiment Name: At_Open_Flower_P Parameter: Tissue Value: Closed Flower vs. Whole Plant
  misc_feature: MA Experiment ID: 20000437 Result: Down-regulated in Transcription
  misc_feature: MA Experiment 20000437 PARAMETER Experiment Name: At_Drought_P Parameter: Age (day) Value: 8
  misc_feature: MA Experiment 20000437 PARAMETER Experiment Name: At_Drought_P Parameter: Organism Value: A. thaliana
  misc_feature: MA Experiment 20000437 PARAMETER Experiment Name: At_Drought_P Parameter: Plant Line Value: WS
  misc_feature: MA Experiment 20000437 PARAMETER Experiment Name: At_Drought_P Parameter: Timepoint (hr) Value: 24
  misc_feature: MA Experiment 20000437 PARAMETER Experiment Name: At_Drought_P Parameter: Tissue Value: Whole Plant
  misc_feature: MA Experiment 20000437 PARAMETER Experiment Name: At_Drought_P Parameter: Treatment Value: Drought vs. No Drought
  misc_feature: MA Experiment ID: 20000439 Result: Down-regulated in Transcription
  misc_feature: MA Experiment 20000439 PARAMETER Experiment Name: At_Roots__P Parameter: Age (day) Value: 14 vs. 21
  misc_feature: MA Experiment 20000439 PARAMETER Experiment Name: At_Roots__P Parameter: Organism Value: A. thaliana
  misc_feature: MA Experiment 20000439 PARAMETER Experiment Name: At_Roots__P Parameter: Tissue Value: Roots vs. Whole Plant
  misc_feature: MA Experiment ID: 20001911 Result: Down-regulated in Transcription
  misc_feature: MA Experiment 20001911 PARAMETER Experiment Name: At_Drought_Reproduction_P Parameter: Age (day) Value: 40
  misc_feature: MA Experiment 20001911 PARAMETER Experiment Name: At_Drought_Reproduction_P Parameter: Organism Value: A. thaliana
  misc_feature: MA Experiment 20001911 PARAMETER Experiment Name: At_Drought_Reproduction_P Parameter: Plant Line Value: WS
  misc_feature: MA Experiment 20001911 PARAMETER Experiment Name: At_Drought_Reproduction_P Parameter: Timepoint (day) Value: 10
  misc_feature: MA Experiment 20001911 PARAMETER Experiment Name: At_Drought_Reproduction_P Parameter: Tissue Value: Flowers
  misc_feature: MA Experiment 20001911 PARAMETER Experiment Name: At_Drought_Reproduction_P Parameter: Treatment Value: Drought vs. No Drought
attaatccactgaaacaatcactattcattctctttccttaagtgtcaaactcttgaaaaaactactttgaaggaaaaaatgtctaagaagaagaaaggcagcaacaactttaagcttctctgtttcttcctgtttttgggtggtttggttcagacagatgcttcttttggagtaggaggcggcgttggagtaggaatcggcggcggcggcggtggcggtggcggtggtgtttgggttggcggtggatacaacaacggtggaaatcgtaatgctgttccaggatcatcagctccaaacagggtagcttacaatgctcttcaagtttggaaatcagccatgagagaggatccatcaaatgttctcaaaacatgggttggatcagatgtttgttcttacaaaggtgtgttctgttctggtcaatctataacctctatagatcttaaccatgcaaatctcaaaggcacacttgtcaaagacctagctttactctcagacctcaatattctccatctcaacagtaacagattctcagggcaaatcccagattctttcaaatctttagcttctcttcaagaacttgatctaagcaacaataaactctcaggtcctttccctttagtcacactctacataccaaatctggtttacctcgatctccggtttaatagtttaaccggtttcatccctgaagagcttttcaacaaacggttagacgcgattctcctcaataacaatcaattcgtcggagaaatcccaagaaacctcggaaattctccggcttcggttattaatctcgcgaataacagattttccggcgaaattccgacgagttttggtctgacgggatcgagggttaaggaagttttgcttttgaataaccagttaaccggttgtataccggaatctgttggtatgttctctgaaattgaagtctttgacgttagctacaatgcattgatgggtcatgttccagatacgatctcttgcttgtcggcgattgaaattttgaatcttgctcacaataaattctctggggaggttcctgatttggtttgttcgttgaggaatcttattaatctcactgttgcgttcaatttcttctctgggtttagctctgaatgttcttccagggttagtttcgggtttgatttcgttgggaattgtattcccgggaggaattcgcagcggccgcagccggattgttccggttattccggcggagctatgagctgttttaggattccgacgcagcctttggcttgtgctgcgataagtgttggattgagagagagtaataatcaatactacacttcatctcctccatgaaagtttctaaagttagaagcttttttttattaatggttgatgctgaatgatctatcttttttgtaacttattaattagttgattagtgaccaaattaaacgttaattcctcttctgtgtaatccaatcgttgctaatgttgttttgtaagcagaagaattttgtaaaaatctaacgt

SEQ ID NO: 106168 - protein, 415 aa, Arabidopsis thaliana; identical to SEQ ID NO: 42455
  peptide (1)..(415): Ceres Seq. ID no. 13618911
  misc_feature (306)..(329): Pfam Name: Leucine Rich Repeat Pfam Description: Leucine Rich Repeat
  misc_feature (1)..(415): Homolog of NCBI NO: 15233499 NR Description: extensin-related protein [Arabidopsis thaliana]
  misc_feature (1)..(407): Homolog of NCBI NO: 15224840 NR Description: leucine rich repeat protein family [Arabidopsis
  misc_feature (41)..(385): Homolog of NCBI NO: 34912294 NR Description: putative extensin-like protein [Oryza sativa
  misc_feature (74)..(385): Homolog of NCBI NO: 15230120 NR Description: leucine-rich repeat extensin family [Arabidopsis
  misc_feature (76)..(392): Homolog of NCBI NO: 15228861 NR Description: leucine-rich repeat extensin family [Arabidopsis
  misc_feature (74)..(385): Homolog of NCBI NO: 15235668 NR Description: leucine-rich repeat extensin family [Arabidopsis
  misc_feature (74)..(415): Homolog of NCBI NO: 15233976 NR Description: leucine-rich repeat extensin family [Arabidopsis
  misc_feature (74)..(385): Homolog of NCBI NO: 7484956 NR Description: extensin homolog F24O1.18 - Arabidopsis thaliana T3P18.1 [Arabidopsis thaliana]
  misc_feature (74)..(385): Homolog of NCBI NO: 15220780 NR Description: leucine-rich repeat extensin family [Arabidopsis
  misc_feature (33)..(396): Homolog of NCBI NO: 34906174 NR Description: putative extensin-like protein [Oryza sativa

SEQ ID NO: 106169 - protein, 329 aa, Arabidopsis thaliana; identical to SEQ ID NO: 42456
  peptide (1)..(329): Ceres Seq. ID no. 13618912
  misc_feature (220)..(243): Pfam Name: Leucine Rich Repeat Pfam Description: Leucine Rich Repeat
  misc_feature (1)..(329): Homolog of NCBI NO: 15233499 NR Description: extensin-related protein [Arabidopsis thaliana]
  misc_feature (1)..(321): Homolog of NCBI NO: 15224840 NR Description: leucine rich repeat protein family [Arabidopsis
  misc_feature (1)..(299): Homolog of NCBI NO: 34912294 NR Description: putative extensin-like protein [Oryza sativa
  misc_feature (1)..(299): Homolog of NCBI NO: 15230120 NR Description: leucine-rich repeat extensin family [Arabidopsis
  misc_feature (1)..(306): Homolog of NCBI NO: 15228861 NR Description: leucine-rich repeat extensin family [Arabidopsis
  misc_feature (1)..(299): Homolog of NCBI NO: 15235668 NR Description: leucine-rich repeat extensin family [Arabidopsis
  misc_feature (1)..(329): Homolog of NCBI NO: 15233976 NR Description: leucine-rich repeat extensin family [Arabidopsis
  misc_feature (1)..(299): Homolog of NCBI NO: 7484956 NR Description: extensin homolog F24O1.18 - Arabidopsis thaliana T3P18.1 [Arabidopsis thaliana]
  misc_feature (1)..(299): Homolog of NCBI NO: 15220780 NR Description: leucine-rich repeat extensin family [Arabidopsis
  misc_feature (1)..(310): Homolog of NCBI NO: 34906174 NR Description: putative extensin-like protein [Oryza sativa

SEQ ID NO: 106170 - DNA, 885 bp, Arabidopsis thaliana
  misc_feature (1)..(885): Ceres Seq. ID no. 13618913
  misc_feature: MA Experiment ID: 108462 Result: Up-regulated in Transcription
  misc_feature: MA Experiment 108462 PARAMETER Experiment Name: At_Germinating_Seeds_cDNA_P Parameter: Age (day) Value: 2 vs. 0
  misc_feature: MA Experiment 108462 PARAMETER Experiment Name: At_Germinating_Seeds_cDNA_P Parameter: Tissue Value: Germinating Seeds
  misc_feature: MA Experiment ID: 108569 Result: Up-regulated in Transcription
  misc_feature: MA Experiment 108569 PARAMETER Experiment Name: At_0.001%_MeJA__cDNA_P Parameter: Timepoint (hr) Value: 6
  misc_feature: MA Experiment 108569 PARAMETER Experiment Name: At_0.001%_MeJA__cDNA_P Parameter: Tissue Value: Aerial
  misc_feature: MA Experiment 108569 PARAMETER Experiment Name: At_0.001%_MeJA__cDNA_P Parameter: Treatment Value: 0.001% MeJA vs. No Treatment
  misc_feature: MA Experiment ID: 20000173 Result: Down-regulated in Transcription
  misc_feature: MA Experiment 20000173 PARAMETER Experiment Name: At_42deg_Heat_P Parameter: Age (day) Value: 14
  misc_feature: MA Experiment 20000173 PARAMETER Experiment Name: At_42deg_Heat_P Parameter: Organism Value: A. thaliana
  misc_feature: MA Experiment 20000173 PARAMETER Experiment Name: At_42deg_Heat_P Parameter: Plant Line Value: WS
  misc_feature: MA Experiment 20000173 PARAMETER Experiment Name: At_42deg_Heat_P Parameter: Temperature (deg C) Value: 42 vs. 22
  misc_feature: MA Experiment 20000173 PARAMETER Experiment Name: At_42deg_Heat_P Parameter: Timepoint (hr) Value: 6
  misc_feature: MA Experiment 20000173 PARAMETER Experiment Name: At_42deg_Heat_P Parameter: Tissue Value: Aerial
  misc_feature: MA Experiment ID: 20000180 Result: Up-regulated in Transcription
  misc_feature: MA Experiment 20000180 PARAMETER Experiment Name: At_Germinating_Seeds_P Parameter: Age (hr) Value: 24 vs. 0
  misc_feature: MA Experiment 20000180 PARAMETER Experiment Name: At_Germinating_Seeds_P Parameter: Tissue Value: Germinating Seeds
  misc_feature: MA Experiment ID: 20000184 Result: Up-regulated in Transcription
  misc_feature: MA Experiment 20000184 PARAMETER Experiment Name: At_Shoots__P Parameter: Age (day) Value: 7
  misc_feature: MA Experiment 20000184 PARAMETER Experiment Name: At_Shoots__P Parameter: Tissue Value: Shoots vs. Whole Plant
  misc_feature: MA Experiment ID: 20000185 Result: Up-regulated in Transcription
  misc_feature: MA Experiment 20000185 PARAMETER Experiment Name: At_Roots__P Parameter: Age (day) Value: 7 vs. 21
  misc_feature: MA Experiment 20000185 PARAMETER Experiment Name: At_Roots__P Parameter: Organism Value: A. thaliana
  misc_feature: MA Experiment 20000185 PARAMETER Experiment Name: At_Roots__P Parameter: Tissue Value: Roots vs. Whole Plant
  misc_feature: MA Experiment ID: 20000227 Result: Down-regulated in Transcription
  misc_feature: MA Experiment 20000227 PARAMETER Experiment Name: At_Root-Tips-vs-Tops_P Parameter: Tissue Value: Root Tips vs. Root Tops
  misc_feature: MA Experiment ID: 20000439 Result: Up-regulated in Transcription
  misc_feature: MA Experiment 20000439 PARAMETER Experiment Name: At_Roots__P Parameter: Age (day) Value: 14 vs. 21
  misc_feature: MA Experiment 20000439 PARAMETER Experiment Name: At_Roots__P Parameter: Organism Value: A. thaliana
  misc_feature: MA Experiment 20000439 PARAMETER Experiment Name: At_Roots__P Parameter: Tissue Value: Roots vs. Whole Plant
  misc_feature: MA Experiment ID: 20000573 Result: Down-regulated in Transcription
  misc_feature: MA Experiment 20000573 PARAMETER Experiment Name: At_100uM_ABA_Mutants__P Parameter: Organism Value: A. thaliana
  misc_feature: MA Experiment 20000573 PARAMETER Experiment Name: At_100uM_ABA_Mutants__P Parameter: Plant Line Value: CS22 vs. Ler wt
  misc_feature: MA Experiment 20000573 PARAMETER Experiment Name: At_100uM_ABA_Mutants__P Parameter: Timepoint (hr) Value: N/A
  misc_feature: MA Experiment 20000573 PARAMETER Experiment Name: At_100uM_ABA_Mutants__P Parameter: Tissue Value: Whole Plant
  misc_feature: MA Experiment 20000573 PARAMETER Experiment Name: At_100uM_ABA_Mutants__P Parameter: Treatment Value: None
  misc_feature: MA Experiment ID: 20000574 Result: Down-regulated in Transcription
  misc_feature: MA Experiment 20000574 PARAMETER Experiment Name: At_100uM_ABA_Mutants__P Parameter: Organism Value: A. thaliana
  misc_feature: MA Experiment 20000574 PARAMETER Experiment Name: At_100uM_ABA_Mutants__P Parameter: Plant Line Value: CS23 vs. Ler wt
  misc_feature: MA Experiment 20000574 PARAMETER Experiment Name: At_100uM_ABA_Mutants__P Parameter: Timepoint (hr) Value: N/A
  misc_feature: MA Experiment 20000574 PARAMETER Experiment Name: At_100uM_ABA_Mutants__P Parameter: Tissue Value: Whole Plant
  misc_feature: MA Experiment 20000574 PARAMETER Experiment Name: At_100uM_ABA_Mutants__P Parameter: Treatment Value: None
atccaatagttgaaaaacagaaaaagcctctccaatgactttttctcgtagcagctcgattacgttcttcatcgttgctttattcaccgtcttaattaatccggcgatctcttctcgcgccgcgtccttcatcaagctgcctcggtcttccatcgcttcatactgcgagagttggagattagccgctgagaccaacaatgttggaccctggaaggtgattccgtcccaatgcgaaaactatattaaaaactacatcaacggaggccagttcgacaaagactacgatgtagtcgctagttacgccattgactacgctaaaacggtcaaggttggcggagacggcaaggacgcgtgggtctttgacatcgatgagacgcttctctccaatattgagtactacaaggctaatggttacgggtctgaaccgtacgatagtattaaatacaatgaggtggtggaaaaaggaaaagacccaggttatgatgcgagcttgaggctctacaaagctctcaagaaacttggtttcactatcattttactaactggccgagacgaaggtcatagaagtgtcaccgagaaaaatcttcgggatgccggttatttcggttggaaccgactcctcttgaggggtcaaaatgatcaagggaaaacagcaacacaatacaaatcagagcagcgatcacaagttgtaaaagaaggctacacaatccatggtaatactggagatcaatggagtgacttgctaggttttgccgtggcttctcgttctttcaaagtcccaaatcccatgtactatgttgcttgatcaccatctgccattgatatattgcatgataatttatcatttatgtatgaataaggatttatgaatgtatcccataattc

SEQ ID NO: 106171 - protein, 256 aa, Arabidopsis thaliana; identical to SEQ ID NO: 39614
  peptide (1)..(256): Ceres Seq. ID no. 13618914
  misc_feature (28)..(256): Pfam Name: HAD superfamily, subfamily IIIB (Acid phosphatase) Pfam Description: HAD superfamily, subfamily IIIB (Acid
  misc_feature (1)..(256): Homolog of NCBI NO: 15233526 NR Description: acid phosphatase-related protein [Arabidopsis
  misc_feature (1)..(255): Homolog of NCBI NO: 15233504 NR Description: acid phosphatase-related protein [Arabidopsis
  misc_feature (14)..(255): Homolog of NCBI NO: 130718 NR Description: Acid phosphatase precursor 1
  misc_feature (14)..(255): Homolog of NCBI NO: 445113 NR Description: acid phosphatase 1
  misc_feature (1)..(255): Homolog of NCBI NO: 15234949 NR Description: acid phosphatase - like protein [Arabidopsis
  misc_feature (9)..(255): Homolog of NCBI NO: 15241412 NR Description: acid phosphatase [Arabidopsis thaliana]

SEQ ID NO: 106172 - DNA, 1180 bp, Arabidopsis thaliana
  misc_feature (1)..(1180): Ceres Seq. ID no. 13618915
  misc_feature: MA Experiment ID: 108461 Result: Up-regulated in Transcription
  misc_feature: MA Experiment 108461 PARAMETER Experiment Name: At_Germinating_Seeds_cDNA_P Parameter: Age (day) Value: 1 vs. 0
  misc_feature: MA Experiment 108461 PARAMETER Experiment Name: At_Germinating_Seeds_cDNA_P Parameter: Tissue Value: Germinating Seeds
  misc_feature: MA Experiment ID: 108462 Result: Up-regulated in Transcription
  misc_feature: MA Experiment 108462 PARAMETER Experiment Name: At_Germinating_Seeds_cDNA_P Parameter: Age (day) Value: 2 vs. 0
  misc_feature: MA Experiment 108462 PARAMETER Experiment Name: At_Germinating_Seeds_cDNA_P Parameter: Tissue Value: Germinating Seeds
  misc_feature: MA Experiment ID: 108463 Result: Up-regulated in Transcription
  misc_feature: MA Experiment 108463 PARAMETER Experiment Name: At_Germinating_Seeds_cDNA_P Parameter: Age (day) Value: 3 vs. 0
  misc_feature: MA Experiment 108463 PARAMETER Experiment Name: At_Germinating_Seeds_cDNA_P Parameter: Tissue Value: Germinating Seeds
  misc_feature: MA Experiment ID: 108464 Result: Up-regulated in Transcription
  misc_feature: MA Experiment 108464 PARAMETER Experiment Name: At_Germinating_Seeds_cDNA_P Parameter: Age (day) Value: 4 vs. 0
  misc_feature: MA Experiment 108464 PARAMETER Experiment Name: At_Germinating_Seeds_cDNA_P Parameter: Tissue Value: Germinating Seeds
  misc_feature: MA Experiment ID: 20000069 Result: Down-regulated in Transcription
  misc_feature: MA Experiment 20000069 PARAMETER Experiment Name: At_100uM_ABA_Mutants_cDNA_P Parameter: Plant Line Value: CS23
  misc_feature: MA Experiment 20000069 PARAMETER Experiment Name: At_100uM_ABA_Mutants_cDNA_P Parameter: Timepoint (hr) Value: 6
  misc_feature: MA Experiment 20000069 PARAMETER Experiment Name: At_100uM_ABA_Mutants_cDNA_P Parameter: Tissue Value: Aerial
  misc_feature: MA Experiment 20000069 PARAMETER Experiment Name: At_100uM_ABA_Mutants_cDNA_P Parameter: Treatment Value: 100uM ABA vs. No Treatment
  misc_feature: MA Experiment ID: 20000087 Result: Down-regulated in Transcription
  misc_feature: MA Experiment 20000087 PARAMETER Experiment Name: At_100uM_ABA_Mutants_cDNA_P Parameter: Plant Line Value: WS
  misc_feature: MA Experiment 20000087 PARAMETER Experiment Name: At_100uM_ABA_Mutants_cDNA_P Parameter: Timepoint (hr) Value: 6
  misc_feature: MA Experiment 20000087 PARAMETER Experiment Name: At_100uM_ABA_Mutants_cDNA_P Parameter: Tissue Value: Aerial
  misc_feature: MA Experiment 20000087 PARAMETER Experiment Name: At_100uM_ABA_Mutants_cDNA_P Parameter: Treatment Value: 100uM ABA vs. No Treatment
  misc_feature: MA Experiment ID: 20000180 Result: Up-regulated in Transcription
  misc_feature: MA Experiment 20000180 PARAMETER Experiment Name: At_Germinating_Seeds_P Parameter: Age (hr) Value: 24 vs. 0
  misc_feature: MA Experiment 20000180 PARAMETER Experiment Name: At_Germinating_Seeds_P Parameter: Tissue Value: Germinating Seeds
  misc_feature: MA Experiment ID: 20000224 Result: Up-regulated in Transcription
  misc_feature: MA Experiment ID: 20000234 Result: Up-regulated in Transcription
  misc_feature: MA Experiment 20000234 PARAMETER Experiment Name: At_Siliques_P Parameter: Age (day) Value: 21
  misc_feature: MA Experiment 20000234 PARAMETER Experiment Name: At_Siliques_P Parameter: Organism Value: A. thaliana
  misc_feature: MA Experiment 20000234 PARAMETER Experiment Name: At_Siliques_P Parameter: Plant Line Value: WS
  misc_feature: MA Experiment 20000234 PARAMETER Experiment Name: At_Siliques_P Parameter: Tissue Value: Less Than 5mm Siliques vs. Whole Plant
  misc_feature: MA Experiment ID: 20000235 Result: Up-regulated in Transcription
  misc_feature: MA Experiment 20000235 PARAMETER Experiment Name: At_Siliques_P Parameter: Age (day) Value: 21
  misc_feature: MA Experiment 20000235 PARAMETER Experiment Name: At_Siliques_P Parameter: Organism Value: A. thaliana
  misc_feature: MA Experiment 20000235 PARAMETER Experiment Name: At_Siliques_P Parameter: Plant Line Value: WS
  misc_feature: MA Experiment 20000235 PARAMETER Experiment Name: At_Siliques_P Parameter: Tissue Value: 5-10mm Siliques vs. Whole Plant
  misc_feature: MA Experiment ID: 20000527 Result: Up-regulated in Transcription
  misc_feature: MA Experiment 20000527 PARAMETER Experiment Name: At_10percent_PEG_P Parameter: Age (day) Value: 20
  misc_feature: MA Experiment 20000527 PARAMETER Experiment Name: At_10percent_PEG_P Parameter: Organism Value: A. thaliana
  misc_feature: MA Experiment 20000527 PARAMETER Experiment Name: At_10percent_PEG_P Parameter: Plant Line Value: WS
  misc_feature: MA Experiment 20000527 PARAMETER Experiment Name: At_10percent_PEG_P Parameter: Timepoint (day) Value: 20
  misc_feature: MA Experiment 20000527 PARAMETER Experiment Name: At_10percent_PEG_P Parameter: Tissue Value: Whole Plant
  misc_feature: MA Experiment 20000527 PARAMETER Experiment Name: At_10percent_PEG_P Parameter: Treatment Value: 10percent PEG vs. No Treatment
tttttacaaatcagacaaaacccaacaattaatgaaacaatgtcaaaaacggctaattttctcagcctgagatccaatcctctacctccgattttctcctccaccggaaactctcctttcctccgagcttcctcggctctgaatcttccgacaactgcttcgaaacctttccacagttggattcgtgcttcttcacgtcgccggttggttctcggtggttttggcggcgcttctttgtggatgaacaacaatatgtccggtaaatttggcggtaaatctttcattgcttccgctaggcagaccaatccttctcccgtcgaacaggcgttgaataaggtggattggccagagactttccctttcaaagaagaagatttccagagatacgatgagtcgtctgattcaacattctacgaagctccaaggtttgtgacacacattgatgatccagctatagctgcattgacaaagtattactccaaggttttgcctcagagcgatactccaggagtgagcatactcgatatgtgtagcagttgggtcagtcattatccaccggggtataggcaagaacgaatagttggaatgggtatgaatgaagaagagcttaagcgaaatccggttctcaccgagtacatagtccaagacttaaatctcaattcaaatctgccttttgaagacaattctttccaagttataaccaatgtggtaagtgtggattatcttacaaagccgcttgaagtgttcaaggaaatgaacagaatccttaagcccggaggactcgctctaatgagcttctcgaaccgttgcttctttactaaagcaatctcgatatggacatcaactggcgacgcagatcatgctctcattgttggatcatactttcactacgccggaggatttgaagctcctcaggccgttgatatatctccaaatccagggcgttcagatcctatgtacgttgtttactctagaaaactccccatggtttaaacctgagatccaagcacatcatgtatacacatagtagagaccgaggaaactaattcttcgattaagacaagggaacttctgaaatcttgtttataaagaatgtgccactctctcaacactaataacaatgtcatataaagaatctgaagccagattcgcaaatttgacgataatacttttcttcgag

SEQ ID NO: 106173 - protein, 330 aa, Arabidopsis thaliana; identical to SEQ ID NO: 40152
  peptide (1)..(330): Ceres Seq. ID no. 13618916
  misc_feature (14)..(330): Homolog of NCBI NO: 15233624 NR Description: expressed protein [Arabidopsis thaliana]
  misc_feature (14)..(330): Homolog of NCBI NO: 21536833 NR Description: unknown [Arabidopsis thaliana]
  misc_feature (81)..(330): Homolog of NCBI NO: 14030675 NR Description: AT4g29590/T16L4_100 [Arabidopsis thaliana]
  misc_feature (64)..(326): Homolog of NCBI NO: 34910520 NR Description: B1142C05.17 [Oryza sativa (japonica
  misc_feature (124)..(327): Homolog of NCBI NO: 22970815 NR Description: hypothetical protein [Chloroflexus aurantiacus]
  misc_feature (173)..(328): Homolog of NCBI NO: 32394624 NR Description: methyltrasferase [Griffithsia japonica]
  misc_feature (122)..(326): Homolog of NCBI NO: 17232182 NR Description: hypothetical protein [Nostoc sp. PCC 7120]
  misc_feature (128)..(326): Homolog of NCBI NO: 22298320 NR Description: ORF_ID:tlr0778~hypothetical protein
  misc_feature (100)..(311): Homolog of NCBI NO: 15232158 NR Description: expressed protein [Arabidopsis thaliana]
  misc_feature (128)..(307): Homolog of NCBI NO: 23129867 NR Description: hypothetical protein [Nostoc punctiforme]

SEQ ID NO: 106174 - protein, 317 aa, Arabidopsis thaliana; identical to SEQ ID NO: 40153
  peptide (1)..(317): Ceres Seq. ID no. 13618917
  misc_feature (1)..(317): Homolog of NCBI NO: 15233624 NR Description: expressed protein [Arabidopsis thaliana]
  misc_feature (1)..(317): Homolog of NCBI NO: 21536833 NR Description: unknown [Arabidopsis thaliana]
  misc_feature (68)..(317): Homolog of NCBI NO: 14030675 NR Description: AT4g29590/T16L4_100 [Arabidopsis thaliana]
  misc_feature (51)..(313): Homolog of NCBI NO: 34910520 NR Description: B1142C05.17 [Oryza sativa (japonica
  misc_feature (111)..(314): Homolog of NCBI NO: 22970815 NR Description: hypothetical protein [Chloroflexus aurantiacus]
  misc_feature (160)..(315): Homolog of NCBI NO: 32394624 NR Description: methyltrasferase [Griffithsia japonica]
  misc_feature (109)..(313): Homolog of NCBI NO: 17232182 NR Description: hypothetical protein [Nostoc sp. PCC 7120]
  misc_feature (115)..(313): Homolog of NCBI NO: 22298320 NR Description: ORF_ID:tlr0778~hypothetical protein
  misc_feature (87)..(298): Homolog of NCBI NO: 15232158 NR Description: expressed protein [Arabidopsis thaliana]
  misc_feature (115)..(294): Homolog of NCBI NO: 23129867 NR Description: hypothetical protein [Nostoc punctiforme]

SEQ ID NO: 106175 - protein, 250 aa, Arabidopsis thaliana; identical to SEQ ID NO: 40154
  peptide (1)..(250): Ceres Seq. ID no. 13618918
  misc_feature (1)..(250): Homolog of NCBI NO: 15233624 NR Description: expressed protein [Arabidopsis thaliana]
  misc_feature (1)..(250): Homolog of NCBI NO: 21536833 NR Description: unknown [Arabidopsis thaliana]
  misc_feature (1)..(250): Homolog of NCBI NO: 14030675 NR Description: AT4g29590/T16L4_100 [Arabidopsis thaliana]
  misc_feature (1)..(246): Homolog of NCBI NO: 34910520 NR Description: B1142C05.17 [Oryza sativa (japonica
  misc_feature (44)..(247): Homolog of NCBI NO: 22970815 NR Description: hypothetical protein [Chloroflexus aurantiacus]
  misc_feature (93)..(248): Homolog of NCBI NO: 32394624 NR Description: methyltrasferase [Griffithsia japonica]
  misc_feature (42)..(246): Homolog of NCBI NO: 17232182 NR Description: hypothetical protein [Nostoc sp. PCC 7120]
  misc_feature (48)..(246): Homolog of NCBI NO: 22298320 NR Description: ORF_ID:tlr0778~hypothetical protein
  misc_feature (20)..(231): Homolog of NCBI NO: 15232158 NR Description: expressed protein [Arabidopsis thaliana]
  misc_feature (48)..(227): Homolog of NCBI NO: 23129867 NR Description: hypothetical protein [Nostoc punctiforme]

SEQ ID NO: 106176 - DNA, 986 bp, Arabidopsis thaliana
  misc_feature (1)..(986): Ceres Seq. ID no. 13618919
  misc_feature: MA Experiment ID: 108434 Result: Down-regulated in Transcription
  misc_feature: MA Experiment 108434 PARAMETER Experiment Name: At_Root_Tips_cDNA_P Parameter: Tissue Value: Root Tips
  misc_feature: MA Experiment ID: 108435 Result: Down-regulated in Transcription
  misc_feature: MA Experiment 108435 PARAMETER Experiment Name: At_stm_Mutants_cDNA_P Parameter: Plant Line Value: wt Landsburg vs stm
  misc_feature: MA Experiment 108435 PARAMETER Experiment Name: At_stm_Mutants_cDNA_P Parameter: Tissue Value: Shoot Apical Meristem Region
  misc_feature: MA Experiment ID: 108461 Result: Up-regulated in Transcription
  misc_feature: MA Experiment 108461 PARAMETER Experiment Name: At_Germinating_Seeds_cDNA_P Parameter: Age (day) Value: 1 vs. 0
  misc_feature: MA Experiment 108461 PARAMETER Experiment Name: At_Germinating_Seeds_cDNA_P Parameter: Tissue Value: Germinating Seeds
  misc_feature: MA Experiment ID: 108463 Result: Up-regulated in Transcription
  misc_feature: MA Experiment 108463 PARAMETER Experiment Name: At_Germinating_Seeds_cDNA_P Parameter: Age (day) Value: 3 vs. 0
  misc_feature: MA Experiment 108463 PARAMETER Experiment Name: At_Germinating_Seeds_cDNA_P Parameter: Tissue Value: Germinating Seeds
  misc_feature: MA Experiment ID: 108464 Result: Up-regulated in Transcription
  misc_feature: MA Experiment 108464 PARAMETER Experiment Name: At_Germinating_Seeds_cDNA_P Parameter: Age (day) Value: 4 vs. 0
  misc_feature: MA Experiment 108464 PARAMETER Experiment Name: At_Germinating_Seeds_cDNA_P Parameter: Tissue Value: Germinating Seeds
  misc_feature: MA Experiment ID: 20000111 Result: Up-regulated in Transcription
  misc_feature: MA Experiment 20000111 PARAMETER Experiment Name: At_42deg_Heat_cDNA_P Parameter: Temperature (deg C) Value: 42 vs. 22
  misc_feature: MA Experiment 20000111 PARAMETER Experiment Name: At_42deg_Heat_cDNA_P Parameter: Timepoint (hr) Value: 6
  misc_feature: MA Experiment 20000111 PARAMETER Experiment Name: At_42deg_Heat_cDNA_P Parameter: Tissue Value: Aerial
  misc_feature: MA Experiment ID: 20000112 Result: Up-regulated in Transcription
  misc_feature: MA Experiment 20000112 PARAMETER Experiment Name: At_42deg_Heat_cDNA_P Parameter: Temperature (deg C) Value: 42 vs. 22
  misc_feature: MA Experiment 20000112 PARAMETER Experiment Name: At_42deg_Heat_cDNA_P Parameter: Timepoint (hr) Value: 2
  misc_feature: MA Experiment 20000112 PARAMETER Experiment Name: At_42deg_Heat_cDNA_P Parameter: Tissue Value: Aerial
  misc_feature: MA Experiment ID: 20000113 Result: Up-regulated in Transcription
  misc_feature: MA Experiment 20000113 PARAMETER Experiment Name: At_42deg_Heat_cDNA_P Parameter: Temperature (deg C) Value: 42 vs. 22
  misc_feature: MA Experiment 20000113 PARAMETER Experiment Name: At_42deg_Heat_cDNA_P Parameter: Timepoint (hr) Value: 8
  misc_feature: MA Experiment 20000113 PARAMETER Experiment Name: At_42deg_Heat_cDNA_P Parameter: Tissue Value: Aerial
  misc_feature: MA Experiment ID: 20000173 Result: Up-regulated in Transcription
  misc_feature: MA Experiment 20000173 PARAMETER Experiment Name: At_42deg_Heat_P Parameter: Age (day) Value: 14
  misc_feature: MA Experiment 20000173 PARAMETER Experiment Name: At_42deg_Heat_P Parameter: Organism Value: A. thaliana
  misc_feature: MA Experiment 20000173 PARAMETER Experiment Name: At_42deg_Heat_P Parameter: Plant Line Value: WS
  misc_feature: MA Experiment 20000173 PARAMETER Experiment Name: At_42deg_Heat_P Parameter: Temperature (deg C) Value: 42 vs. 22
  misc_feature: MA Experiment 20000173 PARAMETER Experiment Name: At_42deg_Heat_P Parameter: Timepoint (hr) Value: 6
  misc_feature: MA Experiment 20000173 PARAMETER Experiment Name: At_42deg_Heat_P Parameter: Tissue Value: Aerial
  misc_feature: MA Experiment ID: 20000185 Result: Down-regulated in Transcription
  misc_feature: MA Experiment 20000185 PARAMETER Experiment Name: At_Roots__P Parameter: Age (day) Value: 7 vs. 21
  misc_feature: MA Experiment 20000185 PARAMETER Experiment Name: At_Roots__P Parameter: Organism Value: A. thaliana
  misc_feature: MA Experiment 20000185 PARAMETER Experiment Name: At_Roots__P Parameter: Tissue Value: Roots vs. Whole Plant
  misc_feature: MA Experiment ID: 20000227 Result: Down-regulated in Transcription
  misc_feature: MA Experiment 20000227 PARAMETER Experiment Name: At_Root-Tips-vs-Tops_P Parameter: Tissue Value: Root Tips vs. Root Tops
  misc_feature: MA Experiment ID: 20000439 Result: Down-regulated in Transcription
  misc_feature: MA Experiment 20000439 PARAMETER Experiment Name: At_Roots__P Parameter: Age (day) Value: 14 vs. 21
  misc_feature: MA Experiment 20000439 PARAMETER Experiment Name: At_Roots__P Parameter: Organism Value: A. thaliana
  misc_feature: MA Experiment 20000439 PARAMETER Experiment Name: At_Roots__P Parameter: Tissue Value: Roots vs. Whole Plant
  misc_feature: MA Experiment ID: 20000495 Result: Down-regulated in Transcription
  misc_feature: MA Experiment 20000495 PARAMETER Experiment Name: At_Guard_Cells_P Parameter: Harvest Date Value: 8/2/2002
  misc_feature: MA Experiment 20000495 PARAMETER Experiment Name: At_Guard_Cells_P Parameter: Organism Value: A. thaliana
  misc_feature: MA Experiment 20000495 PARAMETER Experiment Name: At_Guard_Cells_P Parameter: Tissue Value: Guard Cells vs. Leaves
  misc_feature: MA Experiment ID: 20000709 Result: Up-regulated in Transcription
  misc_feature: MA Experiment 20000709 PARAMETER Experiment Name: At_15mM_NH4NO3_L-to-H_P Parameter: Age (hr) Value: 14
  misc_feature: MA Experiment 20000709 PARAMETER Experiment Name: At_15mM_NH4NO3_L-to-H_P Parameter: Organism Value: A. thaliana
  misc_feature: MA Experiment 20000709 PARAMETER Experiment Name: At_15mM_NH4NO3_L-to-H_P Parameter: Plant Line Value: WS
  misc_feature: MA Experiment 20000709 PARAMETER Experiment Name: At_15mM_NH4NO3_L-to-H_P Parameter: Timepoint (hr) Value: 4
  misc_feature: MA Experiment 20000709 PARAMETER Experiment Name: At_15mM_NH4NO3_L-to-H_P Parameter: Tissue Value: Aerial
  misc_feature: MA Experiment 20000709 PARAMETER Experiment Name: At_15mM_NH4NO3_L-to-H_P Parameter: Treatment Value: 15mM NH4NO3 vs. 30mM Mannitol
  misc_feature: MA Experiment ID: 20001451 Result: Down-regulated in Transcription
  misc_feature: MA Experiment 20001451 PARAMETER Experiment Name: At_Far-red-induction_P Parameter: Age (day) Value: 7
  misc_feature: MA Experiment 20001451 PARAMETER Experiment Name: At_Far-red-induction_P Parameter: Light Value: Far-red vs. White
  misc_feature: MA Experiment 20001451 PARAMETER Experiment Name: At_Far-red-induction_P Parameter: Organism Value: A. thaliana
  misc_feature: MA Experiment 20001451 PARAMETER Experiment Name: At_Far-red-induction_P Parameter: Plant Line Value: Columbia
  misc_feature: MA Experiment 20001451 PARAMETER Experiment Name: At_Far-red-induction_P Parameter: Timepoint (hr) Value: 24
  misc_feature: MA Experiment 20001451 PARAMETER Experiment Name: At_Far-red-induction_P Parameter: Tissue Value: Whole Plant
aattggagagacatgatgagagaaatatcactggaatctgaaccagacagtttctgatcttcttctccttagaggatctctcggagaagattcaaaaccaagaacaatctcagtctctatctctctctctgggtgcatttagatggctggagttgtgcgattaacgacgacgtcggttcaagccattcgtgtctcctcgtccttcagctcctttgccaccgctcttaatcctctgcaaccttgcttacctccaaactcgaatctgaattccgacaagagattgcgtcttctctcatcttctccttcctgctcgtcttctcattaccacccatcttctggtctcggaagccatctcccccttagacgacccaagagccaagtggttcgtgtcaaggtagatgaaaatgtagccgagacagagccaccgaaatggtgggagaggaatgctccaaacatggtcgatattcattctactgaagagttcttgagcgctttaagcggtgcgggtgaaagattagttattgtagagttttatggaacttggtgtgcttcttgcagagcattgttcccaaagctttgcaagacagcggtggaacatcccgatatagtgttccttaaagtaaactttgatgagaataaaccgatgtgcaagagtttgaacgtgagagtgcttccttttttccacttttaccgtggagctgatggtcagcttgagtcattctcatgttctcttgctaagtttcagaagataaaagatgcaatccaactgcacaataccgatcgttgcagcctcggtccagccaaggtacctgaaggcttaacattagccaaaccagctgcatcaagttgaagtgccagatttttagatatattactaaggcaacaatctttggttgctcaagcaaatactcagcttaaaattctgtatatcgtcatatttttgggtgtaaaagaatacttcctaaagccagttacgattcttctgc

SEQ ID NO: 106177 - protein, 235 aa, Arabidopsis thaliana
  peptide (1)..(235): Ceres Seq. ID no. 13618920
  misc_feature (105)..(212): Pfam Name: Thioredoxin Pfam Description: Thioredoxin
  misc_feature (1)..(235): Homolog of NCBI NO: 18417441 NR Description: thioredoxin family [Arabidopsis thaliana]
  misc_feature (1)..(235): Homolog of NCBI NO: 21554313 NR Description: thioredoxin-like protein [Arabidopsis thaliana]
  misc_feature (1)..(218): Homolog of NCBI NO: 30688403 NR Description: thioredoxin family [Arabidopsis thaliana]
  misc_feature (8)..(216): Homolog of NCBI NO: 21553512 NR Description: putative thioredoxin [Arabidopsis thaliana]
  misc_feature (8)..(216): Homolog of NCBI NO: 15236134 NR Description: thioredoxin family [Arabidopsis thaliana]
  misc_feature (18)..(216): Homolog of NCBI NO: 4973258 NR Description: thioredoxin-like 2 [Arabidopsis thaliana]
  misc_feature (105)..(218): Homolog of NCBI NO: 14423392 NR Description: Thioredoxin-like protein [Arabidopsis thaliana]
  misc_feature (64)..(234): Homolog of NCBI NO: 308906 NR Description: thioredoxin
  misc_feature (96)..(234): Homolog of NCBI NO: 15223262 NR Description: thioredoxin family [Arabidopsis thaliana]
  misc_feature (96)..(221): Homolog of NCBI NO: 34394520 NR Description: putative thioredoxin [Oryza sativa (japonica
MAGVVRLTTTSVQAIRVSSSFSSFATALNPLQPCLPPNSNLNSDKRLRLLSSSPSCSSSHYHPSSGLGSHLPLRRPKSQVVRVKVDENVAETEPPKWWERNAPNMVDIHSTEEFLSALSGAGERLVIVEFYGTWCASCRALFPKLCKTAVEHPDIVFLKVNFDENKPMCKSLNVRVLPFFHFYRGADGQLESFSCSLAKFQKIKDAIQLHNTDRCSLGPAKVPEGLTLAKPAASS

SEQ ID NO: 106178 - protein, 131 aa, Arabidopsis thaliana; identical to SEQ ID NO: 35751
  peptide (1)..(131): Ceres Seq. ID no. 13618921
  misc_feature (1)..(108): Pfam Name: Thioredoxin Pfam Description: Thioredoxin
  misc_feature (1)..(131): Homolog of NCBI NO: 18417441 NR Description: thioredoxin family [Arabidopsis thaliana]
  misc_feature (1)..(131): Homolog of NCBI NO: 21554313 NR Description: thioredoxin-like protein [Arabidopsis thaliana]
  misc_feature (1)..(114): Homolog of NCBI NO: 30688403 NR Description: thioredoxin family [Arabidopsis thaliana]
  misc_feature (1)..(112): Homolog of NCBI NO: 21553512 NR Description: putative thioredoxin [Arabidopsis thaliana]
  misc_feature (1)..(112): Homolog of NCBI NO: 15236134 NR Description: thioredoxin family [Arabidopsis thaliana]
  misc_feature (1)..(112): Homolog of NCBI NO: 4973258 NR Description: thioredoxin-like 2 [Arabidopsis thaliana]
  misc_feature (1)..(114): Homolog of NCBI NO: 14423392 NR Description: Thioredoxin-like protein [Arabidopsis thaliana]
  misc_feature (1)..(130): Homolog of NCBI NO: 308906 NR Description: thioredoxin
  misc_feature (1)..(130): Homolog of NCBI NO: 15223262 NR Description: thioredoxin family [Arabidopsis thaliana]
  misc_feature (1)..(117): Homolog of NCBI NO: 34394520 NR Description: putative thioredoxin [Oryza sativa (japonica

SEQ ID NO: 106179 - DNA, 729 bp, Arabidopsis thaliana
  misc_feature (1)..(729): Ceres Seq. ID no. 13618923
  misc_feature: MA Experiment ID: 108577 Result: Down-regulated in Transcription
  misc_feature: MA Experiment 108577 PARAMETER Experiment Name: At_42deg_Heat_cDNA_P Parameter: Temperature (deg C) Value: 42 vs. 22
  misc_feature: MA Experiment 108577 PARAMETER Experiment Name: At_42deg_Heat_cDNA_P Parameter: Timepoint (hr) Value: 6
  misc_feature: MA Experiment 108577 PARAMETER Experiment Name: At_42deg_Heat_cDNA_P Parameter: Tissue Value: Aerial
  misc_feature: MA Experiment ID: 20000111 Result: Down-regulated in Transcription
  misc_feature: MA Experiment 20000111 PARAMETER Experiment Name: At_42deg_Heat_cDNA_P Parameter: Temperature (deg C) Value: 42 vs. 22
  misc_feature: MA Experiment 20000111 PARAMETER Experiment Name: At_42deg_Heat_cDNA_P Parameter: Timepoint (hr) Value: 6
  misc_feature: MA Experiment 20000111 PARAMETER Experiment Name: At_42deg_Heat_cDNA_P Parameter: Tissue Value: Aerial
  misc_feature: MA Experiment ID: 20000306 Result: Up-regulated in Transcription
  misc_feature: MA Experiment 20000306 PARAMETER Experiment Name: At_Germinating_Seeds_Sub_P Parameter: Age (hr) Value: 6 vs. 0
  misc_feature: MA Experiment 20000306 PARAMETER Experiment Name: At_Germinating_Seeds_Sub_P Parameter: Organism Value: A. thaliana
  misc_feature: MA Experiment 20000306 PARAMETER Experiment Name: At_Germinating_Seeds_Sub_P Parameter: Plant Line Value: WS
  misc_feature: MA Experiment 20000306 PARAMETER Experiment Name: At_Germinating_Seeds_Sub_P Parameter: Tissue Value: Germinating Seeds
  misc_feature: MA Experiment ID: 20000315 Result: Down-regulated in Transcription
  misc_feature: MA Experiment 20000315 PARAMETER Experiment Name: At_14day_Shoots-Roots_Sub_P Parameter: Age (day) Value: 14
  misc_feature: MA Experiment 20000315 PARAMETER Experiment Name: At_14day_Shoots-Roots_Sub_P Parameter: Organism Value: A. thaliana
  misc_feature: MA Experiment 20000315 PARAMETER Experiment Name: At_14day_Shoots-Roots_Sub_P Parameter: Plant Line Value: WS
  misc_feature: MA Experiment 20000315 PARAMETER Experiment Name: At_14day_Shoots-Roots_Sub_P Parameter: Tissue Value: Shoots vs. Whole Plant
  misc_feature: MA Experiment ID: 20000328 Result: Down-regulated in Transcription
  misc_feature: MA Experiment 20000328 PARAMETER Experiment Name: At_42deg_Heat_Sub_P Parameter: Age (day) Value: 14
  misc_feature: MA Experiment 20000328 PARAMETER Experiment Name: At_42deg_Heat_Sub_P Parameter: Organism Value: A. thaliana
  misc_feature: MA Experiment 20000328 PARAMETER Experiment Name: At_42deg_Heat_Sub_P Parameter: Plant Line Value: WS
  misc_feature: MA Experiment 20000328 PARAMETER Experiment Name: At_42deg_Heat_Sub_P Parameter: Temperature (deg C) Value: 42 vs. 22
  misc_feature: MA Experiment 20000328 PARAMETER Experiment Name: At_42deg_Heat_Sub_P Parameter: Timepoint (hr) Value: 6
  misc_feature: MA Experiment 20000328 PARAMETER Experiment Name: At_42deg_Heat_Sub_P Parameter: Tissue Value: Aerial
  misc_feature: MA Experiment ID: 20000355 Result: Up-regulated in Transcription
  misc_feature: MA Experiment 20000355 PARAMETER Experiment Name: At_Siliques_Sub_P Parameter: Age (day) Value: 21
  misc_feature: MA Experiment 20000355 PARAMETER Experiment Name: At_Siliques_Sub_P Parameter: Organism Value: A. thaliana
  misc_feature: MA Experiment 20000355 PARAMETER Experiment Name: At_Siliques_Sub_P Parameter: Plant Line Value: WS
  misc_feature: MA Experiment 20000355 PARAMETER Experiment Name: At_Siliques_Sub_P Parameter: Tissue Value: Less Than 5mm Siliques vs. Whole Plant
  misc_feature: MA Experiment ID: 20000440 Result: Up-regulated in Transcription
  misc_feature: MA Experiment 20000440 PARAMETER Experiment Name: At_Closed-Flower__Sub_P Parameter: Tissue Value: Closed Flower vs. Whole Plant
aaacttcgaagattttgatattgtaacgatccgccatggaagagaagaagacagaatccgcgactaagaacgttaaaaaggttaacttgttagaccacatcgcaatcaaacacctccttgatgaatccgtctccgatatcgttacgagcagagggtacaaggaggatgtgagattaagcaacgtcaaatttctgttaggagggattataatcgtggttgctcttgttgctcaattctacaacaagaagtttcctgagaacagagactttttgatctgctgcatcggattatatgtggtgttgactgcggtaatgcagctgattctgtacattaaggagaagaacgctatcttgttcacctatcctcttgagggatcattcaccagcactggtttggtggtatcttccaagttacctagattctctgatcagtacactctaaccatcgacagtgctgatccgcaatcaatctcagctgggaagtcggttcagttcaccaaaagtgtcactcaatggctcacaaaagatggagttcttgtcgagggtttattctggaaagatgttgaagccctagtcaaagagtacacagaagcaggagaaccaaagaagaagagatgatcatctataatgggaaaagtatgttgctccttattagttctaaatgttacattttttttatgactaaaatcgatggtgacttggtttaaaagacgacagagtttttgcctcc

SEQ ID NO: 106180 - protein, 193 aa, Arabidopsis thaliana; identical to SEQ ID NO: 40076
  peptide (1)..(193): Ceres Seq. ID no. 13618924
  misc_feature (1)..(193): Homolog of NCBI NO: 34365647 NR Description: At4g04200 [Arabidopsis thaliana]
  misc_feature (1)..(193): Homolog of NCBI NO: 30688096 NR Description: expressed protein [Arabidopsis thaliana] Probable microsomal signal peptidase 25 kDa subunit (SPase 25 kDa (SPC25) >gi|17528956|gb|AAL38688.1| unknown protein [Arabidopsis
  misc_feature (1)..(107): Homolog of NCBI NO: 25408649 NR Description: hypothetical protein At2g39960 [imported] - thaliana >gi|2088649|gb|AAB95281.1| unknown protein [Arabidopsis
  misc_feature (109)..(193): Homolog of NCBI NO: 15233420 NR Description: hypothetical protein [Arabidopsis thaliana]
  misc_feature (1)..(44): Homolog of NCBI NO: 15233420 NR Description: hypothetical protein [Arabidopsis thaliana]
  misc_feature (9)..(185): Homolog of NCBI NO: 38344552 NR Description: OSJNBa0027P08.20 [Oryza sativa (japonica
  misc_feature (15)..(192): Homolog of NCBI NO: 28195697 NR Description: signal peptidase 25 kDA subunit [Gasterosteus
  misc_feature (1)..(180): Homolog of NCBI NO: 31240525 NR Description: ENSANGP00000021231 [Anopheles gambiae]

SEQ ID NO: 106181 - protein, 101 aa, Arabidopsis thaliana; identical to SEQ ID NO: 40077
  peptide (1)..(101): Ceres Seq. ID no. 13618925
  misc_feature (1)..(101): Homolog of NCBI NO: 34365647 NR Description: At4g04200 [Arabidopsis thaliana]
  misc_feature (1)..(101): Homolog of NCBI NO: 30688096 NR Description: expressed protein [Arabidopsis thaliana] Probable microsomal signal peptidase 25 kDa subunit (SPase 25 kDa (SPC25) >gi|17528956|gb|AAL38688.1| unknown protein [Arabidopsis
  misc_feature (1)..(15): Homolog of NCBI NO: 25408649 NR Description: hypothetical protein At2g39960 [imported] - thaliana >gi|2088649|gb|AAB95281.1| unknown protein [Arabidopsis
  misc_feature (17)..(101): Homolog of NCBI NO: 15233420 NR Description: hypothetical protein [Arabidopsis thaliana]
  misc_feature (1)..(93): Homolog of NCBI NO: 38344552 NR Description: OSJNBa0027P08.20 [Oryza sativa (japonica
  misc_feature (1)..(100): Homolog of NCBI NO: 28195697 NR Description: signal peptidase 25 kDA subunit [Gasterosteus
  misc_feature (1)..(88): Homolog of NCBI NO: 31240525 NR Description: ENSANGP00000021231 [Anopheles gambiae]

SEQ ID NO: 106182 - DNA, 1069 bp, Arabidopsis thaliana
  misc_feature (1)..(1069): Ceres Seq. ID no. 13618930
  misc_feature: MA Experiment ID: 108434 Result: Up-regulated in Transcription
  misc_feature: MA Experiment 108434 PARAMETER Experiment Name: At_Root_Tips_cDNA_P Parameter: Tissue Value: Root Tips
  misc_feature: MA Experiment ID: 108461 Result: Down-regulated in Transcription
  misc_feature: MA Experiment 108461 PARAMETER Experiment Name: At_Germinating_Seeds_cDNA_P Parameter: Age (day) Value: 1 vs. 0
  misc_feature: MA Experiment 108461 PARAMETER Experiment Name: At_Germinating_Seeds_cDNA_P Parameter: Tissue Value: Germinating Seeds
  misc_feature: MA Experiment ID: 108462 Result: Down-regulated in Transcription
  misc_feature: MA Experiment 108462 PARAMETER Experiment Name: At_Germinating_Seeds_cDNA_P Parameter: Age (day) Value: 2 vs. 0
  misc_feature: MA Experiment 108462 PARAMETER Experiment Name: At_Germinating_Seeds_cDNA_P Parameter: Tissue Value: Germinating Seeds
  misc_feature: MA Experiment ID: 108463 Result: Down-regulated in Transcription
  misc_feature: MA Experiment 108463 PARAMETER Experiment Name: At_Germinating_Seeds_cDNA_P Parameter: Age (day) Value: 3 vs. 0
  misc_feature: MA Experiment 108463 PARAMETER Experiment Name: At_Germinating_Seeds_cDNA_P Parameter: Tissue Value: Germinating Seeds
  misc_feature: MA Experiment ID: 108464 Result: Down-regulated in Transcription
  misc_feature: MA Experiment 108464 PARAMETER Experiment Name: At_Germinating_Seeds_cDNA_P Parameter: Age (day) Value: 4 vs. 0
  misc_feature: MA Experiment 108464 PARAMETER Experiment Name: At_Germinating_Seeds_cDNA_P Parameter: Tissue Value: Germinating Seeds
  misc_feature: MA Experiment ID: 108569 Result: Up-regulated in Transcription
  misc_feature: MA Experiment 108569 PARAMETER Experiment Name: At_0.001%_MeJA__cDNA_P Parameter: Timepoint (hr) Value: 6
  misc_feature: MA Experiment 108569 PARAMETER Experiment Name: At_0.001%_MeJA__cDNA_P Parameter: Tissue Value: Aerial
  misc_feature: MA Experiment 108569 PARAMETER Experiment Name: At_0.001%_MeJA__cDNA_P Parameter: Treatment Value: 0.001% MeJA vs. No Treatment
  misc_feature: MA Experiment ID: 108573 Result: Up-regulated in Transcription
  misc_feature: MA Experiment 108573 PARAMETER Experiment Name: At_Drought_cDNA_P Parameter: Timepoint (hr) Value: 6
  misc_feature: MA Experiment 108573 PARAMETER Experiment Name: At_Drought_cDNA_P Parameter: Tissue Value: Aerial
  misc_feature: MA Experiment 108573 PARAMETER Experiment Name: At_Drought_cDNA_P Parameter: Treatment Value: Drought vs. No Drought
  misc_feature: MA Experiment ID: 108585 Result: Up-regulated in Transcription
  misc_feature: MA Experiment 108585 PARAMETER Experiment Name: At_5mM_NaNP_cDNA_P Parameter: Timepoint (hr) Value: 6
  misc_feature: MA Experiment 108585 PARAMETER Experiment Name: At_5mM_NaNP_cDNA_P Parameter: Tissue Value: Aerial
  misc_feature: MA Experiment 108585 PARAMETER Experiment Name: At_5mM_NaNP_cDNA_P Parameter: Treatment Value: null
  misc_feature: MA Experiment ID: 20000179 Result: Down-regulated in Transcription
  misc_feature: MA Experiment 20000179 PARAMETER Experiment Name: At_Germinating_Seeds_P Parameter: Age (hr) Value: 6 vs. 0
  misc_feature: MA Experiment 20000179 PARAMETER Experiment Name: At_Germinating_Seeds_P Parameter: Tissue Value: Germinating Seeds
  misc_feature: MA Experiment ID: 20000180 Result: Down-regulated in Transcription
  misc_feature: MA Experiment 20000180 PARAMETER Experiment Name: At_Germinating_Seeds_P Parameter: Age (hr) Value: 24 vs. 0
  misc_feature: MA Experiment 20000180 PARAMETER Experiment Name: At_Germinating_Seeds_P Parameter: Tissue Value: Germinating Seeds
  misc_feature: MA Experiment ID: 20000224 Result: Down-regulated in Transcription
  misc_feature: MA Experiment ID: 20000227 Result: Up-regulated in Transcription
  misc_feature: MA Experiment 20000227 PARAMETER Experiment Name: At_Root-Tips-vs-Tops_P Parameter: Tissue Value: Root Tips vs. Root Tops
  misc_feature: MA Experiment ID: 20000265 Result: Up-regulated in Transcription
  misc_feature: MA Experiment 20000265 PARAMETER Experiment Name: At_Open_Flower_P Parameter: Age (day) Value: 21
  misc_feature: MA Experiment 20000265 PARAMETER Experiment Name: At_Open_Flower_P Parameter: Plant Line Value: WS
  misc_feature: MA Experiment 20000265 PARAMETER Experiment Name: At_Open_Flower_P Parameter: Tissue Value: Closed Flower vs. Whole Plant
  misc_feature: MA Experiment ID: 20001451 Result: Down-regulated in Transcription
  misc_feature: MA Experiment 20001451 PARAMETER Experiment Name: At_Far-red-induction_P Parameter: Age (day) Value: 7
  misc_feature: MA Experiment 20001451 PARAMETER Experiment Name: At_Far-red-induction_P Parameter: Light Value: Far-red vs. White
  misc_feature: MA Experiment 20001451 PARAMETER Experiment Name: At_Far-red-induction_P Parameter: Organism Value: A. thaliana
  misc_feature: MA Experiment 20001451 PARAMETER Experiment Name: At_Far-red-induction_P Parameter: Plant Line Value: Columbia
  misc_feature: MA Experiment 20001451 PARAMETER Experiment Name: At_Far-red-induction_P Parameter: Timepoint (hr) Value: 24
  misc_feature: MA Experiment 20001451 PARAMETER Experiment Name: At_Far-red-induction_P Parameter: Tissue Value: Whole Plant
aattctcacacattcttctgcttcgttaattttctactcgatttcgctcttcagaaatttgacaatgaagcttgacactagtggattggagacaactatgcctgtgattggctttggatcaaacagtgagatgcttgatgggttttcgtctgcaccttcgtttgatcttcctcgtaccactgattttgatgggtttcagaaaaaagctgtggagatggtgaagcctgcaaagggtacaactacacttgcgtttatctttaaggaaggtgttatggtagctgctgattctcgagctagcatgggaggatatatctcgtcgcaatctgtgaagaagattattgaaattaatccttatatgcttggtacaatggctggtggtgctgctgattgtcaattctggcacagaaatctgggaattaagtgccgtctacatgagctggcaaacaaaaggagaatctctgtttcaggagcttcaaagcttcttgctaacatgctctattcatatcgtggaatgggactttctgttggcacaatgattgctggatgggatgaaacaggccctggattgtactatgttgacaacgaaggaggacggcttaagggagacagattctctgtcggttcaggttcaccatacgcttatggtgttctggacagcggatacaaattcgatatgtcggttgaagaagcctcagagttagcaaggagatccatctaccatgctacattccgtgatggagctagtggtggagttgctagcgtgtaccacgttgggccgcaaggatggacgaaactctctggagacgacgttggcgagctacattaccattattaccccgtggctccaatcaccgcggaacatgtgatggaagaggctgccgaataagtactgtgattcttgtctatcttactaagagttttattacatcacttatgttttgttcatcaatgaacagaatcatagattcaagtttcttttgtattgcgaatgatgtagacgttagtttggccacaatgatcacgttgcataatagataacataatagataacctgtttctttcttcttct

SEQ ID NO: 106183 - protein, 294 aa, Arabidopsis thaliana
  peptide (1)..(294): Ceres Seq. ID no. 13618931
  misc_feature (75)..(257): Pfam Name: Proteasome A-type and B-type Pfam Description: Proteasome A-type and B-type
  misc_feature (22)..(294): Homolog of NCBI NO: 15231544 NR Description: 20S proteasome beta subunit E, putative thaliana] >gi|9294292|dbj|BAB02194.1| proteasome epsilon chain [Arabidopsis thaliana] >gi|16612308|gb|AAL27514.1|AF439846_1
  misc_feature (22)..(292): Homolog of NCBI NO: 15222152 NR Description: 20S proteasome beta subunit E1 (PBE1) thaliana] >gi|3914425|sp|O23717|PSB5_ARATH Proteasome subunit type 5 precursor (20S proteasome subunit E) (Proteasome epsilon
  misc_feature (22)..(292): Homolog of NCBI NO: 15292875 NR Description: putative proteasome epsilon chain precursor
  misc_feature (22)..(291): Homolog of NCBI NO: 3914430 NR Description: Proteasome subunit beta type 5 precursor (20S subunit E) (Proteasome epsilon chain) >gi|7435872|pir||T09132 26S
  misc_feature (22)..(292): Homolog of NCBI NO: 8671510 NR Description: beta 5 subunit of 20S proteasome [Oryza sativa
  misc_feature (127)..(292): Homolog of NCBI NO: 3980264 NR Description: 20S proteasome beta subunit [Cicer arietinum]
  misc_feature (22)..(95): Homolog of NCBI NO: 3980264 NR Description: 20S proteasome beta subunit [Cicer arietinum]
  misc_feature (95)..(293): Homolog of NCBI NO: 16588840 NR Description: putative 20S proteasome beta subunit 5 [Prunus
  misc_feature (98)..(271): Homolog of NCBI NO: 14594931 NR Description: putative beta5 proteasome subunit [Nicotiana
  misc_feature (27)..(281): Homolog of NCBI NO: 6755204 NR Description: proteasome (prosome, macropain) subunit, beta PSMB5 [Mus musculus] >gi|2897809|dbj|BAA24917.1| PSMB5 [Mus [Mus
ILTHSSASLIFYSISLFRNLTMKLDTSGLETTMPVIGFGSNSEMLDGFSSAPSFDLPRTTDFDGFQKKAVEMVKPAKGTTTLAFIFKEGVMVAADSRASMGGYISSQSVKKIIEINPYMLGTMAGGAADCQFWHRNLGIKCRLHELANKRRISVSGASKLLANMLYSYRGMGLSVGTMIAGWDETGPGLYYVDNEGGRLKGDRFSVGSGSPYAYGVLDSGYKFDMSVEEASELARRSIYHATFRDGASGGVASVYHVGPQGWTKLSGDDVGELHYHYYPVAPITAEHVMEEAAE

SEQ ID NO: 106184 - protein, 273 aa, Arabidopsis thaliana; identical to SEQ ID NO: 30157
  peptide (1)..(273): Ceres Seq. ID no. 13618932
  misc_feature (54)..(236): Pfam Name: Proteasome A-type and B-type Pfam Description: Proteasome A-type and B-type
  misc_feature (1)..(273): Homolog of NCBI NO: 15231544 NR Description: 20S proteasome beta subunit E, putative thaliana] >gi|9294292|dbj|BAB02194.1| proteasome epsilon chain [Arabidopsis thaliana] >gi|16612308|gb|AAL27514.1|AF439846_1
  misc_feature (1)..(271): Homolog of NCBI NO: 15222152 NR Description: 20S proteasome beta subunit E1 (PBE1) thaliana] >gi|3914425|sp|O23717|PSB5_ARATH Proteasome subunit type 5 precursor (20S proteasome subunit E) (Proteasome epsilon
  misc_feature (1)..(271): Homolog of NCBI NO: 15292875 NR Description: putative proteasome epsilon chain precursor
  misc_feature (1)..(270): Homolog of NCBI NO: 3914430 NR Description: Proteasome subunit beta type 5 precursor (20S subunit E) (Proteasome epsilon chain) >gi|7435872|pir||T09132 26S
  misc_feature (1)..(271): Homolog of NCBI NO: 8671510 NR Description: beta 5 subunit of 20S proteasome [Oryza sativa
  misc_feature (106)..(271): Homolog of NCBI NO: 3980264 NR Description: 20S proteasome beta subunit [Cicer arietinum]
  misc_feature (1)..(74): Homolog of NCBI NO: 3980264 NR Description: 20S proteasome beta subunit [Cicer arietinum]
  misc_feature (74)..(272): Homolog of NCBI NO: 16588840 NR Description: putative 20S proteasome beta subunit 5 [Prunus
  misc_feature (77)..(250): Homolog of NCBI NO: 14594931 NR Description: putative beta5 proteasome subunit [Nicotiana
  misc_feature (6)..(260): Homolog of NCBI NO: 6755204 NR Description: proteasome (prosome, macropain) subunit, beta PSMB5 [Mus musculus] >gi|2897809|dbj|BAA24917.1| PSMB5 [Mus [Mus

SEQ ID NO: 106185 - protein, 262 aa, Arabidopsis thaliana; identical to SEQ ID NO: 30158
  peptide (1)..(262): Ceres Seq. ID no. 13618933
  misc_feature (43)..(225): Pfam Name: Proteasome A-type and B-type Pfam Description: Proteasome A-type and B-type
  misc_feature (1)..(262): Homolog of NCBI NO: 15231544 NR Description: 20S proteasome beta subunit E, putative thaliana] >gi|9294292|dbj|BAB02194.1| proteasome epsilon chain [Arabidopsis thaliana] >gi|16612308|gb|AAL27514.1|AF439846_1
  misc_feature (1)..(260): Homolog of NCBI NO: 15222152 NR Description: 20S proteasome beta subunit E1 (PBE1) thaliana] >gi|3914425|sp|O23717|PSB5_ARATH Proteasome subunit type 5 precursor (20S proteasome subunit E) (Proteasome epsilon
  misc_feature (1)..(260): Homolog of NCBI NO: 15292875 NR Description: putative proteasome epsilon chain precursor
  misc_feature (1)..(259): Homolog of NCBI NO: 3914430 NR Description: Proteasome subunit beta type 5 precursor (20S subunit E) (Proteasome epsilon chain) >gi|7435872|pir||T09132 26S
  misc_feature (1)..(260): Homolog of NCBI NO: 8671510 NR Description: beta 5 subunit of 20S proteasome [Oryza sativa
  misc_feature (95)..(260): Homolog of NCBI NO: 3980264 NR Description: 20S proteasome beta subunit [Cicer arietinum]
  misc_feature (1)..(63): Homolog of NCBI NO: 3980264 NR Description: 20S proteasome beta subunit [Cicer arietinum]
  misc_feature (63)..(261): Homolog of NCBI NO: 16588840 NR Description: putative 20S proteasome beta subunit 5 [Prunus
  misc_feature (66)..(239): Homolog of NCBI NO: 14594931 NR Description: putative beta5 proteasome subunit [Nicotiana
  misc_feature (1)..(249): Homolog of NCBI NO: 6755204 NR Description: proteasome (prosome, macropain) subunit, beta PSMB5 [Mus musculus] >gi|2897809|dbj|BAA24917.1| PSMB5 [Mus [Mus

SEQ ID NO: 106186 - DNA, 1522 bp, Arabidopsis thaliana
  misc_feature (1)..(1522): Ceres Seq. ID no. 13618941
  misc_feature: MA Experiment ID: 20000182 Result: Up-regulated in Transcription
  misc_feature: MA Experiment 20000182 PARAMETER Experiment Name: At_2mM_SA_P Parameter: Age (day) Value: 14
  misc_feature: MA Experiment 20000182 PARAMETER Experiment Name: At_2mM_SA_P Parameter: Organism Value: A. thaliana
  misc_feature: MA Experiment 20000182 PARAMETER Experiment Name: At_2mM_SA_P Parameter: Plant Line Value: WS
  misc_feature: MA Experiment 20000182 PARAMETER Experiment Name: At_2mM_SA_P Parameter: Timepoint (hr) Value: 6
  misc_feature: MA Experiment 20000182 PARAMETER Experiment Name: At_2mM_SA_P Parameter: Tissue Value: Aerial
  misc_feature: MA Experiment 20000182 PARAMETER Experiment Name: At_2mM_SA_P Parameter: Treatment Value: 2mM SA vs. No Treatment
  misc_feature: MA Experiment ID: 20000184 Result: Down-regulated in Transcription
  misc_feature: MA Experiment 20000184 PARAMETER Experiment Name: At_Shoots__P Parameter: Age (day) Value: 7
  misc_feature: MA Experiment 20000184 PARAMETER Experiment Name: At_Shoots__P Parameter: Tissue Value: Shoots vs. Whole Plant
  misc_feature: MA Experiment ID: 20000234 Result: Down-regulated in Transcription
  misc_feature: MA Experiment 20000234 PARAMETER Experiment Name: At_Siliques_P Parameter: Age (day) Value: 21
  misc_feature: MA Experiment 20000234 PARAMETER Experiment Name: At_Siliques_P Parameter: Organism Value: A. thaliana
  misc_feature: MA Experiment 20000234 PARAMETER Experiment Name: At_Siliques_P Parameter: Plant Line Value: WS
  misc_feature: MA Experiment 20000234 PARAMETER Experiment Name: At_Siliques_P Parameter: Tissue Value: Less Than 5mm Siliques vs. Whole Plant
  misc_feature: MA Experiment ID: 20000235 Result: Down-regulated in Transcription
  misc_feature: MA Experiment 20000235 PARAMETER Experiment Name: At_Siliques_P Parameter: Age (day) Value: 21
  misc_feature: MA Experiment 20000235 PARAMETER Experiment Name: At_Siliques_P Parameter: Organism Value: A. thaliana
  misc_feature: MA Experiment 20000235 PARAMETER Experiment Name: At_Siliques_P Parameter: Plant Line Value: WS
  misc_feature: MA Experiment 20000235 PARAMETER Experiment Name: At_Siliques_P Parameter: Tissue Value: 5-10mm Siliques vs. Whole Plant
  misc_feature: MA Experiment ID: 20000264 Result: Down-regulated in Transcription
  misc_feature: MA Experiment 20000264 PARAMETER Experiment Name: At_Open_Flower_P Parameter: Age (day) Value: 21
  misc_feature: MA Experiment 20000264 PARAMETER Experiment Name: At_Open_Flower_P Parameter: Plant Line Value: WS
  misc_feature: MA Experiment 20000264 PARAMETER Experiment Name: At_Open_Flower_P Parameter: Tissue Value: Open Flower vs. Whole Plant
  misc_feature: MA Experiment ID: 20000265 Result: Down-regulated in Transcription
  misc_feature: MA Experiment 20000265 PARAMETER Experiment Name: At_Open_Flower_P Parameter: Age (day) Value: 21
  misc_feature: MA Experiment 20000265 PARAMETER Experiment Name: At_Open_Flower_P Parameter: Plant Line Value: WS
  misc_feature: MA Experiment 20000265 PARAMETER Experiment Name: At_Open_Flower_P Parameter: Tissue Value: Closed Flower vs. Whole Plant
  misc_feature: MA Experiment ID: 20000286 Result: Down-regulated in Transcription
  misc_feature: MA Experiment 20000286 PARAMETER Experiment Name: At_Open_Flower_P Parameter: Age (day) Value: 21
  misc_feature: MA Experiment 20000286 PARAMETER Experiment Name: At_Open_Flower_P Parameter: Plant Line Value: WS
  misc_feature: MA Experiment 20000286 PARAMETER Experiment Name: At_Open_Flower_P Parameter: Tissue Value: Half Open vs. Whole Plant
  misc_feature: MA Experiment ID: 20000438 Result: Down-regulated in Transcription
  misc_feature: MA Experiment 20000438 PARAMETER Experiment Name: At_Shoots__P Parameter: Age (day) Value: 14
  misc_feature: MA Experiment 20000438 PARAMETER Experiment Name: At_Shoots__P Parameter: Tissue Value: Shoots vs. Whole Plant
  misc_feature: MA Experiment ID: 20000575 Result: Down-regulated in Transcription
  misc_feature: MA Experiment 20000575 PARAMETER Experiment Name: At_100uM_ABA_Mutants__P Parameter: Organism Value: A. thaliana
  misc_feature: MA Experiment 20000575 PARAMETER Experiment Name: At_100uM_ABA_Mutants__P Parameter: Plant Line Value: CS22
  misc_feature: MA Experiment 20000575 PARAMETER Experiment Name: At_100uM_ABA_Mutants__P Parameter: Timepoint (hr) Value: 6
  misc_feature: MA Experiment 20000575 PARAMETER Experiment Name: At_100uM_ABA_Mutants__P Parameter: Tissue Value: Whole Plant
  misc_feature: MA Experiment 20000575 PARAMETER Experiment Name: At_100uM_ABA_Mutants__P Parameter: Treatment Value: 1uM ABA vs. No Treatment
  misc_feature: MA Experiment ID: 20000794 Result: Down-regulated in Transcription
  misc_feature: MA Experiment 20000794 PARAMETER Experiment Name: At_Petals_P Parameter: Age (day) Value: 23-25 days
  misc_feature: MA Experiment 20000794 PARAMETER Experiment Name: At_Petals_P Parameter: Plant Line Value: WS
  misc_feature: MA Experiment 20000794 PARAMETER Experiment Name: At_Petals_P Parameter: Tissue Value: Petals vs. Whole plant
  misc_feature: MA Experiment ID: 20001248 Result: Up-regulated in Transcription
  misc_feature: MA Experiment 20001248 PARAMETER Experiment Name: At_Far-red-induction_P Parameter: Age (day) Value: 7
  misc_feature: MA Experiment 20001248 PARAMETER Experiment Name: At_Far-red-induction_P Parameter: Light Value: Far-red vs. White
  misc_feature: MA Experiment 20001248 PARAMETER Experiment Name: At_Far-red-induction_P Parameter: Organism Value: A. thaliana
  misc_feature: MA Experiment 20001248 PARAMETER Experiment Name: At_Far-red-induction_P Parameter: Plant Line Value: Columbia
  misc_feature: MA Experiment 20001248 PARAMETER Experiment Name: At_Far-red-induction_P Parameter: Timepoint (hr) Value: 4
  misc_feature: MA Experiment 20001248 PARAMETER Experiment Name: At_Far-red-induction_P Parameter: Tissue Value: Whole Plant
  misc_feature: MA Experiment ID: 20001451 Result: Up-regulated in Transcription
  misc_feature: MA Experiment 20001451 PARAMETER Experiment Name: At_Far-red-induction_P Parameter: Age (day) Value: 7
  misc_feature: MA Experiment 20001451 PARAMETER Experiment Name: At_Far-red-induction_P Parameter: Light Value: Far-red vs. White
  misc_feature: MA Experiment 20001451 PARAMETER Experiment Name: At_Far-red-induction_P Parameter: Organism Value: A. thaliana
  misc_feature: MA Experiment 20001451 PARAMETER Experiment Name: At_Far-red-induction_P Parameter: Plant Line Value: Columbia
  misc_feature: MA Experiment 20001451 PARAMETER Experiment Name: At_Far-red-induction_P Parameter: Timepoint (hr) Value: 24
  misc_feature: MA Experiment 20001451 PARAMETER Experiment Name: At_Far-red-induction_P Parameter: Tissue Value: Whole Plant
  misc_feature: MA Experiment ID: 20001554 Result: Down-regulated in Transcription
  misc_feature: MA Experiment 20001554 PARAMETER Experiment Name: At_Drought_Soil_Dry_P Parameter: Age (day) Value: 21
  misc_feature: MA Experiment 20001554 PARAMETER Experiment Name: At_Drought_Soil_Dry_P Parameter: Organism Value: A. thaliana
  misc_feature: MA Experiment 20001554 PARAMETER Experiment Name: At_Drought_Soil_Dry_P Parameter: Plant Line Value: WS
  misc_feature: MA Experiment 20001554 PARAMETER Experiment Name: At_Drought_Soil_Dry_P Parameter: Post Timepoint (hr) Value: None
  misc_feature: MA Experiment 20001554 PARAMETER Experiment Name: At_Drought_Soil_Dry_P Parameter: Post-Treatment Value: None
  misc_feature: MA Experiment 20001554 PARAMETER Experiment Name: At_Drought_Soil_Dry_P Parameter: Timepoint (day) Value: 7
  misc_feature: MA Experiment 20001554 PARAMETER Experiment Name: At_Drought_Soil_Dry_P Parameter: Treatment Value: Drought vs. No Drought
  misc_feature: MA Experiment ID: 20001555 Result: Down-regulated in Transcription
  misc_feature: MA Experiment 20001555 PARAMETER Experiment Name: At_Drought_Soil_Dry_P Parameter: Age (day) Value: 24
  misc_feature: MA Experiment 20001555 PARAMETER Experiment Name: At_Drought_Soil_Dry_P Parameter: Organism Value: A. thaliana
  misc_feature: MA Experiment 20001555 PARAMETER Experiment Name: At_Drought_Soil_Dry_P Parameter: Plant Line Value: WS
  misc_feature: MA Experiment 20001555 PARAMETER Experiment Name: At_Drought_Soil_Dry_P Parameter: Post Timepoint (hr) Value: None
  misc_feature: MA Experiment 20001555 PARAMETER Experiment Name: At_Drought_Soil_Dry_P Parameter: Post-Treatment Value: None
  misc_feature: MA Experiment 20001555 PARAMETER Experiment Name: At_Drought_Soil_Dry_P Parameter: Timepoint (day) Value: 10
  misc_feature: MA Experiment 20001555 PARAMETER Experiment Name: At_Drought_Soil_Dry_P Parameter: Treatment Value: Drought vs. No Drought
  misc_feature: MA Experiment ID: 20001556 Result: Down-regulated in Transcription
  misc_feature: MA Experiment 20001556 PARAMETER Experiment Name: At_Drought_Soil_Dry_P Parameter: Age (day) Value: 26
  misc_feature: MA Experiment 20001556 PARAMETER Experiment Name: At_Drought_Soil_Dry_P Parameter: Organism Value: A. thaliana
  misc_feature: MA Experiment 20001556 PARAMETER Experiment Name: At_Drought_Soil_Dry_P Parameter: Plant Line Value: WS
  misc_feature: MA Experiment 20001556 PARAMETER Experiment Name: At_Drought_Soil_Dry_P Parameter: Post Timepoint (hr) Value: None
  misc_feature: MA Experiment 20001556 PARAMETER Experiment Name: At_Drought_Soil_Dry_P Parameter: Post-Treatment Value: None
  misc_feature: MA Experiment 20001556 PARAMETER Experiment Name: At_Drought_Soil_Dry_P Parameter: Timepoint (day) Value: 12
  misc_feature: MA Experiment 20001556 PARAMETER Experiment Name: At_Drought_Soil_Dry_P Parameter: Treatment Value: Drought vs. No Drought
  misc_feature: MA Experiment ID: 20001558 Result: Down-regulated in Transcription
  misc_feature: MA Experiment 20001558 PARAMETER Experiment Name: At_Drought_Soil_Dry_P Parameter: Age (day) Value: 27
  misc_feature: MA Experiment 20001558 PARAMETER Experiment Name: At_Drought_Soil_Dry_P Parameter: Organism Value: A. thaliana
  misc_feature: MA Experiment 20001558 PARAMETER Experiment Name: At_Drought_Soil_Dry_P Parameter: Plant Line Value: WS
  misc_feature: MA Experiment 20001558 PARAMETER Experiment Name: At_Drought_Soil_Dry_P Parameter: Post Timepoint (hr) Value: 6
  misc_feature: MA Experiment 20001558 PARAMETER Experiment Name: At_Drought_Soil_Dry_P Parameter: Post-Treatment Value: Re-Water vs. No Drought
  misc_feature: MA Experiment 20001558 PARAMETER Experiment Name: At_Drought_Soil_Dry_P Parameter: Timepoint (day) Value: 13
  misc_feature: MA Experiment 20001558 PARAMETER Experiment Name: At_Drought_Soil_Dry_P Parameter: Treatment Value: Drought vs. No Drought
  misc_feature: MA Experiment ID: 20001560 Result: Down-regulated in Transcription
  misc_feature: MA Experiment 20001560 PARAMETER Experiment Name: At_Drought_Soil_Dry_P Parameter: Age (day) Value: 28
  misc_feature: MA Experiment 20001560 PARAMETER Experiment Name: At_Drought_Soil_Dry_P Parameter: Organism Value: A. thaliana
  misc_feature: MA Experiment 20001560 PARAMETER Experiment Name: At_Drought_Soil_Dry_P Parameter: Plant Line Value: WS
  misc_feature: MA Experiment 20001560 PARAMETER Experiment Name: At_Drought_Soil_Dry_P Parameter: Post Timepoint (hr) Value: None
  misc_feature: MA Experiment 20001560 PARAMETER Experiment Name: At_Drought_Soil_Dry_P Parameter: Post-Treatment Value: None
  misc_feature: MA Experiment 20001560 PARAMETER Experiment Name: At_Drought_Soil_Dry_P Parameter: Timepoint (day) Value: 14
  misc_feature: MA Experiment 20001560 PARAMETER Experiment Name: At_Drought_Soil_Dry_P Parameter: Treatment Value: Drought vs. No Drought
gactaataatcacaaaaaccatggatcacgatctcgacaaattccctttactctcttacgtccttcatcaacatgactccaatctccacgcgccgccgtctatggccgcgcaagaaactctccttccttcttttcctcttctctccaatccagaaatcatgtctatgttgactcaatccatccccacaacgatcacacagacgcttttcgtcttcaactctctcggctctcgacctgatcccttagcggtttcctctgctcgattcaagatcgctcaaattatggattcgctctcgccggaggaagcagcgaaggagtcggagatttatgccggggttgtgcggttggatgaagtgcacgatagttacgagaagaagttgaaggatacagaggaggagctttctagggtttattctacggaggtggaatcgatgttgagaagcggtgaagaagtgaacgagaaggttcttgcggtgctcaaggaggcggaatccggcggaaccgttgagaggattgatctctccagccaagaacttaagcttatccctgaagctttttggaaagtagttggcttagtatacttgaatctctctggcaatgacttgacgtttataccggatgcaatctcgaaactcaagaagctagaagagctcgatgtatcttcaaattctttggaatctcttcctgactctatagggatgttgcttaaccttagaatccttaatgtgaatgcgaacaatctaaccgcactccctgagagcatcgcgcattgcaggtcactagttgagttagatgcaagctacaacaacttgacttcattacctacaaacattggatacggattacaaaacctcgagagattatcgatccagctgaacaaactccgttactttccaggttcgataagtgaaatgtataatctaaagtatcttgacgcacacatgaacgagatccacgggataccaaactcgatcgggagactaacgaaacttgaggttctaaacctaagcagcaatttcaacaacttgatgggtgtccctgacactatcactgatctaactaacctgagggagcttgatctaagcaacaaccaaatccaagctataccagactcattttataggctgaggaagctagagaaactgaacttggaccaaaacccgcttgagatcccatctcaagaagtggctactcaaggagctgaagttgttagagagtttatgaggaagagatggggtgatatcatggcagagcagcaacagaggattggcgttgaggctgagcgacatggagatgaaaacgggtgggtctattggggaacctccatggttactaatcttgtttctggagtgacccataccattggatttggaggagcaactagcgatggtggagataagaaaccgggagactcgtacttttatcaccaaatctgacttctgctaaattatcttgtaatctacacttttgtatacaaaaatttggagtgactttcttgtgaacttatcactccttgtttacc

SEQ ID NO: 106187 - protein, 477 aa, Arabidopsis thaliana
  peptide (1)..(477): Ceres Seq. ID no. 13618942
  misc_feature (329)..(353): Pfam Name: Leucine Rich Repeat Pfam Description: Leucine Rich Repeat
  misc_feature (7)..(477): Homolog of NCBI NO: 30688342 NR Description: leucine rich repeat protein family [Arabidopsis
  misc_feature (7)..(477): Homolog of NCBI NO: 18391461 NR Description: leucine rich repeat protein-related [Arabidopsis >gi|17063165|gb|AAL32979.1| At1g12970/F13K23_18 [Arabidopsis >gi|21700931|gb|AAM70589.1| At1g12970/F13K23_18 [Arabidopsis
  misc_feature (7)..(390): Homolog of NCBI NO: 25518616 NR Description: hypothetical protein F13K23.23 - Arabidopsis >gi|8698744|gb|AAF78502.1|AC012187_22 Contains similarity to CYR1 Candida albicans gb|AB034965 and contains multiple Leucine Rich
  misc_feature (73)..(455): Homolog of NCBI NO: 15239256 NR Description: expressed protein [Arabidopsis thaliana] gene_id:MJJ3.27~pir||T12704~strong similarity to unknown protein
  misc_feature (91)..(455): Homolog of NCBI NO: 22330985 NR Description: leucine rich repeat protein-related [Arabidopsis >gi|18175638|gb|AAL59901.1| unknown protein [Arabidopsis >gi|21689861|gb|AAM67491.1| unknown protein [Arabidopsis
  misc_feature (107)..(476): Homolog of NCBI NO: 38605760 NR Description: OSJNBa0044K18.1 [Oryza sativa (japonica
  misc_feature (128)..(477): Homolog of NCBI NO: 25518616 NR Description: hypothetical protein F13K23.23 - Arabidopsis >gi|8698744|gb|AAF78502.1|AC012187_22 Contains similarity to CYR1 Candida albicans gb|AB034965 and contains multiple Leucine Rich
  misc_feature (104)..(435): Homolog of NCBI NO: 7489337 NR Description: leucine-rich protein - common sunflower
  misc_feature (204)..(455): Homolog of NCBI NO: 12321872 NR Description: hypothetical protein; 91861-89496 [Arabidopsis
  misc_feature (23)..(407): Homolog of NCBI NO: 15237011 NR Description: expressed protein [Arabidopsis thaliana]
LIITKTMDHDLDKFPLLSYVLHQHDSNLHAPPSMAAQETLLPSFPLLSNPEIMSMLTQSIPTTITQTLFVFNSLGSRPDPLAVSSARFKIAQIMDSLSPEEAAKESEIYAGVVRLDEVHDSYEKKLKDTEEELSRVYSTEVESMLRSGEEVNEKVLAVLKEAESGGTVERIDLSSQELKLIPEAFWKVVGLVYLNLSGNDLTFIPDAISKLKKLEELDVSSNSLESLPDSIGMLLNLRILNVNANNLTALPESIAHCRSLVELDASYNNLTSLPTNIGYGLQNLERLSIQLNKLRYFPGSISEMYNLKYLDAHMNEIHGIPNSIGRLTKLEVLNLSSNFNNLMGVPDTITDLTNLRELDLSNNQIQAIPDSFYRLRKLEKLNLDQNPLEIPSQEVATQGAEVVREFMRKRWGDIMAEQQQRIGVEAERHGDENGWVYWGTSMVTNLVSGVTHTIGFGGATSDGGDKKPGDSYFYHQI

SEQ ID NO: 106188 - protein, 471 aa, Arabidopsis thaliana
  peptide (1)..(471): Ceres Seq. ID no. 13618943
  misc_feature (323)..(347): Pfam Name: Leucine Rich Repeat Pfam Description: Leucine Rich Repeat
  misc_feature (1)..(471): Homolog of NCBI NO: 30688342 NR Description: leucine rich repeat protein family [Arabidopsis
  misc_feature (1)..(471): Homolog of NCBI NO: 18391461 NR Description: leucine rich repeat protein-related [Arabidopsis >gi|17063165|gb|AAL32979.1| At1g12970/F13K23_18 [Arabidopsis >gi|21700931|gb|AAM70589.1| At1g12970/F13K23_18 [Arabidopsis
  misc_feature (1)..(384): Homolog of NCBI NO: 25518616 NR Description: hypothetical protein F13K23.23 - Arabidopsis >gi|8698744|gb|AAF78502.1|AC012187_22 Contains similarity to CYR1 Candida albicans gb|AB034965 and contains multiple Leucine Rich
  misc_feature (67)..(449): Homolog of NCBI NO: 15239256 NR Description: expressed protein [Arabidopsis thaliana] gene_id:MJJ3.27~pir||T12704~strong similarity to unknown protein
  misc_feature (85)..(449): Homolog of NCBI NO: 22330985 NR Description: leucine rich repeat protein-related [Arabidopsis >gi|18175638|gb|AAL59901.1| unknown protein [Arabidopsis >gi|21689861|gb|AAM67491.1| unknown protein [Arabidopsis
  misc_feature (101)..(470): Homolog of NCBI NO: 38605760 NR Description: OSJNBa0044K18.1 [Oryza sativa (japonica
  misc_feature (122)..(471): Homolog of NCBI NO: 25518616 NR Description: hypothetical protein F13K23.23 - Arabidopsis >gi|8698744|gb|AAF78502.1|AC012187_22 Contains similarity to CYR1 Candida albicans gb|AB034965 and contains multiple Leucine Rich
  misc_feature (98)..(429): Homolog of NCBI NO: 7489337 NR Description: leucine-rich protein - common sunflower
  misc_feature (198)..(449): Homolog of NCBI NO: 12321872 NR Description: hypothetical protein; 91861-89496 [Arabidopsis
  misc_feature (17)..(401): Homolog of NCBI NO: 15237011 NR Description: expressed protein [Arabidopsis thaliana]
MDHDLDKFPLLSYVLHQHDSNLHAPPSMAAQETLLPSFPLLSNPEIMSMLTQSIPTTITQTLFVFNSLGSRPDPLAVSSARFKIAQIMDSLSPEEAAKESEIYAGVVRLDEVHDSYEKKLKDTEEELSRVYSTEVESMLRSGEEVNEKVLAVLKEAESGGTVERIDLSSQELKLIPEAFWKVVGLVYLNLSGNDLTFIPDAISKLKKLEELDVSSNSLESLPDSIGMLLNLRILNVNANNLTALPESIAHCRSLVELDASYNNLTSLPTNIGYGLQNLERLSIQLNKLRYFPGSISEMYNLKYLDAHMNEIHGIPNSIGRLTKLEVLNLSSNFNNLMGVPDTITDLTNLRELDLSNNQIQAIPDSFYRLRKLEKLNLDQNPLEIPSQEVATQGAEVVREFMRKRWGDIMAEQQQRIGVEAERHGDENGWVYWGTSMVTNLVSGVTHTIGFGGATSDGGDKKPGDSYFYHQI

SEQ ID NO: 106189 - protein, 444 aa, Arabidopsis thaliana
  peptide (1)..(444): Ceres Seq. ID no. 13618944
  misc_feature (296)..(320): Pfam Name: Leucine Rich Repeat Pfam Description: Leucine Rich Repeat
  misc_feature (1)..(444): Homolog of NCBI NO: 30688342 NR Description: leucine rich repeat protein family [Arabidopsis
  misc_feature (1)..(444): Homolog of NCBI NO: 18391461 NR Description: leucine rich repeat protein-related [Arabidopsis >gi|17063165|gb|AAL32979.1| At1g12970/F13K23_18 [Arabidopsis >gi|21700931|gb|AAM70589.1| At1g12970/F13K23_18 [Arabidopsis
  misc_feature (1)..(357): Homolog of NCBI NO: 25518616 NR Description: hypothetical protein F13K23.23 - Arabidopsis >gi|8698744|gb|AAF78502.1|AC012187_22 Contains similarity to CYR1 Candida albicans gb|AB034965 and contains multiple Leucine Rich
  misc_feature (40)..(422): Homolog of NCBI NO: 15239256 NR Description: expressed protein [Arabidopsis thaliana] gene_id:MJJ3.27~pir||T12704~strong similarity to unknown protein
  misc_feature (58)..(422): Homolog of NCBI NO: 22330985 NR Description: leucine rich repeat protein-related [Arabidopsis >gi|18175638|gb|AAL59901.1| unknown protein [Arabidopsis >gi|21689861|gb|AAM67491.1| unknown protein [Arabidopsis
  misc_feature (74)..(443): Homolog of NCBI NO: 38605760 NR Description: OSJNBa0044K18.1 [Oryza sativa (japonica
  misc_feature (95)..(444): Homolog of NCBI NO: 25518616 NR Description: hypothetical protein F13K23.23 - Arabidopsis >gi|8698744|gb|AAF78502.1|AC012187_22 Contains similarity to CYR1 Candida albicans gb|AB034965 and contains multiple Leucine Rich
  misc_feature (71)..(402): Homolog of NCBI NO: 7489337 NR Description: leucine-rich protein - common sunflower
  misc_feature (171)..(422): Homolog of NCBI NO: 12321872 NR Description: hypothetical protein; 91861-89496 [Arabidopsis
  misc_feature (1)..(374): Homolog of NCBI NO: 15237011 NR Description: expressed protein [Arabidopsis thaliana]
MAAQETLLPSFPLLSNPEIMSMLTQSIPTTITQTLFVFNSLGSRPDPLAVSSARFKIAQIMDSLSPEEAAKESEIYAGVVRLDEVHDSYEKKLKDTEEELSRVYSTEVESMLRSGEEVNEKVLAVLKEAESGGTVERIDLSSQELKLIPEAFWKVVGLVYLNLSGNDLTFIPDAISKLKKLEELDVSSNSLESLPDSIGMLLNLRILNVNANNLTALPESIAHCRSLVELDASYNNLTSLPTNIGYGLQNLERLSIQLNKLRYFPGSISEMYNLKYLDAHMNEIHGIPNSIGRLTKLEVLNLSSNFNNLMGVPDTITDLTNLRELDLSNNQIQAIPDSFYRLRKLEKLNLDQNPLEIPSQEVATQGAEVVREFMRKRWGDIMAEQQQRIGVEAERHGDENGWVYWGTSMVTNLVSGVTHTIGFGGATSDGGDKKPGDSYFYHQI

SEQ ID NO: 106190 - DNA, 1066 bp, Arabidopsis thaliana
  misc_feature (1)..(1066): Ceres Seq. ID no. 13618949
  misc_feature: MA Experiment ID: 108434 Result: Down-regulated in Transcription
  misc_feature: MA Experiment 108434 PARAMETER Experiment Name: At_Root_Tips_cDNA_P Parameter: Tissue Value: Root Tips
  misc_feature: MA Experiment ID: 108461 Result: Up-regulated in Transcription
  misc_feature: MA Experiment 108461 PARAMETER Experiment Name: At_Germinating_Seeds_cDNA_P Parameter: Age (day) Value: 1 vs. 0
  misc_feature: MA Experiment 108461 PARAMETER Experiment Name: At_Germinating_Seeds_cDNA_P Parameter: Tissue Value: Germinating Seeds
  misc_feature: MA Experiment ID: 108462 Result: Up-regulated in Transcription
  misc_feature: MA Experiment 108462 PARAMETER Experiment Name: At_Germinating_Seeds_cDNA_P Parameter: Age (day) Value: 2 vs. 0
  misc_feature: MA Experiment 108462 PARAMETER Experiment Name: At_Germinating_Seeds_cDNA_P Parameter: Tissue Value: Germinating Seeds
  misc_feature: MA Experiment ID: 108464 Result: Up-regulated in Transcription
  misc_feature: MA Experiment 108464 PARAMETER Experiment Name: At_Germinating_Seeds_cDNA_P Parameter: Age (day) Value: 4 vs. 0
  misc_feature: MA Experiment 108464 PARAMETER Experiment Name: At_Germinating_Seeds_cDNA_P Parameter: Tissue Value: Germinating Seeds
  misc_feature: MA Experiment ID: 108573 Result: Up-regulated in Transcription
  misc_feature: MA Experiment 108573 PARAMETER Experiment Name: At_Drought_cDNA_P Parameter: Timepoint (hr) Value: 6
  misc_feature: MA Experiment 108573 PARAMETER Experiment Name: At_Drought_cDNA_P Parameter: Tissue Value: Aerial
  misc_feature: MA Experiment 108573 PARAMETER Experiment Name: At_Drought_cDNA_P Parameter: Treatment Value: Drought vs. No Drought
  misc_feature: MA Experiment ID: 108595 Result: Down-regulated in Transcription
  misc_feature: MA Experiment 108595 PARAMETER Experiment Name: At_Ler-pi_Ovule_cDNA_P Parameter: Plant Line Value: null
  misc_feature: MA Experiment ID: 20000180 Result: Up-regulated in Transcription
  misc_feature: MA Experiment 20000180 PARAMETER Experiment Name: At_Germinating_Seeds_P Parameter: Age (hr) Value: 24 vs. 0
  misc_feature: MA Experiment 20000180 PARAMETER Experiment Name: At_Germinating_Seeds_P Parameter: Tissue Value: Germinating Seeds
  misc_feature: MA Experiment ID: 20000264 Result: Down-regulated in Transcription
  misc_feature: MA Experiment 20000264 PARAMETER Experiment Name: At_Open_Flower_P Parameter: Age (day) Value: 21
  misc_feature: MA Experiment 20000264 PARAMETER Experiment Name: At_Open_Flower_P Parameter: Plant Line Value: WS
  misc_feature: MA Experiment 20000264 PARAMETER Experiment Name: At_Open_Flower_P Parameter: Tissue Value: Open Flower vs. Whole Plant
  misc_feature: MA Experiment ID: 20000265 Result: Down-regulated in Transcription
  misc_feature: MA Experiment 20000265 PARAMETER Experiment Name: At_Open_Flower_P Parameter: Age (day) Value: 21
  misc_feature: MA Experiment 20000265 PARAMETER Experiment Name: At_Open_Flower_P Parameter: Plant Line Value: WS
  misc_feature: MA Experiment 20000265 PARAMETER Experiment Name: At_Open_Flower_P Parameter: Tissue Value: Closed Flower vs. Whole Plant
  misc_feature: MA Experiment ID: 20000437 Result: Down-regulated in Transcription
  misc_feature: MA Experiment 20000437 PARAMETER Experiment Name: At_Drought_P Parameter: Age (day) Value: 8
  misc_feature: MA Experiment 20000437 PARAMETER Experiment Name: At_Drought_P Parameter: Organism Value: A. thaliana
  misc_feature: MA Experiment 20000437 PARAMETER Experiment Name: At_Drought_P Parameter: Plant Line Value: WS
  misc_feature: MA Experiment 20000437 PARAMETER Experiment Name: At_Drought_P Parameter: Timepoint (hr) Value: 24
  misc_feature: MA Experiment 20000437 PARAMETER Experiment Name: At_Drought_P Parameter: Tissue Value: Whole Plant
  misc_feature: MA Experiment 20000437 PARAMETER Experiment Name: At_Drought_P Parameter: Treatment Value: Drought vs. No Drought
  misc_feature: MA Experiment ID: 20000441 Result: Up-regulated in Transcription
  misc_feature: MA Experiment 20000441 PARAMETER Experiment Name: At_1uM_BR-BRZ__P Parameter: Tissue Value: Shoot Apices
  misc_feature: MA Experiment 20000441 PARAMETER Experiment Name: At_1uM_BR-BRZ__P Parameter: Treatment Value: 1uM BR vs. No Treatment
  misc_feature: MA Experiment ID: 20000445 Result: Down-regulated in Transcription
  misc_feature: MA Experiment 20000445 PARAMETER Experiment Name: At_100uM_NAA__P Parameter: Age (day) Value: 14
  misc_feature: MA Experiment 20000445 PARAMETER Experiment Name: At_100uM_NAA__P Parameter: Organism Value: A. thaliana
  misc_feature: MA Experiment 20000445 PARAMETER Experiment Name: At_100uM_NAA__P Parameter: Plant Line Value: WS
  misc_feature: MA Experiment 20000445 PARAMETER Experiment Name: At_100uM_NAA__P Parameter: Timepoint (hr) Value: 6
  misc_feature: MA Experiment 20000445 PARAMETER Experiment Name: At_100uM_NAA__P Parameter: Tissue Value: Aerial
  misc_feature: MA Experiment 20000445 PARAMETER Experiment Name: At_100uM_NAA__P Parameter: Treatment Value: 100uM NAA vs. No Treatment
  misc_feature: MA Experiment ID: 20001450 Result: Up-regulated in Transcription
  misc_feature: MA Experiment 20001450 PARAMETER Experiment Name: At_Far-red-induction_P Parameter: Age (day) Value: 7
  misc_feature: MA Experiment 20001450 PARAMETER Experiment Name: At_Far-red-induction_P Parameter: Light Value: Far-red vs. White
  misc_feature: MA Experiment 20001450 PARAMETER Experiment Name: At_Far-red-induction_P Parameter: Organism Value: A. thaliana
  misc_feature: MA Experiment 20001450 PARAMETER Experiment Name: At_Far-red-induction_P Parameter: Plant Line Value: Columbia
  misc_feature: MA Experiment 20001450 PARAMETER Experiment Name: At_Far-red-induction_P Parameter: Timepoint (hr) Value: 8
  misc_feature: MA Experiment 20001450 PARAMETER Experiment Name: At_Far-red-induction_P Parameter: Tissue Value: Whole Plant
  misc_feature: MA Experiment ID: 20001451 Result: Up-regulated in Transcription
  misc_feature: MA Experiment 20001451 PARAMETER Experiment Name: At_Far-red-induction_P Parameter: Age (day) Value: 7
  misc_feature: MA Experiment 20001451 PARAMETER Experiment Name: At_Far-red-induction_P Parameter: Light Value: Far-red vs. White
  misc_feature: MA Experiment 20001451 PARAMETER Experiment Name: At_Far-red-induction_P Parameter: Organism Value: A. thaliana
  misc_feature: MA Experiment 20001451 PARAMETER Experiment Name: At_Far-red-induction_P Parameter: Plant Line Value: Columbia
  misc_feature: MA Experiment 20001451 PARAMETER Experiment Name: At_Far-red-induction_P Parameter: Timepoint (hr) Value: 24
  misc_feature: MA Experiment 20001451 PARAMETER Experiment Name: At_Far-red-induction_P Parameter: Tissue Value: Whole Plant
  misc_feature: MA Experiment ID: 20001555 Result: Down-regulated in Transcription
  misc_feature: MA Experiment 20001555 PARAMETER Experiment Name: At_Drought_Soil_Dry_P Parameter: Age (day) Value: 24
  misc_feature: MA Experiment 20001555 PARAMETER Experiment Name: At_Drought_Soil_Dry_P Parameter: Organism Value: A. thaliana
  misc_feature: MA Experiment 20001555 PARAMETER Experiment Name: At_Drought_Soil_Dry_P Parameter: Plant Line Value: WS
  misc_feature: MA Experiment 20001555 PARAMETER Experiment Name: At_Drought_Soil_Dry_P Parameter: Post Timepoint (hr) Value: None
  misc_feature: MA Experiment 20001555 PARAMETER Experiment Name: At_Drought_Soil_Dry_P Parameter: Post-Treatment Value: None
  misc_feature: MA Experiment 20001555 PARAMETER Experiment Name: At_Drought_Soil_Dry_P Parameter: Timepoint (day) Value: 10
  misc_feature: MA Experiment 20001555 PARAMETER Experiment Name: At_Drought_Soil_Dry_P Parameter: Treatment Value: Drought vs. No Drought
  misc_feature: MA Experiment ID: 20001556 Result: Down-regulated in Transcription
  misc_feature: MA Experiment 20001556 PARAMETER Experiment Name: At_Drought_Soil_Dry_P Parameter: Age (day) Value: 26
  misc_feature: MA Experiment 20001556 PARAMETER Experiment Name: At_Drought_Soil_Dry_P Parameter: Organism Value: A. thaliana
  misc_feature: MA Experiment 20001556 PARAMETER Experiment Name: At_Drought_Soil_Dry_P Parameter: Plant Line Value: WS
  misc_feature: MA Experiment 20001556 PARAMETER Experiment Name: At_Drought_Soil_Dry_P Parameter: Post Timepoint (hr) Value: None
  misc_feature: MA Experiment 20001556 PARAMETER Experiment Name: At_Drought_Soil_Dry_P Parameter: Post-Treatment Value: None
  misc_feature: MA Experiment 20001556 PARAMETER Experiment Name: At_Drought_Soil_Dry_P Parameter: Timepoint (day) Value: 12
  misc_feature: MA Experiment 20001556 PARAMETER Experiment Name: At_Drought_Soil_Dry_P Parameter: Treatment Value: Drought vs. No Drought
  misc_feature: MA Experiment ID: 20001557 Result: Down-regulated in Transcription
  misc_feature: MA Experiment 20001557 PARAMETER Experiment Name: At_Drought_Soil_Dry_P Parameter: Age (day) Value: 27
  misc_feature: MA Experiment 20001557 PARAMETER Experiment Name: At_Drought_Soil_Dry_P Parameter: Organism Value: A. thaliana
  misc_feature: MA Experiment 20001557 PARAMETER Experiment Name: At_Drought_Soil_Dry_P Parameter: Plant Line Value: WS
  misc_feature: MA Experiment 20001557 PARAMETER Experiment Name: At_Drought_Soil_Dry_P Parameter: Post Timepoint (hr) Value: 3
  misc_feature: MA Experiment 20001557 PARAMETER Experiment Name: At_Drought_Soil_Dry_P Parameter: Post-Treatment Value: Re-Water vs. No Drought
  misc_feature: MA Experiment 20001557 PARAMETER Experiment Name: At_Drought_Soil_Dry_P Parameter: Timepoint (day) Value: 13
  misc_feature: MA Experiment 20001557 PARAMETER Experiment Name: At_Drought_Soil_Dry_P Parameter: Treatment Value: Drought vs. No Drought
  misc_feature: MA Experiment ID: 20001559 Result: Down-regulated in Transcription
  misc_feature: MA Experiment 20001559 PARAMETER Experiment Name: At_Drought_Soil_Dry_P Parameter: Age (day) Value: 28
  misc_feature: MA Experiment 20001559 PARAMETER Experiment Name: At_Drought_Soil_Dry_P Parameter: Organism Value: A. thaliana
  misc_feature: MA Experiment 20001559 PARAMETER Experiment Name: At_Drought_Soil_Dry_P Parameter: Plant Line Value: WS
  misc_feature: MA Experiment 20001559 PARAMETER Experiment Name: At_Drought_Soil_Dry_P Parameter: Post Timepoint (hr) Value: 29
  misc_feature: MA Experiment 20001559 PARAMETER Experiment Name: At_Drought_Soil_Dry_P Parameter: Post-Treatment Value: Re-Water vs. No Drought
  misc_feature: MA Experiment 20001559 PARAMETER Experiment Name: At_Drought_Soil_Dry_P Parameter: Timepoint (day) Value: 14
  misc_feature: MA Experiment 20001559 PARAMETER Experiment Name: At_Drought_Soil_Dry_P Parameter: Treatment Value: Drought vs. No Drought
  misc_feature: MA Experiment ID: 20001757 Result: Up-regulated in Transcription
  misc_feature: MA Experiment 20001757 PARAMETER Experiment Name: At_50mM_NH4NO3_L-to-H_P Parameter: Timepoint (hr) Value: 6
  misc_feature: MA Experiment 20001757 PARAMETER Experiment Name: At_50mM_NH4NO3_L-to-H_P Parameter: Tissue Value: Leaf
  misc_feature: MA Experiment 20001757 PARAMETER Experiment Name: At_50mM_NH4NO3_L-to-H_P Parameter: Treatment Value: 50mM NH4NO3 vs 100mM Mannitol
  misc_feature: MA Experiment ID: 20001905 Result: Down-regulated in Transcription
  misc_feature: MA Experiment 20001905 PARAMETER Experiment Name: At_Drought_Reproduction_P Parameter: Age (day) Value: 40
  misc_feature: MA Experiment 20001905 PARAMETER Experiment Name: At_Drought_Reproduction_P Parameter: Organism Value: A. thaliana
  misc_feature: MA Experiment 20001905 PARAMETER Experiment Name: At_Drought_Reproduction_P Parameter: Plant Line Value: WS
  misc_feature: MA Experiment 20001905 PARAMETER Experiment Name: At_Drought_Reproduction_P Parameter: Timepoint (day) Value: 10
  misc_feature: MA Experiment 20001905 PARAMETER Experiment Name: At_Drought_Reproduction_P Parameter: Tissue Value: Rosettes
  misc_feature: MA Experiment 20001905 PARAMETER Experiment Name: At_Drought_Reproduction_P Parameter: Treatment Value: Drought vs. No Drought
  misc_feature: MA Experiment ID: 20001907 Result: Down-regulated in Transcription
  misc_feature: MA Experiment 20001907 PARAMETER Experiment Name: At_Drought_Reproduction_P Parameter: Age (day) Value: 37
  misc_feature: MA Experiment 20001907 PARAMETER Experiment Name: At_Drought_Reproduction_P Parameter: Organism Value: A. thaliana
  misc_feature: MA Experiment 20001907 PARAMETER Experiment Name: At_Drought_Reproduction_P Parameter: Plant Line Value: WS
  misc_feature: MA Experiment 20001907 PARAMETER Experiment Name: At_Drought_Reproduction_P Parameter: Timepoint (day) Value: 7
  misc_feature: MA Experiment 20001907 PARAMETER Experiment Name: At_Drought_Reproduction_P Parameter: Tissue Value: Siliques
  misc_feature: MA Experiment 20001907 PARAMETER Experiment Name: At_Drought_Reproduction_P Parameter: Treatment Value: Drought vs. No Drought
  misc_feature: MA Experiment ID: 20001911 Result: Down-regulated in Transcription
  misc_feature: MA Experiment 20001911 PARAMETER Experiment Name: At_Drought_Reproduction_P Parameter: Age (day) Value: 40
  misc_feature: MA Experiment 20001911 PARAMETER Experiment Name: At_Drought_Reproduction_P Parameter: Organism Value: A. thaliana
  misc_feature: MA Experiment 20001911 PARAMETER Experiment Name: At_Drought_Reproduction_P Parameter: Plant Line Value: WS
  misc_feature: MA Experiment 20001911 PARAMETER Experiment Name: At_Drought_Reproduction_P Parameter: Timepoint (day) Value: 10
  misc_feature: MA Experiment 20001911 PARAMETER Experiment Name: At_Drought_Reproduction_P Parameter: Tissue Value: Flowers
  misc_feature: MA Experiment 20001911 PARAMETER Experiment Name: At_Drought_Reproduction_P Parameter: Treatment Value: Drought vs. No Drought
aaaccaatcacttcactctctctaatcaaaaagcttttaacctcagccgttaaatctttctccgatcatgccgaccagaaacatcgccattggtggagtccaagaagaggtctatcaccccaacgcacttagggcggcgctcgctgagtttatctcgactttgatcttcgtcttcgccggctcaggctccggaattgctttcaacaagatcactgacaatggagcaaccactccttccggcctcgtcgccgctgccttagctcatgctttcggtctctttgtcgctgtctctgttggcgctaacatttccggtggccacgttaaccctgccgttaccttcggtgtcttactcggtggtaacatcactctcctccgtggtattctctactggattgctcagcttcttggctccgtcgccgcttgtttcctccttagctttgccaccggtggcgagccaattccagcgttcggtctctctgccggagtcggatcattaaacgctctcgtcttcgagatcgtgatgaccttcgggctcgtctacaccgtctacgccacagccgttgaccccaagaacggtagtctcggaacaatcgcaccaatcgccataggtttcatcgttggagctaacatcctcgccggtggagctttcagcggagcttccatgaacccagccgttgctttcggaccagccgtcgtaagctggacgtggaccaaccactgggtttactgggctggtcctcttattggtggtggactcgccggaattatctacgactttgtcttcatcgatgaaaatgcccacgagcaattgcctaccaccgattactgaagacgtcaaattcaacgttgttaatctgatgaatttttcgtgatttgcttttttaatttgcatcgtaatgggtttctggccgttggatcatttttagatgaatctttgtctattgattgatcatttatgtgtctttgggtttgttgttggagttgtaatatctctggaaggcttttgtgcaattgtattgtacggtttaataactataattgagaaaaccagggaatgtgaattatg

SEQ ID NO: 106191 - protein, 253 aa, Arabidopsis thaliana
  peptide (1)..(253): Ceres Seq. ID no. 13618950
  misc_feature (1)..(253): Homolog of NCBI NO: 15231569 NR Description: tonoplast intrinsic protein, putative
  misc_feature (1)..(253): Homolog of NCBI NO: 11357300 NR Description: gamma tonoplast intrinsic protein 2 [imported] - thaliana >gi|3688799|gb|AAC62397.1| gamma tonoplast intrinsic
  misc_feature (1)..(253): Homolog of NCBI NO: 5081419 NR Description: tonoplast intrinsic protein [Brassica napus]
  misc_feature (1)..(253): Homolog of NCBI NO: 1514977 NR Description: VM23 [Raphanus sativus]
  misc_feature (1)..(253): Homolog of NCBI NO: 21593151 NR Description: putative aquaporin (tonoplast intrinsic protein
  misc_feature (1)..(253): Homolog of NCBI NO: 475048 NR Description: tonoplast intrinsic protein gamma (gamma-TIP)
  misc_feature (1)..(253): Homolog of NCBI NO: 15228041 NR Description: major intrinsic protein (MIP) family [Arabidopsis >gi|135860|sp|P25818|TIPG_ARATH Tonoplast intrinsic protein,
  misc_feature (1)..(253): Homolog of NCBI NO: 22858917 NR Description: tonoplast intrinsic protein bobTIP26-2 [Brassica
  misc_feature (1)..(253): Homolog of NCBI NO: 21284370 NR Description: tonoplast intrinsic protein bobTIP26-1 [Brassica
  misc_feature (1)..(241): Homolog of NCBI NO: 99747 NR Description: probable membrane channel protein RB7 - thaliana >gi|16492|emb|CAA38633.1| possible membrane channel
MPTRNIAIGGVQEEVYHPNALRAALAEFISTLIFVFAGSGSGIAFNKITDNGATTPSGLVAAALAHAFGLFVAVSVGANISGGHVNPAVTFGVLLGGNITLLRGILYWIAQLLGSVAACFLLSFATGGEPIPAFGLSAGVGSLNALVFEIVMTFGLVYTVYATAVDPKNGSLGTIAPIAIGFIVGANILAGGAFSGASMNPAVAFGPAVVSWTWTNHWVYWAGPLIGGGLAGIIYDFVFIDENAHEQLPTTDY

SEQ ID NO: 106192 - DNA, 1520 bp, Arabidopsis thaliana
  misc_feature (1)..(1520): Ceres Seq. ID no. 13618954
  misc_feature: MA Experiment ID: 20000182 Result: Down-regulated in Transcription
  misc_feature: MA Experiment 20000182 PARAMETER Experiment Name: At_2mM_SA_P Parameter: Age (day) Value: 14
  misc_feature: MA Experiment 20000182 PARAMETER Experiment Name: At_2mM_SA_P Parameter: Organism Value: A. thaliana
  misc_feature: MA Experiment 20000182 PARAMETER Experiment Name: At_2mM_SA_P Parameter: Plant Line Value: WS
  misc_feature: MA Experiment 20000182 PARAMETER Experiment Name: At_2mM_SA_P Parameter: Timepoint (hr) Value: 6
  misc_feature: MA Experiment 20000182 PARAMETER Experiment Name: At_2mM_SA_P Parameter: Tissue Value: Aerial
  misc_feature: MA Experiment 20000182 PARAMETER Experiment Name: At_2mM_SA_P Parameter: Treatment Value: 2mM SA vs. No Treatment
  misc_feature: MA Experiment ID: 20000185 Result: Up-regulated in Transcription
  misc_feature: MA Experiment 20000185 PARAMETER Experiment Name: At_Roots__P Parameter: Age (day) Value: 7 vs. 21
  misc_feature: MA Experiment 20000185 PARAMETER Experiment Name: At_Roots__P Parameter: Organism Value: A. thaliana
  misc_feature: MA Experiment 20000185 PARAMETER Experiment Name: At_Roots__P Parameter: Tissue Value: Roots vs. Whole Plant
  misc_feature: MA Experiment ID: 20000234 Result: Up-regulated in Transcription
  misc_feature: MA Experiment 20000234 PARAMETER Experiment Name: At_Siliques_P Parameter: Age (day) Value: 21
  misc_feature: MA Experiment 20000234 PARAMETER Experiment Name: At_Siliques_P Parameter: Organism Value: A. thaliana
  misc_feature: MA Experiment 20000234 PARAMETER Experiment Name: At_Siliques_P Parameter: Plant Line Value: WS
  misc_feature: MA Experiment 20000234 PARAMETER Experiment Name: At_Siliques_P Parameter: Tissue Value: Less Than 5mm Siliques vs. Whole Plant
  misc_feature: MA Experiment ID: 20000235 Result: Up-regulated in Transcription
  misc_feature: MA Experiment 20000235 PARAMETER Experiment Name: At_Siliques_P Parameter: Age (day) Value: 21
  misc_feature: MA Experiment 20000235 PARAMETER Experiment Name: At_Siliques_P Parameter: Organism Value: A. thaliana
  misc_feature: MA Experiment 20000235 PARAMETER Experiment Name: At_Siliques_P Parameter: Plant Line Value: WS
  misc_feature: MA Experiment 20000235 PARAMETER Experiment Name: At_Siliques_P Parameter: Tissue Value: 5-10mm Siliques vs. Whole Plant
  misc_feature: MA Experiment ID: 20000436 Result: Down-regulated in Transcription
  misc_feature: MA Experiment 20000436 PARAMETER Experiment Name: At_Drought_P Parameter: Age (day) Value: 7
  misc_feature: MA Experiment 20000436 PARAMETER Experiment Name: At_Drought_P Parameter: Organism Value: A. thaliana
  misc_feature: MA Experiment 20000436 PARAMETER Experiment Name: At_Drought_P Parameter: Plant Line Value: WS
  misc_feature: MA Experiment 20000436 PARAMETER Experiment Name: At_Drought_P Parameter: Timepoint (hr) Value: 12
  misc_feature: MA Experiment 20000436 PARAMETER Experiment Name: At_Drought_P Parameter: Tissue Value: Whole Plant
  misc_feature: MA Experiment 20000436 PARAMETER Experiment Name: At_Drought_P Parameter: Treatment Value: Drought vs. No Drought
  misc_feature: MA Experiment ID: 20000437 Result: Down-regulated in Transcription
  misc_feature: MA Experiment 20000437 PARAMETER Experiment Name: At_Drought_P Parameter: Age (day) Value: 8
  misc_feature: MA Experiment 20000437 PARAMETER Experiment Name: At_Drought_P Parameter: Organism Value: A. thaliana
  misc_feature: MA Experiment 20000437 PARAMETER Experiment Name: At_Drought_P Parameter: Plant Line Value: WS
  misc_feature: MA Experiment 20000437 PARAMETER Experiment Name: At_Drought_P Parameter: Timepoint (hr) Value: 24
  misc_feature: MA Experiment 20000437 PARAMETER Experiment Name: At_Drought_P Parameter: Tissue Value: Whole Plant
  misc_feature: MA Experiment 20000437 PARAMETER Experiment Name: At_Drought_P Parameter: Treatment Value: Drought vs. No Drought
  misc_feature: MA Experiment ID: 20001248 Result: Down-regulated in Transcription
  misc_feature: MA Experiment 20001248 PARAMETER Experiment Name: At_Far-red-induction_P Parameter: Age (day) Value: 7
  misc_feature: MA Experiment 20001248 PARAMETER Experiment Name: At_Far-red-induction_P Parameter: Light Value: Far-red vs. White
  misc_feature: MA Experiment 20001248 PARAMETER Experiment Name: At_Far-red-induction_P Parameter: Organism Value: A. thaliana
  misc_feature: MA Experiment 20001248 PARAMETER Experiment Name: At_Far-red-induction_P Parameter: Plant Line Value: Columbia
  misc_feature: MA Experiment 20001248 PARAMETER Experiment Name: At_Far-red-induction_P Parameter: Timepoint (hr) Value: 4
  misc_feature: MA Experiment 20001248 PARAMETER Experiment Name: At_Far-red-induction_P Parameter: Tissue Value: Whole Plant
  misc_feature: MA Experiment ID: 20001451 Result: Down-regulated in Transcription
  misc_feature: MA Experiment 20001451 PARAMETER Experiment Name: At_Far-red-induction_P Parameter: Age (day) Value: 7
  misc_feature: MA Experiment 20001451 PARAMETER Experiment Name: At_Far-red-induction_P Parameter: Light Value: Far-red vs. White
  misc_feature: MA Experiment 20001451 PARAMETER Experiment Name: At_Far-red-induction_P Parameter: Organism Value: A. thaliana
  misc_feature: MA Experiment 20001451 PARAMETER Experiment Name: At_Far-red-induction_P Parameter: Plant Line Value: Columbia
  misc_feature: MA Experiment 20001451 PARAMETER Experiment Name: At_Far-red-induction_P Parameter: Timepoint (hr) Value: 24
  misc_feature: MA Experiment 20001451 PARAMETER Experiment Name: At_Far-red-induction_P Parameter: Tissue Value: Whole Plant
  misc_feature: MA Experiment ID: 20001558 Result: Up-regulated in Transcription
  misc_feature: MA Experiment 20001558 PARAMETER Experiment Name: At_Drought_Soil_Dry_P Parameter: Age (day) Value: 27
  misc_feature: MA Experiment 20001558 PARAMETER Experiment Name: At_Drought_Soil_Dry_P Parameter: Organism Value: A. thaliana
  misc_feature: MA Experiment 20001558 PARAMETER Experiment Name: At_Drought_Soil_Dry_P Parameter: Plant Line Value: WS
  misc_feature: MA Experiment 20001558 PARAMETER Experiment Name: At_Drought_Soil_Dry_P Parameter: Post Timepoint (hr) Value: 6
  misc_feature: MA Experiment 20001558 PARAMETER Experiment Name: At_Drought_Soil_Dry_P Parameter: Post-Treatment Value: Re-Water vs. No Drought
  misc_feature: MA Experiment 20001558 PARAMETER Experiment Name: At_Drought_Soil_Dry_P Parameter: Timepoint (day) Value: 13
  misc_feature: MA Experiment 20001558 PARAMETER Experiment Name: At_Drought_Soil_Dry_P Parameter: Treatment Value: Drought vs. No Drought
  misc_feature: MA Experiment ID: 20001560 Result: Up-regulated in Transcription
  misc_feature: MA Experiment 20001560 PARAMETER Experiment Name: At_Drought_Soil_Dry_P Parameter: Age (day) Value: 28
  misc_feature: MA Experiment 20001560 PARAMETER Experiment Name: At_Drought_Soil_Dry_P Parameter: Organism Value: A. thaliana
  misc_feature: MA Experiment 20001560 PARAMETER Experiment Name: At_Drought_Soil_Dry_P Parameter: Plant Line Value: WS
  misc_feature: MA Experiment 20001560 PARAMETER Experiment Name: At_Drought_Soil_Dry_P Parameter: Post Timepoint (hr) Value: None
  misc_feature: MA Experiment 20001560 PARAMETER Experiment Name: At_Drought_Soil_Dry_P Parameter: Post-Treatment Value: None
  misc_feature: MA Experiment 20001560 PARAMETER Experiment Name: At_Drought_Soil_Dry_P Parameter: Timepoint (day) Value: 14
  misc_feature: MA Experiment 20001560 PARAMETER Experiment Name: At_Drought_Soil_Dry_P Parameter: Treatment Value: Drought vs. No Drought
  misc_feature: MA Experiment ID: 20001906 Result: Down-regulated in Transcription
  misc_feature: MA Experiment 20001906 PARAMETER Experiment Name: At_Drought_Reproduction_P Parameter: Age (day) Value: 35
  misc_feature: MA Experiment 20001906 PARAMETER Experiment Name: At_Drought_Reproduction_P Parameter: Organism Value: A. thaliana
  misc_feature: MA Experiment 20001906 PARAMETER Experiment Name: At_Drought_Reproduction_P Parameter: Plant Line Value: WS
  misc_feature: MA Experiment 20001906 PARAMETER Experiment Name: At_Drought_Reproduction_P Parameter: Timepoint (day) Value: 5
  misc_feature: MA Experiment 20001906 PARAMETER Experiment Name: At_Drought_Reproduction_P Parameter: Tissue Value: Siliques
  misc_feature: MA Experiment 20001906 PARAMETER Experiment Name: At_Drought_Reproduction_P Parameter: Treatment Value: Drought vs. No Drought
agtggaagcttggagcatcggtgaggaaaagagaaagagagagagaaggcagttttgttttccaaatgtcagcaattcttgcagctgccattggtggtgctgtaggagctcttgcattgattgctttgtttgtttttctcctttggttttgtgtctttcgtcgtaagaatctgtctagaacttctgagactggctcttctgatccatctactcaagaaggaagaaatgttgcaattgagttgtcaatgagagaagctagaagatttgaaatggaggaacttgctcaagccaccaagagttttaccaataaaagtcttattggtattggcaaattcggcgaggtttacaaaggtttgcttcaagatggtgttcttgtagctatcaagaaaagacctggtttgcctactcaagaatttgttaacgaggttcgttatctatcgtctatccatcaccgtaatctcgtcactcttttggggttttgccaagaaagcaacacacagtttcttgtctacgagtatgttcctaatggaagtgtttccagtcacctgtacggtgctggtggtaaagtacctggtaatagactagagttcagacataggcttgcaatatctataggagcagctaaaggcttggcacatcttcactcgttgagtcctcggttgatacacaaggacttcaaaaccgctaatgttcttgtggatgaaaatttcattgctaaggttgcggatgcaggagtccgtaacttcttaggaagagaggatgttggtacatcgtctcacattgttgcagaccagattttcctctccccagaggttcaagagttcaaaagattttcagagaaaagtgatgtctatgcttttggtgtattcctcttggaattagtaagtggaagagaagcatcagaaccatccccttcaagctcaacgcaaactctagtcgattggatgcaaaacttaacggattacgcagatataccaatgatgattgatgagagactaggaggtacatacacagcagaaggagttgaggaacttattacattgacactaagatgtgttgatgtatcaagtgagaagagaccaacaatgagttttgttgtgacagagcttgaaagaatattggataaagaagtgagcttaacaacagtaatgggtgaaggtactccaactgttactcttggaagtcagctttttaaagcaaccaagtgattattataaaggaaccatctttttacatatatatacatatatatatatatattatataagttctctgagacaagaaccaatcagagaacttaaggaggaagaagaagaagactgatcagctgttttgtgttaagtgtataaagaacagctgaagcttattgtttgtttgttttttccctcctttttcacttcctttggaggttattattttcagcaattatttttttgacaatgagtgcagaaaagtataactttgtaaaaacattatttattgatataaaggaagcaaagagtggaatgttgtgtgaaaat

SEQ ID NO: 106193 - protein, 401 aa, Arabidopsis thaliana
  peptide (1)..(401): Ceres Seq. ID no. 13618955
  misc_feature (22)..(401): Homolog of NCBI NO: 30688460 NR Description: protein kinase family [Arabidopsis thaliana]
  misc_feature (22)..(401): Homolog of NCBI NO: 26453311 NR Description: putative protein kinase [Arabidopsis thaliana]
  misc_feature (22)..(401): Homolog of NCBI NO: 1402888 NR Description: unknown [Arabidopsis thaliana]
  misc_feature (22)..(397): Homolog of NCBI NO: 34907096 NR Description: putative serine/threonine protein kinase [Oryza
  misc_feature (26)..(397): Homolog of NCBI NO: 34907204 NR Description: serine/threonine protein kinase-like protein
  misc_feature (28)..(376): Homolog of NCBI NO: 34909240 NR Description: putative receptor protein kinase [Oryza sativa
  misc_feature (30)..(373): Homolog of NCBI NO: 21698802 NR Description: nodulation receptor kinase [Melilotus alba]
  misc_feature (32)..(373): Homolog of NCBI NO: 21698781 NR Description: nodulation receptor kinase [Medicago sativa]
  misc_feature (30)..(373): Homolog of NCBI NO: 21698787 NR Description: nodulation receptor kinase [Medicago truncatula]
  misc_feature (30)..(373): Homolog of NCBI NO: 21698783 NR Description: nodulation receptor kinase [Medicago truncatula]
WKLGASVRKREREREGSFVFQMSAILAAAIGGAVGALALIALFVFLLWFCVFRRKNLSRTSETGSSDPSTQEGRNVAIELSMREARRFEMEELAQATKSFTNKSLIGIGKFGEVYKGLLQDGVLVAIKKRPGLPTQEFVNEVRYLSSIHHRNLVTLLGFCQESNTQFLVYEYVPNGSVSSHLYGAGGKVPGNRLEFRHRLAISIGAAKGLAHLHSLSPRLIHKDFKTANVLVDENFIAKVADAGVRNFLGREDVGTSSHIVADQIFLSPEVQEFKRFSEKSDVYAFGVFLLELVSGREASEPSPSSSTQTLVDWMQNLTDYADIPMMIDERLGGTYTAEGVEELITLTLRCVDVSSEKRPTMSFVVTELERILDKEVSLTTVMGEGTPTVTLGSQLFKATK

SEQ ID NO: 106194 - protein, 380 aa, Arabidopsis thaliana
  peptide (1)..(380): Ceres Seq. ID no. 13618956
  misc_feature (1)..(380): Homolog of NCBI NO: 30688460 NR Description: protein kinase family [Arabidopsis thaliana]
  misc_feature (1)..(380): Homolog of NCBI NO: 26453311 NR Description: putative protein kinase [Arabidopsis thaliana]
  misc_feature (1)..(380): Homolog of NCBI NO: 1402888 NR Description: unknown [Arabidopsis thaliana]
  misc_feature (1)..(376): Homolog of NCBI NO: 34907096 NR Description: putative serine/threonine protein kinase [Oryza
  misc_feature (5)..(376): Homolog of NCBI NO: 34907204 NR Description: serine/threonine protein kinase-like protein
  misc_feature (7)..(355): Homolog of NCBI NO: 34909240 NR Description: putative receptor protein kinase [Oryza sativa
  misc_feature (9)..(352): Homolog of NCBI NO: 21698802 NR Description: nodulation receptor kinase [Melilotus alba]
  misc_feature (11)..(352): Homolog of NCBI NO: 21698781 NR Description: nodulation receptor kinase [Medicago sativa]
  misc_feature (9)..(352): Homolog of NCBI NO: 21698787 NR Description: nodulation receptor kinase [Medicago truncatula]
  misc_feature (9)..(352): Homolog of NCBI NO: 21698783 NR Description: nodulation receptor kinase [Medicago truncatula]
MSAILAAAIGGAVGALALIALFVFLLWFCVFRRKNLSRTSETGSSDPSTQEGRNVAIELSMREARRFEMEELAQATKSFTNKSLIGIGKFGEVYKGLLQDGVLVAIKKRPGLPTQEFVNEVRYLSSIHHRNLVTLLGFCQESNTQFLVYEYVPNGSVSSHLYGAGGKVPGNRLEFRHRLAISIGAAKGLAHLHSLSPRLIHKDFKTANVLVDENFIAKVADAGVRNFLGREDVGTSSHIVADQIFLSPEVQEFKRFSEKSDVYAFGVFLLELVSGREASEPSPSSSTQTLVDWMQNLTDYADIPMMIDERLGGTYTAEGVEELITLTLRCVDVSSEKRPTMSFVVTELERILDKEVSLTTVMGEGTPTVTLGSQLFKATK

SEQ ID NO: 106195 - protein, 320 aa, Arabidopsis thaliana
  peptide (1)..(320): Ceres Seq. ID no. 13618957
  misc_feature (1)..(320): Homolog of NCBI NO: 30688460 NR Description: protein kinase family [Arabidopsis thaliana]
  misc_feature (1)..(320): Homolog of NCBI NO: 26453311 NR Description: putative protein kinase [Arabidopsis thaliana]
  misc_feature (1)..(320): Homolog of NCBI NO: 1402888 NR Description: unknown [Arabidopsis thaliana]
  misc_feature (1)..(316): Homolog of NCBI NO: 34907096 NR Description: putative serine/threonine protein kinase [Oryza
  misc_feature (1)..(316): Homolog of NCBI NO: 34907204 NR Description: serine/threonine protein kinase-like protein
  misc_feature (1)..(295): Homolog of NCBI NO: 34909240 NR Description: putative receptor protein kinase [Oryza sativa
  misc_feature (1)..(292): Homolog of NCBI NO: 21698802 NR Description: nodulation receptor kinase [Melilotus alba]
  misc_feature (1)..(292): Homolog of NCBI NO: 21698781 NR Description: nodulation receptor kinase [Medicago sativa]
  misc_feature (1)..(292): Homolog of NCBI NO: 21698787 NR Description: nodulation receptor kinase [Medicago truncatula]
  misc_feature (1)..(292): Homolog of NCBI NO: 21698783 NR Description: nodulation receptor kinase [Medicago truncatula]
MREARRFEMEELAQATKSFTNKSLIGIGKFGEVYKGLLQDGVLVAIKKRPGLPTQEFVNEVRYLSSIHHRNLVTLLGFCQESNTQFLVYEYVPNGSVSSHLYGAGGKVPGNRLEFRHRLAISIGAAKGLAHLHSLSPRLIHKDFKTANVLVDENFIAKVADAGVRNFLGREDVGTSSHIVADQIFLSPEVQEFKRFSEKSDVYAFGVFLLELVSGREASEPSPSSSTQTLVDWMQNLTDYADIPMMIDERLGGTYTAEGVEELITLTLRCVDVSSEKRPTMSFVVTELERILDKEVSLTTVMGEGTPTVTLGSQLFKATK

SEQ ID NO: 106196 - DNA, 1440 bp, Arabidopsis thaliana
  misc_feature (1)..(1440): Ceres Seq. ID no. 13618980
  misc_feature: MA Experiment ID: 108577 Result: Up-regulated in Transcription
  misc_feature: MA Experiment 108577 PARAMETER Experiment Name: At_42deg_Heat_cDNA_P Parameter: Temperature (deg C) Value: 42 vs. 22
  misc_feature: MA Experiment 108577 PARAMETER Experiment Name: At_42deg_Heat_cDNA_P Parameter: Timepoint (hr) Value: 6
  misc_feature: MA Experiment 108577 PARAMETER Experiment Name: At_42deg_Heat_cDNA_P Parameter: Tissue Value: Aerial
  misc_feature: MA Experiment ID: 108595 Result: Down-regulated in Transcription
  misc_feature: MA Experiment 108595 PARAMETER Experiment Name: At_Ler-pi_Ovule_cDNA_P Parameter: Plant Line Value: null
  misc_feature: MA Experiment ID: 20000173 Result: Up-regulated in Transcription
  misc_feature: MA Experiment 20000173 PARAMETER Experiment Name: At_42deg_Heat_P Parameter: Age (day) Value: 14
  misc_feature: MA Experiment 20000173 PARAMETER Experiment Name: At_42deg_Heat_P Parameter: Organism Value: A. thaliana
  misc_feature: MA Experiment 20000173 PARAMETER Experiment Name: At_42deg_Heat_P Parameter: Plant Line Value: WS
  misc_feature: MA Experiment 20000173 PARAMETER Experiment Name: At_42deg_Heat_P Parameter: Temperature (deg C) Value: 42 vs. 22
  misc_feature: MA Experiment 20000173 PARAMETER Experiment Name: At_42deg_Heat_P Parameter: Timepoint (hr) Value: 6
  misc_feature: MA Experiment 20000173 PARAMETER Experiment Name: At_42deg_Heat_P Parameter: Tissue Value: Aerial
  misc_feature: MA Experiment ID: 20000184 Result: Down-regulated in Transcription
  misc_feature: MA Experiment 20000184 PARAMETER Experiment Name: At_Shoots__P Parameter: Age (day) Value: 7
  misc_feature: MA Experiment 20000184 PARAMETER Experiment Name: At_Shoots__P Parameter: Tissue Value: Shoots vs. Whole Plant
  misc_feature: MA Experiment ID: 20000235 Result: Down-regulated in Transcription
  misc_feature: MA Experiment 20000235 PARAMETER Experiment Name: At_Siliques_P Parameter: Age (day) Value: 21
  misc_feature: MA Experiment 20000235 PARAMETER Experiment Name: At_Siliques_P Parameter: Organism Value: A. thaliana
  misc_feature: MA Experiment 20000235 PARAMETER Experiment Name: At_Siliques_P Parameter: Plant Line Value: WS
  misc_feature: MA Experiment 20000235 PARAMETER Experiment Name: At_Siliques_P Parameter: Tissue Value: 5-10mm Siliques vs. Whole Plant
  misc_feature: MA Experiment ID: 20000496 Result: Up-regulated in Transcription
  misc_feature: MA Experiment 20000496 PARAMETER Experiment Name: At_Guard_Cells_P Parameter: Harvest Date Value: 7/19/2002
  misc_feature: MA Experiment 20000496 PARAMETER Experiment Name: At_Guard_Cells_P Parameter: Organism Value: Canola
  misc_feature: MA Experiment 20000496 PARAMETER Experiment Name: At_Guard_Cells_P Parameter: Tissue Value: Guard Cells vs. Leaves
gaggaccatttcttctctctcattctctcttctgacgtgtttcccttcttcggtttctcatcctcacgtccgccggatttcgaggaaacgaagaagaagaagaacaacaacaacaaaagccttttgagatatggacagcttctggcaattaggtgatgagctacgaggtcagacgagagcatcagaggatcacaaatggtctactgttgcaacgaagctagctgagcaaactagaatgaaaggggagaggatgaacaatcttgatctctccaaaggttacactgagtttagaccaagtgagaaattcagtttccaggagaacaatcttaacttcaacatgttgaatttggatggtaaatttggtgaaagcatcatggggaagacttcgatgcagagcaatgtttataatatgaatactgttttccagaagaatgactttaagagtggaggcaacatgaaagttaacaagtataatggtaatgttgttgctaacaaggagatgagcaacaacaaacataacaacaactgcaatgataatgggaatatgaatttggctgttgacaagaggtttaaaaccttgcctgcttcggagactcttccgaggaatgaagttcttggtggttacatctttgtttgcaacaatgatactatgcaggaggatatgaaacgtcacctctttggtttacctccaagatacagagactctgttcgagctataacacctggattgcctctgtttctttacaactacaccactcaccagcttcatggtatctttgaggcaacaacttttggaggtactaatattgatgctactgcttgggaagacaaaaagtgcaaaggagagtcaaggtttccggctcaggtaaggatcagagtgaggaaaatctgcaaagccttggaagaggactccttcaggccagtacttcaccactatgatggtccaaaattccgccttgagctctctgttcctgagacattggatctgctagatctttgcgaacaagctggttctgcataagccgaaacgatcaaccttgcaatgccacgttgcaaagagggggatgttttgtatgaaatctatctatatatgtaagacctaccgtaagagcgtaagcttttgggatttagttaagagtcggattcaaatgtatgtttactaagaagggatgagagtatgtgtggtcttaaggcaagcaaaagagcgaagaggctctgccgaataagcgactactcttgttctgtgtcgtgtctgatgtgtgagtgtgtgtctgtgtttgtgagagattcgatactctttgaaacaaagatttatgtagaagaatatagagaaagaaagactactataaacagagccaaaaaatgatgtgagctactgtttgtgcttgcttgtgtaaggataaaacaaattgtcctaaatgacaagtttaacttttaagt

SEQ ID NO: 106197 - protein, 296 aa, Arabidopsis thaliana; identical to SEQ ID NO: 30087
  peptide (1)..(296): Ceres Seq. ID no. 13618981
  misc_feature (1)..(296): Homolog of NCBI NO: 15232081 NR Description: gda-1 -related [Arabidopsis thaliana] contains similarity to unknown [Arabidopsis thaliana] >gi|16604450|gb|AAL24231.1|
  misc_feature (1)..(296): Homolog of NCBI NO: 21592623 NR Description: gda-1, putative [Arabidopsis thaliana]
  misc_feature (1)..(296): Homolog of NCBI NO: 2369766 NR Description: hypothetical protein [Citrus x paradisi]
  misc_feature (82)..(296): Homolog of NCBI NO: 21665866 NR Description: GDA2 protein [Pisum sativum]
  misc_feature (113)..(292): Homolog of NCBI NO: 584825 NR Description: B2 PROTEIN >gi|322726|pir||S32124 B2 protein -
  misc_feature (47)..(289): Homolog of NCBI NO: 18422167 NR Description: expressed protein [Arabidopsis thaliana] unknown protein [Arabidopsis thaliana] unknown protein [Arabidopsis thaliana]
  misc_feature (87)..(289): Homolog of NCBI NO: 9757950 NR Description: gene_id:MJC20.15~similar to unknown
  misc_feature (37)..(283): Homolog of NCBI NO: 34913876 NR Description: B1156H12.22 [Oryza sativa (japonica
  misc_feature (174)..(285): Homolog of NCBI NO: 7488804 NR Description: gda-1 protein - garden pea
  misc_feature (141)..(289): Homolog of NCBI NO: 34896110 NR Description: P0701D05.9 [Oryza sativa (japonica

SEQ ID NO: 106198 - protein, 261 aa, Arabidopsis thaliana; identical to SEQ ID NO: 30088
  peptide (1)..(261): Ceres Seq. ID no. 13618982
  misc_feature (1)..(261): Homolog of NCBI NO: 15232081 NR Description: gda-1 -related [Arabidopsis thaliana] contains similarity to unknown [Arabidopsis thaliana] >gi|16604450|gb|AAL24231.1|
  misc_feature (1)..(261): Homolog of NCBI NO: 21592623 NR Description: gda-1, putative [Arabidopsis thaliana]
  misc_feature (1)..(261): Homolog of NCBI NO: 2369766 NR Description: hypothetical protein [Citrus x paradisi]
  misc_feature (47)..(261): Homolog of NCBI NO: 21665866 NR Description: GDA2 protein [Pisum sativum]
  misc_feature (78)..(257): Homolog of NCBI NO: 584825 NR Description: B2 PROTEIN >gi|322726|pir||S32124 B2 protein -
  misc_feature (12)..(254): Homolog of NCBI NO: 18422167 NR Description: expressed protein [Arabidopsis thaliana] unknown protein [Arabidopsis thaliana] unknown protein [Arabidopsis thaliana]
  misc_feature (52)..(254): Homolog of NCBI NO: 9757950 NR Description: gene_id:MJC20.15~similar to unknown
  misc_feature (2)..(248): Homolog of NCBI NO: 34913876 NR Description: B1156H12.22 [Oryza sativa (japonica
  misc_feature (139)..(250): Homolog of NCBI NO: 7488804 NR Description: gda-1 protein - garden pea
  misc_feature (106)..(254): Homolog of NCBI NO: 34896110 NR Description: P0701D05.9 [Oryza sativa (japonica

SEQ ID NO: 106199 - protein, 256 aa, Arabidopsis thaliana; identical to SEQ ID NO: 30089
  peptide (1)..(256): Ceres Seq. ID no. 13618983
  misc_feature (1)..(256): Homolog of NCBI NO: 15232081 NR Description: gda-1 -related [Arabidopsis thaliana] contains similarity to unknown [Arabidopsis thaliana] >gi|16604450|gb|AAL24231.1|
  misc_feature (1)..(256): Homolog of NCBI NO: 21592623 NR Description: gda-1, putative [Arabidopsis thaliana]
  misc_feature (1)..(256): Homolog of NCBI NO: 2369766 NR Description: hypothetical protein [Citrus x paradisi]
  misc_feature (42)..(256): Homolog of NCBI NO: 21665866 NR Description: GDA2 protein [Pisum sativum]
  misc_feature (73)..(252): Homolog of NCBI NO: 584825 NR Description: B2 PROTEIN >gi|322726|pir||S32124 B2 protein -
  misc_feature (7)..(249): Homolog of NCBI NO: 18422167 NR Description: expressed protein [Arabidopsis thaliana] unknown protein [Arabidopsis thaliana] unknown protein [Arabidopsis thaliana]
  misc_feature (47)..(249): Homolog of NCBI NO: 9757950 NR Description: gene_id:MJC20.15~similar to unknown
  misc_feature (1)..(243): Homolog of NCBI NO: 34913876 NR Description: B1156H12.22 [Oryza sativa (japonica
  misc_feature (134)..(245): Homolog of NCBI NO: 7488804 NR Description: gda-1 protein - garden pea
  misc_feature (101)..(249): Homolog of NCBI NO: 34896110 NR Description: P0701D05.9 [Oryza sativa (japonica

SEQ ID NO: 106200 - DNA, 1414 bp, Arabidopsis thaliana
  misc_feature (1)..(1414): Ceres Seq. ID no. 13618992
  misc_feature: MA Experiment ID: 108434 Result: Up-regulated in Transcription
  misc_feature: MA Experiment 108434 PARAMETER Experiment Name: At_Root_Tips_cDNA_P Parameter: Tissue Value: Root Tips
  misc_feature: MA Experiment ID: 108573 Result: Up-regulated in Transcription
  misc_feature: MA Experiment 108573 PARAMETER Experiment Name: At_Drought_cDNA_P Parameter: Timepoint (hr) Value: 6
  misc_feature: MA Experiment 108573 PARAMETER Experiment Name: At_Drought_cDNA_P Parameter: Tissue Value: Aerial
  misc_feature: MA Experiment 108573 PARAMETER Experiment Name: At_Drought_cDNA_P Parameter: Treatment Value: Drought vs. No Drought
  misc_feature: MA Experiment ID: 108595 Result: Down-regulated in Transcription
  misc_feature: MA Experiment 108595 PARAMETER Experiment Name: At_Ler-pi_Ovule_cDNA_P Parameter: Plant Line Value: null
  misc_feature: MA Experiment ID: 20000179 Result: Up-regulated in Transcription
  misc_feature: MA Experiment 20000179 PARAMETER Experiment Name: At_Germinating_Seeds_P Parameter: Age (hr) Value: 6 vs. 0
  misc_feature: MA Experiment 20000179 PARAMETER Experiment Name: At_Germinating_Seeds_P Parameter: Tissue Value: Germinating Seeds
  misc_feature: MA Experiment ID: 20000184 Result: Up-regulated in Transcription
  misc_feature: MA Experiment 20000184 PARAMETER Experiment Name: At_Shoots__P Parameter: Age (day) Value: 7
  misc_feature: MA Experiment 20000184 PARAMETER Experiment Name: At_Shoots__P Parameter: Tissue Value: Shoots vs. Whole Plant
  misc_feature: MA Experiment ID: 20000185 Result: Up-regulated in Transcription
  misc_feature: MA Experiment 20000185 PARAMETER Experiment Name: At_Roots__P Parameter: Age (day) Value: 7 vs. 21
  misc_feature: MA Experiment 20000185 PARAMETER Experiment Name: At_Roots__P Parameter: Organism Value: A. thaliana
  misc_feature: MA Experiment 20000185 PARAMETER Experiment Name: At_Roots__P Parameter: Tissue Value: Roots vs. Whole Plant
  misc_feature: MA Experiment ID: 20000264 Result: Up-regulated in Transcription
  misc_feature: MA Experiment 20000264 PARAMETER Experiment Name: At_Open_Flower_P Parameter: Age (day) Value: 21
  misc_feature: MA Experiment 20000264 PARAMETER Experiment Name: At_Open_Flower_P Parameter: Plant Line Value: WS
  misc_feature: MA Experiment 20000264 PARAMETER Experiment Name: At_Open_Flower_P Parameter: Tissue Value: Open Flower vs. Whole Plant
  misc_feature: MA Experiment ID: 20000286 Result: Up-regulated in Transcription
  misc_feature: MA Experiment 20000286 PARAMETER Experiment Name: At_Open_Flower_P Parameter: Age (day) Value: 21
  misc_feature: MA Experiment 20000286 PARAMETER Experiment Name: At_Open_Flower_P Parameter: Plant Line Value: WS
  misc_feature: MA Experiment 20000286 PARAMETER Experiment Name: At_Open_Flower_P Parameter: Tissue Value: Half Open vs. Whole Plant
  misc_feature: MA Experiment ID: 20000439 Result: Up-regulated in Transcription
  misc_feature: MA Experiment 20000439 PARAMETER Experiment Name: At_Roots__P Parameter: Age (day) Value: 14 vs. 21
  misc_feature: MA Experiment 20000439 PARAMETER Experiment Name: At_Roots__P Parameter: Organism Value: A. thaliana
  misc_feature: MA Experiment 20000439 PARAMETER Experiment Name: At_Roots__P Parameter: Tissue Value: Roots vs. Whole Plant
  misc_feature: MA Experiment ID: 20000794 Result: Up-regulated in Transcription
  misc_feature: MA Experiment 20000794 PARAMETER Experiment Name: At_Petals_P Parameter: Age (day) Value: 23-25 days
  misc_feature: MA Experiment 20000794 PARAMETER Experiment Name: At_Petals_P Parameter: Plant Line Value: WS
  misc_feature: MA Experiment 20000794 PARAMETER Experiment Name: At_Petals_P Parameter: Tissue Value: Petals vs. Whole plant
  misc_feature: MA Experiment ID: 20001451 Result: Down-regulated in Transcription
  misc_feature: MA Experiment 20001451 PARAMETER Experiment Name: At_Far-red-induction_P Parameter: Age (day) Value: 7
  misc_feature: MA Experiment 20001451 PARAMETER Experiment Name: At_Far-red-induction_P Parameter: Light Value: Far-red vs. White
  misc_feature: MA Experiment 20001451 PARAMETER Experiment Name: At_Far-red-induction_P Parameter: Organism Value: A. thaliana
  misc_feature: MA Experiment 20001451 PARAMETER Experiment Name: At_Far-red-induction_P Parameter: Plant Line Value: Columbia
  misc_feature: MA Experiment 20001451 PARAMETER Experiment Name: At_Far-red-induction_P Parameter: Timepoint (hr) Value: 24
  misc_feature: MA Experiment 20001451 PARAMETER Experiment Name: At_Far-red-induction_P Parameter: Tissue Value: Whole Plant
gccgctgtgtcatcgtggaactcccattttctctcttttacttgttcgttcccaaactcttctccctcgatcgtctccgtcgccgatctcgtttcttcattttccgcgtgttgattggtacaaaggtttaatcaaatggttggaggaggagttatccagcaaattcttaggaggaagcttcactcccaatcacttgcaactccggttttgtcttggttttcttcgaagaaagctcatgaggatgctggttcttctggtgtaagagcacttgccttgttgggtgctggtgttacaggactgttgagtttttctacagtagcatctgctgatgaggctgaacatggattggagagtccagagtacccttggcctcatgatggcattcttagctcatatgaccatgcttcgatccgtcgtgggcatcaagtttatcagcaagtctgtgcatcatgccattcaatgtctctgatctcataccgagacttggtgggtgtcgcctacacagaggaagaggcaaaggcaatggcagctgaaatcgaggtagtagatggacctaatgatgagggtgagatgttcacccgccctggtaaactcagtgaccggtttcctcagccatatgcaaatgaatcagctgcaaggtttgctaatggtggagcgtatcctcctgatctaagtcttataactaaggcacgtcacaatggtccaaactatgtctttgcgcttctgactggttaccgtgatccccctgctggcatatcgattagagaggggttacactacaatccttatttccctgggggagcaattgctatgccgaaaatgctcaatgatgaagctgttgagtatgaagatggtgtccccgccacagaggcacagatgggtaaagatattgtatcattcttggcctgggcagctgaaccagaaatggaagagaggaaactgatgggtttcaaatggatattcctactctctctcgctcttctccaagctgcttactacaggcgactaaaatggtcggttctcaagtcccgcaagctggttcttgacgtggttaactaaagcgccgctgaaaagcttttgcattggcctggccacacacagtcgtattttcaacaaaggatgttaaatagagaagagcctttctctgggtaataacgtatcatcatttttatgtgtcataaaaatctttgatgagaccagttctcacctgaaggtgaaaagacctcatcgttcttctttttccttcgattattactagagagttttatgaggataatcacgaaaacttgtttttttcgcctcataataatcacacatgattttgagattatatcatttgttatgtttttcctcttgtctcaataaaaaataactttgtactctgattttgttgtctattttcggcatttcttgc

SEQ ID NO: 106201 - protein, 307 aa, Arabidopsis thaliana
  peptide (1)..(307): Ceres Seq. ID no. 13618993
  misc_feature (72)..(297): Pfam Name: Cytochrome C1 family Pfam Description: Cytochrome C1 family
  misc_feature (1)..(307): Homolog of NCBI NO: 15232125 NR Description: cytochrome c -related [Arabidopsis thaliana]
  misc_feature (1)..(307): Homolog of NCBI NO: 21593678 NR Description: cytochrome c, putative [Arabidopsis thaliana]
  misc_feature (1)..(307): Homolog of NCBI NO: 15809956 NR Description: AT3g27240/K17E12_6 [Arabidopsis thaliana]
  misc_feature (1)..(307): Homolog of NCBI NO: 15237497 NR Description: cytochrome c1 precursor [Arabidopsis thaliana]
  misc_feature (1)..(307): Homolog of NCBI NO: 15215624 NR Description: AT5g40810/MHK7_4 [Arabidopsis thaliana]
  misc_feature (37)..(307): Homolog of NCBI NO: 82263 NR Description: ubiquinol-cytochrome-c reductase (EC 1.10.2.2)
  misc_feature (37)..(307): Homolog of NCBI NO: 7547401 NR Description: cytochrome c1 precursor [Solanum tuberosum]
  misc_feature (1)..(307): Homolog of NCBI NO: 34907202 NR Description: putative cytochrome c1 precursor [Oryza sativa
  misc_feature (37)..(307): Homolog of NCBI NO: 117765 NR Description: Cytochrome c1, heme protein, mitochondrial (Clone PC13III) >gi|21439|emb|CAA44055.1| cytochrome c1 [Solanum
  misc_feature (48)..(307): Homolog of NCBI NO: 82264 NR Description: ubiquinol-cytochrome-c reductase (EC 1.10.2.2)
MVGGGVIQQILRRKLHSQSLATPVLSWFSSKKAHEDAGSSGVRALALLGAGVTGLLSFSTVASADEAEHGLESPEYPWPHDGILSSYDHASIRRGHQVYQQVCASCHSMSLISYRDLVGVAYTEEEAKAMAAEIEVVDGPNDEGEMFTRPGKLSDRFPQPYANESAARFANGGAYPPDLSLITKARHNGPNYVFALLTGYRDPPAGISIREGLHYNPYFPGGAIAMPKMLNDEAVEYEDGVPATEAQMGKDIVSFLAWAAEPEMEERKLMGFKWIFLLSLALLQAAYYRRLKWSVLKSRKLVLDVVN

SEQ ID NO: 106202 - protein, 199 aa, Arabidopsis thaliana
  peptide (1)..(199): Ceres Seq. ID no. 13618994
  misc_feature (1)..(189): Pfam Name: Cytochrome C1 family Pfam Description: Cytochrome C1 family
  misc_feature (1)..(199): Homolog of NCBI NO: 15232125 NR Description: cytochrome c -related [Arabidopsis thaliana]
  misc_feature (1)..(199): Homolog of NCBI NO: 21593678 NR Description: cytochrome c, putative [Arabidopsis thaliana]
  misc_feature (1)..(199): Homolog of NCBI NO: 15809956 NR Description: AT3g27240/K17E12_6 [Arabidopsis thaliana]
  misc_feature (1)..(199): Homolog of NCBI NO: 15237497 NR Description: cytochrome c1 precursor [Arabidopsis thaliana]
  misc_feature (1)..(199): Homolog of NCBI NO: 15215624 NR Description: AT5g40810/MHK7_4 [Arabidopsis thaliana]
  misc_feature (1)..(199): Homolog of NCBI NO: 82263 NR Description: ubiquinol-cytochrome-c reductase (EC 1.10.2.2)
  misc_feature (1)..(199): Homolog of NCBI NO: 7547401 NR Description: cytochrome c1 precursor [Solanum tuberosum]
  misc_feature (1)..(199): Homolog of NCBI NO: 34907202 NR Description: putative cytochrome c1 precursor [Oryza sativa
  misc_feature (1)..(199): Homolog of NCBI NO: 117765 NR Description: Cytochrome c1, heme protein, mitochondrial (Clone PC13III) >gi|21439|emb|CAA44055.1| cytochrome c1 [Solanum
  misc_feature (1)..(199): Homolog of NCBI NO: 82264 NR Description: ubiquinol-cytochrome-c reductase (EC 1.10.2.2)
MSLISYRDLVGVAYTEEEAKAMAAEIEVVDGPNDEGEMFTRPGKLSDRFPQPYANESAARFANGGAYPPDLSLITKARHNGPNYVFALLTGYRDPPAGISIREGLHYNPYFPGGAIAMPKMLNDEAVEYEDGVPATEAQMGKDIVSFLAWAAEPEMEERKLMGFKWIFLLSLALLQAAYYRRLKWSVLKSRKLVLDVVN

SEQ ID NO: 106203 - protein, 178 aa, Arabidopsis thaliana; identical to SEQ ID NO: 37471
  peptide (1)..(178): Ceres Seq. ID no. 13618995
  misc_feature (1)..(168): Pfam Name: Cytochrome C1 family Pfam Description: Cytochrome C1 family
  misc_feature (1)..(178): Homolog of NCBI NO: 15232125 NR Description: cytochrome c -related [Arabidopsis thaliana]
  misc_feature (1)..(178): Homolog of NCBI NO: 21593678 NR Description: cytochrome c, putative [Arabidopsis thaliana]
  misc_feature (1)..(178): Homolog of NCBI NO: 15809956 NR Description: AT3g27240/K17E12_6 [Arabidopsis thaliana]
  misc_feature (1)..(178): Homolog of NCBI NO: 15237497 NR Description: cytochrome c1 precursor [Arabidopsis thaliana]
  misc_feature (1)..(178): Homolog of NCBI NO: 15215624 NR Description: AT5g40810/MHK7_4 [Arabidopsis thaliana]
  misc_feature (1)..(178): Homolog of NCBI NO: 82263 NR Description: ubiquinol-cytochrome-c reductase (EC 1.10.2.2)
  misc_feature (1)..(178): Homolog of NCBI NO: 7547401 NR Description: cytochrome c1 precursor [Solanum tuberosum]
  misc_feature (1)..(178): Homolog of NCBI NO: 34907202 NR Description: putative cytochrome c1 precursor [Oryza sativa
  misc_feature (1)..(178): Homolog of NCBI NO: 117765 NR Description: Cytochrome c1, heme protein, mitochondrial (Clone PC13III) >gi|21439|emb|CAA44055.1| cytochrome c1 [Solanum
  misc_feature (1)..(178): Homolog of NCBI NO: 82264 NR Description: ubiquinol-cytochrome-c reductase (EC 1.10.2.2)

SEQ ID NO: 106204 - DNA, 1182 bp, Arabidopsis thaliana
  misc_feature (1)..(1182): Ceres Seq. ID no. 13618996
  misc_feature: MA Experiment ID: 108434 Result: Up-regulated in Transcription
  misc_feature: MA Experiment 108434 PARAMETER Experiment Name: At_Root_Tips_cDNA_P Parameter: Tissue Value: Root Tips
  misc_feature: MA Experiment ID: 108461 Result: Down-regulated in Transcription
  misc_feature: MA Experiment 108461 PARAMETER Experiment Name: At_Germinating_Seeds_cDNA_P Parameter: Age (day) Value: 1 vs. 0
  misc_feature: MA Experiment 108461 PARAMETER Experiment Name: At_Germinating_Seeds_cDNA_P Parameter: Tissue Value: Germinating Seeds
  misc_feature: MA Experiment ID: 108462 Result: Down-regulated in Transcription
  misc_feature: MA Experiment 108462 PARAMETER Experiment Name: At_Germinating_Seeds_cDNA_P Parameter: Age (day) Value: 2 vs. 0
  misc_feature: MA Experiment 108462 PARAMETER Experiment Name: At_Germinating_Seeds_cDNA_P Parameter: Tissue Value: Germinating Seeds
  misc_feature: MA Experiment ID: 108463 Result: Down-regulated in Transcription
  misc_feature: MA Experiment 108463 PARAMETER Experiment Name: At_Germinating_Seeds_cDNA_P Parameter: Age (day) Value: 3 vs. 0
  misc_feature: MA Experiment 108463 PARAMETER Experiment Name: At_Germinating_Seeds_cDNA_P Parameter: Tissue Value: Germinating Seeds
  misc_feature: MA Experiment ID: 108464 Result: Down-regulated in Transcription
  misc_feature: MA Experiment 108464 PARAMETER Experiment Name: At_Germinating_Seeds_cDNA_P Parameter: Age (day) Value: 4 vs. 0
  misc_feature: MA Experiment 108464 PARAMETER Experiment Name: At_Germinating_Seeds_cDNA_P Parameter: Tissue Value: Germinating Seeds
  misc_feature: MA Experiment ID: 20000090 Result: Up-regulated in Transcription
  misc_feature: MA Experiment ID: 20000111 Result: Up-regulated in Transcription
  misc_feature: MA Experiment 20000111 PARAMETER Experiment Name: At_42deg_Heat_cDNA_P Parameter: Temperature (deg C) Value: 42 vs. 22
  misc_feature: MA Experiment 20000111 PARAMETER Experiment Name: At_42deg_Heat_cDNA_P Parameter: Timepoint (hr) Value: 6
  misc_feature: MA Experiment 20000111 PARAMETER Experiment Name: At_42deg_Heat_cDNA_P Parameter: Tissue Value: Aerial
  misc_feature: MA Experiment ID: 20000112 Result: Up-regulated in Transcription
  misc_feature: MA Experiment 20000112 PARAMETER Experiment Name: At_42deg_Heat_cDNA_P Parameter: Temperature (deg C) Value: 42 vs. 22
  misc_feature: MA Experiment 20000112 PARAMETER Experiment Name: At_42deg_Heat_cDNA_P Parameter: Timepoint (hr) Value: 2
  misc_feature: MA Experiment 20000112 PARAMETER Experiment Name: At_42deg_Heat_cDNA_P Parameter: Tissue Value: Aerial
  misc_feature: MA Experiment ID: 20000113 Result: Up-regulated in Transcription
  misc_feature: MA Experiment 20000113 PARAMETER Experiment Name: At_42deg_Heat_cDNA_P Parameter: Temperature (deg C) Value: 42 vs. 22
  misc_feature: MA Experiment 20000113 PARAMETER Experiment Name: At_42deg_Heat_cDNA_P Parameter: Timepoint (hr) Value: 8
  misc_feature: MA Experiment 20000113 PARAMETER Experiment Name: At_42deg_Heat_cDNA_P Parameter: Tissue Value: Aerial
  misc_feature: MA Experiment ID: 20000173 Result: Up-regulated in Transcription
  misc_feature: MA Experiment 20000173 PARAMETER Experiment Name: At_42deg_Heat_P Parameter: Age (day) Value: 14
  misc_feature: MA Experiment 20000173 PARAMETER Experiment Name: At_42deg_Heat_P Parameter: Organism Value: A. thaliana
  misc_feature: MA Experiment 20000173 PARAMETER Experiment Name: At_42deg_Heat_P Parameter: Plant Line Value: WS
  misc_feature: MA Experiment 20000173 PARAMETER Experiment Name: At_42deg_Heat_P Parameter: Temperature (deg C) Value: 42 vs. 22
  misc_feature: MA Experiment 20000173 PARAMETER Experiment Name: At_42deg_Heat_P Parameter: Timepoint (hr) Value: 6
  misc_feature: MA Experiment 20000173 PARAMETER Experiment Name: At_42deg_Heat_P Parameter: Tissue Value: Aerial
  misc_feature: MA Experiment ID: 20000180 Result: Down-regulated in Transcription
  misc_feature: MA Experiment 20000180 PARAMETER Experiment Name: At_Germinating_Seeds_P Parameter: Age (hr) Value: 24 vs. 0
  misc_feature: MA Experiment 20000180 PARAMETER Experiment Name: At_Germinating_Seeds_P Parameter: Tissue Value: Germinating Seeds
  misc_feature: MA Experiment ID: 20000227 Result: Up-regulated in Transcription
  misc_feature: MA Experiment 20000227 PARAMETER Experiment Name: At_Root-Tips-vs-Tops_P Parameter: Tissue Value: Root Tips vs. Root Tops
  misc_feature: MA Experiment ID: 20000794 Result: Down-regulated in Transcription
  misc_feature: MA Experiment 20000794 PARAMETER Experiment Name: At_Petals_P Parameter: Age (day) Value: 23-25 days
  misc_feature: MA Experiment 20000794 PARAMETER Experiment Name: At_Petals_P Parameter: Plant Line Value: WS
  misc_feature: MA Experiment 20000794 PARAMETER Experiment Name: At_Petals_P Parameter: Tissue Value: Petals vs. Whole plant
  misc_feature: MA Experiment ID: 20001247 Result: Down-regulated in Transcription
  misc_feature: MA Experiment 20001247 PARAMETER Experiment Name: At_Far-red-induction_P Parameter: Age (day) Value: 7
  misc_feature: MA Experiment 20001247 PARAMETER Experiment Name: At_Far-red-induction_P Parameter: Light Value: Far-red vs. White
  misc_feature: MA Experiment 20001247 PARAMETER Experiment Name: At_Far-red-induction_P Parameter: Organism Value: A. thaliana
  misc_feature: MA Experiment 20001247 PARAMETER Experiment Name: At_Far-red-induction_P Parameter: Plant Line Value: Columbia
  misc_feature: MA Experiment 20001247 PARAMETER Experiment Name: At_Far-red-induction_P Parameter: Timepoint (hr) Value: 1
  misc_feature: MA Experiment 20001247 PARAMETER Experiment Name: At_Far-red-induction_P Parameter: Tissue Value: Whole Plant
  misc_feature: MA Experiment ID: 20001557 Result: Up-regulated in Transcription
  misc_feature: MA Experiment 20001557 PARAMETER Experiment Name: At_Drought_Soil_Dry_P Parameter: Age (day) Value: 27
  misc_feature: MA Experiment 20001557 PARAMETER Experiment Name: At_Drought_Soil_Dry_P Parameter: Organism Value: A. thaliana
  misc_feature: MA Experiment 20001557 PARAMETER Experiment Name: At_Drought_Soil_Dry_P Parameter: Plant Line Value: WS
  misc_feature: MA Experiment 20001557 PARAMETER Experiment Name: At_Drought_Soil_Dry_P Parameter: Post Timepoint (hr) Value: 3
  misc_feature: MA Experiment 20001557 PARAMETER Experiment Name: At_Drought_Soil_Dry_P Parameter: Post-Treatment Value: Re-Water vs. No Drought
  misc_feature: MA Experiment 20001557 PARAMETER Experiment Name: At_Drought_Soil_Dry_P Parameter: Timepoint (day) Value: 13
  misc_feature: MA Experiment 20001557 PARAMETER Experiment Name: At_Drought_Soil_Dry_P Parameter: Treatment Value: Drought vs. No Drought
  misc_feature: MA Experiment ID: 20001558 Result: Up-regulated in Transcription
  misc_feature: MA Experiment 20001558 PARAMETER Experiment Name: At_Drought_Soil_Dry_P Parameter: Age (day) Value: 27
  misc_feature: MA Experiment 20001558 PARAMETER Experiment Name: At_Drought_Soil_Dry_P Parameter: Organism Value: A. thaliana
  misc_feature: MA Experiment 20001558 PARAMETER Experiment Name: At_Drought_Soil_Dry_P Parameter: Plant Line Value: WS
  misc_feature: MA Experiment 20001558 PARAMETER Experiment Name: At_Drought_Soil_Dry_P Parameter: Post Timepoint (hr) Value: 6
  misc_feature: MA Experiment 20001558 PARAMETER Experiment Name: At_Drought_Soil_Dry_P Parameter: Post-Treatment Value: Re-Water vs. No Drought
  misc_feature: MA Experiment 20001558 PARAMETER Experiment Name: At_Drought_Soil_Dry_P Parameter: Timepoint (day) Value: 13
  misc_feature: MA Experiment 20001558 PARAMETER Experiment Name: At_Drought_Soil_Dry_P Parameter: Treatment Value: Drought vs. No Drought
  misc_feature: MA Experiment ID: 20001560 Result: Up-regulated in Transcription
  misc_feature: MA Experiment 20001560 PARAMETER Experiment Name: At_Drought_Soil_Dry_P Parameter: Age (day) Value: 28
  misc_feature: MA Experiment 20001560 PARAMETER Experiment Name: At_Drought_Soil_Dry_P Parameter: Organism Value: A. thaliana
  misc_feature: MA Experiment 20001560 PARAMETER Experiment Name: At_Drought_Soil_Dry_P Parameter: Plant Line Value: WS
  misc_feature: MA Experiment 20001560 PARAMETER Experiment Name: At_Drought_Soil_Dry_P Parameter: Post Timepoint (hr) Value: None
  misc_feature: MA Experiment 20001560 PARAMETER Experiment Name: At_Drought_Soil_Dry_P Parameter: Post-Treatment Value: None
  misc_feature: MA Experiment 20001560 PARAMETER Experiment Name: At_Drought_Soil_Dry_P Parameter: Timepoint (day) Value: 14
  misc_feature: MA Experiment 20001560 PARAMETER Experiment Name: At_Drought_Soil_Dry_P Parameter: Treatment Value: Drought vs. No Drought
  misc_feature: MA Experiment ID: 20001757 Result: Up-regulated in Transcription
  misc_feature: MA Experiment 20001757 PARAMETER Experiment Name: At_50mM_NH4NO3_L-to-H_P Parameter: Timepoint (hr) Value: 6
  misc_feature: MA Experiment 20001757 PARAMETER Experiment Name: At_50mM_NH4NO3_L-to-H_P Parameter: Tissue Value: Leaf
  misc_feature: MA Experiment 20001757 PARAMETER Experiment Name: At_50mM_NH4NO3_L-to-H_P Parameter: Treatment Value: 50mM NH4NO3 vs 100mM Mannitol
aattctctccttcgaagcttttttcttgtgaggtcagaaaagaaaatgggaagtcaacaagtagcgatttcgtttctgacgaacttggcgaaggcggcgtttgggttaggtgtggcggcgacggcactaaactcgtcgctctacactgttgatggtggcgagagagctgttttgttcgatcgattcaggggagtgttggatcagaccgtcggcgaagggactcatttcttgatcccgtatctccagacgccgcacatatacgatattcgtacgaaacctcacactttctcctccaaatctggtactaaggatcttcagatggttaatctcacccttcgtgttctctttcgccctgaggtttcgcgtctcccgtacattttccaaacattgggtcttgaatacgatgagaaggttcttccatcgattggaaatgaggtcttgaaagctgtggttgctaatttcaatgctgatcagctcctcactgagcgtcctcaagtatcagcacttgttcgtgatgctcttatcaagcgtgccagggaatttaacattgagctcgacgacatagccattactcacttatcgtacggtgctgagttctcgagggcagtggaggcgaagcaagtggctcagcaggaagctgaaaggtcaaagtttgtggtgatgaaggctgatcaagagaggagagctgcggttataagagcagaaggtgagagtgaagctgctcagttgatatcagatgcaacagctaaagcaggaatgggactaattgagcttaggaggattgaagcttcaagggaggttgcggctactctggctaggtctccgaacgtggcttacttacctggtggacaaagcatgctctttaatctgaaccctggtcgttgagctataacattggtgggaagaggagcttcagtggagacaaaacgacggagctgtgaagtttattaacgttgatgctcttttatttctgatgaacacgatgtgaaaaaagataattgttttgagccgttctatcttttctgactctagaagtaaagactatgccattgttgtcgaaacccgatcattccaatgaaaggcttcaccaaaaaatctaccataacaatagtcgaaatttgtattgtcaaaaacaatttccaacaccaaggttgttgtacttgtattatttaaaatataaat

SEQ ID NO: 106205 - protein, 294 aa, Arabidopsis thaliana
  peptide (1)..(294): Ceres Seq. ID no. 13618997
  misc_feature (16)..(294): Homolog of NCBI NO: 15232129 NR Description: prohibitin -related [Arabidopsis thaliana]
  misc_feature (16)..(294): Homolog of NCBI NO: 27765032 NR Description: At3g27280 [Arabidopsis thaliana]
  misc_feature (16)..(294): Homolog of NCBI NO: 21592895 NR Description: prohibitin, putative [Arabidopsis thaliana]
  misc_feature (16)..(291): Homolog of NCBI NO: 15237488 NR Description: prohibitin (gb|AAC49691.1) [Arabidopsis thaliana] prohibitin [Arabidopsis thaliana] >gi|4097692|gb|AAD00157.1|
  misc_feature (16)..(294): Homolog of NCBI NO: 7489185 NR Description: prohibitin - common tobacco
  misc_feature (16)..(291): Homolog of NCBI NO: 7716458 NR Description: prohibitin [Zea mays]
  misc_feature (17)..(294): Homolog of NCBI NO: 7716460 NR Description: prohibitin [Zea mays]
  misc_feature (16)..(291): Homolog of NCBI NO: 38567717 NR Description: B1358B12.15 [Oryza sativa (japonica
  misc_feature (21)..(284): Homolog of NCBI NO: 40746306 NR Description: conserved hypothetical protein [Aspergillus
  misc_feature (26)..(294): Homolog of NCBI NO: 32421789 NR Description: hypothetical protein [Neurospora crassa] hypothetical protein [Neurospora crassa]
NSLLRSFFLVRSEKKMGSQQVAISFLTNLAKAAFGLGVAATALNSSLYTVDGGERAVLFDRFRGVLDQTVGEGTHFLIPYLQTPHIYDIRTKPHTFSSKSGTKDLQMVNLTLRVLFRPEVSRLPYIFQTLGLEYDEKVLPSIGNEVLKAVVANFNADQLLTERPQVSALVRDALIKRAREFNIELDDIAITHLSYGAEFSRAVEAKQVAQQEAERSKFVVMKADQERRAAVIRAEGESEAAQLISDATAKAGMGLIELRRIEASREVAATLARSPNVAYLPGGQSMLFNLNPGR

SEQ ID NO: 106206 - protein, 279 aa, Arabidopsis thaliana
  peptide (1)..(279): Ceres Seq. ID no. 13618998
  misc_feature (1)..(279): Homolog of NCBI NO: 15232129 NR Description: prohibitin -related [Arabidopsis thaliana]
  misc_feature (1)..(279): Homolog of NCBI NO: 27765032 NR Description: At3g27280 [Arabidopsis thaliana]
  misc_feature (1)..(279): Homolog of NCBI NO: 21592895 NR Description: prohibitin, putative [Arabidopsis thaliana]
  misc_feature (1)..(276): Homolog of NCBI NO: 15237488 NR Description: prohibitin (gb|AAC49691.1) [Arabidopsis thaliana] prohibitin [Arabidopsis thaliana] >gi|4097692|gb|AAD00157.1|
  misc_feature (1)..(279): Homolog of NCBI NO: 7489185 NR Description: prohibitin - common tobacco
  misc_feature (1)..(276): Homolog of NCBI NO: 7716458 NR Description: prohibitin [Zea mays]
  misc_feature (2)..(279): Homolog of NCBI NO: 7716460 NR Description: prohibitin [Zea mays]
  misc_feature (1)..(276): Homolog of NCBI NO: 38567717 NR Description: B1358B12.15 [Oryza sativa (japonica
  misc_feature (6)..(269): Homolog of NCBI NO: 40746306 NR Description: conserved hypothetical protein [Aspergillus
  misc_feature (11)..(279): Homolog of NCBI NO: 32421789 NR Description: hypothetical protein [Neurospora crassa] hypothetical protein [Neurospora crassa]
MGSQQVAISFLTNLAKAAFGLGVAATALNSSLYTVDGGERAVLFDRFRGVLDQTVGEGTHFLIPYLQTPHIYDIRTKPHTFSSKSGTKDLQMVNLTLRVLFRPEVSRLPYIFQTLGLEYDEKVLPSIGNEVLKAVVANFNADQLLTERPQVSALVRDALIKRAREFNIELDDIAITHLSYGAEFSRAVEAKQVAQQEAERSKFVVMKADQERRAAVIRAEGESEAAQLISDATAKAGMGLIELRRIEASREVAATLARSPNVAYLPGGQSMLFNLNPGR

SEQ ID NO: 106207 - protein, 188 aa, Arabidopsis thaliana
  peptide (1)..(188): Ceres Seq. ID no. 13618999
  misc_feature (1)..(188): Homolog of NCBI NO: 15232129 NR Description: prohibitin -related [Arabidopsis thaliana]
  misc_feature (1)..(188): Homolog of NCBI NO: 27765032 NR Description: At3g27280 [Arabidopsis thaliana]
  misc_feature (1)..(188): Homolog of NCBI NO: 21592895 NR Description: prohibitin, putative [Arabidopsis thaliana]
  misc_feature (1)..(185): Homolog of NCBI NO: 15237488 NR Description: prohibitin (gb|AAC49691.1) [Arabidopsis thaliana] prohibitin [Arabidopsis thaliana] >gi|4097692|gb|AAD00157.1|
  misc_feature (1)..(188): Homolog of NCBI NO: 7489185 NR Description: prohibitin - common tobacco
  misc_feature (1)..(185): Homolog of NCBI NO: 7716458 NR Description: prohibitin [Zea mays]
  misc_feature (1)..(188): Homolog of NCBI NO: 7716460 NR Description: prohibitin [Zea mays]
  misc_feature (1)..(185): Homolog of NCBI NO: 38567717 NR Description: B1358B12.15 [Oryza sativa (japonica
  misc_feature (1)..(178): Homolog of NCBI NO: 40746306 NR Description: conserved hypothetical protein [Aspergillus
  misc_feature (1)..(188): Homolog of NCBI NO: 32421789 NR Description: hypothetical protein [Neurospora crassa] hypothetical protein [Neurospora crassa]
MVNLTLRVLFRPEVSRLPYIFQTLGLEYDEKVLPSIGNEVLKAVVANFNADQLLTERPQVSALVRDALIKRAREFNIELDDIAITHLSYGAEFSRAVEAKQVAQQEAERSKFVVMKADQERRAAVIRAEGESEAAQLISDATAKAGMGLIELRRIEASREVAATLARSPNVAYLPGGQSMLFNLNPGR

SEQ ID NO: 106208 - DNA, 1175 bp, Arabidopsis thaliana
  misc_feature (1)..(1175): Ceres Seq. ID no. 13619003
  misc_feature: MA Experiment ID: 108488 Result: Down-regulated in Transcription
  misc_feature: MA Experiment ID: 108561 Result: Up-regulated in Transcription
  misc_feature: MA Experiment 108561 PARAMETER Experiment Name: At_100uM_ABA_cDNA_P Parameter: Timepoint (hr) Value: 6
  misc_feature: MA Experiment 108561 PARAMETER Experiment Name: At_100uM_ABA_cDNA_P Parameter: Tissue Value: Aerial
  misc_feature: MA Experiment 108561 PARAMETER Experiment Name: At_100uM_ABA_cDNA_P Parameter: Treatment Value: 100uM ABA vs. No Treatment
  misc_feature: MA Experiment ID: 108573 Result: Up-regulated in Transcription
  misc_feature: MA Experiment 108573 PARAMETER Experiment Name: At_Drought_cDNA_P Parameter: Timepoint (hr) Value: 6
  misc_feature: MA Experiment 108573 PARAMETER Experiment Name: At_Drought_cDNA_P Parameter: Tissue Value: Aerial
  misc_feature: MA Experiment 108573 PARAMETER Experiment Name: At_Drought_cDNA_P Parameter: Treatment Value: Drought vs. No Drought
  misc_feature: MA Experiment ID: 108585 Result: Up-regulated in Transcription
  misc_feature: MA Experiment 108585 PARAMETER Experiment Name: At_5mM_NaNP_cDNA_P Parameter: Timepoint (hr) Value: 6
  misc_feature: MA Experiment 108585 PARAMETER Experiment Name: At_5mM_NaNP_cDNA_P Parameter: Tissue Value: Aerial
  misc_feature: MA Experiment 108585 PARAMETER Experiment Name: At_5mM_NaNP_cDNA_P Parameter: Treatment Value: null
  misc_feature: MA Experiment ID: 108609 Result: Up-regulated in Transcription
  misc_feature: MA Experiment 108609 PARAMETER Experiment Name: At_100uM_ABA_cDNA_P Parameter: Timepoint (hr) Value: 24
  misc_feature: MA Experiment 108609 PARAMETER Experiment Name: At_100uM_ABA_cDNA_P Parameter: Tissue Value: Aerial
  misc_feature: MA Experiment 108609 PARAMETER Experiment Name: At_100uM_ABA_cDNA_P Parameter: Treatment Value: 100uM ABA vs. No Treatment
  misc_feature: MA Experiment ID: 20000069 Result: Up-regulated in Transcription
  misc_feature: MA Experiment 20000069 PARAMETER Experiment Name: At_100uM_ABA_Mutants_cDNA_P Parameter: Plant Line Value: CS23
  misc_feature: MA Experiment 20000069 PARAMETER Experiment Name: At_100uM_ABA_Mutants_cDNA_P Parameter: Timepoint (hr) Value: 6
  misc_feature: MA Experiment 20000069 PARAMETER Experiment Name: At_100uM_ABA_Mutants_cDNA_P Parameter: Tissue Value: Aerial
  misc_feature: MA Experiment 20000069 PARAMETER Experiment Name: At_100uM_ABA_Mutants_cDNA_P Parameter: Treatment Value: 100uM ABA vs. No Treatment
  misc_feature: MA Experiment ID: 20000087 Result: Up-regulated in Transcription
  misc_feature: MA Experiment 20000087 PARAMETER Experiment Name: At_100uM_ABA_Mutants_cDNA_P Parameter: Plant Line Value: WS
  misc_feature: MA Experiment 20000087 PARAMETER Experiment Name: At_100uM_ABA_Mutants_cDNA_P Parameter: Timepoint (hr) Value: 6
  misc_feature: MA Experiment 20000087 PARAMETER Experiment Name: At_100uM_ABA_Mutants_cDNA_P Parameter: Tissue Value: Aerial
  misc_feature: MA Experiment 20000087 PARAMETER Experiment Name: At_100uM_ABA_Mutants_cDNA_P Parameter: Treatment Value: 100uM ABA vs. No Treatment
  misc_feature: MA Experiment ID: 20000112 Result: Up-regulated in Transcription
  misc_feature: MA Experiment 20000112 PARAMETER Experiment Name: At_42deg_Heat_cDNA_P Parameter: Temperature (deg C) Value: 42 vs. 22
  misc_feature: MA Experiment 20000112 PARAMETER Experiment Name: At_42deg_Heat_cDNA_P Parameter: Timepoint (hr) Value: 2
  misc_feature: MA Experiment 20000112 PARAMETER Experiment Name: At_42deg_Heat_cDNA_P Parameter: Tissue Value: Aerial
  misc_feature: MA Experiment ID: 20000113 Result: Up-regulated in Transcription
  misc_feature: MA Experiment 20000113 PARAMETER Experiment Name: At_42deg_Heat_cDNA_P Parameter: Temperature (deg C) Value: 42 vs. 22
  misc_feature: MA Experiment 20000113 PARAMETER Experiment Name: At_42deg_Heat_cDNA_P Parameter: Timepoint (hr) Value: 8
  misc_feature: MA Experiment 20000113 PARAMETER Experiment Name: At_42deg_Heat_cDNA_P Parameter: Tissue Value: Aerial
  misc_feature: MA Experiment ID: 20000117 Result: Up-regulated in Transcription
  misc_feature: MA Experiment 20000117 PARAMETER Experiment Name: At_100uM_ABA_Mutants_cDNA_P Parameter: Plant Line Value: Columbia
  misc_feature: MA Experiment 20000117 PARAMETER Experiment Name: At_100uM_ABA_Mutants_cDNA_P Parameter: Timepoint (hr) Value: 6
  misc_feature: MA Experiment 20000117 PARAMETER Experiment Name: At_100uM_ABA_Mutants_cDNA_P Parameter: Tissue Value: Aerial
  misc_feature: MA Experiment 20000117 PARAMETER Experiment Name: At_100uM_ABA_Mutants_cDNA_P Parameter: Treatment Value: 100uM ABA vs. No Treatment
  misc_feature: MA Experiment ID: 20000173 Result: Up-regulated in Transcription
  misc_feature: MA Experiment 20000173 PARAMETER Experiment Name: At_42deg_Heat_P Parameter: Age (day) Value: 14
  misc_feature: MA Experiment 20000173 PARAMETER Experiment Name: At_42deg_Heat_P Parameter: Organism Value: A. thaliana
  misc_feature: MA Experiment 20000173 PARAMETER Experiment Name: At_42deg_Heat_P Parameter: Plant Line Value: WS
  misc_feature: MA Experiment 20000173 PARAMETER Experiment Name: At_42deg_Heat_P Parameter: Temperature (deg C) Value: 42 vs. 22
  misc_feature: MA Experiment 20000173 PARAMETER Experiment Name: At_42deg_Heat_P Parameter: Timepoint (hr) Value: 6
  misc_feature: MA Experiment 20000173 PARAMETER Experiment Name: At_42deg_Heat_P Parameter: Tissue Value: Aerial
  misc_feature: MA Experiment ID: 20000185 Result: Up-regulated in Transcription
  misc_feature: MA Experiment 20000185 PARAMETER Experiment Name: At_Roots__P Parameter: Age (day) Value: 7 vs. 21
  misc_feature: MA Experiment 20000185 PARAMETER Experiment Name: At_Roots__P Parameter: Organism Value: A. thaliana
  misc_feature: MA Experiment 20000185 PARAMETER Experiment Name: At_Roots__P Parameter: Tissue Value: Roots vs. Whole Plant
  misc_feature: MA Experiment ID: 20000264 Result: Up-regulated in Transcription
  misc_feature: MA Experiment 20000264 PARAMETER Experiment Name: At_Open_Flower_P Parameter: Age (day) Value: 21
  misc_feature: MA Experiment 20000264 PARAMETER Experiment Name: At_Open_Flower_P Parameter: Plant Line Value: WS
  misc_feature: MA Experiment 20000264 PARAMETER Experiment Name: At_Open_Flower_P Parameter: Tissue Value: Open Flower vs. Whole Plant
  misc_feature: MA Experiment ID: 20000286 Result: Up-regulated in Transcription
  misc_feature: MA Experiment 20000286 PARAMETER Experiment Name: At_Open_Flower_P Parameter: Age (day) Value: 21
  misc_feature: MA Experiment 20000286 PARAMETER Experiment Name: At_Open_Flower_P Parameter: Plant Line Value: WS
  misc_feature: MA Experiment 20000286 PARAMETER Experiment Name: At_Open_Flower_P Parameter: Tissue Value: Half Open vs. Whole Plant
  misc_feature: MA Experiment ID: 20000437 Result: Up-regulated in Transcription
  misc_feature: MA Experiment 20000437 PARAMETER Experiment Name: At_Drought_P Parameter: Age (day) Value: 8
  misc_feature: MA Experiment 20000437 PARAMETER Experiment Name: At_Drought_P Parameter: Organism Value: A. thaliana
  misc_feature: MA Experiment 20000437 PARAMETER Experiment Name: At_Drought_P Parameter: Plant Line Value: WS
  misc_feature: MA Experiment 20000437 PARAMETER Experiment Name: At_Drought_P Parameter: Timepoint (hr) Value: 24
  misc_feature: MA Experiment 20000437 PARAMETER Experiment Name: At_Drought_P Parameter: Tissue Value: Whole Plant
  misc_feature: MA Experiment 20000437 PARAMETER Experiment Name: At_Drought_P Parameter: Treatment Value: Drought vs. No Drought
  misc_feature: MA Experiment ID: 20000439 Result: Up-regulated in Transcription
  misc_feature: MA Experiment 20000439 PARAMETER Experiment Name: At_Roots__P Parameter: Age (day) Value: 14 vs. 21
  misc_feature: MA Experiment 20000439 PARAMETER Experiment Name: At_Roots__P Parameter: Organism Value: A. thaliana
  misc_feature: MA Experiment 20000439 PARAMETER Experiment Name: At_Roots__P Parameter: Tissue Value: Roots vs. Whole Plant
  misc_feature: MA Experiment ID: 20000453 Result: Up-regulated in Transcription
  misc_feature: MA Experiment 20000453 PARAMETER Experiment Name: At_100uM_ABA_P Parameter: Age (day) Value: 15
  misc_feature: MA Experiment 20000453 PARAMETER Experiment Name: At_100uM_ABA_P Parameter: Organism Value: A. thaliana
  misc_feature: MA Experiment 20000453 PARAMETER Experiment Name: At_100uM_ABA_P Parameter: Plant Line Value: WS
  misc_feature: MA Experiment 20000453 PARAMETER Experiment Name: At_100uM_ABA_P Parameter: Timepoint (hr) Value: 24
  misc_feature: MA Experiment 20000453 PARAMETER Experiment Name: At_100uM_ABA_P Parameter: Tissue Value: Aerial
  misc_feature: MA Experiment 20000453 PARAMETER Experiment Name: At_100uM_ABA_P Parameter: Treatment Value: 100uM ABA vs. No Treatment
  misc_feature: MA Experiment ID: 20000527 Result: Down-regulated in Transcription
  misc_feature: MA Experiment 20000527 PARAMETER Experiment Name: At_10percent_PEG_P Parameter: Age (day) Value: 20
  misc_feature: MA Experiment 20000527 PARAMETER Experiment Name: At_10percent_PEG_P Parameter: Organism Value: A. thaliana
  misc_feature: MA Experiment 20000527 PARAMETER Experiment Name: At_10percent_PEG_P Parameter: Plant Line Value: WS
  misc_feature: MA Experiment 20000527 PARAMETER Experiment Name: At_10percent_PEG_P Parameter: Timepoint (day) Value: 20
  misc_feature: MA Experiment 20000527 PARAMETER Experiment Name: At_10percent_PEG_P Parameter: Tissue Value: Whole Plant
  misc_feature: MA Experiment 20000527 PARAMETER Experiment Name: At_10percent_PEG_P Parameter: Treatment Value: 10percent PEG vs. No Treatment
  misc_feature: MA Experiment ID: 20000794 Result: Up-regulated in Transcription
  misc_feature: MA Experiment 20000794 PARAMETER Experiment Name: At_Petals_P Parameter: Age (day) Value: 23-25 days
  misc_feature: MA Experiment 20000794 PARAMETER Experiment Name: At_Petals_P Parameter: Plant Line Value: WS
  misc_feature: MA Experiment 20000794 PARAMETER Experiment Name: At_Petals_P Parameter: Tissue Value: Petals vs. Whole plant
  misc_feature: MA Experiment ID: 20001905 Result: Up-regulated in Transcription
  misc_feature: MA Experiment 20001905 PARAMETER Experiment Name: At_Drought_Reproduction_P Parameter: Age (day) Value: 40
  misc_feature: MA Experiment 20001905 PARAMETER Experiment Name: At_Drought_Reproduction_P Parameter: Organism Value: A. thaliana
  misc_feature: MA Experiment 20001905 PARAMETER Experiment Name: At_Drought_Reproduction_P Parameter: Plant Line Value: WS
  misc_feature: MA Experiment 20001905 PARAMETER Experiment Name: At_Drought_Reproduction_P Parameter: Timepoint (day) Value: 10
  misc_feature: MA Experiment 20001905 PARAMETER Experiment Name: At_Drought_Reproduction_P Parameter: Tissue Value: Rosettes
  misc_feature: MA Experiment 20001905 PARAMETER Experiment Name: At_Drought_Reproduction_P Parameter: Treatment Value: Drought vs. No Drought
  misc_feature: MA Experiment ID: 20001908 Result: Up-regulated in Transcription
  misc_feature: MA Experiment 20001908 PARAMETER Experiment Name: At_Drought_Reproduction_P Parameter: Age (day) Value: 40
  misc_feature: MA Experiment 20001908 PARAMETER Experiment Name: At_Drought_Reproduction_P Parameter: Organism Value: A. thaliana
  misc_feature: MA Experiment 20001908 PARAMETER Experiment Name: At_Drought_Reproduction_P Parameter: Plant Line Value: WS
  misc_feature: MA Experiment 20001908 PARAMETER Experiment Name: At_Drought_Reproduction_P Parameter: Timepoint (day) Value: 10
  misc_feature: MA Experiment 20001908 PARAMETER Experiment Name: At_Drought_Reproduction_P Parameter: Tissue Value: Siliques
  misc_feature: MA Experiment 20001908 PARAMETER Experiment Name: At_Drought_Reproduction_P Parameter: Treatment Value: Drought vs. No Drought
aagttattataaattaattatcttctgaaaaatataaatacttgaattaattttttagccattttcagatttctccgaggaaaaaaatggcgtctggtttgatcggaagattggttggaacgaaaccgtcgaaattagccacggcggcgaggttaattccggcgagatggacctctacaggagcggaggcggaaacaaaagcttcctctggcggcggaagaggatcgaacttgaagacttttcagatctatcgatggaatccagataatccagggaagccagagcttcaaaattaccagatcgatctcaaagattgtggtccaatggtattagatgctttgattaagatcaaaaacgaaatggatccatctcttactttccgtagatcatgccgtgaagggatctgtggttcatgtgctatgaacattgatggatgtaacggacttgcttgtttgacaaagattcaagatgaagcatcggagacgacgattacaccgttgcctcatatgtttgtgattaaggatttggttgttgatatgactaatttttataatcagtataagagtattgagccgtggttgaagaggaagactccagcgtctgttcctgctaaggagattttgcagagtaagaaggatagagctaagcttgatgggatgtatgaatgtattctttgtgcttgttgtagcacatcttgtcctagttactggtggaatcctgagtcttaccttggtccagctgctttgctacacgctaataggtggataagcgacagtcgtgatgagtacactaaggaaagacttgaggctattgacgacgagttcaagctttaccgttgccatacaatcttgaattgtgctcgtgcctgtccaaagggtttgaacccaggaaaacagattactcacatcaagcaacttcagcgttgaaacagctaagtttgtgtgcgggatccgttgggaaactcatcagtcttaacgtttgaagctaataatcttcacaaaacctcttcggattttcaattcattcttgtattgttgttgccaaatattagcgccttaaaaaaactcgtttgcaagtcttcccaagtagatgagctttgtggttgtatcttgctgaaaatctcctctttaagtaataaaactcgagtaaacttaaacctcatctacttatcatct

SEQ ID NO: 106209 - protein, 279 aa, Arabidopsis thaliana; identical to SEQ ID NO: 29511
  peptide (1)..(279): Ceres Seq. ID no. 13619004
  misc_feature (63)..(127): Pfam Name: 2Fe-2S iron-sulfur cluster binding domain Pfam Description: 2Fe-2S iron-sulfur cluster binding domain
  misc_feature (1)..(279): Homolog of NCBI NO: 15232149 NR Description: succinate dehydrogenase, iron-sulphur subunit,
  misc_feature (1)..(279): Homolog of NCBI NO: 12049598 NR Description: mitochondrial succinate dehydrogenase
  misc_feature (1)..(279): Homolog of NCBI NO: 21555840 NR Description: succinate dehydrogenase iron-protein subunit,
  misc_feature (1)..(279): Homolog of NCBI NO: 21593098 NR Description: succinate dehydrogenase iron-protein subunit-like
  misc_feature (1)..(279): Homolog of NCBI NO: 15237464 NR Description: succinate dehydrogenase, iron-sulphur subunit,
  misc_feature (1)..(279): Homolog of NCBI NO: 12049600 NR Description: mitochondrial succinate dehydrogenase
  misc_feature (18)..(278): Homolog of NCBI NO: 28611029 NR Description: succinate dehydrogenase [Triticum aestivum]
  misc_feature (18)..(278): Homolog of NCBI NO: 5688947 NR Description: succinate dehydrogenase iron-protein subunit
  misc_feature (1)..(278): Homolog of NCBI NO: 4803711 NR Description: iron sulfur subunit of succinate dehydrogenase
  misc_feature (1)..(277): Homolog of NCBI NO: 3851612 NR Description: succinate dehydrogenase Ip subunit [Gallus gallus]

SEQ ID NO: 106210 - protein, 200 aa, Arabidopsis thaliana; identical to SEQ ID NO: 29512
  peptide (1)..(200): Ceres Seq. ID no. 13619005
  misc_feature (1)..(48): Pfam Name: 2Fe-2S iron-sulfur cluster binding domain Pfam Description: 2Fe-2S iron-sulfur cluster binding domain
  misc_feature (1)..(200): Homolog of NCBI NO: 15232149 NR Description: succinate dehydrogenase, iron-sulphur subunit,
  misc_feature (1)..(200): Homolog of NCBI NO: 12049598 NR Description: mitochondrial succinate dehydrogenase
  misc_feature (1)..(200): Homolog of NCBI NO: 21555840 NR Description: succinate dehydrogenase iron-protein subunit,
  misc_feature (1)..(200): Homolog of NCBI NO: 21593098 NR Description: succinate dehydrogenase iron-protein subunit-like
  misc_feature (1)..(200): Homolog of NCBI NO: 15237464 NR Description: succinate dehydrogenase, iron-sulphur subunit,
  misc_feature (1)..(200): Homolog of NCBI NO: 12049600 NR Description: mitochondrial succinate dehydrogenase
  misc_feature (1)..(199): Homolog of NCBI NO: 28611029 NR Description: succinate dehydrogenase [Triticum aestivum]
  misc_feature (1)..(199): Homolog of NCBI NO: 5688947 NR Description: succinate dehydrogenase iron-protein subunit
  misc_feature (1)..(199): Homolog of NCBI NO: 4803711 NR Description: iron sulfur subunit of succinate dehydrogenase
  misc_feature (1)..(198): Homolog of NCBI NO: 3851612 NR Description: succinate dehydrogenase Ip subunit [Gallus gallus]

SEQ ID NO: 106211 - protein, 188 aa, Arabidopsis thaliana
  peptide (1)..(188): Ceres Seq. ID no. 13619006
  misc_feature (1)..(188): Homolog of NCBI NO: 15232149 NR Description: succinate dehydrogenase, iron-sulphur subunit,
  misc_feature (1)..(188): Homolog of NCBI NO: 12049598 NR Description: mitochondrial succinate dehydrogenase
  misc_feature (1)..(188): Homolog of NCBI NO: 21555840 NR Description: succinate dehydrogenase iron-protein subunit,
  misc_feature (1)..(188): Homolog of NCBI NO: 21593098 NR Description: succinate dehydrogenase iron-protein subunit-like
  misc_feature (1)..(188): Homolog of NCBI NO: 15237464 NR Description: succinate dehydrogenase, iron-sulphur subunit,
  misc_feature (1)..(188): Homolog of NCBI NO: 12049600 NR Description: mitochondrial succinate dehydrogenase
  misc_feature (1)..(187): Homolog of NCBI NO: 28611029 NR Description: succinate dehydrogenase [Triticum aestivum]
  misc_feature (1)..(187): Homolog of NCBI NO: 5688947 NR Description: succinate dehydrogenase iron-protein subunit
  misc_feature (1)..(187): Homolog of NCBI NO: 4803711 NR Description: iron sulfur subunit of succinate dehydrogenase
  misc_feature (1)..(186): Homolog of NCBI NO: 3851612 NR Description: succinate dehydrogenase Ip subunit [Gallus gallus]
MDPSLTFRRSCREGICGSCAMNIDGCNGLACLTKIQDEASETTITPLPHMFVIKDLVVDMTNFYNQYKSIEPWLKRKTPASVPAKEILQSKKDRAKLDGMYECILCACCSTSCPSYWWNPESYLGPAALLHANRWISDSRDEYTKERLEAIDDEFKLYRCHTILNCARACPKGLNPGKQITHIKQLQR

SEQ ID NO: 106212 - DNA, 1123 bp, Arabidopsis thaliana
  misc_feature (1)..(1123): Ceres Seq. ID no. 13619007
  misc_feature: MA Experiment ID: 108434 Result: Up-regulated in Transcription
  misc_feature: MA Experiment 108434 PARAMETER Experiment Name: At_Root_Tips_cDNA_P Parameter: Tissue Value: Root Tips
  misc_feature: MA Experiment ID: 108464 Result: Down-regulated in Transcription
  misc_feature: MA Experiment 108464 PARAMETER Experiment Name: At_Germinating_Seeds_cDNA_P Parameter: Age (day) Value: 4 vs. 0
  misc_feature: MA Experiment 108464 PARAMETER Experiment Name: At_Germinating_Seeds_cDNA_P Parameter: Tissue Value: Germinating Seeds
  misc_feature: MA Experiment ID: 108573 Result: Up-regulated in Transcription
  misc_feature: MA Experiment 108573 PARAMETER Experiment Name: At_Drought_cDNA_P Parameter: Timepoint (hr) Value: 6
  misc_feature: MA Experiment 108573 PARAMETER Experiment Name: At_Drought_cDNA_P Parameter: Tissue Value: Aerial
  misc_feature: MA Experiment 108573 PARAMETER Experiment Name: At_Drought_cDNA_P Parameter: Treatment Value: Drought vs. No Drought
  misc_feature: MA Experiment ID: 108585 Result: Up-regulated in Transcription
  misc_feature: MA Experiment 108585 PARAMETER Experiment Name: At_5mM_NaNP_cDNA_P Parameter: Timepoint (hr) Value: 6
  misc_feature: MA Experiment 108585 PARAMETER Experiment Name: At_5mM_NaNP_cDNA_P Parameter: Tissue Value: Aerial
  misc_feature: MA Experiment 108585 PARAMETER Experiment Name: At_5mM_NaNP_cDNA_P Parameter: Treatment Value: null
  misc_feature: MA Experiment ID: 20000224 Result: Down-regulated in Transcription
tttttgtaacttttgcttcacctctctcttcttctcttgttctattttttttcccgattcaagcaaaattcatcaagacttgtcaatttgaaaaaatgtcgcaatcaaccgtagatgttccgccaaagggtgggtttagcttcgatctgtgtaagagaaatgatatgcttacacaaaagggtcttaaagctccgtcttttttgaagactggaacaaccattgttggtttgattttcaaggatggtgtgatactaggggcagatacccgagcaactgaggggccaattgttgctgataagaactgtgagaagattcactatatggcaccaaacatatattgctgtggtgcaggaactgcggctgatactgaagcagtcactgatatggtcagctcacagctgcgattgcatcgttaccagactggtcgagactctcgggtcattactgctttgacccttctcaaaaaacatcttttcagctaccaaggtcatgtctctgctgctcttgtactcggtggagttgatatcactggtccacatctgcatactatatacccacacggttcaactgacactcttccattcgccacaatgggttcgggttctcttgctgctatgtctgtgtttgaggcaaagtataaagaaggcctaactagggatgaaggaattaagctggtcgctgaatccatatgctcgggtatattcaatgacctgggtagtggtagcaacgtggacatctgcgtgatcacaaaggggaacaaggaatatctcaggaactacatggaaccaaacccaagaacctatgtcagcagcaaaggctattccttcaccaagaaaactgaggttcttctcaccaaaatcaccccattgctggagcgagtcgaaatcacagaagttggtgaagctatggaggaataattcaatcaatctcatatatcttcttttgcattgatctacatcaaggctctgtgtactctcatgatctcatcttcccagtcttgtcttcttcccatgtttaaggatcattcaaatcttgttactcctctctctccttcttagatttcaatagagagggtcagactcgagagacttcgtcctttcgaaataaaaaaacaactttccct

SEQ ID NO: 106213 - protein, 304 aa, Arabidopsis thaliana
  peptide (1)..(304): Ceres Seq. ID no. 13619008
  misc_feature (67)..(248): Pfam Name: Proteasome A-type and B-type Pfam Description: Proteasome A-type and B-type
  misc_feature (32)..(304): Homolog of NCBI NO: 18405364 NR Description: 20S proteasome beta subunit B (PBB1) [Arabidopsis >gi|25529005|pir||T51977 C 3.4.25.1 proteasome endopeptidase
  misc_feature (32)..(304): Homolog of NCBI NO: 2511578 NR Description: multicatalytic endopeptidase [Arabidopsis
  misc_feature (32)..(304): Homolog of NCBI NO: 15237451 NR Description: 20S proteasome beta subunit B (PBB2) [Arabidopsis >gi|30693626|ref|NP_851108.1| 20S proteasome beta subunit B [Arabidopsis thaliana] >gi|25529007|pir||T51979 C 3.4.25.1
  misc_feature (32)..(279): Homolog of NCBI NO: 30688785 NR Description: 20S proteasome beta subunit B (PBB1) [Arabidopsis
  misc_feature (32)..(304): Homolog of NCBI NO: 20260224 NR Description: 20S proteasome beta subunit PBB2 [Arabidopsis >gi|21387013|gb|AAM47910.1| 20S proteasome beta subunit PBB2
  misc_feature (32)..(304): Homolog of NCBI NO: 21593337 NR Description: 20S proteasome beta subunit PBB2 [Arabidopsis
  misc_feature (32)..(304): Homolog of NCBI NO: 8671504 NR Description: beta 2 subunit of 20S proteasome [Oryza sativa
  misc_feature (88)..(304): Homolog of NCBI NO: 2511576 NR Description: multicatalytic endopeptidase [Arabidopsis
  misc_feature (41)..(294): Homolog of NCBI NO: 24664391 NR Description: Proteasome beta2 subunit CG3329-PA [Drosophila
  misc_feature (33)..(216): Homolog of NCBI NO: 14594921 NR Description: putative beta proteasome subunit [Nicotiana
FVTFASPLSSSLVLFFFPIQAKFIKTCQFEKMSQSTVDVPPKGGFSFDLCKRNDMLTQKGLKAPSFLKTGTTIVGLIFKDGVILGADTRATEGPIVADKNCEKIHYMAPNIYCCGAGTAADTEAVTDMVSSQLRLHRYQTGRDSRVITALTLLKKHLFSYQGHVSAALVLGGVDITGPHLHTIYPHGSTDTLPFATMGSGSLAAMSVFEAKYKEGLTRDEGIKLVAESICSGIFNDLGSGSNVDICVITKGNKEYLRNYMEPNPRTYVSSKGYSFTKKTEVLLTKITPLLERVEITEVGEAMEE

SEQ ID NO: 106214 - protein, 273 aa, Arabidopsis thaliana; identical to SEQ ID NO: 35843
  peptide (1)..(273): Ceres Seq. ID no. 13619009
  misc_feature (36)..(217): Pfam Name: Proteasome A-type and B-type Pfam Description: Proteasome A-type and B-type
  misc_feature (1)..(273): Homolog of NCBI NO: 18405364 NR Description: 20S proteasome beta subunit B (PBB1) [Arabidopsis >gi|25529005|pir||T51977 C 3.4.25.1 proteasome endopeptidase
  misc_feature (1)..(273): Homolog of NCBI NO: 2511578 NR Description: multicatalytic endopeptidase [Arabidopsis
  misc_feature (1)..(273): Homolog of NCBI NO: 15237451 NR Description: 20S proteasome beta subunit B (PBB2) [Arabidopsis >gi|30693626|ref|NP_851108.1| 20S proteasome beta subunit B [Arabidopsis thaliana] >gi|25529007|pir||T51979 C 3.4.25.1
  misc_feature (1)..(248): Homolog of NCBI NO: 30688785 NR Description: 20S proteasome beta subunit B (PBB1) [Arabidopsis
  misc_feature (1)..(273): Homolog of NCBI NO: 20260224 NR Description: 20S proteasome beta subunit PBB2 [Arabidopsis >gi|21387013|gb|AAM47910.1| 20S proteasome beta subunit PBB2
  misc_feature (1)..(273): Homolog of NCBI NO: 21593337 NR Description: 20S proteasome beta subunit PBB2 [Arabidopsis
  misc_feature (1)..(273): Homolog of NCBI NO: 8671504 NR Description: beta 2 subunit of 20S proteasome [Oryza sativa
  misc_feature (57)..(273): Homolog of NCBI NO: 2511576 NR Description: multicatalytic endopeptidase [Arabidopsis
  misc_feature (10)..(263): Homolog of NCBI NO: 24664391 NR Description: Proteasome beta2 subunit CG3329-PA [Drosophila
  misc_feature (2)..(185): Homolog of NCBI NO: 14594921 NR Description: putative beta proteasome subunit [Nicotiana

SEQ ID NO: 106215 - protein, 250 aa, Arabidopsis thaliana; identical to SEQ ID NO: 35844
  peptide (1)..(250): Ceres Seq. ID no. 13619010
  misc_feature (13)..(194): Pfam Name: Proteasome A-type and B-type Pfam Description: Proteasome A-type and B-type
  misc_feature (1)..(250): Homolog of NCBI NO: 18405364 NR Description: 20S proteasome beta subunit B (PBB1) [Arabidopsis >gi|25529005|pir||T51977 C 3.4.25.1 proteasome endopeptidase
  misc_feature (1)..(250): Homolog of NCBI NO: 2511578 NR Description: multicatalytic endopeptidase [Arabidopsis
  misc_feature (1)..(250): Homolog of NCBI NO: 15237451 NR Description: 20S proteasome beta subunit B (PBB2) [Arabidopsis >gi|30693626|ref|NP_851108.1| 20S proteasome beta subunit B [Arabidopsis thaliana] >gi|25529007|pir||T51979 C 3.4.25.1
  misc_feature (1)..(225): Homolog of NCBI NO: 30688785 NR Description: 20S proteasome beta subunit B (PBB1) [Arabidopsis
  misc_feature (1)..(250): Homolog of NCBI NO: 20260224 NR Description: 20S proteasome beta subunit PBB2 [Arabidopsis >gi|21387013|gb|AAM47910.1| 20S proteasome beta subunit PBB2
  misc_feature (1)..(250): Homolog of NCBI NO: 21593337 NR Description: 20S proteasome beta subunit PBB2 [Arabidopsis
  misc_feature (1)..(250): Homolog of NCBI NO: 8671504 NR Description: beta 2 subunit of 20S proteasome [Oryza sativa
  misc_feature (34)..(250): Homolog of NCBI NO: 2511576 NR Description: multicatalytic endopeptidase [Arabidopsis
  misc_feature (1)..(240): Homolog of NCBI NO: 24664391 NR Description: Proteasome beta2 subunit CG3329-PA [Drosophila
  misc_feature (1)..(162): Homolog of NCBI NO: 14594921 NR Description: putative beta proteasome subunit [Nicotiana

SEQ ID NO: 106216 - DNA, 1770 bp, Arabidopsis thaliana
  misc_feature (1)..(1770): Ceres Seq. ID no. 13619011
  misc_feature: MA Experiment ID: 20000173 Result: Down-regulated in Transcription
  misc_feature: MA Experiment 20000173 PARAMETER Experiment Name: At_42deg_Heat_P Parameter: Age (day) Value: 14
  misc_feature: MA Experiment 20000173 PARAMETER Experiment Name: At_42deg_Heat_P Parameter: Organism Value: A. thaliana
  misc_feature: MA Experiment 20000173 PARAMETER Experiment Name: At_42deg_Heat_P Parameter: Plant Line Value: WS
  misc_feature: MA Experiment 20000173 PARAMETER Experiment Name: At_42deg_Heat_P Parameter: Temperature (deg C) Value: 42 vs. 22
  misc_feature: MA Experiment 20000173 PARAMETER Experiment Name: At_42deg_Heat_P Parameter: Timepoint (hr) Value: 6
  misc_feature: MA Experiment 20000173 PARAMETER Experiment Name: At_42deg_Heat_P Parameter: Tissue Value: Aerial
  misc_feature: MA Experiment ID: 20000184 Result: Down-regulated in Transcription
  misc_feature: MA Experiment 20000184 PARAMETER Experiment Name: At_Shoots__P Parameter: Age (day) Value: 7
  misc_feature: MA Experiment 20000184 PARAMETER Experiment Name: At_Shoots__P Parameter: Tissue Value: Shoots vs. Whole Plant
  misc_feature: MA Experiment ID: 20000185 Result: Up-regulated in Transcription
  misc_feature: MA Experiment 20000185 PARAMETER Experiment Name: At_Roots__P Parameter: Age (day) Value: 7 vs. 21
  misc_feature: MA Experiment 20000185 PARAMETER Experiment Name: At_Roots__P Parameter: Organism Value: A. thaliana
  misc_feature: MA Experiment 20000185 PARAMETER Experiment Name: At_Roots__P Parameter: Tissue Value: Roots vs. Whole Plant
  misc_feature: MA Experiment ID: 20000439 Result: Up-regulated in Transcription
  misc_feature: MA Experiment 20000439 PARAMETER Experiment Name: At_Roots__P Parameter: Age (day) Value: 14 vs. 21
  misc_feature: MA Experiment 20000439 PARAMETER Experiment Name: At_Roots__P Parameter: Organism Value: A. thaliana
  misc_feature: MA Experiment 20000439 PARAMETER Experiment Name: At_Roots__P Parameter: Tissue Value: Roots vs. Whole Plant
  misc_feature: MA Experiment ID: 20000495 Result: Up-regulated in Transcription
  misc_feature: MA Experiment 20000495 PARAMETER Experiment Name: At_Guard_Cells_P Parameter: Harvest Date Value: 8/2/2002
  misc_feature: MA Experiment 20000495 PARAMETER Experiment Name: At_Guard_Cells_P Parameter: Organism Value: A. thaliana
  misc_feature: MA Experiment 20000495 PARAMETER Experiment Name: At_Guard_Cells_P Parameter: Tissue Value: Guard Cells vs. Leaves
  misc_feature: MA Experiment ID: 20000794 Result: Up-regulated in Transcription
  misc_feature: MA Experiment 20000794 PARAMETER Experiment Name: At_Petals_P Parameter: Age (day) Value: 23-25 days
  misc_feature: MA Experiment 20000794 PARAMETER Experiment Name: At_Petals_P Parameter: Plant Line Value: WS
  misc_feature: MA Experiment 20000794 PARAMETER Experiment Name: At_Petals_P Parameter: Tissue Value: Petals vs. Whole plant
attcttttgagctaccgattttgccgttttcgtgcagtaatttcgagaaagcgtggaccatttctggattccaaagctgaagaagatccaaacattgtgaagatagaatccgtttactaatgttagaagcatcgaagaatgaaaatgtgatgcaagtgaaggaatgaaagtgcgttgtagttcttcgtatcacgactttggcgtgcatagactgtagatagatatcagataacaacctgtagtggaaatatgagaagacctagtcaaatgatgaggcttctattaacatcctttttcggtgttattgttggtttccttatgggtattacttttccaaccttgactttaactaagatgaatcttccatccacattgtttccctcgattgatcttgcatacattgaggataaatactctgacatatcaagacaaagactatttggttcttggtcttcgacaaaaggcctcaaactcaagaatgacatccctgaccctccatataactataatgacactaagatatgggtttcgactaacccccgtggtgctgagaggctaccaccagatatagtcacgcctgaatcagatttttacctccgtcgactgtggggcgaccctaatgaggatttaacagtcaagcagcggtatctagtaacatttacggttggctatgatcagaggaaaaatatagacactgtgttgaagaagttctcagataacttctctataatgctgtttcactacgatggccgggcaagcgaatgggaagagtttgaatggtccaagcgagccattcatgtgagcattcggaaacaaacaaaatggtggtacgctaagcgatttcttcatcctgacatagttgccccctatgaatatatcttcatatgggatgaggatcttggcgtggaacactttgattcggaaaaatatctggcggtggtgaagaagcatggtttggaaatctcacagcctggattagagccatatgaagggctcacatgggagatgaccaagaaaagagacgacactgaagtccacaagcatgctgaggaaaggaatgggtggtgcactgatcccaatttacccccttgtgcagcgtttgtggagattatggctcctgttttctcccgcaaggcatggcgctgtgtgtggcatatgattcagaacgatttgattcatggatggggtctggactttgccgttcggaaatgtgttcagaacgcacacgagaaaattggagttgtagatgctcaatggattatacatcaaggtgttccatcattagggaatcaaggacaaccagagcaagggaaacaaccatgggaaggggtgagagaacgatgcaggagagagtggacaatgtttcaagacagattggatgatgctgaaaaagcttattttgaagcatctgctcacaagaatgcttcttcacggcctcacgggtaataaggaaacatatagtctctccctccgacttccactctctttgtttaccctgttaattttgttcccggagctgtgctttgatttcgtgtttatggaagagaatagtctggtcgagagaagataaattgttagcagctaagcacattcattaacatctgattagtctttcttttttcttttcttttcttaactctgttaactcttattgttgatgagaactccggtggagagtagagttagaggtagacaacaataaaaaaagggagattaactgtgatgggtaagaaattaggtgttattaccagaacacgacagaactttttt

SEQ ID NO: 106217 - protein, 398 aa, Arabidopsis thaliana
  peptide (1)..(398): Ceres Seq. ID no. 13619012
  misc_feature (90)..(288): Pfam Name: Protein of unknown function (DUF707) Pfam Description: Protein of unknown function (DUF707)
  misc_feature (1)..(398): Homolog of NCBI NO: 22331371 NR Description: expressed protein [Arabidopsis thaliana] unknown protein [Arabidopsis thaliana]
  misc_feature (89)..(288): Homolog of NCBI NO: 7939519 NR Description: gb|AAD31054.1~gene_id:K1G2.18~strong similarity
  misc_feature (284)..(398): Homolog of NCBI NO: 7939519 NR Description: gb|AAD31054.1~gene_id:K1G2.18~strong similarity
  misc_feature (1)..(36): Homolog of NCBI NO: 7939519 NR Description: gb|AAD31054.1~gene_id:K1G2.18~strong similarity
  misc_feature (2)..(394): Homolog of NCBI NO: 18408876 NR Description: F12A21.2 [Arabidopsis thaliana] At1g67850/F12A21_2 [Arabidopsis thaliana]
  misc_feature (1)..(384): Homolog of NCBI NO: 34906848 NR Description: P0470A12.1 [Oryza sativa (japonica
  misc_feature (1)..(385): Homolog of NCBI NO: 14719314 NR Description: putative protein [Oryza sativa]
  misc_feature (1)..(389): Homolog of NCBI NO: 22329525 NR Description: expressed protein [Arabidopsis thaliana] unknown protein [Arabidopsis thaliana]
  misc_feature (90)..(390): Homolog of NCBI NO: 18390845 NR Description: storage protein -related [Arabidopsis thaliana] putative storage protein [Arabidopsis thaliana]
  misc_feature (1)..(71): Homolog of NCBI NO: 18390845 NR Description: storage protein -related [Arabidopsis thaliana] putative storage protein [Arabidopsis thaliana]
MRRPSQMMRLLLTSFFGVIVGFLMGITFPTLTLTKMNLPSTLFPSIDLAYIEDKYSDISRQRLFGSWSSTKGLKLKNDIPDPPYNYNDTKIWVSTNPRGAERLPPDIVTPESDFYLRRLWGDPNEDLTVKQRYLVTFTVGYDQRKNIDTVLKKFSDNFSIMLFHYDGRASEWEEFEWSKRAIHVSIRKQTKWWYAKRFLHPDIVAPYEYIFIWDEDLGVEHFDSEKYLAVVKKHGLEISQPGLEPYEGLTWEMTKKRDDTEVHKHAEERNGWCTDPNLPPCAAFVEIMAPVFSRKAWRCVWHMIQNDLIHGWGLDFAVRKCVQNAHEKIGVVDAQWIIHQGVPSLGNQGQPEQGKQPWEGVRERCRREWTMFQDRLDDAEKAYFEASAHKNASSRPHG

SEQ ID NO: 106218 - protein, 392 aa, Arabidopsis thaliana
  peptide (1)..(392): Ceres Seq. ID no. 13619013
  misc_feature (84)..(282): Pfam Name: Protein of unknown function (DUF707) Pfam Description: Protein of unknown function (DUF707)
  misc_feature (1)..(392): Homolog of NCBI NO: 22331371 NR Description: expressed protein [Arabidopsis thaliana] unknown protein [Arabidopsis thaliana]
  misc_feature (83)..(282): Homolog of NCBI NO: 7939519 NR Description: gb|AAD31054.1~gene_id:K1G2.18~strong similarity
  misc_feature (278)..(392): Homolog of NCBI NO: 7939519 NR Description: gb|AAD31054.1~gene_id:K1G2.18~strong similarity
  misc_feature (1)..(30): Homolog of NCBI NO: 7939519 NR Description: gb|AAD31054.1~gene_id:K1G2.18~strong similarity
  misc_feature (1)..(388): Homolog of NCBI NO: 18408876 NR Description: F12A21.2 [Arabidopsis thaliana] At1g67850/F12A21_2 [Arabidopsis thaliana]
  misc_feature (1)..(378): Homolog of NCBI NO: 34906848 NR Description: P0470A12.1 [Oryza sativa (japonica
  misc_feature (1)..(379): Homolog of NCBI NO: 14719314 NR Description: putative protein [Oryza sativa]
  misc_feature (1)..(383): Homolog of NCBI NO: 22329525 NR Description: expressed protein [Arabidopsis thaliana] unknown protein [Arabidopsis thaliana]
  misc_feature (84)..(384): Homolog of NCBI NO: 18390845 NR Description: storage protein -related [Arabidopsis thaliana] putative storage protein [Arabidopsis thaliana]
  misc_feature (1)..(65): Homolog of NCBI NO: 18390845 NR Description: storage protein -related [Arabidopsis thaliana] putative storage protein [Arabidopsis thaliana]
MMRLLLTSFFGVIVGFLMGITFPTLTLTKMNLPSTLFPSIDLAYIEDKYSDISRQRLFGSWSSTKGLKLKNDIPDPPYNYNDTKIWVSTNPRGAERLPPDIVTPESDFYLRRLWGDPNEDLTVKQRYLVTFTVGYDQRKNIDTVLKKFSDNFSIMLFHYDGRASEWEEFEWSKRAIHVSIRKQTKWWYAKRFLHPDIVAPYEYIFIWDEDLGVEHFDSEKYLAVVKKHGLEISQPGLEPYEGLTWEMTKKRDDTEVHKHAEERNGWCTDPNLPPCAAFVEIMAPVFSRKAWRCVWHMIQNDLIHGWGLDFAVRKCVQNAHEKIGVVDAQWIIHQGVPSLGNQGQPEQGKQPWEGVRERCRREWTMFQDRLDDAEKAYFEASAHKNASSRPHG

SEQ ID NO: 106219 - protein, 391 aa, Arabidopsis thaliana
  peptide (1)..(391): Ceres Seq. ID no. 13619014
  misc_feature (83)..(281): Pfam Name: Protein of unknown function (DUF707) Pfam Description: Protein of unknown function (DUF707)
  misc_feature (1)..(391): Homolog of NCBI NO: 22331371 NR Description: expressed protein [Arabidopsis thaliana] unknown protein [Arabidopsis thaliana]
  misc_feature (82)..(281): Homolog of NCBI NO: 7939519 NR Description: gb|AAD31054.1~gene_id:K1G2.18~strong similarity
  misc_feature (277)..(391): Homolog of NCBI NO: 7939519 NR Description: gb|AAD31054.1~gene_id:K1G2.18~strong similarity
  misc_feature (1)..(29): Homolog of NCBI NO: 7939519 NR Description: gb|AAD31054.1~gene_id:K1G2.18~strong similarity
  misc_feature (1)..(387): Homolog of NCBI NO: 18408876 NR Description: F12A21.2 [Arabidopsis thaliana] At1g67850/F12A21_2 [Arabidopsis thaliana]
  misc_feature (1)..(377): Homolog of NCBI NO: 34906848 NR Description: P0470A12.1 [Oryza sativa (japonica
  misc_feature (1)..(378): Homolog of NCBI NO: 14719314 NR Description: putative protein [Oryza sativa]
  misc_feature (1)..(382): Homolog of NCBI NO: 22329525 NR Description: expressed protein [Arabidopsis thaliana] unknown protein [Arabidopsis thaliana]
  misc_feature (83)..(383): Homolog of NCBI NO: 18390845 NR Description: storage protein -related [Arabidopsis thaliana] putative storage protein [Arabidopsis thaliana]
  misc_feature (1)..(64): Homolog of NCBI NO: 18390845 NR Description: storage protein -related [Arabidopsis thaliana] putative storage protein [Arabidopsis thaliana]
MRLLLTSFFGVIVGFLMGITFPTLTLTKMNLPSTLFPSIDLAYIEDKYSDISRQRLFGSWSSTKGLKLKNDIPDPPYNYNDTKIWVSTNPRGAERLPPDIVTPESDFYLRRLWGDPNEDLTVKQRYLVTFTVGYDQRKNIDTVLKKFSDNFSIMLFHYDGRASEWEEFEWSKRAIHVSIRKQTKWWYAKRFLHPDIVAPYEYIFIWDEDLGVEHFDSEKYLAVVKKHGLEISQPGLEPYEGLTWEMTKKRDDTEVHKHAEERNGWCTDPNLPPCAAFVEIMAPVFSRKAWRCVWHMIQNDLIHGWGLDFAVRKCVQNAHEKIGVVDAQWIIHQGVPSLGNQGQPEQGKQPWEGVRERCRREWTMFQDRLDDAEKAYFEASAHKNASSRPHG

SEQ ID NO: 106220 - DNA, 1351 bp, Arabidopsis thaliana
  misc_feature (1)..(1351): Ceres Seq. ID no. 13619015
  misc_feature: MA Experiment ID: 108464 Result: Down-regulated in Transcription
  misc_feature: MA Experiment 108464 PARAMETER Experiment Name: At_Germinating_Seeds_cDNA_P Parameter: Age (day) Value: 4 vs. 0
  misc_feature: MA Experiment 108464 PARAMETER Experiment Name: At_Germinating_Seeds_cDNA_P Parameter: Tissue Value: Germinating Seeds
  misc_feature: MA Experiment ID: 108577 Result: Down-regulated in Transcription
  misc_feature: MA Experiment 108577 PARAMETER Experiment Name: At_42deg_Heat_cDNA_P Parameter: Temperature (deg C) Value: 42 vs. 22
  misc_feature: MA Experiment 108577 PARAMETER Experiment Name: At_42deg_Heat_cDNA_P Parameter: Timepoint (hr) Value: 6
  misc_feature: MA Experiment 108577 PARAMETER Experiment Name: At_42deg_Heat_cDNA_P Parameter: Tissue Value: Aerial
  misc_feature: MA Experiment ID: 20000794 Result: Up-regulated in Transcription
  misc_feature: MA Experiment 20000794 PARAMETER Experiment Name: At_Petals_P Parameter: Age (day) Value: 23-25 days
  misc_feature: MA Experiment 20000794 PARAMETER Experiment Name: At_Petals_P Parameter: Plant Line Value: WS
  misc_feature: MA Experiment 20000794 PARAMETER Experiment Name: At_Petals_P Parameter: Tissue Value: Petals vs. Whole plant
  misc_feature: MA Experiment ID: 20001557 Result: Up-regulated in Transcription
  misc_feature: MA Experiment 20001557 PARAMETER Experiment Name: At_Drought_Soil_Dry_P Parameter: Age (day) Value: 27
  misc_feature: MA Experiment 20001557 PARAMETER Experiment Name: At_Drought_Soil_Dry_P Parameter: Organism Value: A. thaliana
  misc_feature: MA Experiment 20001557 PARAMETER Experiment Name: At_Drought_Soil_Dry_P Parameter: Plant Line Value: WS
  misc_feature: MA Experiment 20001557 PARAMETER Experiment Name: At_Drought_Soil_Dry_P Parameter: Post Timepoint (hr) Value: 3
  misc_feature: MA Experiment 20001557 PARAMETER Experiment Name: At_Drought_Soil_Dry_P Parameter: Post-Treatment Value: Re-Water vs. No Drought
  misc_feature: MA Experiment 20001557 PARAMETER Experiment Name: At_Drought_Soil_Dry_P Parameter: Timepoint (day) Value: 13
  misc_feature: MA Experiment 20001557 PARAMETER Experiment Name: At_Drought_Soil_Dry_P Parameter: Treatment Value: Drought vs. No Drought
  misc_feature: MA Experiment ID: 20001911 Result: Up-regulated in Transcription
  misc_feature: MA Experiment 20001911 PARAMETER Experiment Name: At_Drought_Reproduction_P Parameter: Age (day) Value: 40
  misc_feature: MA Experiment 20001911 PARAMETER Experiment Name: At_Drought_Reproduction_P Parameter: Organism Value: A. thaliana
  misc_feature: MA Experiment 20001911 PARAMETER Experiment Name: At_Drought_Reproduction_P Parameter: Plant Line Value: WS
  misc_feature: MA Experiment 20001911 PARAMETER Experiment Name: At_Drought_Reproduction_P Parameter: Timepoint (day) Value: 10
  misc_feature: MA Experiment 20001911 PARAMETER Experiment Name: At_Drought_Reproduction_P Parameter: Tissue Value: Flowers
  misc_feature: MA Experiment 20001911 PARAMETER Experiment Name: At_Drought_Reproduction_P Parameter: Treatment Value: Drought vs. No Drought
tttcgattgattcgcttcttcaactctctctcttcttcttcttctatttgcttctgtgaaaccctagattttggtgtgaggaagaagacttcaatggcggaagaagtagcagagaacgttaacgcagtcccggtttcggaagacgagctttacggatttaaacgatcggagatgtacagtggtactctcgccggttccgttggtccgtacggtcgtcatgttttcctttgttacaagagtcatgagacttggcttcctcgtgttgaaactgaaggacttcctcagcgtttcgcgaagttgtttaaggatcgtaaagctgatttcgctgttgagacgaagcttacggtgtgtggtggtggtggtgaatctgatggagatgtgttgattttcccggagatggttagatacaaggcgattcaggacacagatgtggatgcttttgtggaagatgtgcttgtgaaaggaaaaacatggacttctgggattcaggaagagttgactggttcctttgtgtttgtgtgcgctcatggtagccgagacaagagatgtggtgtttgtggaccagttcttatggagaagttcgagcaggagataagttcacgtggactttcagacaaaatctttgttttgccgtgttctcatatcggtgggcacaagtatgctggaaatttgattgtcttcagccctgattcagctggaaatgtttctggccattggtatggctatgtgactcctgatgacgtgcctgcaatgcttgatcagcatattgcaaaaggagaaatcattcaaaacctttccagaggccagatgagactaagacccgagggtgaggaagctgagaaagaggatgagcataaaatcccaaacggaaacagtgtaatggtggaagaacgcgaacctgtggagcagaaagggttcacaggaggttgttgccaaggtgcaaacggagtttcatgttgccaagaacaagctgcagagccagtcaagaaagaaggatgcatgaagctaaactggttgaaatcgatggggaaagaagaggttctcttgggagcagcagtagtttcagctgtcgcaaccgttgccgtggcttacagcatttacagaaggtcaggttaagaacctgaaccaccctcctctttttacacttttaagaagaaactttatttttggtagccatattatagaagtaaaggaagaaaagaaaacatggagaggtaataatcttttggaactatataaccatcatttggtttcggtatgggcaatgcaggaatgggatgtaatcttgcttttgactcggtttagtttggtttatcttattatgttgtcattggaatatatcaatcttctc

SEQ ID NO: 106221 - protein, 371 aa, Arabidopsis thaliana
  peptide (1)..(371): Ceres Seq. ID no. 13619016
  misc_feature (1)..(371): Homolog of NCBI NO: 30688845 NR Description: sucrose cleavage protein -related [Arabidopsis
  misc_feature (32)..(371): Homolog of NCBI NO: 16604338 NR Description: AT3g27570/MMJ24_12 [Arabidopsis thaliana]
  misc_feature (58)..(371): Homolog of NCBI NO: 11994184 NR Description: sucrose cleavage protein-like [Arabidopsis
  misc_feature (38)..(371): Homolog of NCBI NO: 21553503 NR Description: sucrose cleavage protein-like [Arabidopsis
  misc_feature (38)..(371): Homolog of NCBI NO: 15237439 NR Description: sucrose cleavage protein -related [Arabidopsis >gi|17979496|gb|AAL50084.1| AT5g40510/MNF13_30 [Arabidopsis >gi|20147291|gb|AAM10359.1| AT5g40510/MNF13_30 [Arabidopsis
  misc_feature (58)..(371): Homolog of NCBI NO: 9758077 NR Description: sucrose cleavage protein-like [Arabidopsis
  misc_feature (58)..(370): Homolog of NCBI NO: 1086252 NR Description: sucrose cleavage protein - potato
  misc_feature (8)..(337): Homolog of NCBI NO: 16604384 NR Description: AT4g26620/T15N24_70 [Arabidopsis thaliana]
  misc_feature (338)..(369): Homolog of NCBI NO: 16604384 NR Description: AT4g26620/T15N24_70 [Arabidopsis thaliana]
  misc_feature (8)..(337): Homolog of NCBI NO: 18416788 NR Description: sucrase-related protein [Arabidopsis thaliana]
FRLIRFFNSLSSSSSICFCETLDFGVRKKTSMAEEVAENVNAVPVSEDELYGFKRSEMYSGTLAGSVGPYGRHVFLCYKSHETWLPRVETEGLPQRFAKLFKDRKADFAVETKLTVCGGGGESDGDVLIFPEMVRYKAIQDTDVDAFVEDVLVKGKTWTSGIQEELTGSFVFVCAHGSRDKRCGVCGPVLMEKFEQEISSRGLSDKIFVLPCSHIGGHKYAGNLIVFSPDSAGNVSGHWYGYVTPDDVPAMLDQHIAKGEIIQNLSRGQMRLRPEGEEAEKEDEHKIPNGNSVMVEEREPVEQKGFTGGCCQGANGVSCCQEQAAEPVKKEGCMKLNWLKSMGKEEVLLGAAVVSAVATVAVAYSIYRRSG

SEQ ID NO: 106222 - protein, 340 aa, Arabidopsis thaliana; identical to SEQ ID NO: 25247
  peptide (1)..(340): Ceres Seq. ID no. 13619017
  misc_feature (1)..(340): Homolog of NCBI NO: 30688845 NR Description: sucrose cleavage protein -related [Arabidopsis
  misc_feature (1)..(340): Homolog of NCBI NO: 16604338 NR Description: AT3g27570/MMJ24_12 [Arabidopsis thaliana]
  misc_feature (27)..(340): Homolog of NCBI NO: 11994184 NR Description: sucrose cleavage protein-like [Arabidopsis
  misc_feature (7)..(340): Homolog of NCBI NO: 21553503 NR Description: sucrose cleavage protein-like [Arabidopsis
  misc_feature (7)..(340): Homolog of NCBI NO: 15237439 NR Description: sucrose cleavage protein -related [Arabidopsis >gi|17979496|gb|AAL50084.1| AT5g40510/MNF13_30 [Arabidopsis >gi|20147291|gb|AAM10359.1| AT5g40510/MNF13_30 [Arabidopsis
  misc_feature (27)..(340): Homolog of NCBI NO: 9758077 NR Description: sucrose cleavage protein-like [Arabidopsis
  misc_feature (27)..(339): Homolog of NCBI NO: 1086252 NR Description: sucrose cleavage protein - potato
  misc_feature (1)..(306): Homolog of NCBI NO: 16604384 NR Description: AT4g26620/T15N24_70 [Arabidopsis thaliana]
  misc_feature (307)..(338): Homolog of NCBI NO: 16604384 NR Description: AT4g26620/T15N24_70 [Arabidopsis thaliana]
  misc_feature (1)..(306): Homolog of NCBI NO: 18416788 NR Description: sucrase-related protein [Arabidopsis thaliana]

SEQ ID NO: 106223 - protein, 314 aa, Arabidopsis thaliana; identical to SEQ ID NO: 25248
  peptide (1)..(314): Ceres Seq. ID no. 13619018
  misc_feature (1)..(314): Homolog of NCBI NO: 30688845 NR Description: sucrose cleavage protein -related [Arabidopsis
  misc_feature (1)..(314): Homolog of NCBI NO: 16604338 NR Description: AT3g27570/MMJ24_12 [Arabidopsis thaliana]
  misc_feature (1)..(314): Homolog of NCBI NO: 11994184 NR Description: sucrose cleavage protein-like [Arabidopsis
  misc_feature (1)..(314): Homolog of NCBI NO: 21553503 NR Description: sucrose cleavage protein-like [Arabidopsis
  misc_feature (1)..(314): Homolog of NCBI NO: 15237439 NR Description: sucrose cleavage protein -related [Arabidopsis >gi|17979496|gb|AAL50084.1| AT5g40510/MNF13_30 [Arabidopsis >gi|20147291|gb|AAM10359.1| AT5g40510/MNF13_30 [Arabidopsis
  misc_feature (1)..(314): Homolog of NCBI NO: 9758077 NR Description: sucrose cleavage protein-like [Arabidopsis
  misc_feature (1)..(313): Homolog of NCBI NO: 1086252 NR Description: sucrose cleavage protein - potato
  misc_feature (1)..(280): Homolog of NCBI NO: 16604384 NR Description: AT4g26620/T15N24_70 [Arabidopsis thaliana]
  misc_feature (281)..(312): Homolog of NCBI NO: 16604384 NR Description: AT4g26620/T15N24_70 [Arabidopsis thaliana]
  misc_feature (1)..(280): Homolog of NCBI NO: 18416788 NR Description: sucrase-related protein [Arabidopsis thaliana]

SEQ ID NO: 106224 - DNA, 1007 bp, Arabidopsis thaliana
  misc_feature (1)..(1007): Ceres Seq. ID no. 13619022
  misc_feature: MA Experiment ID: 20000234 Result: Down-regulated in Transcription
  misc_feature: MA Experiment 20000234 PARAMETER Experiment Name: At_Siliques_P Parameter: Age (day) Value: 21
  misc_feature: MA Experiment 20000234 PARAMETER Experiment Name: At_Siliques_P Parameter: Organism Value: A. thaliana
  misc_feature: MA Experiment 20000234 PARAMETER Experiment Name: At_Siliques_P Parameter: Plant Line Value: WS
  misc_feature: MA Experiment 20000234 PARAMETER Experiment Name: At_Siliques_P Parameter: Tissue Value: Less Than 5mm Siliques vs. Whole Plant
  misc_feature: MA Experiment ID: 20000235 Result: Down-regulated in Transcription
  misc_feature: MA Experiment 20000235 PARAMETER Experiment Name: At_Siliques_P Parameter: Age (day) Value: 21
  misc_feature: MA Experiment 20000235 PARAMETER Experiment Name: At_Siliques_P Parameter: Organism Value: A. thaliana
  misc_feature: MA Experiment 20000235 PARAMETER Experiment Name: At_Siliques_P Parameter: Plant Line Value: WS
  misc_feature: MA Experiment 20000235 PARAMETER Experiment Name: At_Siliques_P Parameter: Tissue Value: 5-10mm Siliques vs. Whole Plant
  misc_feature: MA Experiment ID: 20000264 Result: Up-regulated in Transcription
  misc_feature: MA Experiment 20000264 PARAMETER Experiment Name: At_Open_Flower_P Parameter: Age (day) Value: 21
  misc_feature: MA Experiment 20000264 PARAMETER Experiment Name: At_Open_Flower_P Parameter: Plant Line Value: WS
  misc_feature: MA Experiment 20000264 PARAMETER Experiment Name: At_Open_Flower_P Parameter: Tissue Value: Open Flower vs. Whole Plant
  misc_feature: MA Experiment ID: 20000265 Result: Up-regulated in Transcription
  misc_feature: MA Experiment 20000265 PARAMETER Experiment Name: At_Open_Flower_P Parameter: Age (day) Value: 21
  misc_feature: MA Experiment 20000265 PARAMETER Experiment Name: At_Open_Flower_P Parameter: Plant Line Value: WS
  misc_feature: MA Experiment 20000265 PARAMETER Experiment Name: At_Open_Flower_P Parameter: Tissue Value: Closed Flower vs. Whole Plant
  misc_feature: MA Experiment ID: 20000286 Result: Up-regulated in Transcription
  misc_feature: MA Experiment 20000286 PARAMETER Experiment Name: At_Open_Flower_P Parameter: Age (day) Value: 21
  misc_feature: MA Experiment 20000286 PARAMETER Experiment Name: At_Open_Flower_P Parameter: Plant Line Value: WS
  misc_feature: MA Experiment 20000286 PARAMETER Experiment Name: At_Open_Flower_P Parameter: Tissue Value: Half Open vs. Whole Plant
  misc_feature: MA Experiment ID: 20000794 Result: Up-regulated in Transcription
  misc_feature: MA Experiment 20000794 PARAMETER Experiment Name: At_Petals_P Parameter: Age (day) Value: 23-25 days
  misc_feature: MA Experiment 20000794 PARAMETER Experiment Name: At_Petals_P Parameter: Plant Line Value: WS
  misc_feature: MA Experiment 20000794 PARAMETER Experiment Name: At_Petals_P Parameter: Tissue Value: Petals vs. Whole plant
  misc_feature: MA Experiment ID: 20001761 Result: Up-regulated in Transcription
  misc_feature: MA Experiment 20001761 PARAMETER Experiment Name: At_50mM_NH4NO3_L-to-H_P Parameter: Timepoint (hr) Value: 4
  misc_feature: MA Experiment 20001761 PARAMETER Experiment Name: At_50mM_NH4NO3_L-to-H_P Parameter: Tissue Value: Siliques
  misc_feature: MA Experiment 20001761 PARAMETER Experiment Name: At_50mM_NH4NO3_L-to-H_P Parameter: Treatment Value: 50mM NH4NO3 vs 100mM Mannitol
  misc_feature: MA Experiment ID: 20001773 Result: Up-regulated in Transcription
  misc_feature: MA Experiment 20001773 PARAMETER Experiment Name: At_Far-red-enriched-adult_P Parameter: Age (day) Value: 30
  misc_feature: MA Experiment 20001773 PARAMETER Experiment Name: At_Far-red-enriched-adult_P Parameter: Light Value: Far-red enriched vs. White
  misc_feature: MA Experiment 20001773 PARAMETER Experiment Name: At_Far-red-enriched-adult_P Parameter: Organism Value: A. thaliana
  misc_feature: MA Experiment 20001773 PARAMETER Experiment Name: At_Far-red-enriched-adult_P Parameter: Plant Line Value: Columbia
  misc_feature: MA Experiment 20001773 PARAMETER Experiment Name: At_Far-red-enriched-adult_P Parameter: Timepoint (hr) Value: 48
  misc_feature: MA Experiment 20001773 PARAMETER Experiment Name: At_Far-red-enriched-adult_P Parameter: Tissue Value: Aerial
  misc_feature: MA Experiment ID: 20001911 Result: Down-regulated in Transcription
  misc_feature: MA Experiment 20001911 PARAMETER Experiment Name: At_Drought_Reproduction_P Parameter: Age (day) Value: 40
  misc_feature: MA Experiment 20001911 PARAMETER Experiment Name: At_Drought_Reproduction_P Parameter: Organism Value: A. thaliana
  misc_feature: MA Experiment 20001911 PARAMETER Experiment Name: At_Drought_Reproduction_P Parameter: Plant Line Value: WS
  misc_feature: MA Experiment 20001911 PARAMETER Experiment Name: At_Drought_Reproduction_P Parameter: Timepoint (day) Value: 10
  misc_feature: MA Experiment 20001911 PARAMETER Experiment Name: At_Drought_Reproduction_P Parameter: Tissue Value: Flowers
  misc_feature: MA Experiment 20001911 PARAMETER Experiment Name: At_Drought_Reproduction_P Parameter: Treatment Value: Drought vs. No Drought
ctctcttattctctcactcttttttttttatattcctctctctctaaatctataaaatatatttaaaaacttgatcgtatataataaagtaaataaagaataataacaaaaaaaatggagaaaagaggaggaggaagtagtggaggttcgggatcatcagcagaagcagaagtgagaaaaggaccatggacgatggaagaagatcttattcttatcaactatatcgccaaccacggcgatggtgtttggaattctctcgccaaatctgcaggtctaaaacgaaccgggaaaagttgccggctccggtggctgaactatctccgccccgacgtacgacggggaaacatcactccagaagagcaacttatcatcatggaacttcatgctaagtggggaaacaggtggtcgaaaatcgccaaacatcttccaggaagaacggacaacgagatcaaaaatttctggaggacaagaattcaaaaatacatcaagcaatcggatgtaacaacaacatcgtccgttggatctcatcatagctcagagatcaacgatcaagctgcaagcacgtcgagccataatgtcttttgtacacaagatcaagcgatggagacttattctcctacaccgacatcatatcaacataccaatatggaattcaactatggtaactattcggccgcggcagtgacggcaaccgtggattatccagtaccgatgaccgttgatgatcaaaccggtgaaaactattggggcatggatgatatttggtcatcaatgcatttattgaatggtaattgattgatcggtggacaaaacatggaatattaattgagtattatatatgatttttaggagtactattattagtacgtgacatgtatatgtttttgcctcgttgtagaggtttggggttataattaatatataatgttatctaatatgcaaccttgatacatatttggatctttattgaacccatgttatacataaataaaattgttgaaggggtc

SEQ ID NO: 106225 - protein, 226 aa, Arabidopsis thaliana
  peptide (1)..(226): Ceres Seq. ID no. 13619023
  misc_feature (22)..(69): Pfam Name: Myb-like DNA-binding domain Pfam Description: Myb-like DNA-binding domain
  misc_feature (1)..(226): Homolog of NCBI NO: 30688935 NR Description: myb family transcription factor (ATMYB3) thaliana] >gi|26451911|dbj|BAC43048.1| putative myb family
  misc_feature (1)..(226): Homolog of NCBI NO: 2280528 NR Description: ATMYB3 [Arabidopsis thaliana]
  misc_feature (1)..(226): Homolog of NCBI NO: 21554734 NR Description: putative transcription factor MYB24 [Arabidopsis
  misc_feature (1)..(226): Homolog of NCBI NO: 15242669 NR Description: myb family transcription factor [Arabidopsis >gi|5823307|gb|AAD53092.1|AF175987_1 putative transcription [Arabidopsis thaliana] >gi|10178145|dbj|BAB11590.1| transcription
  misc_feature (86)..(226): Homolog of NCBI NO: 11358682 NR Description: probable transcription factor MYB21 [imported] - thaliana (fragment) >gi|3941432|gb|AAC83592.1| putative
  misc_feature (14)..(226): Homolog of NCBI NO: 7438338 NR Description: Myb26 protein - garden pea
  misc_feature (14)..(226): Homolog of NCBI NO: 82306 NR Description: myb-related protein 305 - garden snapdragon
  misc_feature (12)..(180): Homolog of NCBI NO: 40643882 NR Description: MYB8 protein [Gerbera hybrid cv. 'Terra Regina']
  misc_feature (14)..(180): Homolog of NCBI NO: 82311 NR Description: myb-related protein 340 - garden snapdragon
  misc_feature (13)..(184): Homolog of NCBI NO: 13537530 NR Description: LhMyb [Lilium hybrid division I]
MEKRGGGSSGGSGSSAEAEVRKGPWTMEEDLILINYIANHGDGVWNSLAKSAGLKRTGKSCRLRWLNYLRPDVRRGNITPEEQLIIMELHAKWGNRWSKIAKHLPGRTDNEIKNFWRTRIQKYIKQSDVTTTSSVGSHHSSEINDQAASTSSHNVFCTQDQAMETYSPTPTSYQHTNMEFNYGNYSAAAVTATVDYPVPMTVDDQTGENYWGMDDIWSSMHLLNGN

SEQ ID NO: 106226 - protein, 200 aa, Arabidopsis thaliana
  peptide (1)..(200): Ceres Seq. ID no. 13619024
  misc_feature (1)..(43): Pfam Name: Myb-like DNA-binding domain Pfam Description: Myb-like DNA-binding domain
  misc_feature (1)..(200): Homolog of NCBI NO: 30688935 NR Description: myb family transcription factor (ATMYB3) thaliana] >gi|26451911|dbj|BAC43048.1| putative myb family
  misc_feature (1)..(200): Homolog of NCBI NO: 2280528 NR Description: ATMYB3 [Arabidopsis thaliana]
  misc_feature (1)..(200): Homolog of NCBI NO: 21554734 NR Description: putative transcription factor MYB24 [Arabidopsis
  misc_feature (1)..(200): Homolog of NCBI NO: 15242669 NR Description: myb family transcription factor [Arabidopsis >gi|5823307|gb|AAD53092.1|AF175987_1 putative transcription [Arabidopsis thaliana] >gi|10178145|dbj|BAB11590.1| transcription
  misc_feature (60)..(200): Homolog of NCBI NO: 11358682 NR Description: probable transcription factor MYB21 [imported] - thaliana (fragment) >gi|3941432|gb|AAC83592.1| putative
  misc_feature (1)..(200): Homolog of NCBI NO: 7438338 NR Description: Myb26 protein - garden pea
  misc_feature (1)..(200): Homolog of NCBI NO: 82306 NR Description: myb-related protein 305 - garden snapdragon
  misc_feature (1)..(154): Homolog of NCBI NO: 40643882 NR Description: MYB8 protein [Gerbera hybrid cv. 'Terra Regina']
  misc_feature (1)..(154): Homolog of NCBI NO: 82311 NR Description: myb-related protein 340 - garden snapdragon
  misc_feature (1)..(158): Homolog of NCBI NO: 13537530 NR Description: LhMyb [Lilium hybrid division I]
MEEDLILINYIANHGDGVWNSLAKSAGLKRTGKSCRLRWLNYLRPDVRRGNITPEEQLIIMELHAKWGNRWSKIAKHLPGRTDNEIKNFWRTRIQKYIKQSDVTTTSSVGSHHSSEINDQAASTSSHNVFCTQDQAMETYSPTPTSYQHTNMEFNYGNYSAAAVTATVDYPVPMTVDDQTGENYWGMDDIWSSMHLLNGN

SEQ ID NO: 106227 - protein, 140 aa, Arabidopsis thaliana
  peptide (1)..(140): Ceres Seq. ID no. 13619025
  misc_feature (1)..(140): Homolog of NCBI NO: 30688935 NR Description: myb family transcription factor (ATMYB3) thaliana] >gi|26451911|dbj|BAC43048.1| putative myb family
  misc_feature (1)..(140): Homolog of NCBI NO: 2280528 NR Description: ATMYB3 [Arabidopsis thaliana]
  misc_feature (1)..(140): Homolog of NCBI NO: 21554734 NR Description: putative transcription factor MYB24 [Arabidopsis
  misc_feature (1)..(140): Homolog of NCBI NO: 15242669 NR Description: myb family transcription factor [Arabidopsis >gi|5823307|gb|AAD53092.1|AF175987_1 putative transcription [Arabidopsis thaliana] >gi|10178145|dbj|BAB11590.1| transcription
  misc_feature (1)..(140): Homolog of NCBI NO: 11358682 NR Description: probable transcription factor MYB21 [imported] - thaliana (fragment) >gi|3941432|gb|AAC83592.1| putative
  misc_feature (1)..(140): Homolog of NCBI NO: 7438338 NR Description: Myb26 protein - garden pea
  misc_feature (1)..(140): Homolog of NCBI NO: 82306 NR Description: myb-related protein 305 - garden snapdragon
  misc_feature (1)..(94): Homolog of NCBI NO: 40643882 NR Description: MYB8 protein [Gerbera hybrid cv. 'Terra Regina']
  misc_feature (1)..(94): Homolog of NCBI NO: 82311 NR Description: myb-related protein 340 - garden snapdragon
  misc_feature (1)..(98): Homolog of NCBI NO: 13537530 NR Description: LhMyb [Lilium hybrid division I]
MELHAKWGNRWSKIAKHLPGRTDNEIKNFWRTRIQKYIKQSDVTTTSSVGSHHSSEINDQAASTSSHNVFCTQDQAMETYSPTPTSYQHTNMEFNYGNYSAAAVTATVDYPVPMTVDDQTGENYWGMDDIWSSMHLLNGN

SEQ ID NO: 106228 - DNA, 808 bp, Arabidopsis thaliana
  misc_feature (1)..(808): Ceres Seq. ID no. 13619026
  misc_feature: MA Experiment ID: 108488 Result: Up-regulated in Transcription
  misc_feature: MA Experiment ID: 108595 Result: Down-regulated in Transcription
  misc_feature: MA Experiment 108595 PARAMETER Experiment Name: At_Ler-pi_Ovule_cDNA_P Parameter: Plant Line Value: null
  misc_feature: MA Experiment ID: 20000070 Result: Down-regulated in Transcription
  misc_feature: MA Experiment 20000070 PARAMETER Experiment Name: At_100uM_ABA_Mutants_cDNA_P Parameter: Plant Line Value: CS24
  misc_feature: MA Experiment 20000070 PARAMETER Experiment Name: At_100uM_ABA_Mutants_cDNA_P Parameter: Timepoint (hr) Value: 6
  misc_feature: MA Experiment 20000070 PARAMETER Experiment Name: At_100uM_ABA_Mutants_cDNA_P Parameter: Tissue Value: Aerial
  misc_feature: MA Experiment 20000070 PARAMETER Experiment Name: At_100uM_ABA_Mutants_cDNA_P Parameter: Treatment Value: 100uM ABA vs. No Treatment
  misc_feature: MA Experiment ID: 20000071 Result: Down-regulated in Transcription
  misc_feature: MA Experiment 20000071 PARAMETER Experiment Name: At_100uM_ABA_Mutants_cDNA_P Parameter: Plant Line Value: CS8104
  misc_feature: MA Experiment 20000071 PARAMETER Experiment Name: At_100uM_ABA_Mutants_cDNA_P Parameter: Timepoint (hr) Value: 6
  misc_feature: MA Experiment 20000071 PARAMETER Experiment Name: At_100uM_ABA_Mutants_cDNA_P Parameter: Tissue Value: Aerial
  misc_feature: MA Experiment 20000071 PARAMETER Experiment Name: At_100uM_ABA_Mutants_cDNA_P Parameter: Treatment Value: 100uM ABA vs. No Treatment
  misc_feature: MA Experiment ID: 20000072 Result: Down-regulated in Transcription
  misc_feature: MA Experiment 20000072 PARAMETER Experiment Name: At_100uM_ABA_Mutants_cDNA_P Parameter: Plant Line Value: CS8105
  misc_feature: MA Experiment 20000072 PARAMETER Experiment Name: At_100uM_ABA_Mutants_cDNA_P Parameter: Timepoint (hr) Value: 6
  misc_feature: MA Experiment 20000072 PARAMETER Experiment Name: At_100uM_ABA_Mutants_cDNA_P Parameter: Tissue Value: Aerial
  misc_feature: MA Experiment 20000072 PARAMETER Experiment Name: At_100uM_ABA_Mutants_cDNA_P Parameter: Treatment Value: 100uM ABA vs. No Treatment
  misc_feature: MA Experiment ID: 20000086 Result: Down-regulated in Transcription
  misc_feature: MA Experiment 20000086 PARAMETER Experiment Name: At_100uM_ABA_Mutants_cDNA_P Parameter: Plant Line Value: CS22
  misc_feature: MA Experiment 20000086 PARAMETER Experiment Name: At_100uM_ABA_Mutants_cDNA_P Parameter: Timepoint (hr) Value: 6
  misc_feature: MA Experiment 20000086 PARAMETER Experiment Name: At_100uM_ABA_Mutants_cDNA_P Parameter: Tissue Value: Aerial
  misc_feature: MA Experiment 20000086 PARAMETER Experiment Name: At_100uM_ABA_Mutants_cDNA_P Parameter: Treatment Value: 100uM ABA vs. No Treatment
  misc_feature: MA Experiment ID: 20000117 Result: Down-regulated in Transcription
  misc_feature: MA Experiment 20000117 PARAMETER Experiment Name: At_100uM_ABA_Mutants_cDNA_P Parameter: Plant Line Value: Columbia
  misc_feature: MA Experiment 20000117 PARAMETER Experiment Name: At_100uM_ABA_Mutants_cDNA_P Parameter: Timepoint (hr) Value: 6
  misc_feature: MA Experiment 20000117 PARAMETER Experiment Name: At_100uM_ABA_Mutants_cDNA_P Parameter: Tissue Value: Aerial
  misc_feature: MA Experiment 20000117 PARAMETER Experiment Name: At_100uM_ABA_Mutants_cDNA_P Parameter: Treatment Value: 100uM ABA vs. No Treatment
  misc_feature: MA Experiment ID: 20000307 Result: Up-regulated in Transcription
  misc_feature: MA Experiment 20000307 PARAMETER Experiment Name: At_Germinating_Seeds_Sub_P Parameter: Age (hr) Value: 24 vs. 0
  misc_feature: MA Experiment 20000307 PARAMETER Experiment Name: At_Germinating_Seeds_Sub_P Parameter: Organism Value: A. thaliana
  misc_feature: MA Experiment 20000307 PARAMETER Experiment Name: At_Germinating_Seeds_Sub_P Parameter: Plant Line Value: WS
  misc_feature: MA Experiment 20000307 PARAMETER Experiment Name: At_Germinating_Seeds_Sub_P Parameter: Tissue Value: Germinating Seeds
  misc_feature: MA Experiment ID: 20000314 Result: Down-regulated in Transcription
  misc_feature: MA Experiment 20000314 PARAMETER Experiment Name: At_14day_Shoots-Roots_Sub_P Parameter: Age (day) Value: 14
  misc_feature: MA Experiment 20000314 PARAMETER Experiment Name: At_14day_Shoots-Roots_Sub_P Parameter: Organism Value: A. thaliana
  misc_feature: MA Experiment 20000314 PARAMETER Experiment Name: At_14day_Shoots-Roots_Sub_P Parameter: Plant Line Value: WS
  misc_feature: MA Experiment 20000314 PARAMETER Experiment Name: At_14day_Shoots-Roots_Sub_P Parameter: Tissue Value: Roots vs. Whole Plant
  misc_feature: MA Experiment ID: 20000355 Result: Up-regulated in Transcription
  misc_feature: MA Experiment 20000355 PARAMETER Experiment Name: At_Siliques_Sub_P Parameter: Age (day) Value: 21
  misc_feature: MA Experiment 20000355 PARAMETER Experiment Name: At_Siliques_Sub_P Parameter: Organism Value: A. thaliana
  misc_feature: MA Experiment 20000355 PARAMETER Experiment Name: At_Siliques_Sub_P Parameter: Plant Line Value: WS
  misc_feature: MA Experiment 20000355 PARAMETER Experiment Name: At_Siliques_Sub_P Parameter: Tissue Value: Less Than 5mm Siliques vs. Whole Plant
  misc_feature: MA Experiment ID: 20001807 Result: Up-regulated in Transcription
  misc_feature: MA Experiment 20001807 PARAMETER Experiment Name: At_50mM_NH4NO3_L-to-H_Sub_P Parameter: Timepoint (hr) Value: 6
  misc_feature: MA Experiment 20001807 PARAMETER Experiment Name: At_50mM_NH4NO3_L-to-H_Sub_P Parameter: Tissue Value: Leaf
  misc_feature: MA Experiment 20001807 PARAMETER Experiment Name: At_50mM_NH4NO3_L-to-H_Sub_P Parameter: Treatment Value: 50mM NH4NO3 vs 100mM Mannitol
actcacagagacacacaaaacaaatcccaaagcttcagaggaagaagaagaagagagtgagaaacaatggcgtcgacgactctctcaatcgcaacaacaatccgttcctcttctcctctcacttccgcttccactcatcacttcctttccaaacccaccgcaatcgaattcccatttcgtctcagctcttcttctagccaccgtgcaatcaacctccgtcctatctccgccgtcgaagctccggagaaaatcgagaaaatcggatccgaaatctcctccttaaccctcgaagaagctcgtatcctcgtcgactatctccaagacaaattcggtgtctccccactctccttagcccccgcagcagcggccgttgcagctccagccgacggtggcgcggcggctgtagtggaggagcaaacagagttcgatgtggttatcaatgaagttccgagtagttctcgtattgcagtaattaaagctgttagggctttgactagcttggcgttgaaggaagctaaggagctaatcgaaggattaccaaagaagtttaaagaaggtatcactaaagatgaagctgaagaagctaagaagactcttgaagaagctggtgctaaagtctccattgcttaagtttcttcaacaatcggaaaaaaaaaaatgtgatattttcggaatttatgagtctttttgttgtttagtatagtttgtgtttgagttattgattcagcttttgagaaattgttgtactttgaatcaatttggtttcgtattacagttttagtcttcaacaagttcttcctctagatgc

SEQ ID NO: 106229 - protein, 187 aa, Arabidopsis thaliana
  peptide (1)..(187): Ceres Seq. ID no. 13619027
  misc_feature (119)..(187): Pfam Name: Ribosomal protein L7/L12 C-terminal domain Pfam Description: Ribosomal protein L7/L12 C-terminal domain
  misc_feature (1)..(187): Homolog of NCBI NO: 15232276 NR Description: 50S ribosomal protein L12-3, chloroplast (CL12-C) [Arabidopsis thaliana] >gi|21431811|sp|P36212|R123_ARATH
  misc_feature (1)..(187): Homolog of NCBI NO: 21592776 NR Description: 50S ribosomal protein L12-C [Arabidopsis thaliana]
  misc_feature (1)..(187): Homolog of NCBI NO: 541897 NR Description: ribosomal protein L12.C precursor, chloroplast - thaliana >gi|468773|emb|CAA48183.1| ribosomal protein L12
  misc_feature (1)..(187): Homolog of NCBI NO: 15232274 NR Description: 50S ribosomal protein L12-1, chloroplast (CL12-A) [Arabidopsis thaliana] >gi|548653|sp|P36210|R121_ARATH
  misc_feature (1)..(186): Homolog of NCBI NO: 15232275 NR Description: 50S ribosomal protein L12-2, chloroplast (CL12-B) [Arabidopsis thaliana] >gi|21431810|sp|P36211|R122_ARATH
  misc_feature (1)..(186): Homolog of NCBI NO: 541896 NR Description: ribosomal protein L12.B precursor, chloroplast - thaliana >gi|468772|emb|CAA48182.1| ribosomal protein L12
  misc_feature (1)..(187): Homolog of NCBI NO: 20020 NR Description: ribosomal protein L12-1a [Nicotiana tabacum]
  misc_feature (1)..(187): Homolog of NCBI NO: 133088 NR Description: 50S RIBOSOMAL PROTEIN L12, CHLOROPLAST PRECURSOR
  misc_feature (1)..(187): Homolog of NCBI NO: 548746 NR Description: 50S RIBOSOMAL PROTEIN L12, CHLOROPLAST PRECURSOR
  misc_feature (1)..(186): Homolog of NCBI NO: 133085 NR Description: 50S RIBOSOMAL PROTEIN L12, CHLOROPLAST PRECURSOR
MASTTLSIATTIRSSSPLTSASTHHFLSKPTAIEFPFRLSSSSSHRAINLRPISAVEAPEKIEKIGSEISSLTLEEARILVDYLQDKFGVSPLSLAPAAAAVAAPADGGAAAVVEEQTEFDVVINEVPSSSRIAVIKAVRALTSLALKEAKELIEGLPKKFKEGITKDEAEEAKKTLEEAGAKVSIA

SEQ ID NO: 106230 - protein, 93 aa, Arabidopsis thaliana
  peptide (1)..(93): Ceres Seq. ID no. 13619028
LTETHKTNPKASEEEEEESEKQWRRRLSQSQQQSVPLLLSLPLPLITSFPNPPQSNSHFVSALLLATVQSTSVLSPPSKLRRKSRKSDPKSPP

SEQ ID NO: 106231 - DNA, 861 bp, Arabidopsis thaliana
  misc_feature (1)..(861): Ceres Seq. ID no. 13619034
  misc_feature: MA Experiment ID: 108488 Result: Down-regulated in Transcription
attttagctttctgtctattcaccagattctctctattcgattctccctttacttcttctcgtctctcttctctgctcgtcagatctcaaaatcaatcggatatcgaaaccacaacttcatcaattatgactcttggctcaggaggatctagcgttgttgttccgaggaattttcggttgttggaggagcttgaacgtggggagaaaggtattggggatggaactgtgagctatggaatggatgatggagatgacatctatatgcgttcttggactggcaccatcatcggtcctcacaacactgttcatgaaggtagaatctatcagttgaagctcttttgtgacaaagattacccggagaaacctccaactgtccgattccattcacgtgtcaacatggcttgtgtcaaccacgaaacaggagtggtggatcctaagaaatttgggctacttgcaaactggcaaagagagtacacaatggaggatatactggtacagttgaagaaggaaatgtctacgtcgcataaccgtaagcttgttcaacctccggaaggtacttgcttctagttacttctggaatcttcttctggtttgctagaaaatcattgccccttctaataccaaagtatgtatctgggggtcctccattgtcgttctcaacgcttttttttttttaattcatcaaaaaatggtctgtgtggatggtatggtgatgatgatgatgttgtccgattgatcatctgaagttttatcattgtgtgcaaatatcaaaaacagcttctcttcctcactccatgtgttcaatcttttgaatttaacattttgtgtcagccctttttttatatataaatgaaatctgct

SEQ ID NO: 106232 - protein, 188 aa, Arabidopsis thaliana; identical to SEQ ID NO: 29977
  peptide (1)..(188): Ceres Seq. ID no. 13619035
  misc_feature (43)..(188): Homolog of NCBI NO: 18409633 NR Description: ubiquitin-conjugating enzyme family [Arabidopsis
  misc_feature (43)..(188): Homolog of NCBI NO: 30693656 NR Description: ubiquitin-conjugating enzyme family [Arabidopsis
  misc_feature (43)..(188): Homolog of NCBI NO: 18404032 NR Description: ubiquitin-conjugating enzyme family [Arabidopsis
  misc_feature (43)..(188): Homolog of NCBI NO: 30686662 NR Description: ubiquitin-conjugating enzyme family [Arabidopsis
  misc_feature (43)..(188): Homolog of NCBI NO: 32488709 NR Description: OSJNBa0088H09.10 [Oryza sativa (japonica
  misc_feature (49)..(188): Homolog of NCBI NO: 2982253 NR Description: CROC-1-like protein [Picea mariana]
  misc_feature (45)..(185): Homolog of NCBI NO: 18395221 NR Description: ubiquitin-conjugating enzyme family [Arabidopsis >gi|16649053|gb|AAL24378.1| similar to DNA binding protein thaliana] >gi|20259984|gb|AAM13339.1| similar to DNA binding
  misc_feature (45)..(185): Homolog of NCBI NO: 21593918 NR Description: E2, ubiquitin-conjugating enzyme, putative
  misc_feature (45)..(185): Homolog of NCBI NO: 18409647 NR Description: ubiquitin-conjugating enzyme family [Arabidopsis
  misc_feature (54)..(185): Homolog of NCBI NO: 13324790 NR Description: putative DNA-binding protein [Oryza sativa]

SEQ ID NO: 106233 - protein, 146 aa, Arabidopsis thaliana; identical to SEQ ID NO: 29978
  peptide (1)..(146): Ceres Seq. ID no. 13619036
  misc_feature (1)..(146): Homolog of NCBI NO: 18409633 NR Description: ubiquitin-conjugating enzyme family [Arabidopsis
  misc_feature (1)..(146): Homolog of NCBI NO: 30693656 NR Description: ubiquitin-conjugating enzyme family [Arabidopsis
  misc_feature (1)..(146): Homolog of NCBI NO: 18404032 NR Description: ubiquitin-conjugating enzyme family [Arabidopsis
  misc_feature (1)..(146): Homolog of NCBI NO: 30686662 NR Description: ubiquitin-conjugating enzyme family [Arabidopsis
  misc_feature (1)..(146): Homolog of NCBI NO: 32488709 NR Description: OSJNBa0088H09.10 [Oryza sativa (japonica
  misc_feature (7)..(146): Homolog of NCBI NO: 2982253 NR Description: CROC-1-like protein [Picea mariana]
  misc_feature (3)..(143): Homolog of NCBI NO: 18395221 NR Description: ubiquitin-conjugating enzyme family [Arabidopsis >gi|16649053|gb|AAL24378.1| similar to DNA binding protein thaliana] >gi|20259984|gb|AAM13339.1| similar to DNA binding
  misc_feature (3)..(143): Homolog of NCBI NO: 21593918 NR Description: E2, ubiquitin-conjugating enzyme, putative
  misc_feature (3)..(143): Homolog of NCBI NO: 18409647 NR Description: ubiquitin-conjugating enzyme family [Arabidopsis
  misc_feature (12)..(143): Homolog of NCBI NO: 13324790 NR Description: putative DNA-binding protein [Oryza sativa]

SEQ ID NO: 106234 - protein, 109 aa, Arabidopsis thaliana; identical to SEQ ID NO: 29979
  peptide (1)..(109): Ceres Seq. ID no. 13619037
  misc_feature (1)..(109): Homolog of NCBI NO: 18409633 NR Description: ubiquitin-conjugating enzyme family [Arabidopsis
  misc_feature (1)..(109): Homolog of NCBI NO: 30693656 NR Description: ubiquitin-conjugating enzyme family [Arabidopsis
  misc_feature (1)..(109): Homolog of NCBI NO: 18404032 NR Description: ubiquitin-conjugating enzyme family [Arabidopsis
  misc_feature (1)..(109): Homolog of NCBI NO: 30686662 NR Description: ubiquitin-conjugating enzyme family [Arabidopsis
  misc_feature (1)..(109): Homolog of NCBI NO: 32488709 NR Description: OSJNBa0088H09.10 [Oryza sativa (japonica
  misc_feature (1)..(109): Homolog of NCBI NO: 2982253 NR Description: CROC-1-like protein [Picea mariana]
  misc_feature (1)..(106): Homolog of NCBI NO: 18395221 NR Description: ubiquitin-conjugating enzyme family [Arabidopsis >gi|16649053|gb|AAL24378.1| similar to DNA binding protein thaliana] >gi|20259984|gb|AAM13339.1| similar to DNA binding
  misc_feature (1)..(106): Homolog of NCBI NO: 21593918 NR Description: E2, ubiquitin-conjugating enzyme, putative
  misc_feature (1)..(106): Homolog of NCBI NO: 18409647 NR Description: ubiquitin-conjugating enzyme family [Arabidopsis
  misc_feature (1)..(106): Homolog of NCBI NO: 13324790 NR Description: putative DNA-binding protein [Oryza sativa]

SEQ ID NO: 106235 - DNA, 1369 bp, Arabidopsis thaliana
  misc_feature (1)..(1369): Ceres Seq. ID no. 13619038
  misc_feature: MA Experiment ID: 108434 Result: Down-regulated in Transcription
  misc_feature: MA Experiment 108434 PARAMETER Experiment Name: At_Root_Tips_cDNA_P Parameter: Tissue Value: Root Tips
  misc_feature: MA Experiment ID: 108464 Result: Up-regulated in Transcription
  misc_feature: MA Experiment 108464 PARAMETER Experiment Name: At_Germinating_Seeds_cDNA_P Parameter: Age (day) Value: 4 vs. 0
  misc_feature: MA Experiment 108464 PARAMETER Experiment Name: At_Germinating_Seeds_cDNA_P Parameter: Tissue Value: Germinating Seeds
  misc_feature: MA Experiment ID: 108488 Result: Down-regulated in Transcription
  misc_feature: MA Experiment ID: 108585 Result: Up-regulated in Transcription
  misc_feature: MA Experiment 108585 PARAMETER Experiment Name: At_5mM_NaNP_cDNA_P Parameter: Timepoint (hr) Value: 6
  misc_feature: MA Experiment 108585 PARAMETER Experiment Name: At_5mM_NaNP_cDNA_P Parameter: Tissue Value: Aerial
  misc_feature: MA Experiment 108585 PARAMETER Experiment Name: At_5mM_NaNP_cDNA_P Parameter: Treatment Value: null
  misc_feature: MA Experiment ID: 20000069 Result: Up-regulated in Transcription
  misc_feature: MA Experiment 20000069 PARAMETER Experiment Name: At_100uM_ABA_Mutants_cDNA_P Parameter: Plant Line Value: CS23
  misc_feature: MA Experiment 20000069 PARAMETER Experiment Name: At_100uM_ABA_Mutants_cDNA_P Parameter: Timepoint (hr) Value: 6
  misc_feature: MA Experiment 20000069 PARAMETER Experiment Name: At_100uM_ABA_Mutants_cDNA_P Parameter: Tissue Value: Aerial
  misc_feature: MA Experiment 20000069 PARAMETER Experiment Name: At_100uM_ABA_Mutants_cDNA_P Parameter: Treatment Value: 100uM ABA vs. No Treatment
  misc_feature: MA Experiment ID: 20000070 Result: Up-regulated in Transcription
  misc_feature: MA Experiment 20000070 PARAMETER Experiment Name: At_100uM_ABA_Mutants_cDNA_P Parameter: Plant Line Value: CS24
  misc_feature: MA Experiment 20000070 PARAMETER Experiment Name: At_100uM_ABA_Mutants_cDNA_P Parameter: Timepoint (hr) Value: 6
  misc_feature: MA Experiment 20000070 PARAMETER Experiment Name: At_100uM_ABA_Mutants_cDNA_P Parameter: Tissue Value: Aerial
  misc_feature: MA Experiment 20000070 PARAMETER Experiment Name: At_100uM_ABA_Mutants_cDNA_P Parameter: Treatment Value: 100uM ABA vs. No Treatment
  misc_feature: MA Experiment ID: 20000071 Result: Up-regulated in Transcription
  misc_feature: MA Experiment 20000071 PARAMETER Experiment Name: At_100uM_ABA_Mutants_cDNA_P Parameter: Plant Line Value: CS8104
  misc_feature: MA Experiment 20000071 PARAMETER Experiment Name: At_100uM_ABA_Mutants_cDNA_P Parameter: Timepoint (hr) Value: 6
  misc_feature: MA Experiment 20000071 PARAMETER Experiment Name: At_100uM_ABA_Mutants_cDNA_P Parameter: Tissue Value: Aerial
  misc_feature: MA Experiment 20000071 PARAMETER Experiment Name: At_100uM_ABA_Mutants_cDNA_P Parameter: Treatment Value: 100uM ABA vs. No Treatment
  misc_feature: MA Experiment ID: 20000173 Result: Down-regulated in Transcription
  misc_feature: MA Experiment 20000173 PARAMETER Experiment Name: At_42deg_Heat_P Parameter: Age (day) Value: 14
  misc_feature: MA Experiment 20000173 PARAMETER Experiment Name: At_42deg_Heat_P Parameter: Organism Value: A. thaliana
  misc_feature: MA Experiment 20000173 PARAMETER Experiment Name: At_42deg_Heat_P Parameter: Plant Line Value: WS
  misc_feature: MA Experiment 20000173 PARAMETER Experiment Name: At_42deg_Heat_P Parameter: Temperature (deg C) Value: 42 vs. 22
  misc_feature: MA Experiment 20000173 PARAMETER Experiment Name: At_42deg_Heat_P Parameter: Timepoint (hr) Value: 6
  misc_feature: MA Experiment 20000173 PARAMETER Experiment Name: At_42deg_Heat_P Parameter: Tissue Value: Aerial
  misc_feature: MA Experiment ID: 20000224 Result: Down-regulated in Transcription
  misc_feature: MA Experiment ID: 20000227 Result: Down-regulated in Transcription
  misc_feature: MA Experiment 20000227 PARAMETER Experiment Name: At_Root-Tips-vs-Tops_P Parameter: Tissue Value: Root Tips vs. Root Tops
  misc_feature: MA Experiment ID: 20000234 Result: Down-regulated in Transcription
  misc_feature: MA Experiment 20000234 PARAMETER Experiment Name: At_Siliques_P Parameter: Age (day) Value: 21
  misc_feature: MA Experiment 20000234 PARAMETER Experiment Name: At_Siliques_P Parameter: Organism Value: A. thaliana
  misc_feature: MA Experiment 20000234 PARAMETER Experiment Name: At_Siliques_P Parameter: Plant Line Value: WS
  misc_feature: MA Experiment 20000234 PARAMETER Experiment Name: At_Siliques_P Parameter: Tissue Value: Less Than 5mm Siliques vs. Whole Plant
  misc_feature: MA Experiment ID: 20000264 Result: Down-regulated in Transcription
  misc_feature: MA Experiment 20000264 PARAMETER Experiment Name: At_Open_Flower_P Parameter: Age (day) Value: 21
  misc_feature: MA Experiment 20000264 PARAMETER Experiment Name: At_Open_Flower_P Parameter: Plant Line Value: WS
  misc_feature: MA Experiment 20000264 PARAMETER Experiment Name: At_Open_Flower_P Parameter: Tissue Value: Open Flower vs. Whole Plant
  misc_feature: MA Experiment ID: 20000265 Result: Down-regulated in Transcription
  misc_feature: MA Experiment 20000265 PARAMETER Experiment Name: At_Open_Flower_P Parameter: Age (day) Value: 21
  misc_feature: MA Experiment 20000265 PARAMETER Experiment Name: At_Open_Flower_P Parameter: Plant Line Value: WS
  misc_feature: MA Experiment 20000265 PARAMETER Experiment Name: At_Open_Flower_P Parameter: Tissue Value: Closed Flower vs. Whole Plant
  misc_feature: MA Experiment ID: 20000286 Result: Down-regulated in Transcription
  misc_feature: MA Experiment 20000286 PARAMETER Experiment Name: At_Open_Flower_P Parameter: Age (day) Value: 21
  misc_feature: MA Experiment 20000286 PARAMETER Experiment Name: At_Open_Flower_P Parameter: Plant Line Value: WS
  misc_feature: MA Experiment 20000286 PARAMETER Experiment Name: At_Open_Flower_P Parameter: Tissue Value: Half Open vs. Whole Plant
  misc_feature: MA Experiment ID: 20000438 Result: Down-regulated in Transcription
  misc_feature: MA Experiment 20000438 PARAMETER Experiment Name: At_Shoots__P Parameter: Age (day) Value: 14
  misc_feature: MA Experiment 20000438 PARAMETER Experiment Name: At_Shoots__P Parameter: Tissue Value: Shoots vs. Whole Plant
  misc_feature: MA Experiment ID: 20000495 Result: Down-regulated in Transcription
  misc_feature: MA Experiment 20000495 PARAMETER Experiment Name: At_Guard_Cells_P Parameter: Harvest Date Value: 8/2/2002
  misc_feature: MA Experiment 20000495 PARAMETER Experiment Name: At_Guard_Cells_P Parameter: Organism Value: A. thaliana
  misc_feature: MA Experiment 20000495 PARAMETER Experiment Name: At_Guard_Cells_P Parameter: Tissue Value: Guard Cells vs. Leaves
  misc_feature: MA Experiment ID: 20000527 Result: Down-regulated in Transcription
  misc_feature: MA Experiment 20000527 PARAMETER Experiment Name: At_10percent_PEG_P Parameter: Age (day) Value: 20
  misc_feature: MA Experiment 20000527 PARAMETER Experiment Name: At_10percent_PEG_P Parameter: Organism Value: A. thaliana
  misc_feature: MA Experiment 20000527 PARAMETER Experiment Name: At_10percent_PEG_P Parameter: Plant Line Value: WS
  misc_feature: MA Experiment 20000527 PARAMETER Experiment Name: At_10percent_PEG_P Parameter: Timepoint (day) Value: 20
  misc_feature: MA Experiment 20000527 PARAMETER Experiment Name: At_10percent_PEG_P Parameter: Tissue Value: Whole Plant
  misc_feature: MA Experiment 20000527 PARAMETER Experiment Name: At_10percent_PEG_P Parameter: Treatment Value: 10percent PEG vs. No Treatment
  misc_feature: MA Experiment ID: 20000709 Result: Down-regulated in Transcription
  misc_feature: MA Experiment 20000709 PARAMETER Experiment Name: At_15mM_NH4NO3_L-to-H_P Parameter: Age (hr) Value: 14
  misc_feature: MA Experiment 20000709 PARAMETER Experiment Name: At_15mM_NH4NO3_L-to-H_P Parameter: Organism Value: A. thaliana
  misc_feature: MA Experiment 20000709 PARAMETER Experiment Name: At_15mM_NH4NO3_L-to-H_P Parameter: Plant Line Value: WS
  misc_feature: MA Experiment 20000709 PARAMETER Experiment Name: At_15mM_NH4NO3_L-to-H_P Parameter: Timepoint (hr) Value: 4
  misc_feature: MA Experiment 20000709 PARAMETER Experiment Name: At_15mM_NH4NO3_L-to-H_P Parameter: Tissue Value: Aerial
  misc_feature: MA Experiment 20000709 PARAMETER Experiment Name: At_15mM_NH4NO3_L-to-H_P Parameter: Treatment Value: 15mM NH4NO3 vs. 30mM Mannitol
  misc_feature: MA Experiment ID: 20000794 Result: Down-regulated in Transcription
  misc_feature: MA Experiment 20000794 PARAMETER Experiment Name: At_Petals_P Parameter: Age (day) Value: 23-25 days
  misc_feature: MA Experiment 20000794 PARAMETER Experiment Name: At_Petals_P Parameter: Plant Line Value: WS
  misc_feature: MA Experiment 20000794 PARAMETER Experiment Name: At_Petals_P Parameter: Tissue Value: Petals vs. Whole plant
  misc_feature: MA Experiment ID: 20001558 Result: Down-regulated in Transcription
  misc_feature: MA Experiment 20001558 PARAMETER Experiment Name: At_Drought_Soil_Dry_P Parameter: Age (day) Value: 27
  misc_feature: MA Experiment 20001558 PARAMETER Experiment Name: At_Drought_Soil_Dry_P Parameter: Organism Value: A. thaliana
  misc_feature: MA Experiment 20001558 PARAMETER Experiment Name: At_Drought_Soil_Dry_P Parameter: Plant Line Value: WS
  misc_feature: MA Experiment 20001558 PARAMETER Experiment Name: At_Drought_Soil_Dry_P Parameter: Post Timepoint (hr) Value: 6
  misc_feature: MA Experiment 20001558 PARAMETER Experiment Name: At_Drought_Soil_Dry_P Parameter: Post-Treatment Value: Re-Water vs. No Drought
  misc_feature: MA Experiment 20001558 PARAMETER Experiment Name: At_Drought_Soil_Dry_P Parameter: Timepoint (day) Value: 13
  misc_feature: MA Experiment 20001558 PARAMETER Experiment Name: At_Drought_Soil_Dry_P Parameter: Treatment Value: Drought vs. No Drought
  misc_feature: MA Experiment ID: 20001559 Result: Down-regulated in Transcription
  misc_feature: MA Experiment 20001559 PARAMETER Experiment Name: At_Drought_Soil_Dry_P Parameter: Age (day) Value: 28
  misc_feature: MA Experiment 20001559 PARAMETER Experiment Name: At_Drought_Soil_Dry_P Parameter: Organism Value: A. thaliana
  misc_feature: MA Experiment 20001559 PARAMETER Experiment Name: At_Drought_Soil_Dry_P Parameter: Plant Line Value: WS
  misc_feature: MA Experiment 20001559 PARAMETER Experiment Name: At_Drought_Soil_Dry_P Parameter: Post Timepoint (hr) Value: 29
  misc_feature: MA Experiment 20001559 PARAMETER Experiment Name: At_Drought_Soil_Dry_P Parameter: Post-Treatment Value: Re-Water vs. No Drought
  misc_feature: MA Experiment 20001559 PARAMETER Experiment Name: At_Drought_Soil_Dry_P Parameter: Timepoint (day) Value: 14
  misc_feature: MA Experiment 20001559 PARAMETER Experiment Name: At_Drought_Soil_Dry_P Parameter: Treatment Value: Drought vs. No Drought
ctccttaaatcacttcgatcaaaacttatctctctctatcgtcttttgttttgatttaaatgcctcaagtcgttgcttcagcatgtaccggtgggtctgaccggaaaatctcatgtgaaactctggccgacgataacgaagactcacctcataactcgaagatccgacccgtatccatctccgccgtcgattttccaccggaatcttactctttatcaaaagaagctcagctcgaatggctaaacgacaacgccttcttcgaacgcaaagaatcacaaaaaggaaactcttctgctccaatttcgaatcccaatacaaaccctaattcgagctctcatcgaatctcactcaaatcaaaagcgtcgatcatcagattaccgaaaccgcagaagacgtgtttcaacgaagcgaagaaacggagaaattgcagaatcgcgaggactttgatgattccgaaacggatcgggtcgagattgaaatcggatcctacgttatcggagccatgttctcccaaggtttcttgtatcggaagggttagatctaaacgtgatcgtagccgacgaatgcagagacaaaaatccggtcgaaccaattcgtttaaggataaaccggttccggttaagaagcctggttttttcgctagcttcagagctattttcagaaccggtggcggttgcaaagacttatctgcgagtggagctcacgcgcctcggagggatgtcgtagtctctccgccgagagtttcggtgagaagatcgacggatattagaggacggcttccgccgggagacgtcgggaaatcctcgccgcagaggaatagtaccggttcgaggagatcaattgacggcggtgaaccggttctgcctggtttaggtgggatgactcggtttacttcagggagaagaccggatttgttggttgaagtttgacgtggcgtgacgtacggcgttttactgtgagtggtggggtccagtcccgagaaaaaacaaggatcgtgattggttagttggctatatggggcccagaagcgtgtgtatatttgaaaagtcgttgtgatgacatggcgagtggtttaacggagttaggaacacggcacagatagaaaaacgcggacgcttttggattgatttcttacgtctcaaccactttcaccgttttattatatagcttttggtgcgttttttcttctttttaagacttttgatatttgaattagtttcgctttttgtcctttttattattttccttgttttgggttgtacataggtattgttatttctttgtgtacatgtgttttttttttgcttagaaaggaatagtagaatgtaaaagatacttgtgatgatcagtcaataatgtgttagacacc

SEQ ID NO: 106236 - protein, 289 aa, Arabidopsis thaliana; identical to SEQ ID NO: 40578
  peptide (1)..(289): Ceres Seq. ID no. 13619039
  misc_feature (1)..(289): Homolog of NCBI NO: 15231297 NR Description: expressed protein [Arabidopsis thaliana]
  misc_feature (1)..(264): Homolog of NCBI NO: 21537164 NR Description: unknown [Arabidopsis thaliana]
  misc_feature (1)..(264): Homolog of NCBI NO: 18404079 NR Description: expressed protein [Arabidopsis thaliana]

SEQ ID NO: 106237 - protein, 160 aa, Arabidopsis thaliana; identical to SEQ ID NO: 40579
  peptide (1)..(160): Ceres Seq. ID no. 13619040
  misc_feature (1)..(160): Homolog of NCBI NO: 15231297 NR Description: expressed protein [Arabidopsis thaliana]
  misc_feature (1)..(135): Homolog of NCBI NO: 21537164 NR Description: unknown [Arabidopsis thaliana]
  misc_feature (1)..(135): Homolog of NCBI NO: 18404079 NR Description: expressed protein [Arabidopsis thaliana]

SEQ ID NO: 106238 - DNA, 1447 bp, Arabidopsis thaliana
  misc_feature (1)..(1447): Ceres Seq. ID no. 13619053
  misc_feature: MA Experiment ID: 108434 Result: Up-regulated in Transcription
  misc_feature: MA Experiment 108434 PARAMETER Experiment Name: At_Root_Tips_cDNA_P Parameter: Tissue Value: Root Tips
  misc_feature: MA Experiment ID: 108461 Result: Up-regulated in Transcription
  misc_feature: MA Experiment 108461 PARAMETER Experiment Name: At_Germinating_Seeds_cDNA_P Parameter: Age (day) Value: 1 vs. 0
  misc_feature: MA Experiment 108461 PARAMETER Experiment Name: At_Germinating_Seeds_cDNA_P Parameter: Tissue Value: Germinating Seeds
  misc_feature: MA Experiment ID: 108561 Result: Down-regulated in Transcription
  misc_feature: MA Experiment 108561 PARAMETER Experiment Name: At_100uM_ABA_cDNA_P Parameter: Timepoint (hr) Value: 6
  misc_feature: MA Experiment 108561 PARAMETER Experiment Name: At_100uM_ABA_cDNA_P Parameter: Tissue Value: Aerial
  misc_feature: MA Experiment 108561 PARAMETER Experiment Name: At_100uM_ABA_cDNA_P Parameter: Treatment Value: 100uM ABA vs. No Treatment
  misc_feature: MA Experiment ID: 108577 Result: Down-regulated in Transcription
  misc_feature: MA Experiment 108577 PARAMETER Experiment Name: At_42deg_Heat_cDNA_P Parameter: Temperature (deg C) Value: 42 vs. 22
  misc_feature: MA Experiment 108577 PARAMETER Experiment Name: At_42deg_Heat_cDNA_P Parameter: Timepoint (hr) Value: 6
  misc_feature: MA Experiment 108577 PARAMETER Experiment Name: At_42deg_Heat_cDNA_P Parameter: Tissue Value: Aerial
  misc_feature: MA Experiment ID: 108579 Result: Up-regulated in Transcription
  misc_feature: MA Experiment 108579 PARAMETER Experiment Name: At_4deg_Cold_cDNA_P Parameter: Temperature (deg C) Value: 4 vs. 22
  misc_feature: MA Experiment 108579 PARAMETER Experiment Name: At_4deg_Cold_cDNA_P Parameter: Timepoint (hr) Value: 6
  misc_feature: MA Experiment 108579 PARAMETER Experiment Name: At_4deg_Cold_cDNA_P Parameter: Tissue Value: Aerial
  misc_feature: MA Experiment ID: 108595 Result: Down-regulated in Transcription
  misc_feature: MA Experiment 108595 PARAMETER Experiment Name: At_Ler-pi_Ovule_cDNA_P Parameter: Plant Line Value: null
  misc_feature: MA Experiment ID: 108607 Result: Down-regulated in Transcription
  misc_feature: MA Experiment 108607 PARAMETER Experiment Name: At_100uM_ABA_cDNA_P Parameter: Timepoint (hr) Value: 4
  misc_feature: MA Experiment 108607 PARAMETER Experiment Name: At_100uM_ABA_cDNA_P Parameter: Tissue Value: Aerial
  misc_feature: MA Experiment 108607 PARAMETER Experiment Name: At_100uM_ABA_cDNA_P Parameter: Treatment Value: 100uM ABA vs. No Treatment
  misc_feature: MA Experiment ID: 20000072 Result: Down-regulated in Transcription
  misc_feature: MA Experiment 20000072 PARAMETER Experiment Name: At_100uM_ABA_Mutants_cDNA_P Parameter: Plant Line Value: CS8105
  misc_feature: MA Experiment 20000072 PARAMETER Experiment Name: At_100uM_ABA_Mutants_cDNA_P Parameter: Timepoint (hr) Value: 6
  misc_feature: MA Experiment 20000072 PARAMETER Experiment Name: At_100uM_ABA_Mutants_cDNA_P Parameter: Tissue Value: Aerial
  misc_feature: MA Experiment 20000072 PARAMETER Experiment Name: At_100uM_ABA_Mutants_cDNA_P Parameter: Treatment Value: 100uM ABA vs. No Treatment
  misc_feature: MA Experiment ID: 20000111 Result: Down-regulated in Transcription
  misc_feature: MA Experiment 20000111 PARAMETER Experiment Name: At_42deg_Heat_cDNA_P Parameter: Temperature (deg C) Value: 42 vs. 22
  misc_feature: MA Experiment 20000111 PARAMETER Experiment Name: At_42deg_Heat_cDNA_P Parameter: Timepoint (hr) Value: 6
  misc_feature: MA Experiment 20000111 PARAMETER Experiment Name: At_42deg_Heat_cDNA_P Parameter: Tissue Value: Aerial
  misc_feature: MA Experiment ID: 20000306 Result: Up-regulated in Transcription
  misc_feature: MA Experiment 20000306 PARAMETER Experiment Name: At_Germinating_Seeds_Sub_P Parameter: Age (hr) Value: 6 vs. 0
  misc_feature: MA Experiment 20000306 PARAMETER Experiment Name: At_Germinating_Seeds_Sub_P Parameter: Organism Value: A. thaliana
  misc_feature: MA Experiment 20000306 PARAMETER Experiment Name: At_Germinating_Seeds_Sub_P Parameter: Plant Line Value: WS
  misc_feature: MA Experiment 20000306 PARAMETER Experiment Name: At_Germinating_Seeds_Sub_P Parameter: Tissue Value: Germinating Seeds
  misc_feature: MA Experiment ID: 20000307 Result: Up-regulated in Transcription
  misc_feature: MA Experiment 20000307 PARAMETER Experiment Name: At_Germinating_Seeds_Sub_P Parameter: Age (hr) Value: 24 vs. 0
  misc_feature: MA Experiment 20000307 PARAMETER Experiment Name: At_Germinating_Seeds_Sub_P Parameter: Organism Value: A. thaliana
  misc_feature: MA Experiment 20000307 PARAMETER Experiment Name: At_Germinating_Seeds_Sub_P Parameter: Plant Line Value: WS
  misc_feature: MA Experiment 20000307 PARAMETER Experiment Name: At_Germinating_Seeds_Sub_P Parameter: Tissue Value: Germinating Seeds
  misc_feature: MA Experiment ID: 20000327 Result: Down-regulated in Transcription
  misc_feature: MA Experiment 20000327 PARAMETER Experiment Name: At_42deg_Heat_Sub_P Parameter: Age (day) Value: 14
  misc_feature: MA Experiment 20000327 PARAMETER Experiment Name: At_42deg_Heat_Sub_P Parameter: Organism Value: A. thaliana
  misc_feature: MA Experiment 20000327 PARAMETER Experiment Name: At_42deg_Heat_Sub_P Parameter: Plant Line Value: WS
  misc_feature: MA Experiment 20000327 PARAMETER Experiment Name: At_42deg_Heat_Sub_P Parameter: Temperature (deg C) Value: 42 vs. 22
  misc_feature: MA Experiment 20000327 PARAMETER Experiment Name: At_42deg_Heat_Sub_P Parameter: Timepoint (hr) Value: 1
  misc_feature: MA Experiment 20000327 PARAMETER Experiment Name: At_42deg_Heat_Sub_P Parameter: Tissue Value: Aerial
  misc_feature: MA Experiment ID: 20000328 Result: Down-regulated in Transcription
  misc_feature: MA Experiment 20000328 PARAMETER Experiment Name: At_42deg_Heat_Sub_P Parameter: Age (day) Value: 14
  misc_feature: MA Experiment 20000328 PARAMETER Experiment Name: At_42deg_Heat_Sub_P Parameter: Organism Value: A. thaliana
  misc_feature: MA Experiment 20000328 PARAMETER Experiment Name: At_42deg_Heat_Sub_P Parameter: Plant Line Value: WS
  misc_feature: MA Experiment 20000328 PARAMETER Experiment Name: At_42deg_Heat_Sub_P Parameter: Temperature (deg C) Value: 42 vs. 22
  misc_feature: MA Experiment 20000328 PARAMETER Experiment Name: At_42deg_Heat_Sub_P Parameter: Timepoint (hr) Value: 6
  misc_feature: MA Experiment 20000328 PARAMETER Experiment Name: At_42deg_Heat_Sub_P Parameter: Tissue Value: Aerial
  misc_feature: MA Experiment ID: 20000329 Result: Up-regulated in Transcription
  misc_feature: MA Experiment 20000329 PARAMETER Experiment Name: At_4deg_Cold_Sub_P Parameter: Age (day) Value: 14
  misc_feature: MA Experiment 20000329 PARAMETER Experiment Name: At_4deg_Cold_Sub_P Parameter: Organism Value: A. thaliana
  misc_feature: MA Experiment 20000329 PARAMETER Experiment Name: At_4deg_Cold_Sub_P Parameter: Plant Line Value: WS
  misc_feature: MA Experiment 20000329 PARAMETER Experiment Name: At_4deg_Cold_Sub_P Parameter: Temperature (deg C) Value: 4 vs. 22
  misc_feature: MA Experiment 20000329 PARAMETER Experiment Name: At_4deg_Cold_Sub_P Parameter: Timepoint (hr) Value: 6
  misc_feature: MA Experiment 20000329 PARAMETER Experiment Name: At_4deg_Cold_Sub_P Parameter: Tissue Value: Aerial
  misc_feature: MA Experiment ID: 20000347 Result: Down-regulated in Transcription
  misc_feature: MA Experiment 20000347 PARAMETER Experiment Name: At_2mM_SA_Sub_P Parameter: Age (day) Value: 14
  misc_feature: MA Experiment 20000347 PARAMETER Experiment Name: At_2mM_SA_Sub_P Parameter: Organism Value: A. thaliana
  misc_feature: MA Experiment 20000347 PARAMETER Experiment Name: At_2mM_SA_Sub_P Parameter: Plant Line Value: WS
  misc_feature: MA Experiment 20000347 PARAMETER Experiment Name: At_2mM_SA_Sub_P Parameter: Timepoint (hr) Value: 6
  misc_feature: MA Experiment 20000347 PARAMETER Experiment Name: At_2mM_SA_Sub_P Parameter: Tissue Value: Aerial
  misc_feature: MA Experiment 20000347 PARAMETER Experiment Name: At_2mM_SA_Sub_P Parameter: Treatment Value: 2mM SA vs. No Treatment
  misc_feature: MA Experiment ID: 20001807 Result: Up-regulated in Transcription
  misc_feature: MA Experiment 20001807 PARAMETER Experiment Name: At_50mM_NH4NO3_L-to-H_Sub_P Parameter: Timepoint (hr) Value: 6
  misc_feature: MA Experiment 20001807 PARAMETER Experiment Name: At_50mM_NH4NO3_L-to-H_Sub_P Parameter: Tissue Value: Leaf
  misc_feature: MA Experiment 20001807 PARAMETER Experiment Name: At_50mM_NH4NO3_L-to-H_Sub_P Parameter: Treatment Value: 50mM NH4NO3 vs 100mM Mannitol
aagggttctttttggtaattttcccgaatcacacaagtgagctagctcatcagagtccacgagcttcccactaaaaaattgaaaattgttgcttctgtcatctgaaattaaacaaagcgagaaaaggcgatacaaacgatttcgaatgcttcatcttctcctttgaaaatccttcttctgcttaatgctgctagatatggatctcggtgttcttcttccatcattgcaatctgtttatgtgctggtgttttacttcgtttacttggccgttgccggagaaattctccccgggaaagttattcgcggcgtccttttatcagatggctctcaacttcgttaccgatgcaatggtctattggcactaatattgttggtagctattttgggaatctgtgcaaaacttggcattgtatcacctcttgtggttgcggatagaggacttgagttactctcagctacttttattttctgtgttttggtgacattagcattgtatgttactgggcgaagttcctcgaataagggttcttccctaaagcctcatgtctcaggaaatcttgtacatgactggtggtttggaatacagctgaatcctcagtttatgagcattgatctcaagtttttctttgtcagagccgggatgatgggatggctgcttatcaatctctctattctggcaaaaagtgtgcaggatggttccttgagtcagtcgatgattctttaccagatcttctgtgcgttatatatattggactactttgttcatgaagaatacatgacctctacgtgggacataattgcagagagactaggcttcatgctagtgtttggagatctcctgtggattcctttcacttttagcattcagggctggtggcttttgcacaacaaagtagaactaacagttcctgcgattgtagtcaattgccttgtcttcttgatagggtacatggtttttcgaggagctaacaaacaaaaacatatctttaagaagaacccaaaaacaccaatatggggcaagcctccagtggtagttggtggaaagttactggtttcaggctattggggaattgcaaggcactgtaattaccttggcgacttgatgcttgctctgtccttcagtttgccatgtggaataagttctccggttccatatttctacccgatataccttctgatactattgatatggagagaacgaagagacgaggttcgatgtgcagagaagtacaaggagatatgggcagagtatcttagacttgtcccctggagaatacttccttatgtttattagatgtgccaagagccaagtcatgaatcctttcagattcatcctcttgtgtcttattttttcataatcttgttttattttagcaatgctcgagtgaaactttgtagtacacgtttgagaataacttcagtccttattattattttagcattgata

SEQ ID NO: 106239 - protein, 369 aa, Arabidopsis thaliana; identical to SEQ ID NO: 24309
  peptide (1)..(369): Ceres Seq. ID no. 13619054
  misc_feature (5)..(369): Pfam Name: Ergosterol biosynthesis ERG4/ERG24 family Pfam Description: Ergosterol biosynthesis ERG4/ERG24 family
  misc_feature (1)..(369): Homolog of NCBI NO: 18409727 NR Description: C-14 sterol reductase (delta(14)-sterol
  misc_feature (5)..(369): Homolog of NCBI NO: 8917585 NR Description: C-14 sterol reductase [Arabidopsis thaliana]
  misc_feature (5)..(213): Homolog of NCBI NO: 11358585 NR Description: nuclear envelope membrane protein-like -
  misc_feature (229)..(369): Homolog of NCBI NO: 11358585 NR Description: nuclear envelope membrane protein-like -
  misc_feature (78)..(366): Homolog of NCBI NO: 11096269 NR Description: sterol C-14 reductase [Dictyostelium discoideum]
  misc_feature (1)..(369): Homolog of NCBI NO: 33320186 NR Description: C-14 sterol reductase [Mus musculus]
  misc_feature (16)..(369): Homolog of NCBI NO: 33417073 NR Description: Unknown (protein for MGC:68849) [Xenopus laevis]
  misc_feature (11)..(369): Homolog of NCBI NO: 439434 NR Description: integral nuclear envelope inner membrane protein
  misc_feature (11)..(369): Homolog of NCBI NO: 37595750 NR Description: lamin B receptor; integral nuclear envelope inner protein [Homo sapiens] >gi|37595752|ref|NP_919424.1| lamin B integral nuclear envelope inner membrane protein [Homo sapiens]
  misc_feature (1)..(369): Homolog of NCBI NO: 20137709 NR Description: Delta(14)-sterol reductase (C-14 sterol

SEQ ID NO: 106240 - protein, 365 aa, Arabidopsis thaliana; identical to SEQ ID NO: 24310
  peptide (1)..(365): Ceres Seq. ID no. 13619055
  misc_feature (1)..(365): Pfam Name: Ergosterol biosynthesis ERG4/ERG24 family Pfam Description: Ergosterol biosynthesis ERG4/ERG24 family
  misc_feature (1)..(365): Homolog of NCBI NO: 18409727 NR Description: C-14 sterol reductase (delta(14)-sterol
  misc_feature (1)..(365): Homolog of NCBI NO: 8917585 NR Description: C-14 sterol reductase [Arabidopsis thaliana]
  misc_feature (1)..(209): Homolog of NCBI NO: 11358585 NR Description: nuclear envelope membrane protein-like -
  misc_feature (225)..(365): Homolog of NCBI NO: 11358585 NR Description: nuclear envelope membrane protein-like -
  misc_feature (74)..(362): Homolog of NCBI NO: 11096269 NR Description: sterol C-14 reductase [Dictyostelium discoideum]
  misc_feature (1)..(365): Homolog of NCBI NO: 33320186 NR Description: C-14 sterol reductase [Mus musculus]
  misc_feature (12)..(365): Homolog of NCBI NO: 33417073 NR Description: Unknown (protein for MGC:68849) [Xenopus laevis]
  misc_feature (7)..(365): Homolog of NCBI NO: 439434 NR Description: integral nuclear envelope inner membrane protein
  misc_feature (7)..(365): Homolog of NCBI NO: 37595750 NR Description: lamin B receptor; integral nuclear envelope inner protein [Homo sapiens] >gi|37595752|ref|NP_919424.1| lamin B integral nuclear envelope inner membrane protein [Homo sapiens]
  misc_feature (1)..(365): Homolog of NCBI NO: 20137709 NR Description: Delta(14)-sterol reductase (C-14 sterol

SEQ ID NO: 106241 - protein, 230 aa, Arabidopsis thaliana; identical to SEQ ID NO: 24311
  peptide (1)..(230): Ceres Seq. ID no. 13619056
  misc_feature (1)..(230): Pfam Name: Ergosterol biosynthesis ERG4/ERG24 family Pfam Description: Ergosterol biosynthesis ERG4/ERG24 family
  misc_feature (1)..(230): Homolog of NCBI NO: 18409727 NR Description: C-14 sterol reductase (delta(14)-sterol
  misc_feature (1)..(230): Homolog of NCBI NO: 8917585 NR Description: C-14 sterol reductase [Arabidopsis thaliana]
  misc_feature (1)..(74): Homolog of NCBI NO: 11358585 NR Description: nuclear envelope membrane protein-like -
  misc_feature (90)..(230): Homolog of NCBI NO: 11358585 NR Description: nuclear envelope membrane protein-like -
  misc_feature (1)..(227): Homolog of NCBI NO: 11096269 NR Description: sterol C-14 reductase [Dictyostelium discoideum]
  misc_feature (1)..(230): Homolog of NCBI NO: 33320186 NR Description: C-14 sterol reductase [Mus musculus]
  misc_feature (1)..(230): Homolog of NCBI NO: 33417073 NR Description: Unknown (protein for MGC:68849) [Xenopus laevis]
  misc_feature (1)..(230): Homolog of NCBI NO: 439434 NR Description: integral nuclear envelope inner membrane protein
  misc_feature (1)..(230): Homolog of NCBI NO: 37595750 NR Description: lamin B receptor; integral nuclear envelope inner protein [Homo sapiens] >gi|37595752|ref|NP_919424.1| lamin B integral nuclear envelope inner membrane protein [Homo sapiens]
  misc_feature (1)..(230): Homolog of NCBI NO: 20137709 NR Description: Delta(14)-sterol reductase (C-14 sterol

SEQ ID NO: 106242 - DNA, 1757 bp, Arabidopsis thaliana
  misc_feature (1)..(1757): Ceres Seq. ID no. 13619060
  misc_feature: MA Experiment ID: 108577 Result: Up-regulated in Transcription
  misc_feature: MA Experiment 108577 PARAMETER Experiment Name: At_42deg_Heat_cDNA_P Parameter: Temperature (deg C) Value: 42 vs. 22
  misc_feature: MA Experiment 108577 PARAMETER Experiment Name: At_42deg_Heat_cDNA_P Parameter: Timepoint (hr) Value: 6
  misc_feature: MA Experiment 108577 PARAMETER Experiment Name: At_42deg_Heat_cDNA_P Parameter: Tissue Value: Aerial
  misc_feature: MA Experiment ID: 20000111 Result: Up-regulated in Transcription
  misc_feature: MA Experiment 20000111 PARAMETER Experiment Name: At_42deg_Heat_cDNA_P Parameter: Temperature (deg C) Value: 42 vs. 22
  misc_feature: MA Experiment 20000111 PARAMETER Experiment Name: At_42deg_Heat_cDNA_P Parameter: Timepoint (hr) Value: 6
  misc_feature: MA Experiment 20000111 PARAMETER Experiment Name: At_42deg_Heat_cDNA_P Parameter: Tissue Value: Aerial
  misc_feature: MA Experiment ID: 20000112 Result: Up-regulated in Transcription
  misc_feature: MA Experiment 20000112 PARAMETER Experiment Name: At_42deg_Heat_cDNA_P Parameter: Temperature (deg C) Value: 42 vs. 22
  misc_feature: MA Experiment 20000112 PARAMETER Experiment Name: At_42deg_Heat_cDNA_P Parameter: Timepoint (hr) Value: 2
  misc_feature: MA Experiment 20000112 PARAMETER Experiment Name: At_42deg_Heat_cDNA_P Parameter: Tissue Value: Aerial
  misc_feature: MA Experiment ID: 20000173 Result: Up-regulated in Transcription
  misc_feature: MA Experiment 20000173 PARAMETER Experiment Name: At_42deg_Heat_P Parameter: Age (day) Value: 14
  misc_feature: MA Experiment 20000173 PARAMETER Experiment Name: At_42deg_Heat_P Parameter: Organism Value: A. thaliana
  misc_feature: MA Experiment 20000173 PARAMETER Experiment Name: At_42deg_Heat_P Parameter: Plant Line Value: WS
  misc_feature: MA Experiment 20000173 PARAMETER Experiment Name: At_42deg_Heat_P Parameter: Temperature (deg C) Value: 42 vs. 22
  misc_feature: MA Experiment 20000173 PARAMETER Experiment Name: At_42deg_Heat_P Parameter: Timepoint (hr) Value: 6
  misc_feature: MA Experiment 20000173 PARAMETER Experiment Name: At_42deg_Heat_P Parameter: Tissue Value: Aerial
gtctccgacttcaaacataacacaaatcgttcatcgtcttccttctctctctctgattctctcattcgcgaatttcaaagctatggcggatacggtagagaaagttcccaccgttgttgagtcatcttcatcatccaccgttgaagcatctaatagcgccgagaagactgagcccacgacggagaagaaaaagtggggcgatgttgaagatgatgatgatgaagaagaagctgtatcggagcttaattcattgagcattaaggaagaagagaaacctgattctattcttgaggaacctgaagattctaacatcaaagctgttacttctggtgacacaccatatacatcagcaagtagatttgaagacttgaacttgtcacctgaattgatgaaaggcttgtacgttgagatgaaattcgaaaagcctagcaagatccaagctattagtttgcctatgataatgacgccgccacacaagcatctgattgcccaggctcataacggatctggaaagacgacttgtttcgttcttggaatgttgagtcgtgttgatcccacattgagagagcctcaagctctctgtatttgtcccactagagaattagctaatcagaatatggaagttcttcagaagatggggaagtttactgggatcactgctgagttggctgtgcctgactcaacgagaggtgcaccggcggcaacaagaggagctcctgtttctgctcatgttgtgattggcacccctggaacgcttaagaaatggatggcatttaagagactaggtctaaatcatttgaagattctggtttttgatgaggctgaccatatgcttgctacggatgggtttagggatgattccttgaagataatgaaagacattgggagagttaatcccaatttccaggttcttcttttctcggcaacttttaacgaaactgtcaaagattttgttgcgcggacagtcaaagatcccaaccaattgtttgtcaaaagagaggatctggctttggactcggtgaagcagtataaagttgtttgcccgaaggagcaaaacaagatcgaagtcatcaaggatcagattatggagcttggggatattgggcaaaccattatctttgtgaaaacaaaagcgtctgctcaaaaggtgcacaaagcccttgcggaaatgggatatgacgttaccagtgtccatggtaatctgactgaatcggacagggataagatagttaaagagtttaaagaatgccttactcaagtgctcattgctaccgatgtcattgcaagaggttttgaccaacagcgggtgaatttggttgtcaattataatcttcccactaaatatgaaactggagagccagattatgaggtgtaccttcacagggttgggagagctggccggtttggtcgcaaaggagcggttttcaacttgctgcttgatgatggctgggataaagaggtgatggagaagatcgagaagtattttgaagcaaatgttaaggagatcaagtcgtggaactcagaggaagagtataagagtgcattaaaggaagctggcctgctggacgagtgaggaagagagacagcatgtgttcaaaccatcttaaaagactatgtcgtctgttttcttgagattgttttaagaaagaaacttgtatacctctttgaggttttcttgtaatctttttatctgattgctgagagtttcagactttgtagattttttgttaagggaaaaggaaaacattttttatgtc

SEQ ID NO: 106243 - protein, 523 aa, Arabidopsis thaliana
  peptide (1)..(523): Ceres Seq. ID no. 13619061
  misc_feature (132)..(343): Pfam Name: DEAD/DEAH box helicase Pfam Description: DEAD/DEAH box helicase
  misc_feature (28)..(523): Homolog of NCBI NO: 15231748 NR Description: DEAD/DEAH box helicase, putative [Arabidopsis
  misc_feature (28)..(523): Homolog of NCBI NO: 15982881 NR Description: AT3g53110/T4D2_40 [Arabidopsis thaliana]
  misc_feature (26)..(283): Homolog of NCBI NO: 22773229 NR Description: Putative DEAD/DEAH box RNA helicase protein
  misc_feature (276)..(522): Homolog of NCBI NO: 22773229 NR Description: Putative DEAD/DEAH box RNA helicase protein
  misc_feature (27)..(518): Homolog of NCBI NO: 19112808 NR Description: putative ATP-dependent cytosolic RNA helicase, for poly(A+) RNA export; by similarity to yeast dbp5
  misc_feature (28)..(517): Homolog of NCBI NO: 6324620 NR Description: Dead-Box protein 5; Dbp5p [Saccharomyces
  misc_feature (67)..(509): Homolog of NCBI NO: 30749194 NR Description: gonadotropin-regulated testicular RNA helicase;
  misc_feature (26)..(509): Homolog of NCBI NO: 38511935 NR Description: DEAD (Asp-Glu-Ala-As) box polypeptide 19
  misc_feature (33)..(509): Homolog of NCBI NO: 28436904 NR Description: Similar to DEAD/H (Asp-Glu-Ala-Asp/His) box
  misc_feature (67)..(509): Homolog of NCBI NO: 33186912 NR Description: DEAD (aspartate-glutamate-alanine-aspartate) box
SPTSNITQIVHRLPSLSLILSFANFKAMADTVEKVPTVVESSSSSTVEASNSAEKTEPTTEKKKWGDVEDDDDEEEAVSELNSLSIKEEEKPDSILEEPEDSNIKAVTSGDTPYTSASRFEDLNLSPELMKGLYVEMKFEKPSKIQAISLPMIMTPPHKHLIAQAHNGSGKTTCFVLGMLSRVDPTLREPQALCICPTRELANQNMEVLQKMGKFTGITAELAVPDSTRGAPAATRGAPVSAHVVIGTPGTLKKWMAFKRLGLNHLKILVFDEADHMLATDGFRDDSLKIMKDIGRVNPNFQVLLFSATFNETVKDFVARTVKDPNQLFVKREDLALDSVKQYKVVCPKEQNKIEVIKDQIMELGDIGQTIIFVKTKASAQKVHKALAEMGYDVTSVHGNLTESDRDKIVKEFKECLTQVLIATDVIARGFDQQRVNLVVNYNLPTKYETGEPDYEVYLHRVGRAGRFGRKGAVFNLLLDDGWDKEVMEKIEKYFEANVKEIKSWNSEEEYKSALKEAGLLDE

SEQ ID NO: 106244 - protein, 496 aa, Arabidopsis thaliana; identical to SEQ ID NO: 25901
  peptide (1)..(496): Ceres Seq. ID no. 13619062
  misc_feature (105)..(316): Pfam Name: DEAD/DEAH box helicase Pfam Description: DEAD/DEAH box helicase
  misc_feature (1)..(496): Homolog of NCBI NO: 15231748 NR Description: DEAD/DEAH box helicase, putative [Arabidopsis
  misc_feature (1)..(496): Homolog of NCBI NO: 15982881 NR Description: AT3g53110/T4D2_40 [Arabidopsis thaliana]
  misc_feature (1)..(256): Homolog of NCBI NO: 22773229 NR Description: Putative DEAD/DEAH box RNA helicase protein
  misc_feature (249)..(495): Homolog of NCBI NO: 22773229 NR Description: Putative DEAD/DEAH box RNA helicase protein
  misc_feature (1)..(491): Homolog of NCBI NO: 19112808 NR Description: putative ATP-dependent cytosolic RNA helicase, for poly(A+) RNA export; by similarity to yeast dbp5
  misc_feature (1)..(490): Homolog of NCBI NO: 6324620 NR Description: Dead-Box protein 5; Dbp5p [Saccharomyces
  misc_feature (40)..(482): Homolog of NCBI NO: 30749194 NR Description: gonadotropin-regulated testicular RNA helicase;
  misc_feature (1)..(482): Homolog of NCBI NO: 38511935 NR Description: DEAD (Asp-Glu-Ala-As) box polypeptide 19
  misc_feature (6)..(482): Homolog of NCBI NO: 28436904 NR Description: Similar to DEAD/H (Asp-Glu-Ala-Asp/His) box
  misc_feature (40)..(482): Homolog of NCBI NO: 33186912 NR Description: DEAD (aspartate-glutamate-alanine-aspartate) box

SEQ ID NO: 106245 - protein, 394 aa, Arabidopsis thaliana; identical to SEQ ID NO: 25902
  peptide (1)..(394): Ceres Seq. ID no. 13619063
  misc_feature (3)..(214): Pfam Name: DEAD/DEAH box helicase Pfam Description: DEAD/DEAH box helicase
  misc_feature (1)..(394): Homolog of NCBI NO: 15231748 NR Description: DEAD/DEAH box helicase, putative [Arabidopsis
  misc_feature (1)..(394): Homolog of NCBI NO: 15982881 NR Description: AT3g53110/T4D2_40 [Arabidopsis thaliana]
  misc_feature (1)..(154): Homolog of NCBI NO: 22773229 NR Description: Putative DEAD/DEAH box RNA helicase protein
  misc_feature (147)..(393): Homolog of NCBI NO: 22773229 NR Description: Putative DEAD/DEAH box RNA helicase protein
  misc_feature (1)..(389): Homolog of NCBI NO: 19112808 NR Description: putative ATP-dependent cytosolic RNA helicase, for poly(A+) RNA export; by similarity to yeast dbp5
  misc_feature (1)..(388): Homolog of NCBI NO: 6324620 NR Description: Dead-Box protein 5; Dbp5p [Saccharomyces
  misc_feature (1)..(380): Homolog of NCBI NO: 30749194 NR Description: gonadotropin-regulated testicular RNA helicase;
  misc_feature (1)..(380): Homolog of NCBI NO: 38511935 NR Description: DEAD (Asp-Glu-Ala-As) box polypeptide 19
  misc_feature (1)..(380): Homolog of NCBI NO: 28436904 NR Description: Similar to DEAD/H (Asp-Glu-Ala-Asp/His) box
  misc_feature (1)..(380): Homolog of NCBI NO: 33186912 NR Description: DEAD (aspartate-glutamate-alanine-aspartate) box

SEQ ID NO: 106246 - DNA, 1347 bp, Arabidopsis thaliana
  misc_feature (1)..(1347): Ceres Seq. ID no. 13619068
  misc_feature: MA Experiment ID: 20000086 Result: Up-regulated in Transcription
  misc_feature: MA Experiment 20000086 PARAMETER Experiment Name: At_100uM_ABA_Mutants_cDNA_P Parameter: Plant Line Value: CS22
  misc_feature: MA Experiment 20000086 PARAMETER Experiment Name: At_100uM_ABA_Mutants_cDNA_P Parameter: Timepoint (hr) Value: 6
  misc_feature: MA Experiment 20000086 PARAMETER Experiment Name: At_100uM_ABA_Mutants_cDNA_P Parameter: Tissue Value: Aerial
  misc_feature: MA Experiment 20000086 PARAMETER Experiment Name: At_100uM_ABA_Mutants_cDNA_P Parameter: Treatment Value: 100uM ABA vs. No Treatment
  misc_feature: MA Experiment ID: 20000306 Result: Up-regulated in Transcription
  misc_feature: MA Experiment 20000306 PARAMETER Experiment Name: At_Germinating_Seeds_Sub_P Parameter: Age (hr) Value: 6 vs. 0
  misc_feature: MA Experiment 20000306 PARAMETER Experiment Name: At_Germinating_Seeds_Sub_P Parameter: Organism Value: A. thaliana
  misc_feature: MA Experiment 20000306 PARAMETER Experiment Name: At_Germinating_Seeds_Sub_P Parameter: Plant Line Value: WS
  misc_feature: MA Experiment 20000306 PARAMETER Experiment Name: At_Germinating_Seeds_Sub_P Parameter: Tissue Value: Germinating Seeds
  misc_feature: MA Experiment ID: 20000307 Result: Up-regulated in Transcription
  misc_feature: MA Experiment 20000307 PARAMETER Experiment Name: At_Germinating_Seeds_Sub_P Parameter: Age (hr) Value: 24 vs. 0
  misc_feature: MA Experiment 20000307 PARAMETER Experiment Name: At_Germinating_Seeds_Sub_P Parameter: Organism Value: A. thaliana
  misc_feature: MA Experiment 20000307 PARAMETER Experiment Name: At_Germinating_Seeds_Sub_P Parameter: Plant Line Value: WS
  misc_feature: MA Experiment 20000307 PARAMETER Experiment Name: At_Germinating_Seeds_Sub_P Parameter: Tissue Value: Germinating Seeds
  misc_feature: MA Experiment ID: 20000327 Result: Up-regulated in Transcription
  misc_feature: MA Experiment 20000327 PARAMETER Experiment Name: At_42deg_Heat_Sub_P Parameter: Age (day) Value: 14
  misc_feature: MA Experiment 20000327 PARAMETER Experiment Name: At_42deg_Heat_Sub_P Parameter: Organism Value: A. thaliana
  misc_feature: MA Experiment 20000327 PARAMETER Experiment Name: At_42deg_Heat_Sub_P Parameter: Plant Line Value: WS
  misc_feature: MA Experiment 20000327 PARAMETER Experiment Name: At_42deg_Heat_Sub_P Parameter: Temperature (deg C) Value: 42 vs. 22
  misc_feature: MA Experiment 20000327 PARAMETER Experiment Name: At_42deg_Heat_Sub_P Parameter: Timepoint (hr) Value: 1
  misc_feature: MA Experiment 20000327 PARAMETER Experiment Name: At_42deg_Heat_Sub_P Parameter: Tissue Value: Aerial
  misc_feature: MA Experiment ID: 20000328 Result: Up-regulated in Transcription
  misc_feature: MA Experiment 20000328 PARAMETER Experiment Name: At_42deg_Heat_Sub_P Parameter: Age (day) Value: 14
  misc_feature: MA Experiment 20000328 PARAMETER Experiment Name: At_42deg_Heat_Sub_P Parameter: Organism Value: A. thaliana
  misc_feature: MA Experiment 20000328 PARAMETER Experiment Name: At_42deg_Heat_Sub_P Parameter: Plant Line Value: WS
  misc_feature: MA Experiment 20000328 PARAMETER Experiment Name: At_42deg_Heat_Sub_P Parameter: Temperature (deg C) Value: 42 vs. 22
  misc_feature: MA Experiment 20000328 PARAMETER Experiment Name: At_42deg_Heat_Sub_P Parameter: Timepoint (hr) Value: 6
  misc_feature: MA Experiment 20000328 PARAMETER Experiment Name: At_42deg_Heat_Sub_P Parameter: Tissue Value: Aerial
  misc_feature: MA Experiment ID: 20000329 Result: Down-regulated in Transcription
  misc_feature: MA Experiment 20000329 PARAMETER Experiment Name: At_4deg_Cold_Sub_P Parameter: Age (day) Value: 14
  misc_feature: MA Experiment 20000329 PARAMETER Experiment Name: At_4deg_Cold_Sub_P Parameter: Organism Value: A. thaliana
  misc_feature: MA Experiment 20000329 PARAMETER Experiment Name: At_4deg_Cold_Sub_P Parameter: Plant Line Value: WS
  misc_feature: MA Experiment 20000329 PARAMETER Experiment Name: At_4deg_Cold_Sub_P Parameter: Temperature (deg C) Value: 4 vs. 22
  misc_feature: MA Experiment 20000329 PARAMETER Experiment Name: At_4deg_Cold_Sub_P Parameter: Timepoint (hr) Value: 6
  misc_feature: MA Experiment 20000329 PARAMETER Experiment Name: At_4deg_Cold_Sub_P Parameter: Tissue Value: Aerial
  misc_feature: MA Experiment ID: 20000348 Result: Up-regulated in Transcription
  misc_feature: MA Experiment 20000348 PARAMETER Experiment Name: At_100uM_ABA_Sub_P Parameter: Age (day) Value: 14
  misc_feature: MA Experiment 20000348 PARAMETER Experiment Name: At_100uM_ABA_Sub_P Parameter: Organism Value: A. thaliana
  misc_feature: MA Experiment 20000348 PARAMETER Experiment Name: At_100uM_ABA_Sub_P Parameter: Plant Line Value: WS
  misc_feature: MA Experiment 20000348 PARAMETER Experiment Name: At_100uM_ABA_Sub_P Parameter: Timepoint (hr) Value: 1
  misc_feature: MA Experiment 20000348 PARAMETER Experiment Name: At_100uM_ABA_Sub_P Parameter: Tissue Value: Aerial
  misc_feature: MA Experiment 20000348 PARAMETER Experiment Name: At_100uM_ABA_Sub_P Parameter: Treatment Value: 100uM ABA vs. No Treatment
  misc_feature: MA Experiment ID: 20000355 Result: Down-regulated in Transcription
  misc_feature: MA Experiment 20000355 PARAMETER Experiment Name: At_Siliques_Sub_P Parameter: Age (day) Value: 21
  misc_feature: MA Experiment 20000355 PARAMETER Experiment Name: At_Siliques_Sub_P Parameter: Organism Value: A. thaliana
  misc_feature: MA Experiment 20000355 PARAMETER Experiment Name: At_Siliques_Sub_P Parameter: Plant Line Value: WS
  misc_feature: MA Experiment 20000355 PARAMETER Experiment Name: At_Siliques_Sub_P Parameter: Tissue Value: Less Than 5mm Siliques vs. Whole Plant
  misc_feature: MA Experiment ID: 20000440 Result: Down-regulated in Transcription
  misc_feature: MA Experiment 20000440 PARAMETER Experiment Name: At_Closed-Flower__Sub_P Parameter: Tissue Value: Closed Flower vs. Whole Plant
  misc_feature: MA Experiment ID: 20001807 Result: Up-regulated in Transcription
  misc_feature: MA Experiment 20001807 PARAMETER Experiment Name: At_50mM_NH4NO3_L-to-H_Sub_P Parameter: Timepoint (hr) Value: 6
  misc_feature: MA Experiment 20001807 PARAMETER Experiment Name: At_50mM_NH4NO3_L-to-H_Sub_P Parameter: Tissue Value: Leaf
  misc_feature: MA Experiment 20001807 PARAMETER Experiment Name: At_50mM_NH4NO3_L-to-H_Sub_P Parameter: Treatment Value: 50mM NH4NO3 vs 100mM Mannitol
atatccaattttttcattgaaaatacaaactttcattccaaaaaaaaacctcaatacacaaaaaaccaaaaaaacatataacgttggcaaaaatactaaaaatattttttaaaagataaagcaataaaaaagtatacaaacaaattaacaagaaggagagctctcactataaaacagagcacatgttcttctcactaaccactccaacagagaagcaaaagaaaaaaaagctattgtttgaaagaagaagaagttaactatggcaaaggatgtggaagccgttcccggagaaggatttcagacaagagactatcaagatccgccaccagctccgtttattgatggagcggagctaaagaagtggtctttctacagagcagttatcgcagagttcgtagccactctcctcttcttatacatcaccgttttgacagtcatcggttacaagattcagtccgatactgatgccggtggcgtagattgcggcggagttggaatcctcggtatcgcttgggcctttggtggtatgatcttcatcctcgtctactgcaccgccggtatctctggtggtcacattaacccagcggtgacatttgggctattcttggcacgtaaagtgtcgttacctagggccctattgtacataatcgctcagtgtttgggtgcgatttgtggagttggttttgtcaaagccttccaaagctcttactacacccgttacggaggtggagccaactctctagccgatggctacagcacagggaccggtctagccgcagagatcattggtactttcgttcttgtctacaccgtcttctctgccactgaccccaaacgtagtgccagagactcccacgttccggtgttggcgccacttccaatcggatttgccgtgttcatggtacatttggctaccattcccattaccggaaccggaattaacccggcaaggagtttcggagctgccgtaatctacaacaagagcaagccatgggatgaccactggatattttgggttggaccattcattggagctgcgatagctgcattctaccaccaattcgttctgagagcttcaggttctaagtctcttggatcattcagaagtgctgccaacgtctaaacacatcaaaccagatttctcaagaataaatgaagttgtgatctctctgtacaaatctaaatcagtcacttgcagttttcatttccctttcttatatttgtgttttccacttgctcttttgtgaattttccttcggtgtaattgttttttctttcgcttttaaacgagtgattggaattataatcaatgaaatcaaagaggttcttatgcgttgtgtttacatt

SEQ ID NO: 106247 - protein, 287 aa, Arabidopsis thaliana; identical to SEQ ID NO: 24770
  peptide (1)..(287): Ceres Seq. ID no. 13619069
  misc_feature (31)..(266): Pfam Name: Major intrinsic protein Pfam Description: Major intrinsic protein
  misc_feature (1)..(287): Homolog of NCBI NO: 15231810 NR Description: plasma membrane intrinsic protein 2A [Arabidopsis >gi|1175013|sp|P43286|WC2A_ARATH Plasma membrane intrinsic
  misc_feature (1)..(287): Homolog of NCBI NO: 5081421 NR Description: plasma membrane intrinsic protein 1 [Brassica
  misc_feature (1)..(287): Homolog of NCBI NO: 3551133 NR Description: Plasma membrane aquaporin (PAQ2) [Raphanus
  misc_feature (1)..(287): Homolog of NCBI NO: 15228095 NR Description: plasma membrane intrinsic protein 2B, putative thaliana] >gi|21431896|sp|P43287|WC2B_ARATH Plasma membrane
  misc_feature (1)..(287): Homolog of NCBI NO: 21554356 NR Description: aquaporin (plasma membrane intrinsic protein 2B)
  misc_feature (1)..(287): Homolog of NCBI NO: 629543 NR Description: plasma membrane intrinsic protein 2b - thaliana >gi|472879|emb|CAA53478.1| plasma membrane intrinsic
  misc_feature (1)..(287): Homolog of NCBI NO: 15228096 NR Description: plasma membrane intrinsic protein 2C [Arabidopsis
  misc_feature (1)..(287): Homolog of NCBI NO: 21537097 NR Description: aquaporin (plasma membrane intrinsic protein 2C)
  misc_feature (1)..(285): Homolog of NCBI NO: 7209560 NR Description: Plasma membrane aquaporin 2b [Raphanus sativus]
  misc_feature (1)..(285): Homolog of NCBI NO: 5081423 NR Description: plasma membrane intrinsic protein 2 [Brassica

SEQ ID NO: 106248 - protein, 198 aa, Arabidopsis thaliana; identical to SEQ ID NO: 24771
  peptide (1)..(198): Ceres Seq. ID no. 13619070
  misc_feature (1)..(177): Pfam Name: Major intrinsic protein Pfam Description: Major intrinsic protein
  misc_feature (1)..(198): Homolog of NCBI NO: 15231810 NR Description: plasma membrane intrinsic protein 2A [Arabidopsis >gi|1175013|sp|P43286|WC2A_ARATH Plasma membrane intrinsic
  misc_feature (1)..(198): Homolog of NCBI NO: 5081421 NR Description: plasma membrane intrinsic protein 1 [Brassica
  misc_feature (1)..(198): Homolog of NCBI NO: 3551133 NR Description: Plasma membrane aquaporin (PAQ2) [Raphanus
  misc_feature (1)..(198): Homolog of NCBI NO: 15228095 NR Description: plasma membrane intrinsic protein 2B, putative thaliana] >gi|21431896|sp|P43287|WC2B_ARATH Plasma membrane
  misc_feature (1)..(198): Homolog of NCBI NO: 21554356 NR Description: aquaporin (plasma membrane intrinsic protein 2B)
  misc_feature (1)..(198): Homolog of NCBI NO: 629543 NR Description: plasma membrane intrinsic protein 2b - thaliana >gi|472879|emb|CAA53478.1| plasma membrane intrinsic
  misc_feature (1)..(198): Homolog of NCBI NO: 15228096 NR Description: plasma membrane intrinsic protein 2C [Arabidopsis
  misc_feature (1)..(198): Homolog of NCBI NO: 21537097 NR Description: aquaporin (plasma membrane intrinsic protein 2C)
  misc_feature (1)..(196): Homolog of NCBI NO: 7209560 NR Description: Plasma membrane aquaporin 2b [Raphanus sativus]
  misc_feature (1)..(196): Homolog of NCBI NO: 5081423 NR Description: plasma membrane intrinsic protein 2 [Brassica

SEQ ID NO: 106249 - DNA, 1665 bp, Arabidopsis thaliana
  misc_feature (1)..(1665): Ceres Seq. ID no. 13619071
  misc_feature: MA Experiment ID: 20000445 Result: Up-regulated in Transcription
  misc_feature: MA Experiment 20000445 PARAMETER Experiment Name: At_100uM_NAA__P Parameter: Age (day) Value: 14
  misc_feature: MA Experiment 20000445 PARAMETER Experiment Name: At_100uM_NAA__P Parameter: Organism Value: A. thaliana
  misc_feature: MA Experiment 20000445 PARAMETER Experiment Name: At_100uM_NAA__P Parameter: Plant Line Value: WS
  misc_feature: MA Experiment 20000445 PARAMETER Experiment Name: At_100uM_NAA__P Parameter: Timepoint (hr) Value: 6
  misc_feature: MA Experiment 20000445 PARAMETER Experiment Name: At_100uM_NAA__P Parameter: Tissue Value: Aerial
  misc_feature: MA Experiment 20000445 PARAMETER Experiment Name: At_100uM_NAA__P Parameter: Treatment Value: 100uM NAA vs. No Treatment
attcaccatcgctcttacgtttgaatctatccagatccaaagctcttcttcttcccggcaattctgagatctcattttcaccggcgacgagctttaatcggagaacgatgaagcagcttcacaagcaaatgagctcgaagcgtgatgaagaaaccattcccatgagccaatccagtccttactctcccaaaactttaaagcatcccagatctcttcccagatcgcttcactatctctttcgtgaacaacgactcctctttatcctcgtcgggatcttgatcggatccactttcttcatcctccagccttctctctctcgtttaggcgccgctgagtccacctcgttaatcaccagatctgtttcctacgccgtcaccgattccccgccttccaggtcgacttttaattccggaggcggcggaggtagaaccggtcgtgttcccgtcggtatcggacggaagagactgaggattgttgtcaccggtggagctggtttcgtcggtagtcatcttgttgataagcttatcggtaggggagatgaagtgatcgtgattgataacttcttcactggtaggaaggagaatttggttcatctattctcgaatcctaggtttgagctaattcgacacgatgttgttgagccaatcctccttgaggtcgatcagatttaccatttagcttgtccagcttcacctgttcattacaagtataatccagtcaagactatcataacaaatgtaatgggcactctcaatatgttgggtcttgcaaagagagttggggcaaggtttctgctcaccagcacaagtgaagtctatggagatccccttgagcatccacagaaagagacttactggggaaacgtgaatccaatcggtgagaggagttgctatgatgaaggaaagcgtactgcagaaaccctggccatggattatcaccgaggtgcaggtgtggaggttagaattgctcgtattttcaacacatatgggcccagaatgtgccttgatgatgggcgtgttgttagtaactttgttgcccagaccattcgcaaacacccaatgactgtttatggtgatggaaaacagactcgtagctttcaatatgtttctgacttggtggagggacttgtagctttaatggaaaacgatcatgtaggacccttcaaccttggtaaccctggagaattcacaatgcttgaacttgcagaggtggttaaggaggtgatcgacccaagcgcgaccatagagttcaaaccaaacacagcagacgatcctcacaagaggaaaccagacataagcaaagcaaaggaacagttgaactgggaaccaaagatatctctgagggagggactgcctcgcatggttagtgacttccgtaaccgaatcttaaacgaagacgaaggtaaaggtctctaagtcagtcacacagagatatagagtataatccttcttctgctttgatttgatatatgtatagtctctttttcaagagctctgctaagtctttttgttctctctgttttttctttttggttctatctccaagacacagattactacttatattagctaatgtttttgacttgggattttgtcattgggccattcaccactaggctcaatattagtggaaaggtattgatataaaatttcgctcggttcatac

SEQ ID NO: 106250 - protein, 470 aa, Arabidopsis thaliana
  peptide (1)..(470): Ceres Seq. ID no. 13619072
  misc_feature (157)..(461): Pfam Name: NAD dependent epimerase/dehydratase family Pfam Description: NAD dependent epimerase/dehydratase family
  misc_feature (36)..(470): Homolog of NCBI NO: 17473549 NR Description: dTDP-glucose 4-6-dehydratase-like protein
  misc_feature (36)..(470): Homolog of NCBI NO: 11270116 NR Description: dTDP-glucose 4-6-dehydratase-like protein -
  misc_feature (36)..(470): Homolog of NCBI NO: 30693847 NR Description: NAD-dependent epimerase/dehydratase family
  misc_feature (36)..(372): Homolog of NCBI NO: 30693844 NR Description: NAD-dependent epimerase/dehydratase family
  misc_feature (42)..(467): Homolog of NCBI NO: 15229334 NR Description: NAD-dependent epimerase/dehydratase family
  misc_feature (42)..(467): Homolog of NCBI NO: 2129578 NR Description: dTDP-glucose 4-6-dehydratase homolog D18 -
  misc_feature (41)..(464): Homolog of NCBI NO: 25396402 NR Description: UDP-glucuronic acid decarboxylase [Oryza sativa
  misc_feature (42)..(466): Homolog of NCBI NO: 15227109 NR Description: NAD-dependent epimerase/dehydratase family
  misc_feature (243)..(464): Homolog of NCBI NO: 34908082 NR Description: P0506B12.30 [Oryza sativa (japonica
  misc_feature (41)..(202): Homolog of NCBI NO: 34908082 NR Description: P0506B12.30 [Oryza sativa (japonica
SPSLLRLNLSRSKALLLPGNSEISFSPATSFNRRTMKQLHKQMSSKRDEETIPMSQSSPYSPKTLKHPRSLPRSLHYLFREQRLLFILVGILIGSTFFILQPSLSRLGAAESTSLITRSVSYAVTDSPPSRSTFNSGGGGGRTGRVPVGIGRKRLRIVVTGGAGFVGSHLVDKLIGRGDEVIVIDNFFTGRKENLVHLFSNPRFELIRHDVVEPILLEVDQIYHLACPASPVHYKYNPVKTIITNVMGTLNMLGLAKRVGARFLLTSTSEVYGDPLEHPQKETYWGNVNPIGERSCYDEGKRTAETLAMDYHRGAGVEVRIARIFNTYGPRMCLDDGRVVSNFVAQTIRKHPMTVYGDGKQTRSFQYVSDLVEGLVALMENDHVGPFNLGNPGEFTMLELAEVVKEVIDPSATIEFKPNTADDPHKRKPDISKAKEQLNWEPKISLREGLPRMVSDFRNRILNEDEGKGL

SEQ ID NO: 106251 - protein, 435 aa, Arabidopsis thaliana
  peptide (1)..(435): Ceres Seq. ID no. 13619073
  misc_feature (122)..(426): Pfam Name: NAD dependent epimerase/dehydratase family Pfam Description: NAD dependent epimerase/dehydratase family
  misc_feature (1)..(435): Homolog of NCBI NO: 17473549 NR Description: dTDP-glucose 4-6-dehydratase-like protein
  misc_feature (1)..(435): Homolog of NCBI NO: 11270116 NR Description: dTDP-glucose 4-6-dehydratase-like protein -
  misc_feature (1)..(435): Homolog of NCBI NO: 30693847 NR Description: NAD-dependent epimerase/dehydratase family
  misc_feature (1)..(337): Homolog of NCBI NO: 30693844 NR Description: NAD-dependent epimerase/dehydratase family
  misc_feature (7)..(432): Homolog of NCBI NO: 15229334 NR Description: NAD-dependent epimerase/dehydratase family
  misc_feature (7)..(432): Homolog of NCBI NO: 2129578 NR Description: dTDP-glucose 4-6-dehydratase homolog D18 -
  misc_feature (6)..(429): Homolog of NCBI NO: 25396402 NR Description: UDP-glucuronic acid decarboxylase [Oryza sativa
  misc_feature (7)..(431): Homolog of NCBI NO: 15227109 NR Description: NAD-dependent epimerase/dehydratase family
  misc_feature (208)..(429): Homolog of NCBI NO: 34908082 NR Description: P0506B12.30 [Oryza sativa (japonica
  misc_feature (6)..(167): Homolog of NCBI NO: 34908082 NR Description: P0506B12.30 [Oryza sativa (japonica
MKQLHKQMSSKRDEETIPMSQSSPYSPKTLKHPRSLPRSLHYLFREQRLLFILVGILIGSTFFILQPSLSRLGAAESTSLITRSVSYAVTDSPPSRSTFNSGGGGGRTGRVPVGIGRKRLRIVVTGGAGFVGSHLVDKLIGRGDEVIVIDNFFTGRKENLVHLFSNPRFELIRHDVVEPILLEVDQIYHLACPASPVHYKYNPVKTIITNVMGTLNMLGLAKRVGARFLLTSTSEVYGDPLEHPQKETYWGNVNPIGERSCYDEGKRTAETLAMDYHRGAGVEVRIARIFNTYGPRMCLDDGRVVSNFVAQTIRKHPMTVYGDGKQTRSFQYVSDLVEGLVALMENDHVGPFNLGNPGEFTMLELAEVVKEVIDPSATIEFKPNTADDPHKRKPDISKAKEQLNWEPKISLREGLPRMVSDFRNRILNEDEGKGL

SEQ ID NO: 106252 - protein, 428 aa, Arabidopsis thaliana
  peptide (1)..(428): Ceres Seq. ID no. 13619074
  misc_feature (115)..(419): Pfam Name: NAD dependent epimerase/dehydratase family Pfam Description: NAD dependent epimerase/dehydratase family
  misc_feature (1)..(428): Homolog of NCBI NO: 17473549 NR Description: dTDP-glucose 4-6-dehydratase-like protein
  misc_feature (1)..(428): Homolog of NCBI NO: 11270116 NR Description: dTDP-glucose 4-6-dehydratase-like protein -
  misc_feature (1)..(428): Homolog of NCBI NO: 30693847 NR Description: NAD-dependent epimerase/dehydratase family
  misc_feature (1)..(330): Homolog of NCBI NO: 30693844 NR Description: NAD-dependent epimerase/dehydratase family
  misc_feature (1)..(425): Homolog of NCBI NO: 15229334 NR Description: NAD-dependent epimerase/dehydratase family
  misc_feature (1)..(425): Homolog of NCBI NO: 2129578 NR Description: dTDP-glucose 4-6-dehydratase homolog D18 -
  misc_feature (1)..(422): Homolog of NCBI NO: 25396402 NR Description: UDP-glucuronic acid decarboxylase [Oryza sativa
  misc_feature (1)..(424): Homolog of NCBI NO: 15227109 NR Description: NAD-dependent epimerase/dehydratase family
  misc_feature (201)..(422): Homolog of NCBI NO: 34908082 NR Description: P0506B12.30 [Oryza sativa (japonica
  misc_feature (1)..(160): Homolog of NCBI NO: 34908082 NR Description: P0506B12.30 [Oryza sativa (japonica
MSSKRDEETIPMSQSSPYSPKTLKHPRSLPRSLHYLFREQRLLFILVGILIGSTFFILQPSLSRLGAAESTSLITRSVSYAVTDSPPSRSTFNSGGGGGRTGRVPVGIGRKRLRIVVTGGAGFVGSHLVDKLIGRGDEVIVIDNFFTGRKENLVHLFSNPRFELIRHDVVEPILLEVDQIYHLACPASPVHYKYNPVKTIITNVMGTLNMLGLAKRVGARFLLTSTSEVYGDPLEHPQKETYWGNVNPIGERSCYDEGKRTAETLAMDYHRGAGVEVRIARIFNTYGPRMCLDDGRVVSNFVAQTIRKHPMTVYGDGKQTRSFQYVSDLVEGLVALMENDHVGPFNLGNPGEFTMLELAEVVKEVIDPSATIEFKPNTADDPHKRKPDISKAKEQLNWEPKISLREGLPRMVSDFRNRILNEDEGKGL

SEQ ID NO: 106253 - DNA, 877 bp, Arabidopsis thaliana
  misc_feature (1)..(877): Ceres Seq. ID no. 13619083
  misc_feature: MA Experiment ID: 20000227 Result: Down-regulated in Transcription
  misc_feature: MA Experiment 20000227 PARAMETER Experiment Name: At_Root-Tips-vs-Tops_P Parameter: Tissue Value: Root Tips vs. Root Tops
  misc_feature: MA Experiment ID: 20000437 Result: Down-regulated in Transcription
  misc_feature: MA Experiment 20000437 PARAMETER Experiment Name: At_Drought_P Parameter: Age (day) Value: 8
  misc_feature: MA Experiment 20000437 PARAMETER Experiment Name: At_Drought_P Parameter: Organism Value: A. thaliana
  misc_feature: MA Experiment 20000437 PARAMETER Experiment Name: At_Drought_P Parameter: Plant Line Value: WS
  misc_feature: MA Experiment 20000437 PARAMETER Experiment Name: At_Drought_P Parameter: Timepoint (hr) Value: 24
  misc_feature: MA Experiment 20000437 PARAMETER Experiment Name: At_Drought_P Parameter: Tissue Value: Whole Plant
  misc_feature: MA Experiment 20000437 PARAMETER Experiment Name: At_Drought_P Parameter: Treatment Value: Drought vs. No Drought
  misc_feature: MA Experiment ID: 20000794 Result: Down-regulated in Transcription
  misc_feature: MA Experiment 20000794 PARAMETER Experiment Name: At_Petals_P Parameter: Age (day) Value: 23-25 days
  misc_feature: MA Experiment 20000794 PARAMETER Experiment Name: At_Petals_P Parameter: Plant Line Value: WS
  misc_feature: MA Experiment 20000794 PARAMETER Experiment Name: At_Petals_P Parameter: Tissue Value: Petals vs. Whole plant
  misc_feature: MA Experiment ID: 20001560 Result: Up-regulated in Transcription
  misc_feature: MA Experiment 20001560 PARAMETER Experiment Name: At_Drought_Soil_Dry_P Parameter: Age (day) Value: 28
  misc_feature: MA Experiment 20001560 PARAMETER Experiment Name: At_Drought_Soil_Dry_P Parameter: Organism Value: A. thaliana
  misc_feature: MA Experiment 20001560 PARAMETER Experiment Name: At_Drought_Soil_Dry_P Parameter: Plant Line Value: WS
  misc_feature: MA Experiment 20001560 PARAMETER Experiment Name: At_Drought_Soil_Dry_P Parameter: Post Timepoint (hr) Value: None
  misc_feature: MA Experiment 20001560 PARAMETER Experiment Name: At_Drought_Soil_Dry_P Parameter: Post-Treatment Value: None
  misc_feature: MA Experiment 20001560 PARAMETER Experiment Name: At_Drought_Soil_Dry_P Parameter: Timepoint (day) Value: 14
  misc_feature: MA Experiment 20001560 PARAMETER Experiment Name: At_Drought_Soil_Dry_P Parameter: Treatment Value: Drought vs. No Drought
  misc_feature: MA Experiment ID: 20001757 Result: Up-regulated in Transcription
  misc_feature: MA Experiment 20001757 PARAMETER Experiment Name: At_50mM_NH4NO3_L-to-H_P Parameter: Timepoint (hr) Value: 6
  misc_feature: MA Experiment 20001757 PARAMETER Experiment Name: At_50mM_NH4NO3_L-to-H_P Parameter: Tissue Value: Leaf
  misc_feature: MA Experiment 20001757 PARAMETER Experiment Name: At_50mM_NH4NO3_L-to-H_P Parameter: Treatment Value: 50mM NH4NO3 vs 100mM Mannitol
aaagcaagaaaaagagaatgtcaaaggagaaacaaggaagaagcttagcttataatcgaatctaagccgtttcgggaaattctgtttgtaggtgacaaaatcctcttatagggttattcttagctatgaatttcctctgcaatttctttttttccccgccaaaatttctcctgaagcaaatgtagctttttacttgctgaactagggttttgttcgattttgttcctctttcctcgctgattttgtcggaatttctgggtttgggaagagaaattggagtcgttattgattgaaatgaagaagcttttaggaggtccgggaactgtgtgtggtctgttactgagaatcggacaatgtgcttcagctgctgcttcaatcggcgttatggtctctgctaaagagttctctgttcacactgctttttgctacttgattgcgtcaatgggtcttcaattgttgtggagctttgggctagcatgtcttgatgtttatgctctcaggggaaagaaagatctccaaaaccctatcttggttagcttattcgtcgttggtgattgggtgacggcaatgttatctcttgcagctgcatgttcatcagcaggagttgtagtcttgtatgaaaaagatatcaagtattgcaatactcaaagccaatatccatgtcttaggtatgaagtagctgtagcgctttctttcgtcacttggatccagattgctgtttcttctcatgtcacattttggatcttagcctcggtttagttagtttcgcaaagaactcccaactttttcttcttcttggaatgttgagacatctttgtagcttttgatgacgttaacaatctgcttctaatcgaatctatcaatgtttcttgcaatc

SEQ ID NO: 106254 - protein, 154 aa, Arabidopsis thaliana; identical to SEQ ID NO: 42421
  peptide (1)..(154): Ceres Seq. ID no. 13619084
  misc_feature (6)..(139): Pfam Name: Domain of unknown function (DUF588) Pfam Description: Domain of unknown function (DUF588)
  misc_feature (1)..(154): Homolog of NCBI NO: 18409932 NR Description: expressed protein [Arabidopsis thaliana] AT4g31460/F3L17_30 [Arabidopsis thaliana]
  misc_feature (36)..(154): Homolog of NCBI NO: 11357817 NR Description: hypothetical protein F5K20.150 - Arabidopsis >gi|7630005|emb|CAB88347.1| putative protein [Arabidopsis
  misc_feature (1)..(151): Homolog of NCBI NO: 15241672 NR Description: hypothetical protein [Arabidopsis thaliana]
  misc_feature (6)..(153): Homolog of NCBI NO: 30686969 NR Description: expressed protein [Arabidopsis thaliana] ethylene responsive element binding protein, putative thaliana] >gi|30102860|gb|AAP21348.1| At3g23220 [Arabidopsis
  misc_feature (1)..(153): Homolog of NCBI NO: 18401722 NR Description: expressed protein [Arabidopsis thaliana]
  misc_feature (1)..(153): Homolog of NCBI NO: 25408537 NR Description: hypothetical protein At2g37200 [imported] - thaliana >gi|4371281|gb|AAD18139.1| unknown protein [Arabidopsis
  misc_feature (1)..(153): Homolog of NCBI NO: 30687069 NR Description: expressed protein [Arabidopsis thaliana]
  misc_feature (8)..(137): Homolog of NCBI NO: 26006486 NR Description: Unknown protein [Oryza sativa (japonica
  misc_feature (6)..(100): Homolog of NCBI NO: 7939530 NR Description: gb|AAD20689.1~gene_id:K14B15.11~similar to
  misc_feature (1)..(154): Homolog of NCBI NO: 22330130 NR Description: hypothetical protein [Arabidopsis thaliana]

SEQ ID NO: 106255 - protein, 124 aa, Arabidopsis thaliana; identical to SEQ ID NO: 42422
  peptide (1)..(124): Ceres Seq. ID no. 13619085
  misc_feature (1)..(109): Pfam Name: Domain of unknown function (DUF588) Pfam Description: Domain of unknown function (DUF588)
  misc_feature (1)..(124): Homolog of NCBI NO: 18409932 NR Description: expressed protein [Arabidopsis thaliana] AT4g31460/F3L17_30 [Arabidopsis thaliana]
  misc_feature (6)..(124): Homolog of NCBI NO: 11357817 NR Description: hypothetical protein F5K20.150 - Arabidopsis >gi|7630005|emb|CAB88347.1| putative protein [Arabidopsis
  misc_feature (1)..(121): Homolog of NCBI NO: 15241672 NR Description: hypothetical protein [Arabidopsis thaliana]
  misc_feature (1)..(123): Homolog of NCBI NO: 30686969 NR Description: expressed protein [Arabidopsis thaliana] ethylene responsive element binding protein, putative thaliana] >gi|30102860|gb|AAP21348.1| At3g23220 [Arabidopsis
  misc_feature (1)..(123): Homolog of NCBI NO: 18401722 NR Description: expressed protein [Arabidopsis thaliana]
  misc_feature (1)..(123): Homolog of NCBI NO: 25408537 NR Description: hypothetical protein At2g37200 [imported] - thaliana >gi|4371281|gb|AAD18139.1| unknown protein [Arabidopsis
  misc_feature (1)..(123): Homolog of NCBI NO: 30687069 NR Description: expressed protein [Arabidopsis thaliana]
  misc_feature (1)..(107): Homolog of NCBI NO: 26006486 NR Description: Unknown protein [Oryza sativa (japonica
  misc_feature (1)..(70): Homolog of NCBI NO: 7939530 NR Description: gb|AAD20689.1~gene_id:K14B15.11~similar to
  misc_feature (1)..(124): Homolog of NCBI NO: 22330130 NR Description: hypothetical protein [Arabidopsis thaliana]

SEQ ID NO: 106256 - protein, 105 aa, Arabidopsis thaliana; identical to SEQ ID NO: 42423
  peptide (1)..(105): Ceres Seq. ID no. 13619086
  misc_feature (1)..(90): Pfam Name: Domain of unknown function (DUF588) Pfam Description: Domain of unknown function (DUF588)
  misc_feature (1)..(105): Homolog of NCBI NO: 18409932 NR Description: expressed protein [Arabidopsis thaliana] AT4g31460/F3L17_30 [Arabidopsis thaliana]
  misc_feature (1)..(105): Homolog of NCBI NO: 11357817 NR Description: hypothetical protein F5K20.150 - Arabidopsis >gi|7630005|emb|CAB88347.1| putative protein [Arabidopsis
  misc_feature (1)..(102): Homolog of NCBI NO: 15241672 NR Description: hypothetical protein [Arabidopsis thaliana]
  misc_feature (1)..(104): Homolog of NCBI NO: 30686969 NR Description: expressed protein [Arabidopsis thaliana] ethylene responsive element binding protein, putative thaliana] >gi|30102860|gb|AAP21348.1| At3g23220 [Arabidopsis
  misc_feature (1)..(104): Homolog of NCBI NO: 18401722 NR Description: expressed protein [Arabidopsis thaliana]
  misc_feature (1)..(104): Homolog of NCBI NO: 25408537 NR Description: hypothetical protein At2g37200 [imported] - thaliana >gi|4371281|gb|AAD18139.1| unknown protein [Arabidopsis
  misc_feature (1)..(104): Homolog of NCBI NO: 30687069 NR Description: expressed protein [Arabidopsis thaliana]
  misc_feature (1)..(88): Homolog of NCBI NO: 26006486 NR Description: Unknown protein [Oryza sativa (japonica
  misc_feature (1)..(51): Homolog of NCBI NO: 7939530 NR Description: gb|AAD20689.1~gene_id:K14B15.11~similar to
  misc_feature (1)..(105): Homolog of NCBI NO: 22330130 NR Description: hypothetical protein [Arabidopsis thaliana]

SEQ ID NO: 106257 - DNA, 747 bp, Arabidopsis thaliana
  misc_feature (1)..(747): Ceres Seq. ID no. 13619087
  misc_feature: MA Experiment ID: 108435 Result: Down-regulated in Transcription
  misc_feature: MA Experiment 108435 PARAMETER Experiment Name: At_stm_Mutants_cDNA_P Parameter: Plant Line Value: wt Landsburg vs stm
  misc_feature: MA Experiment 108435 PARAMETER Experiment Name: At_stm_Mutants_cDNA_P Parameter: Tissue Value: Shoot Apical Meristem Region
  misc_feature: MA Experiment ID: 108461 Result: Up-regulated in Transcription
  misc_feature: MA Experiment 108461 PARAMETER Experiment Name: At_Germinating_Seeds_cDNA_P Parameter: Age (day) Value: 1 vs. 0
  misc_feature: MA Experiment 108461 PARAMETER Experiment Name: At_Germinating_Seeds_cDNA_P Parameter: Tissue Value: Germinating Seeds
  misc_feature: MA Experiment ID: 108462 Result: Up-regulated in Transcription
  misc_feature: MA Experiment 108462 PARAMETER Experiment Name: At_Germinating_Seeds_cDNA_P Parameter: Age (day) Value: 2 vs. 0
  misc_feature: MA Experiment 108462 PARAMETER Experiment Name: At_Germinating_Seeds_cDNA_P Parameter: Tissue Value: Germinating Seeds
  misc_feature: MA Experiment ID: 108464 Result: Up-regulated in Transcription
  misc_feature: MA Experiment 108464 PARAMETER Experiment Name: At_Germinating_Seeds_cDNA_P Parameter: Age (day) Value: 4 vs. 0
  misc_feature: MA Experiment 108464 PARAMETER Experiment Name: At_Germinating_Seeds_cDNA_P Parameter: Tissue Value: Germinating Seeds
  misc_feature: MA Experiment ID: 108488 Result: Down-regulated in Transcription
  misc_feature: MA Experiment ID: 108573 Result: Up-regulated in Transcription
  misc_feature: MA Experiment 108573 PARAMETER Experiment Name: At_Drought_cDNA_P Parameter: Timepoint (hr) Value: 6
  misc_feature: MA Experiment 108573 PARAMETER Experiment Name: At_Drought_cDNA_P Parameter: Tissue Value: Aerial
  misc_feature: MA Experiment 108573 PARAMETER Experiment Name: At_Drought_cDNA_P Parameter: Treatment Value: Drought vs. No Drought
  misc_feature: MA Experiment ID: 108577 Result: Down-regulated in Transcription
  misc_feature: MA Experiment 108577 PARAMETER Experiment Name: At_42deg_Heat_cDNA_P Parameter: Temperature (deg C) Value: 42 vs. 22
  misc_feature: MA Experiment 108577 PARAMETER Experiment Name: At_42deg_Heat_cDNA_P Parameter: Timepoint (hr) Value: 6
  misc_feature: MA Experiment 108577 PARAMETER Experiment Name: At_42deg_Heat_cDNA_P Parameter: Tissue Value: Aerial
  misc_feature: MA Experiment ID: 108608 Result: Up-regulated in Transcription
  misc_feature: MA Experiment 108608 PARAMETER Experiment Name: At_100uM_ABA_cDNA_P Parameter: Timepoint (hr) Value: 1
  misc_feature: MA Experiment 108608 PARAMETER Experiment Name: At_100uM_ABA_cDNA_P Parameter: Tissue Value: Aerial
  misc_feature: MA Experiment 108608 PARAMETER Experiment Name: At_100uM_ABA_cDNA_P Parameter: Treatment Value: 100uM ABA vs. No Treatment
  misc_feature: MA Experiment ID: 108609 Result: Up-regulated in Transcription
  misc_feature: MA Experiment 108609 PARAMETER Experiment Name: At_100uM_ABA_cDNA_P Parameter: Timepoint (hr) Value: 24
  misc_feature: MA Experiment 108609 PARAMETER Experiment Name: At_100uM_ABA_cDNA_P Parameter: Tissue Value: Aerial
  misc_feature: MA Experiment 108609 PARAMETER Experiment Name: At_100uM_ABA_cDNA_P Parameter: Treatment Value: 100uM ABA vs. No Treatment
  misc_feature: MA Experiment ID: 20000069 Result: Up-regulated in Transcription
  misc_feature: MA Experiment 20000069 PARAMETER Experiment Name: At_100uM_ABA_Mutants_cDNA_P Parameter: Plant Line Value: CS23
  misc_feature: MA Experiment 20000069 PARAMETER Experiment Name: At_100uM_ABA_Mutants_cDNA_P Parameter: Timepoint (hr) Value: 6
  misc_feature: MA Experiment 20000069 PARAMETER Experiment Name: At_100uM_ABA_Mutants_cDNA_P Parameter: Tissue Value: Aerial
  misc_feature: MA Experiment 20000069 PARAMETER Experiment Name: At_100uM_ABA_Mutants_cDNA_P Parameter: Treatment Value: 100uM ABA vs. No Treatment
  misc_feature: MA Experiment ID: 20000070 Result: Up-regulated in Transcription
  misc_feature: MA Experiment 20000070 PARAMETER Experiment Name: At_100uM_ABA_Mutants_cDNA_P Parameter: Plant Line Value: CS24
  misc_feature: MA Experiment 20000070 PARAMETER Experiment Name: At_100uM_ABA_Mutants_cDNA_P Parameter: Timepoint (hr) Value: 6
  misc_feature: MA Experiment 20000070 PARAMETER Experiment Name: At_100uM_ABA_Mutants_cDNA_P Parameter: Tissue Value: Aerial
  misc_feature: MA Experiment 20000070 PARAMETER Experiment Name: At_100uM_ABA_Mutants_cDNA_P Parameter: Treatment Value: 100uM ABA vs. No Treatment
  misc_feature: MA Experiment ID: 20000071 Result: Up-regulated in Transcription
  misc_feature: MA Experiment 20000071 PARAMETER Experiment Name: At_100uM_ABA_Mutants_cDNA_P Parameter: Plant Line Value: CS8104
  misc_feature: MA Experiment 20000071 PARAMETER Experiment Name: At_100uM_ABA_Mutants_cDNA_P Parameter: Timepoint (hr) Value: 6
  misc_feature: MA Experiment 20000071 PARAMETER Experiment Name: At_100uM_ABA_Mutants_cDNA_P Parameter: Tissue Value: Aerial
  misc_feature: MA Experiment 20000071 PARAMETER Experiment Name: At_100uM_ABA_Mutants_cDNA_P Parameter: Treatment Value: 100uM ABA vs. No Treatment
  misc_feature: MA Experiment ID: 20000072 Result: Up-regulated in Transcription
  misc_feature: MA Experiment 20000072 PARAMETER Experiment Name: At_100uM_ABA_Mutants_cDNA_P Parameter: Plant Line Value: CS8105
  misc_feature: MA Experiment 20000072 PARAMETER Experiment Name: At_100uM_ABA_Mutants_cDNA_P Parameter: Timepoint (hr) Value: 6
  misc_feature: MA Experiment 20000072 PARAMETER Experiment Name: At_100uM_ABA_Mutants_cDNA_P Parameter: Tissue Value: Aerial
  misc_feature: MA Experiment 20000072 PARAMETER Experiment Name: At_100uM_ABA_Mutants_cDNA_P Parameter: Treatment Value: 100uM ABA vs. No Treatment
  misc_feature: MA Experiment ID: 20000086 Result: Up-regulated in Transcription
  misc_feature: MA Experiment 20000086 PARAMETER Experiment Name: At_100uM_ABA_Mutants_cDNA_P Parameter: Plant Line Value: CS22
  misc_feature: MA Experiment 20000086 PARAMETER Experiment Name: At_100uM_ABA_Mutants_cDNA_P Parameter: Timepoint (hr) Value: 6
  misc_feature: MA Experiment 20000086 PARAMETER Experiment Name: At_100uM_ABA_Mutants_cDNA_P Parameter: Tissue Value: Aerial
  misc_feature: MA Experiment 20000086 PARAMETER Experiment Name: At_100uM_ABA_Mutants_cDNA_P Parameter: Treatment Value: 100uM ABA vs. No Treatment
  misc_feature: MA Experiment ID: 20000087 Result: Up-regulated in Transcription
  misc_feature: MA Experiment 20000087 PARAMETER Experiment Name: At_100uM_ABA_Mutants_cDNA_P Parameter: Plant Line Value: WS
  misc_feature: MA Experiment 20000087 PARAMETER Experiment Name: At_100uM_ABA_Mutants_cDNA_P Parameter: Timepoint (hr) Value: 6
  misc_feature: MA Experiment 20000087 PARAMETER Experiment Name: At_100uM_ABA_Mutants_cDNA_P Parameter: Tissue Value: Aerial
  misc_feature: MA Experiment 20000087 PARAMETER Experiment Name: At_100uM_ABA_Mutants_cDNA_P Parameter: Treatment Value: 100uM ABA vs. No Treatment
  misc_feature: MA Experiment ID: 20000088 Result: Up-regulated in Transcription
  misc_feature: MA Experiment 20000088 PARAMETER Experiment Name: At_100uM_ABA_Mutants_cDNA_P Parameter: Plant Line Value: Landsberg
  misc_feature: MA Experiment 20000088 PARAMETER Experiment Name: At_100uM_ABA_Mutants_cDNA_P Parameter: Timepoint (hr) Value: 6
  misc_feature: MA Experiment 20000088 PARAMETER Experiment Name: At_100uM_ABA_Mutants_cDNA_P Parameter: Tissue Value: Aerial
  misc_feature: MA Experiment 20000088 PARAMETER Experiment Name: At_100uM_ABA_Mutants_cDNA_P Parameter: Treatment Value: 100uM ABA vs. No Treatment
  misc_feature: MA Experiment ID: 20000089 Result: Up-regulated in Transcription
  misc_feature: MA Experiment ID: 20000090 Result: Up-regulated in Transcription
  misc_feature: MA Experiment ID: 20000113 Result: Up-regulated in Transcription
  misc_feature: MA Experiment 20000113 PARAMETER Experiment Name: At_42deg_Heat_cDNA_P Parameter: Temperature (deg C) Value: 42 vs. 22
  misc_feature: MA Experiment 20000113 PARAMETER Experiment Name: At_42deg_Heat_cDNA_P Parameter: Timepoint (hr) Value: 8
  misc_feature: MA Experiment 20000113 PARAMETER Experiment Name: At_42deg_Heat_cDNA_P Parameter: Tissue Value: Aerial
  misc_feature: MA Experiment ID: 20000117 Result: Up-regulated in Transcription
  misc_feature: MA Experiment 20000117 PARAMETER Experiment Name: At_100uM_ABA_Mutants_cDNA_P Parameter: Plant Line Value: Columbia
  misc_feature: MA Experiment 20000117 PARAMETER Experiment Name: At_100uM_ABA_Mutants_cDNA_P Parameter: Timepoint (hr) Value: 6
  misc_feature: MA Experiment 20000117 PARAMETER Experiment Name: At_100uM_ABA_Mutants_cDNA_P Parameter: Tissue Value: Aerial
  misc_feature: MA Experiment 20000117 PARAMETER Experiment Name: At_100uM_ABA_Mutants_cDNA_P Parameter: Treatment Value: 100uM ABA vs. No Treatment
  misc_feature: MA Experiment ID: 20000166 Result: Up-regulated in Transcription
  misc_feature: MA Experiment 20000166 PARAMETER Experiment Name: At_100uM_ABA_P Parameter: Age (day) Value: 14
  misc_feature: MA Experiment 20000166 PARAMETER Experiment Name: At_100uM_ABA_P Parameter: Organism Value: A. thaliana
  misc_feature: MA Experiment 20000166 PARAMETER Experiment Name: At_100uM_ABA_P Parameter: Plant Line Value: WS
  misc_feature: MA Experiment 20000166 PARAMETER Experiment Name: At_100uM_ABA_P Parameter: Timepoint (hr) Value: 1
  misc_feature: MA Experiment 20000166 PARAMETER Experiment Name: At_100uM_ABA_P Parameter: Tissue Value: Aerial
  misc_feature: MA Experiment 20000166 PARAMETER Experiment Name: At_100uM_ABA_P Parameter: Treatment Value: 100uM ABA vs. No Treatment
  misc_feature: MA Experiment ID: 20000180 Result: Up-regulated in Transcription
  misc_feature: MA Experiment 20000180 PARAMETER Experiment Name: At_Germinating_Seeds_P Parameter: Age (hr) Value: 24 vs. 0
  misc_feature: MA Experiment 20000180 PARAMETER Experiment Name: At_Germinating_Seeds_P Parameter: Tissue Value: Germinating Seeds
  misc_feature: MA Experiment ID: 20000184 Result: Down-regulated in Transcription
  misc_feature: MA Experiment 20000184 PARAMETER Experiment Name: At_Shoots__P Parameter: Age (day) Value: 7
  misc_feature: MA Experiment 20000184 PARAMETER Experiment Name: At_Shoots__P Parameter: Tissue Value: Shoots vs. Whole Plant
  misc_feature: MA Experiment ID: 20000224 Result: Up-regulated in Transcription
  misc_feature: MA Experiment ID: 20000227 Result: Up-regulated in Transcription
  misc_feature: MA Experiment 20000227 PARAMETER Experiment Name: At_Root-Tips-vs-Tops_P Parameter: Tissue Value: Root Tips vs. Root Tops
  misc_feature: MA Experiment ID: 20000437 Result: Up-regulated in Transcription
  misc_feature: MA Experiment 20000437 PARAMETER Experiment Name: At_Drought_P Parameter: Age (day) Value: 8
  misc_feature: MA Experiment 20000437 PARAMETER Experiment Name: At_Drought_P Parameter: Organism Value: A. thaliana
  misc_feature: MA Experiment 20000437 PARAMETER Experiment Name: At_Drought_P Parameter: Plant Line Value: WS
  misc_feature: MA Experiment 20000437 PARAMETER Experiment Name: At_Drought_P Parameter: Timepoint (hr) Value: 24
  misc_feature: MA Experiment 20000437 PARAMETER Experiment Name: At_Drought_P Parameter: Tissue Value: Whole Plant
  misc_feature: MA Experiment 20000437 PARAMETER Experiment Name: At_Drought_P Parameter: Treatment Value: Drought vs. No Drought
  misc_feature: MA Experiment ID: 20000453 Result: Up-regulated in Transcription
  misc_feature: MA Experiment 20000453 PARAMETER Experiment Name: At_100uM_ABA_P Parameter: Age (day) Value: 15
  misc_feature: MA Experiment 20000453 PARAMETER Experiment Name: At_100uM_ABA_P Parameter: Organism Value: A. thaliana
  misc_feature: MA Experiment 20000453 PARAMETER Experiment Name: At_100uM_ABA_P Parameter: Plant Line Value: WS
  misc_feature: MA Experiment 20000453 PARAMETER Experiment Name: At_100uM_ABA_P Parameter: Timepoint (hr) Value: 24
  misc_feature: MA Experiment 20000453 PARAMETER Experiment Name: At_100uM_ABA_P Parameter: Tissue Value: Aerial
  misc_feature: MA Experiment 20000453 PARAMETER Experiment Name: At_100uM_ABA_P Parameter: Treatment Value: 100uM ABA vs. No Treatment
  misc_feature: MA Experiment ID: 20000496 Result: Down-regulated in Transcription
  misc_feature: MA Experiment 20000496 PARAMETER Experiment Name: At_Guard_Cells_P Parameter: Harvest Date Value: 7/19/2002
  misc_feature: MA Experiment 20000496 PARAMETER Experiment Name: At_Guard_Cells_P Parameter: Organism Value: Canola
  misc_feature: MA Experiment 20000496 PARAMETER Experiment Name: At_Guard_Cells_P Parameter: Tissue Value: Guard Cells vs. Leaves
  misc_feature: MA Experiment ID: 20001248 Result: Up-regulated in Transcription
  misc_feature: MA Experiment 20001248 PARAMETER Experiment Name: At_Far-red-induction_P Parameter: Age (day) Value: 7
  misc_feature: MA Experiment 20001248 PARAMETER Experiment Name: At_Far-red-induction_P Parameter: Light Value: Far-red vs. White
  misc_feature: MA Experiment 20001248 PARAMETER Experiment Name: At_Far-red-induction_P Parameter: Organism Value: A. thaliana
  misc_feature: MA Experiment 20001248 PARAMETER Experiment Name: At_Far-red-induction_P Parameter: Plant Line Value: Columbia
  misc_feature: MA Experiment 20001248 PARAMETER Experiment Name: At_Far-red-induction_P Parameter: Timepoint (hr) Value: 4
  misc_feature: MA Experiment 20001248 PARAMETER Experiment Name: At_Far-red-induction_P Parameter: Tissue Value: Whole Plant
  misc_feature: MA Experiment ID: 20001451 Result: Up-regulated in Transcription
  misc_feature: MA Experiment 20001451 PARAMETER Experiment Name: At_Far-red-induction_P Parameter: Age (day) Value: 7
  misc_feature: MA Experiment 20001451 PARAMETER Experiment Name: At_Far-red-induction_P Parameter: Light Value: Far-red vs. White
  misc_feature: MA Experiment 20001451 PARAMETER Experiment Name: At_Far-red-induction_P Parameter: Organism Value: A. thaliana
  misc_feature: MA Experiment 20001451 PARAMETER Experiment Name: At_Far-red-induction_P Parameter: Plant Line Value: Columbia
  misc_feature: MA Experiment 20001451 PARAMETER Experiment Name: At_Far-red-induction_P Parameter: Timepoint (hr) Value: 24
  misc_feature: MA Experiment 20001451 PARAMETER Experiment Name: At_Far-red-induction_P Parameter: Tissue Value: Whole Plant
  misc_feature: MA Experiment ID: 20001557 Result: Down-regulated in Transcription
  misc_feature: MA Experiment 20001557 PARAMETER Experiment Name: At_Drought_Soil_Dry_P Parameter: Age (day) Value: 27
  misc_feature: MA Experiment 20001557 PARAMETER Experiment Name: At_Drought_Soil_Dry_P Parameter: Organism Value: A. thaliana
  misc_feature: MA Experiment 20001557 PARAMETER Experiment Name: At_Drought_Soil_Dry_P Parameter: Plant Line Value: WS
  misc_feature: MA Experiment 20001557 PARAMETER Experiment Name: At_Drought_Soil_Dry_P Parameter: Post Timepoint (hr) Value: 3
  misc_feature: MA Experiment 20001557 PARAMETER Experiment Name: At_Drought_Soil_Dry_P Parameter: Post-Treatment Value: Re-Water vs. No Drought
  misc_feature: MA Experiment 20001557 PARAMETER Experiment Name: At_Drought_Soil_Dry_P Parameter: Timepoint (day) Value: 13
  misc_feature: MA Experiment 20001557 PARAMETER Experiment Name: At_Drought_Soil_Dry_P Parameter: Treatment Value: Drought vs. No Drought
  misc_feature: MA Experiment ID: 20001558 Result: Down-regulated in Transcription
  misc_feature: MA Experiment 20001558 PARAMETER Experiment Name: At_Drought_Soil_Dry_P Parameter: Age (day) Value: 27
  misc_feature: MA Experiment 20001558 PARAMETER Experiment Name: At_Drought_Soil_Dry_P Parameter: Organism Value: A. thaliana
  misc_feature: MA Experiment 20001558 PARAMETER Experiment Name: At_Drought_Soil_Dry_P Parameter: Plant Line Value: WS
  misc_feature: MA Experiment 20001558 PARAMETER Experiment Name: At_Drought_Soil_Dry_P Parameter: Post Timepoint (hr) Value: 6
  misc_feature: MA Experiment 20001558 PARAMETER Experiment Name: At_Drought_Soil_Dry_P Parameter: Post-Treatment Value: Re-Water vs. No Drought
  misc_feature: MA Experiment 20001558 PARAMETER Experiment Name: At_Drought_Soil_Dry_P Parameter: Timepoint (day) Value: 13
  misc_feature: MA Experiment 20001558 PARAMETER Experiment Name: At_Drought_Soil_Dry_P Parameter: Treatment Value: Drought vs. No Drought
  misc_feature: MA Experiment ID: 20001911 Result: Up-regulated in Transcription
  misc_feature: MA Experiment 20001911 PARAMETER Experiment Name: At_Drought_Reproduction_P Parameter: Age (day) Value: 40
  misc_feature: MA Experiment 20001911 PARAMETER Experiment Name: At_Drought_Reproduction_P Parameter: Organism Value: A. thaliana
  misc_feature: MA Experiment 20001911 PARAMETER Experiment Name: At_Drought_Reproduction_P Parameter: Plant Line Value: WS
  misc_feature: MA Experiment 20001911 PARAMETER Experiment Name: At_Drought_Reproduction_P Parameter: Timepoint (day) Value: 10
  misc_feature: MA Experiment 20001911 PARAMETER Experiment Name: At_Drought_Reproduction_P Parameter: Tissue Value: Flowers
  misc_feature: MA Experiment 20001911 PARAMETER Experiment Name: At_Drought_Reproduction_P Parameter: Treatment Value: Drought vs. No Drought
tctctctagaaaatatcagaaaaacaaaaccatctcaaagtttcttgagaagaaaaaaagggtcaagaaagatgcctaaagacaggaatatcggaatcgccatggatttctcagagagcagcaagaacgctctgaaatgggcgatcgagaacttagcagacaaaggagacacgatttacatcatccacactctaccactctctggcgatgaatctcgtaactccctctggttcaaatccggttctcctctcataccgttggcagagtttagggaaccggagattatggagaaatacggtgtcaaaaccgacatcgcatgtcttgatatgctcgacactggttcgaggcagaaagaggtgcatgtagtgaccaagttatactggggagatgcaagagagaagcttgttgatgctgttaaagatcttaaactcgattctattgtcatgggaagcagaggactcagtgctcttcaaaggataataatgggaagcgtgagcagctttgtgatccaacacgcgccttgccctgtcaccgttgtcaaggataacgaataaacgattctcactacaaaaaaaaaaaaaaaaaaaaactgtctttatcttataagtcctaccaaataatcatcgcaatttatgctttttagtttttattaataaaagaatctttatgttggttttatttgtaatttgactacaacaaaaaaagaacccagagtgttttcatcttctagttttgagagtttcttgc

SEQ ID NO: 106258 - protein, 183 aa, Arabidopsis thaliana
  peptide (1)..(183): Ceres Seq. ID no. 13619088
  misc_feature (27)..(180): Pfam Name: Universal stress protein family Pfam Description: Universal stress protein family
  misc_feature (24)..(183): Homolog of NCBI NO: 30693971 NR Description: expressed protein [Arabidopsis thaliana]
  misc_feature (26)..(181): Homolog of NCBI NO: 11602751 NR Description: ENOD18 protein [Vicia faba]
  misc_feature (24)..(181): Homolog of NCBI NO: 11602747 NR Description: early nodulin ENOD18 [Vicia faba]
  misc_feature (24)..(181): Homolog of NCBI NO: 11602749 NR Description: early nodulin ENOD18 [Vicia faba]
  misc_feature (20)..(180): Homolog of NCBI NO: 32352136 NR Description: hypothetical protein [Oryza sativa (japonica
  misc_feature (24)..(121): Homolog of NCBI NO: 21555070 NR Description: unknown [Arabidopsis thaliana]
  misc_feature (24)..(182): Homolog of NCBI NO: 30678807 NR Description: expressed protein [Arabidopsis thaliana]
  misc_feature (27)..(180): Homolog of NCBI NO: 20160561 NR Description: P0414E03.3 [Oryza sativa (japonica
  misc_feature (24)..(158): Homolog of NCBI NO: 18396497 NR Description: expressed protein [Arabidopsis thaliana] unknown [Arabidopsis thaliana] >gi|27754280|gb|AAO22593.1|
  misc_feature (28)..(180): Homolog of NCBI NO: 18401345 NR Description: expressed protein [Arabidopsis thaliana] gb|AAF26101.1~gene_id:K14A17.9~similar to unknown protein thaliana] >gi|14190421|gb|AAK55691.1|AF378888_1
SLENIRKTKPSQSFLRRKKGSRKMPKDRNIGIAMDFSESSKNALKWAIENLADKGDTIYIIHTLPLSGDESRNSLWFKSGSPLIPLAEFREPEIMEKYGVKTDIACLDMLDTGSRQKEVHVVTKLYWGDAREKLVDAVKDLKLDSIVMGSRGLSALQRIIMGSVSSFVIQHAPCPVTVVKDNE

SEQ ID NO: 106259 - protein, 160 aa, Arabidopsis thaliana; identical to SEQ ID NO: 35431
  peptide (1)..(160): Ceres Seq. ID no. 13619089
  misc_feature (4)..(157): Pfam Name: Universal stress protein family Pfam Description: Universal stress protein family
  misc_feature (1)..(160): Homolog of NCBI NO: 30693971 NR Description: expressed protein [Arabidopsis thaliana]
  misc_feature (3)..(158): Homolog of NCBI NO: 11602751 NR Description: ENOD18 protein [Vicia faba]
  misc_feature (1)..(158): Homolog of NCBI NO: 11602747 NR Description: early nodulin ENOD18 [Vicia faba]
  misc_feature (1)..(158): Homolog of NCBI NO: 11602749 NR Description: early nodulin ENOD18 [Vicia faba]
  misc_feature (1)..(157): Homolog of NCBI NO: 32352136 NR Description: hypothetical protein [Oryza sativa (japonica
  misc_feature (1)..(98): Homolog of NCBI NO: 21555070 NR Description: unknown [Arabidopsis thaliana]
  misc_feature (1)..(159): Homolog of NCBI NO: 30678807 NR Description: expressed protein [Arabidopsis thaliana]
  misc_feature (4)..(157): Homolog of NCBI NO: 20160561 NR Description: P0414E03.3 [Oryza sativa (japonica
  misc_feature (1)..(135): Homolog of NCBI NO: 18396497 NR Description: expressed protein [Arabidopsis thaliana] unknown [Arabidopsis thaliana] >gi|27754280|gb|AAO22593.1|
  misc_feature (5)..(157): Homolog of NCBI NO: 18401345 NR Description: expressed protein [Arabidopsis thaliana] gb|AAF26101.1~gene_id:K14A17.9~similar to unknown protein thaliana] >gi|14190421|gb|AAK55691.1|AF378888_1

SEQ ID NO: 106260 - protein, 150 aa, Arabidopsis thaliana; identical to SEQ ID NO: 35432
  peptide (1)..(150): Ceres Seq. ID no. 13619090
  misc_feature (1)..(147): Pfam Name: Universal stress protein family Pfam Description: Universal stress protein family
  misc_feature (1)..(150): Homolog of NCBI NO: 30693971 NR Description: expressed protein [Arabidopsis thaliana]
  misc_feature (1)..(148): Homolog of NCBI NO: 11602751 NR Description: ENOD18 protein [Vicia faba]
  misc_feature (1)..(148): Homolog of NCBI NO: 11602747 NR Description: early nodulin ENOD18 [Vicia faba]
  misc_feature (1)..(148): Homolog of NCBI NO: 11602749 NR Description: early nodulin ENOD18 [Vicia faba]
  misc_feature (1)..(147): Homolog of NCBI NO: 32352136 NR Description: hypothetical protein [Oryza sativa (japonica
  misc_feature (1)..(88): Homolog of NCBI NO: 21555070 NR Description: unknown [Arabidopsis thaliana]
  misc_feature (1)..(149): Homolog of NCBI NO: 30678807 NR Description: expressed protein [Arabidopsis thaliana]
  misc_feature (1)..(147): Homolog of NCBI NO: 20160561 NR Description: P0414E03.3 [Oryza sativa (japonica
  misc_feature (1)..(125): Homolog of NCBI NO: 18396497 NR Description: expressed protein [Arabidopsis thaliana] unknown [Arabidopsis thaliana] >gi|27754280|gb|AAO22593.1|
  misc_feature (1)..(147): Homolog of NCBI NO: 18401345 NR Description: expressed protein [Arabidopsis thaliana] gb|AAF26101.1~gene_id:K14A17.9~similar to unknown protein thaliana] >gi|14190421|gb|AAK55691.1|AF378888_1

SEQ ID NO: 106261 - DNA, 1811 bp, Arabidopsis thaliana
  misc_feature (1)..(1811): Ceres Seq. ID no. 13619095
  misc_feature: MA Experiment ID: 20000445 Result: Up-regulated in Transcription
  misc_feature: MA Experiment 20000445 PARAMETER Experiment Name: At_100uM_NAA__P Parameter: Age (day) Value: 14
  misc_feature: MA Experiment 20000445 PARAMETER Experiment Name: At_100uM_NAA__P Parameter: Organism Value: A. thaliana
  misc_feature: MA Experiment 20000445 PARAMETER Experiment Name: At_100uM_NAA__P Parameter: Plant Line Value: WS
  misc_feature: MA Experiment 20000445 PARAMETER Experiment Name: At_100uM_NAA__P Parameter: Timepoint (hr) Value: 6
  misc_feature: MA Experiment 20000445 PARAMETER Experiment Name: At_100uM_NAA__P Parameter: Tissue Value: Aerial
  misc_feature: MA Experiment 20000445 PARAMETER Experiment Name: At_100uM_NAA__P Parameter: Treatment Value: 100uM NAA vs. No Treatment
  misc_feature: MA Experiment ID: 20001450 Result: Up-regulated in Transcription
  misc_feature: MA Experiment 20001450 PARAMETER Experiment Name: At_Far-red-induction_P Parameter: Age (day) Value: 7
  misc_feature: MA Experiment 20001450 PARAMETER Experiment Name: At_Far-red-induction_P Parameter: Light Value: Far-red vs. White
  misc_feature: MA Experiment 20001450 PARAMETER Experiment Name: At_Far-red-induction_P Parameter: Organism Value: A. thaliana
  misc_feature: MA Experiment 20001450 PARAMETER Experiment Name: At_Far-red-induction_P Parameter: Plant Line Value: Columbia
  misc_feature: MA Experiment 20001450 PARAMETER Experiment Name: At_Far-red-induction_P Parameter: Timepoint (hr) Value: 8
  misc_feature: MA Experiment 20001450 PARAMETER Experiment Name: At_Far-red-induction_P Parameter: Tissue Value: Whole Plant
aattctctttgtagagggaagtctgaaaacgccgagaagaagacgaagaagaagaagaagaagaaagcttgagactttctctctgtgtgcaatttcgaaatcgataaagacttcaactttcggttctaacaatgacaatttccgtatagtttgattttgtccacctctttcaccgattacctgatttcatcgctggcgttagtcatcaaatgggagctcgttgctcaaagttctcattctgcttgttcccttctcacttcaaatccgcttcagttctcgagtctcctgatatcgagaatggaggaaaagtgtggccgacttttaaggaattcaaattggagcagctgaaatctgcgaccggaggtttctcttcagacaacattgtatcagaacacggcgagaaagctccaaacgttgtctacagaggaaggcttgatgatggtcgtttgattgctgtcaaacgattcaatcgccttgcttgggctgatcatcgacagttcctggatgaagctaaagctgttgggagcttgaggagtgatagattagcgaatctgattggatgttgctttgaaggagaagagagattactagttgctgagtttatgcctcatgaaacgcttgcaaagcatcttttccactgggagaataatccgatgaaatgggcgatgagattaagagttgcattgtgtttagcacaagcattggaatattgtagtaataaagggagagctttgtatcatgatctcaatgcttacagggttttgtttgacaaggatgggaatcccaggttgtcttgttttggactcatgaaaaatagcagagatgggaagagttatagcacaaacttggcatttactcctccagagtatttgcgaacgggtagagttacaccagagagtgttgtattcagttttggaaccgttttgctcgatctcatgagtggaaaacatattccaccgagtcatgcgcttgacctaatcagaggcaagaactgtgcaatgttaatggattctgctctcgagggtcatttctcaaacgaagacggaactgagctagtacgcttagccacacgttgtctgcagtatgaagctcgagaaagaccaaatgtgaaatctctcgtgacttcacttgtcacactccagaaggaatctgatgtagcttcctacgttcttatgggtataccccatgaaaccgaggctgaagaagagtctccgctttctttgacaccctttggtgatgcatgcttaagagtggatcttacagccatacaggaaatactcagtaagattggatacaaggatgatgaaggaattgccaatgagctctcgtttcaaatgtggaccaatcagatgcaggaatctctcaattcgaagaagcaaggcgacttagctttccgttccaaagattttacaaccgcggtcgattgctacactcagttcatagatgggggaacaatggtgtcaccaacagtacacgcacggcggtgcttgtcatatctgatgaacgacaacgcacaagaggctctgacagatgcattgcaggcacaggttgtgtctccggattggccaaccgccttgtatctgcaagcggcttgcttgttcaagctgggtatggaagccgatgctcagcaagctcttaaggatgggactacattggaagctaagaagagtaacaagcgctgataaaatagcgttttcaaaagcttttgtatatgctttattttgtttcctttctctctatttccatctatatgcgcatacatacacatatgcgggtgtatttattatatatgtgcatatacttttgatgcc

SEQ ID NO: 106262 - protein, 490 aa, Arabidopsis thaliana; identical to SEQ ID NO: 42727
  peptide (1)..(490): Ceres Seq. ID no. 13619096
  misc_feature (1)..(490): Homolog of NCBI NO: 15232406 NR Description: protein kinase family [Arabidopsis thaliana]
  misc_feature (1)..(490): Homolog of NCBI NO: 21553556 NR Description: protein kinase-like protein [Arabidopsis thaliana]
  misc_feature (1)..(490): Homolog of NCBI NO: 22327962 NR Description: protein kinase - related [Arabidopsis thaliana]
  misc_feature (1)..(485): Homolog of NCBI NO: 22328189 NR Description: protein kinase family [Arabidopsis thaliana] Unknown protein [Arabidopsis thaliana]
  misc_feature (1)..(487): Homolog of NCBI NO: 15237604 NR Description: protein kinase family [Arabidopsis thaliana]
  misc_feature (1)..(488): Homolog of NCBI NO: 32488705 NR Description: OSJNBa0088H09.6 [Oryza sativa (japonica
  misc_feature (1)..(485): Homolog of NCBI NO: 7486564 NR Description: hypothetical protein F6N23.9 - Arabidopsis >gi|3047104|gb|AAC13615.1| F6N23.9 gene product [Arabidopsis >gi|7267410|emb|CAB80880.1| hypothetical protein [Arabidopsis
  misc_feature (1)..(487): Homolog of NCBI NO: 34897368 NR Description: putative protein kinase [Oryza sativa]
  misc_feature (1)..(486): Homolog of NCBI NO: 15223469 NR Description: protein kinase family [Arabidopsis thaliana]
  misc_feature (31)..(486): Homolog of NCBI NO: 18418600 NR Description: protein kinase family [Arabidopsis thaliana] AT4g35230/F23E12_210 [Arabidopsis thaliana]

SEQ ID NO: 106263 - protein, 359 aa, Arabidopsis thaliana; identical to SEQ ID NO: 42728
  peptide (1)..(359): Ceres Seq. ID no. 13619097
  misc_feature (1)..(359): Homolog of NCBI NO: 15232406 NR Description: protein kinase family [Arabidopsis thaliana]
  misc_feature (1)..(359): Homolog of NCBI NO: 21553556 NR Description: protein kinase-like protein [Arabidopsis thaliana]
  misc_feature (1)..(359): Homolog of NCBI NO: 22327962 NR Description: protein kinase - related [Arabidopsis thaliana]
  misc_feature (1)..(354): Homolog of NCBI NO: 22328189 NR Description: protein kinase family [Arabidopsis thaliana] Unknown protein [Arabidopsis thaliana]
  misc_feature (1)..(356): Homolog of NCBI NO: 15237604 NR Description: protein kinase family [Arabidopsis thaliana]
  misc_feature (1)..(357): Homolog of NCBI NO: 32488705 NR Description: OSJNBa0088H09.6 [Oryza sativa (japonica
  misc_feature (1)..(354): Homolog of NCBI NO: 7486564 NR Description: hypothetical protein F6N23.9 - Arabidopsis >gi|3047104|gb|AAC13615.1| F6N23.9 gene product [Arabidopsis >gi|7267410|emb|CAB80880.1| hypothetical protein [Arabidopsis
  misc_feature (1)..(356): Homolog of NCBI NO: 34897368 NR Description: putative protein kinase [Oryza sativa]
  misc_feature (1)..(355): Homolog of NCBI NO: 15223469 NR Description: protein kinase family [Arabidopsis thaliana]
  misc_feature (1)..(355): Homolog of NCBI NO: 18418600 NR Description: protein kinase family [Arabidopsis thaliana] AT4g35230/F23E12_210 [Arabidopsis thaliana]

SEQ ID NO: 106264 - protein, 342 aa, Arabidopsis thaliana; identical to SEQ ID NO: 42729
  peptide (1)..(342): Ceres Seq. ID no. 13619098
  misc_feature (1)..(342): Homolog of NCBI NO: 15232406 NR Description: protein kinase family [Arabidopsis thaliana]
  misc_feature (1)..(342): Homolog of NCBI NO: 21553556 NR Description: protein kinase-like protein [Arabidopsis thaliana]
  misc_feature (1)..(342): Homolog of NCBI NO: 22327962 NR Description: protein kinase - related [Arabidopsis thaliana]
  misc_feature (1)..(337): Homolog of NCBI NO: 22328189 NR Description: protein kinase family [Arabidopsis thaliana] Unknown protein [Arabidopsis thaliana]
  misc_feature (1)..(339): Homolog of NCBI NO: 15237604 NR Description: protein kinase family [Arabidopsis thaliana]
  misc_feature (1)..(340): Homolog of NCBI NO: 32488705 NR Description: OSJNBa0088H09.6 [Oryza sativa (japonica
  misc_feature (1)..(337): Homolog of NCBI NO: 7486564 NR Description: hypothetical protein F6N23.9 - Arabidopsis >gi|3047104|gb|AAC13615.1| F6N23.9 gene product [Arabidopsis >gi|7267410|emb|CAB80880.1| hypothetical protein [Arabidopsis
  misc_feature (1)..(339): Homolog of NCBI NO: 34897368 NR Description: putative protein kinase [Oryza sativa]
  misc_feature (1)..(338): Homolog of NCBI NO: 15223469 NR Description: protein kinase family [Arabidopsis thaliana]
  misc_feature (1)..(338): Homolog of NCBI NO: 18418600 NR Description: protein kinase family [Arabidopsis thaliana] AT4g35230/F23E12_210 [Arabidopsis thaliana]

SEQ ID NO: 106265 - DNA, 1169 bp, Arabidopsis thaliana
  misc_feature (1)..(1169): Ceres Seq. ID no. 13619099
  misc_feature: MA Experiment ID: 108434 Result: Down-regulated in Transcription
  misc_feature: MA Experiment 108434 PARAMETER Experiment Name: At_Root_Tips_cDNA_P Parameter: Tissue Value: Root Tips
  misc_feature: MA Experiment ID: 108461 Result: Down-regulated in Transcription
  misc_feature: MA Experiment 108461 PARAMETER Experiment Name: At_Germinating_Seeds_cDNA_P Parameter: Age (day) Value: 1 vs. 0
  misc_feature: MA Experiment 108461 PARAMETER Experiment Name: At_Germinating_Seeds_cDNA_P Parameter: Tissue Value: Germinating Seeds
  misc_feature: MA Experiment ID: 108469 Result: Up-regulated in Transcription
  misc_feature: MA Experiment ID: 108585 Result: Up-regulated in Transcription
  misc_feature: MA Experiment 108585 PARAMETER Experiment Name: At_5mM_NaNP_cDNA_P Parameter: Timepoint (hr) Value: 6
  misc_feature: MA Experiment 108585 PARAMETER Experiment Name: At_5mM_NaNP_cDNA_P Parameter: Tissue Value: Aerial
  misc_feature: MA Experiment 108585 PARAMETER Experiment Name: At_5mM_NaNP_cDNA_P Parameter: Treatment Value: null
  misc_feature: MA Experiment ID: 108595 Result: Up-regulated in Transcription
  misc_feature: MA Experiment 108595 PARAMETER Experiment Name: At_Ler-pi_Ovule_cDNA_P Parameter: Plant Line Value: null
  misc_feature: MA Experiment ID: 108667 Result: Up-regulated in Transcription
  misc_feature: MA Experiment 108667 PARAMETER Experiment Name: At_2mM_SA_cDNA_P Parameter: Plant Line Value: WS
  misc_feature: MA Experiment 108667 PARAMETER Experiment Name: At_2mM_SA_cDNA_P Parameter: Timepoint (hr) Value: 1
  misc_feature: MA Experiment 108667 PARAMETER Experiment Name: At_2mM_SA_cDNA_P Parameter: Treatment Value: 2mM SA vs. No Treatment
  misc_feature: MA Experiment ID: 108668 Result: Up-regulated in Transcription
  misc_feature: MA Experiment 108668 PARAMETER Experiment Name: At_2mM_SA_cDNA_P Parameter: Plant Line Value: WS
  misc_feature: MA Experiment 108668 PARAMETER Experiment Name: At_2mM_SA_cDNA_P Parameter: Timepoint (hr) Value: 6
  misc_feature: MA Experiment 108668 PARAMETER Experiment Name: At_2mM_SA_cDNA_P Parameter: Treatment Value: 2mM SA vs. No Treatment
  misc_feature: MA Experiment ID: 20000090 Result: Up-regulated in Transcription
  misc_feature: MA Experiment ID: 20000179 Result: Down-regulated in Transcription
  misc_feature: MA Experiment 20000179 PARAMETER Experiment Name: At_Germinating_Seeds_P Parameter: Age (hr) Value: 6 vs. 0
  misc_feature: MA Experiment 20000179 PARAMETER Experiment Name: At_Germinating_Seeds_P Parameter: Tissue Value: Germinating Seeds
  misc_feature: MA Experiment ID: 20000180 Result: Down-regulated in Transcription
  misc_feature: MA Experiment 20000180 PARAMETER Experiment Name: At_Germinating_Seeds_P Parameter: Age (hr) Value: 24 vs. 0
  misc_feature: MA Experiment 20000180 PARAMETER Experiment Name: At_Germinating_Seeds_P Parameter: Tissue Value: Germinating Seeds
  misc_feature: MA Experiment ID: 20000182 Result: Up-regulated in Transcription
  misc_feature: MA Experiment 20000182 PARAMETER Experiment Name: At_2mM_SA_P Parameter: Age (day) Value: 14
  misc_feature: MA Experiment 20000182 PARAMETER Experiment Name: At_2mM_SA_P Parameter: Organism Value: A. thaliana
  misc_feature: MA Experiment 20000182 PARAMETER Experiment Name: At_2mM_SA_P Parameter: Plant Line Value: WS
  misc_feature: MA Experiment 20000182 PARAMETER Experiment Name: At_2mM_SA_P Parameter: Timepoint (hr) Value: 6
  misc_feature: MA Experiment 20000182 PARAMETER Experiment Name: At_2mM_SA_P Parameter: Tissue Value: Aerial
  misc_feature: MA Experiment 20000182 PARAMETER Experiment Name: At_2mM_SA_P Parameter: Treatment Value: 2mM SA vs. No Treatment
  misc_feature: MA Experiment ID: 20000184 Result: Down-regulated in Transcription
  misc_feature: MA Experiment 20000184 PARAMETER Experiment Name: At_Shoots__P Parameter: Age (day) Value: 7
  misc_feature: MA Experiment 20000184 PARAMETER Experiment Name: At_Shoots__P Parameter: Tissue Value: Shoots vs. Whole Plant
  misc_feature: MA Experiment ID: 20000185 Result: Down-regulated in Transcription
  misc_feature: MA Experiment 20000185 PARAMETER Experiment Name: At_Roots__P Parameter: Age (day) Value: 7 vs. 21
  misc_feature: MA Experiment 20000185 PARAMETER Experiment Name: At_Roots__P Parameter: Organism Value: A. thaliana
  misc_feature: MA Experiment 20000185 PARAMETER Experiment Name: At_Roots__P Parameter: Tissue Value: Roots vs. Whole Plant
  misc_feature: MA Experiment ID: 20000234 Result: Down-regulated in Transcription
  misc_feature: MA Experiment 20000234 PARAMETER Experiment Name: At_Siliques_P Parameter: Age (day) Value: 21
  misc_feature: MA Experiment 20000234 PARAMETER Experiment Name: At_Siliques_P Parameter: Organism Value: A. thaliana
  misc_feature: MA Experiment 20000234 PARAMETER Experiment Name: At_Siliques_P Parameter: Plant Line Value: WS
  misc_feature: MA Experiment 20000234 PARAMETER Experiment Name: At_Siliques_P Parameter: Tissue Value: Less Than 5mm Siliques vs. Whole Plant
  misc_feature: MA Experiment ID: 20000235 Result: Down-regulated in Transcription
  misc_feature: MA Experiment 20000235 PARAMETER Experiment Name: At_Siliques_P Parameter: Age (day) Value: 21
  misc_feature: MA Experiment 20000235 PARAMETER Experiment Name: At_Siliques_P Parameter: Organism Value: A. thaliana
  misc_feature: MA Experiment 20000235 PARAMETER Experiment Name: At_Siliques_P Parameter: Plant Line Value: WS
  misc_feature: MA Experiment 20000235 PARAMETER Experiment Name: At_Siliques_P Parameter: Tissue Value: 5-10mm Siliques vs. Whole Plant
  misc_feature: MA Experiment ID: 20000438 Result: Down-regulated in Transcription
  misc_feature: MA Experiment 20000438 PARAMETER Experiment Name: At_Shoots__P Parameter: Age (day) Value: 14
  misc_feature: MA Experiment 20000438 PARAMETER Experiment Name: At_Shoots__P Parameter: Tissue Value: Shoots vs. Whole Plant
  misc_feature: MA Experiment ID: 20000439 Result: Down-regulated in Transcription
  misc_feature: MA Experiment 20000439 PARAMETER Experiment Name: At_Roots__P Parameter: Age (day) Value: 14 vs. 21
  misc_feature: MA Experiment 20000439 PARAMETER Experiment Name: At_Roots__P Parameter: Organism Value: A. thaliana
  misc_feature: MA Experiment 20000439 PARAMETER Experiment Name: At_Roots__P Parameter: Tissue Value: Roots vs. Whole Plant
  misc_feature: MA Experiment ID: 20000451 Result: Up-regulated in Transcription
  misc_feature: MA Experiment 20000451 PARAMETER Experiment Name: At_CS6879_Shoots-Roots_P Parameter: Age (day) Value: 14
  misc_feature: MA Experiment 20000451 PARAMETER Experiment Name: At_CS6879_Shoots-Roots_P Parameter: Organism Value: A. thaliana
  misc_feature: MA Experiment 20000451 PARAMETER Experiment Name: At_CS6879_Shoots-Roots_P Parameter: Plant Line Value: CS6879 vs. WS
  misc_feature: MA Experiment 20000451 PARAMETER Experiment Name: At_CS6879_Shoots-Roots_P Parameter: Tissue Value: Roots
  misc_feature: MA Experiment ID: 20000456 Result: Up-regulated in Transcription
  misc_feature: MA Experiment 20000456 PARAMETER Experiment Name: At_100uM_BA_P Parameter: Age (day) Value: 14
  misc_feature: MA Experiment 20000456 PARAMETER Experiment Name: At_100uM_BA_P Parameter: Organism Value: A. thaliana
  misc_feature: MA Experiment 20000456 PARAMETER Experiment Name: At_100uM_BA_P Parameter: Plant Line Value: WS
  misc_feature: MA Experiment 20000456 PARAMETER Experiment Name: At_100uM_BA_P Parameter: Timepoint (hr) Value: 6
  misc_feature: MA Experiment 20000456 PARAMETER Experiment Name: At_100uM_BA_P Parameter: Tissue Value: Aerial
  misc_feature: MA Experiment 20000456 PARAMETER Experiment Name: At_100uM_BA_P Parameter: Treatment Value: 100uM BA vs. No Treatment
  misc_feature: MA Experiment ID: 20000527 Result: Down-regulated in Transcription
  misc_feature: MA Experiment 20000527 PARAMETER Experiment Name: At_10percent_PEG_P Parameter: Age (day) Value: 20
  misc_feature: MA Experiment 20000527 PARAMETER Experiment Name: At_10percent_PEG_P Parameter: Organism Value: A. thaliana
  misc_feature: MA Experiment 20000527 PARAMETER Experiment Name: At_10percent_PEG_P Parameter: Plant Line Value: WS
  misc_feature: MA Experiment 20000527 PARAMETER Experiment Name: At_10percent_PEG_P Parameter: Timepoint (day) Value: 20
  misc_feature: MA Experiment 20000527 PARAMETER Experiment Name: At_10percent_PEG_P Parameter: Tissue Value: Whole Plant
  misc_feature: MA Experiment 20000527 PARAMETER Experiment Name: At_10percent_PEG_P Parameter: Treatment Value: 10percent PEG vs. No Treatment
  misc_feature: MA Experiment ID: 20000573 Result: Up-regulated in Transcription
  misc_feature: MA Experiment 20000573 PARAMETER Experiment Name: At_100uM_ABA_Mutants__P Parameter: Organism Value: A. thaliana
  misc_feature: MA Experiment 20000573 PARAMETER Experiment Name: At_100uM_ABA_Mutants__P Parameter: Plant Line Value: CS22 vs. Ler wt
  misc_feature: MA Experiment 20000573 PARAMETER Experiment Name: At_100uM_ABA_Mutants__P Parameter: Timepoint (hr) Value: N/A
  misc_feature: MA Experiment 20000573 PARAMETER Experiment Name: At_100uM_ABA_Mutants__P Parameter: Tissue Value: Whole Plant
  misc_feature: MA Experiment 20000573 PARAMETER Experiment Name: At_100uM_ABA_Mutants__P Parameter: Treatment Value: None
  misc_feature: MA Experiment ID: 20000574 Result: Up-regulated in Transcription
  misc_feature: MA Experiment 20000574 PARAMETER Experiment Name: At_100uM_ABA_Mutants__P Parameter: Organism Value: A. thaliana
  misc_feature: MA Experiment 20000574 PARAMETER Experiment Name: At_100uM_ABA_Mutants__P Parameter: Plant Line Value: CS23 vs. Ler wt
  misc_feature: MA Experiment 20000574 PARAMETER Experiment Name: At_100uM_ABA_Mutants__P Parameter: Timepoint (hr) Value: N/A
  misc_feature: MA Experiment 20000574 PARAMETER Experiment Name: At_100uM_ABA_Mutants__P Parameter: Tissue Value: Whole Plant
  misc_feature: MA Experiment 20000574 PARAMETER Experiment Name: At_100uM_ABA_Mutants__P Parameter: Treatment Value: None
  misc_feature: MA Experiment ID: 20000606 Result: Up-regulated in Transcription
  misc_feature: MA Experiment 20000606 PARAMETER Experiment Name: At_CS8548_Mutant_P Parameter: Age (day) Value: 14
  misc_feature: MA Experiment 20000606 PARAMETER Experiment Name: At_CS8548_Mutant_P Parameter: Plant Line Value: CS8548 vs. wt
  misc_feature: MA Experiment 20000606 PARAMETER Experiment Name: At_CS8548_Mutant_P Parameter: Tissue Value: Whole Plant
  misc_feature: MA Experiment ID: 20000709 Result: Up-regulated in Transcription
  misc_feature: MA Experiment 20000709 PARAMETER Experiment Name: At_15mM_NH4NO3_L-to-H_P Parameter: Age (hr) Value: 14
  misc_feature: MA Experiment 20000709 PARAMETER Experiment Name: At_15mM_NH4NO3_L-to-H_P Parameter: Organism Value: A. thaliana
  misc_feature: MA Experiment 20000709 PARAMETER Experiment Name: At_15mM_NH4NO3_L-to-H_P Parameter: Plant Line Value: WS
  misc_feature: MA Experiment 20000709 PARAMETER Experiment Name: At_15mM_NH4NO3_L-to-H_P Parameter: Timepoint (hr) Value: 4
  misc_feature: MA Experiment 20000709 PARAMETER Experiment Name: At_15mM_NH4NO3_L-to-H_P Parameter: Tissue Value: Aerial
  misc_feature: MA Experiment 20000709 PARAMETER Experiment Name: At_15mM_NH4NO3_L-to-H_P Parameter: Treatment Value: 15mM NH4NO3 vs. 30mM Mannitol
  misc_feature: MA Experiment ID: 20000794 Result: Down-regulated in Transcription
  misc_feature: MA Experiment 20000794 PARAMETER Experiment Name: At_Petals_P Parameter: Age (day) Value: 23-25 days
  misc_feature: MA Experiment 20000794 PARAMETER Experiment Name: At_Petals_P Parameter: Plant Line Value: WS
  misc_feature: MA Experiment 20000794 PARAMETER Experiment Name: At_Petals_P Parameter: Tissue Value: Petals vs. Whole plant
  misc_feature: MA Experiment ID: 20001557 Result: Up-regulated in Transcription
  misc_feature: MA Experiment 20001557 PARAMETER Experiment Name: At_Drought_Soil_Dry_P Parameter: Age (day) Value: 27
  misc_feature: MA Experiment 20001557 PARAMETER Experiment Name: At_Drought_Soil_Dry_P Parameter: Organism Value: A. thaliana
  misc_feature: MA Experiment 20001557 PARAMETER Experiment Name: At_Drought_Soil_Dry_P Parameter: Plant Line Value: WS
  misc_feature: MA Experiment 20001557 PARAMETER Experiment Name: At_Drought_Soil_Dry_P Parameter: Post Timepoint (hr) Value: 3
  misc_feature: MA Experiment 20001557 PARAMETER Experiment Name: At_Drought_Soil_Dry_P Parameter: Post-Treatment Value: Re-Water vs. No Drought
  misc_feature: MA Experiment 20001557 PARAMETER Experiment Name: At_Drought_Soil_Dry_P Parameter: Timepoint (day) Value: 13
  misc_feature: MA Experiment 20001557 PARAMETER Experiment Name: At_Drought_Soil_Dry_P Parameter: Treatment Value: Drought vs. No Drought
  misc_feature: MA Experiment ID: 20001904 Result: Down-regulated in Transcription
  misc_feature: MA Experiment 20001904 PARAMETER Experiment Name: At_Drought_Reproduction_P Parameter: Age (day) Value: 37
  misc_feature: MA Experiment 20001904 PARAMETER Experiment Name: At_Drought_Reproduction_P Parameter: Organism Value: A. thaliana
  misc_feature: MA Experiment 20001904 PARAMETER Experiment Name: At_Drought_Reproduction_P Parameter: Plant Line Value: WS
  misc_feature: MA Experiment 20001904 PARAMETER Experiment Name: At_Drought_Reproduction_P Parameter: Timepoint (day) Value: 7
  misc_feature: MA Experiment 20001904 PARAMETER Experiment Name: At_Drought_Reproduction_P Parameter: Tissue Value: Rosettes
  misc_feature: MA Experiment 20001904 PARAMETER Experiment Name: At_Drought_Reproduction_P Parameter: Treatment Value: Drought vs. No Drought
aaaccaaggaaagaaaacgagagaggtacgtagaagaaaatggctgccttatcagagaaagaggctgaagcttatctcgacgcaaggcctagatatccgatcgattggtttaagaaaattgccgcacggacacaggaccacaaatttgcttgggatgttggaactggtaatggtcaggctgctattgggcttgtggagcattacgagaatgtagtggctaccgatataaacgaagcacaacttcaacgagcaatcaaacactcaagaatcagttaccatcacactccaacaacgatatcagaagatgagatggtggatctactcgggggagaaaactccgtggatctcatagttgctgctcaagctgtccatttcttcgacctcaacgtattttacaatgttgcaaaacgtgttcttcgtaaagaaggaggcctaatcgccgtttgggtatacaacgatatcattatctcgcatgagatcgatcccataatgaagcgccttgtcgactctactctaccttttagaactcctattatgaatttagcatttgacggttacaagacattgacatttccttttgagaccatagggatgggttccgaaggaaagcctattactctagacattccgcataaactttcgcttaaagggtttatagggttcttgagatcgtggcagcccgcgatgaaggctaaggaaaaaggagtagagcttataaatgaagatctaataaccaaatttgaggaggcttggggtgatgaaacccaagtgaaagatgttttctacaaggctcacatgattgttggaaaaattccggaagaaaaattcgaatctgatcaagtactgtctaacaaaggtcgtctcttgcttgaaacggaggttgggagaaaccagaaaagaccacaaccatccgatgaaggagacagacaaagtaagaaacaaaatacaagtgaagatgacgcatgcaaagataaaccatcgtcagtttttagtactcattacaggttttaaccaaaaatagatattaaaccatttgagaaagcaataactcttatttggatatcagttcattattccgtattaaagccgttggtttttgtacaactgagtaataaagttcatgttgagtatgtcaattattggatttgggagttccaaagaaaattttg

SEQ ID NO: 106266 - protein, 323 aa, Arabidopsis thaliana; identical to SEQ ID NO: 27465
  peptide (1)..(323): Ceres Seq. ID no. 13619100
  misc_feature (1)..(323): Homolog of NCBI NO: 15232436 NR Description: embryonic abundant protein -related [Arabidopsis
  misc_feature (1)..(323): Homolog of NCBI NO: 21594033 NR Description: embryonic abundant protein-like [Arabidopsis
  misc_feature (1)..(264): Homolog of NCBI NO: 18405387 NR Description: expressed protein [Arabidopsis thaliana]
  misc_feature (1)..(258): Homolog of NCBI NO: 15233061 NR Description: expressed protein [Arabidopsis thaliana]
  misc_feature (1)..(258): Homolog of NCBI NO: 15238280 NR Description: embryonic abundant protein -related [Arabidopsis
  misc_feature (1)..(259): Homolog of NCBI NO: 15235684 NR Description: expressed protein [Arabidopsis thaliana]
  misc_feature (26)..(259): Homolog of NCBI NO: 20258825 NR Description: unknown protein [Arabidopsis thaliana]
  misc_feature (1)..(161): Homolog of NCBI NO: 34912212 NR Description: P0415C01.8 [Oryza sativa (japonica
  misc_feature (171)..(258): Homolog of NCBI NO: 34912212 NR Description: P0415C01.8 [Oryza sativa (japonica
  misc_feature (1)..(257): Homolog of NCBI NO: 34910604 NR Description: putative embryonic abundant protein-like [Oryza

SEQ ID NO: 106267 - protein, 233 aa, Arabidopsis thaliana; identical to SEQ ID NO: 27466
  peptide (1)..(233): Ceres Seq. ID no. 13619101
  misc_feature (1)..(233): Homolog of NCBI NO: 15232436 NR Description: embryonic abundant protein -related [Arabidopsis
  misc_feature (1)..(233): Homolog of NCBI NO: 21594033 NR Description: embryonic abundant protein-like [Arabidopsis
  misc_feature (1)..(174): Homolog of NCBI NO: 18405387 NR Description: expressed protein [Arabidopsis thaliana]
  misc_feature (1)..(168): Homolog of NCBI NO: 15233061 NR Description: expressed protein [Arabidopsis thaliana]
  misc_feature (1)..(168): Homolog of NCBI NO: 15238280 NR Description: embryonic abundant protein -related [Arabidopsis
  misc_feature (1)..(169): Homolog of NCBI NO: 15235684 NR Description: expressed protein [Arabidopsis thaliana]
  misc_feature (1)..(169): Homolog of NCBI NO: 20258825 NR Description: unknown protein [Arabidopsis thaliana]
  misc_feature (1)..(71): Homolog of NCBI NO: 34912212 NR Description: P0415C01.8 [Oryza sativa (japonica
  misc_feature (81)..(168): Homolog of NCBI NO: 34912212 NR Description: P0415C01.8 [Oryza sativa (japonica
  misc_feature (1)..(167): Homolog of NCBI NO: 34910604 NR Description: putative embryonic abundant protein-like [Oryza

SEQ ID NO: 106268 - protein, 173 aa, Arabidopsis thaliana; identical to SEQ ID NO: 27467
  peptide (1)..(173): Ceres Seq. ID no. 13619102
  misc_feature (1)..(173): Homolog of NCBI NO: 15232436 NR Description: embryonic abundant protein -related [Arabidopsis
  misc_feature (1)..(173): Homolog of NCBI NO: 21594033 NR Description: embryonic abundant protein-like [Arabidopsis
  misc_feature (1)..(114): Homolog of NCBI NO: 18405387 NR Description: expressed protein [Arabidopsis thaliana]
  misc_feature (1)..(108): Homolog of NCBI NO: 15233061 NR Description: expressed protein [Arabidopsis thaliana]
  misc_feature (1)..(108): Homolog of NCBI NO: 15238280 NR Description: embryonic abundant protein -related [Arabidopsis
  misc_feature (1)..(109): Homolog of NCBI NO: 15235684 NR Description: expressed protein [Arabidopsis thaliana]
  misc_feature (1)..(109): Homolog of NCBI NO: 20258825 NR Description: unknown protein [Arabidopsis thaliana]
  misc_feature (1)..(11): Homolog of NCBI NO: 34912212 NR Description: P0415C01.8 [Oryza sativa (japonica
  misc_feature (21)..(108): Homolog of NCBI NO: 34912212 NR Description: P0415C01.8 [Oryza sativa (japonica
  misc_feature (1)..(107): Homolog of NCBI NO: 34910604 NR Description: putative embryonic abundant protein-like [Oryza

SEQ ID NO: 106269 - DNA, 1204 bp, Arabidopsis thaliana
  misc_feature (1)..(1204): Ceres Seq. ID no. 13619103
  misc_feature: MA Experiment ID: 108434 Result: Up-regulated in Transcription
  misc_feature: MA Experiment 108434 PARAMETER Experiment Name: At_Root_Tips_cDNA_P Parameter: Tissue Value: Root Tips
  misc_feature: MA Experiment ID: 108461 Result: Up-regulated in Transcription
  misc_feature: MA Experiment 108461 PARAMETER Experiment Name: At_Germinating_Seeds_cDNA_P Parameter: Age (day) Value: 1 vs. 0
  misc_feature: MA Experiment 108461 PARAMETER Experiment Name: At_Germinating_Seeds_cDNA_P Parameter: Tissue Value: Germinating Seeds
  misc_feature: MA Experiment ID: 108462 Result: Up-regulated in Transcription
  misc_feature: MA Experiment 108462 PARAMETER Experiment Name: At_Germinating_Seeds_cDNA_P Parameter: Age (day) Value: 2 vs. 0
  misc_feature: MA Experiment 108462 PARAMETER Experiment Name: At_Germinating_Seeds_cDNA_P Parameter: Tissue Value: Germinating Seeds
  misc_feature: MA Experiment ID: 20000030 Result: Up-regulated in Transcription
  misc_feature: MA Experiment 20000030 PARAMETER Experiment Name: At_CS6630_Roots_cDNA_P Parameter: Plant Line Value: CS6630 vs. WS
  misc_feature: MA Experiment 20000030 PARAMETER Experiment Name: At_CS6630_Roots_cDNA_P Parameter: Tissue Value: Roots
  misc_feature: MA Experiment ID: 20000171 Result: Down-regulated in Transcription
  misc_feature: MA Experiment 20000171 PARAMETER Experiment Name: At_42deg_Heat_P Parameter: Age (day) Value: 14
  misc_feature: MA Experiment 20000171 PARAMETER Experiment Name: At_42deg_Heat_P Parameter: Organism Value: A. thaliana
  misc_feature: MA Experiment 20000171 PARAMETER Experiment Name: At_42deg_Heat_P Parameter: Plant Line Value: WS
  misc_feature: MA Experiment 20000171 PARAMETER Experiment Name: At_42deg_Heat_P Parameter: Temperature (deg C) Value: 42 vs. 22
  misc_feature: MA Experiment 20000171 PARAMETER Experiment Name: At_42deg_Heat_P Parameter: Timepoint (hr) Value: 1
  misc_feature: MA Experiment 20000171 PARAMETER Experiment Name: At_42deg_Heat_P Parameter: Tissue Value: Aerial
  misc_feature: MA Experiment ID: 20000227 Result: Up-regulated in Transcription
  misc_feature: MA Experiment 20000227 PARAMETER Experiment Name: At_Root-Tips-vs-Tops_P Parameter: Tissue Value: Root Tips vs. Root Tops
  misc_feature: MA Experiment ID: 20000234 Result: Up-regulated in Transcription
  misc_feature: MA Experiment 20000234 PARAMETER Experiment Name: At_Siliques_P Parameter: Age (day) Value: 21
  misc_feature: MA Experiment 20000234 PARAMETER Experiment Name: At_Siliques_P Parameter: Organism Value: A. thaliana
  misc_feature: MA Experiment 20000234 PARAMETER Experiment Name: At_Siliques_P Parameter: Plant Line Value: WS
  misc_feature: MA Experiment 20000234 PARAMETER Experiment Name: At_Siliques_P Parameter: Tissue Value: Less Than 5mm Siliques vs. Whole Plant
  misc_feature: MA Experiment ID: 20000264 Result: Up-regulated in Transcription
  misc_feature: MA Experiment 20000264 PARAMETER Experiment Name: At_Open_Flower_P Parameter: Age (day) Value: 21
  misc_feature: MA Experiment 20000264 PARAMETER Experiment Name: At_Open_Flower_P Parameter: Plant Line Value: WS
  misc_feature: MA Experiment 20000264 PARAMETER Experiment Name: At_Open_Flower_P Parameter: Tissue Value: Open Flower vs. Whole Plant
  misc_feature: MA Experiment ID: 20000265 Result: Up-regulated in Transcription
  misc_feature: MA Experiment 20000265 PARAMETER Experiment Name: At_Open_Flower_P Parameter: Age (day) Value: 21
  misc_feature: MA Experiment 20000265 PARAMETER Experiment Name: At_Open_Flower_P Parameter: Plant Line Value: WS
  misc_feature: MA Experiment 20000265 PARAMETER Experiment Name: At_Open_Flower_P Parameter: Tissue Value: Closed Flower vs. Whole Plant
  misc_feature: MA Experiment ID: 20000286 Result: Up-regulated in Transcription
  misc_feature: MA Experiment 20000286 PARAMETER Experiment Name: At_Open_Flower_P Parameter: Age (day) Value: 21
  misc_feature: MA Experiment 20000286 PARAMETER Experiment Name: At_Open_Flower_P Parameter: Plant Line Value: WS
  misc_feature: MA Experiment 20000286 PARAMETER Experiment Name: At_Open_Flower_P Parameter: Tissue Value: Half Open vs. Whole Plant
  misc_feature: MA Experiment ID: 20000438 Result: Up-regulated in Transcription
  misc_feature: MA Experiment 20000438 PARAMETER Experiment Name: At_Shoots__P Parameter: Age (day) Value: 14
  misc_feature: MA Experiment 20000438 PARAMETER Experiment Name: At_Shoots__P Parameter: Tissue Value: Shoots vs. Whole Plant
  misc_feature: MA Experiment ID: 20000794 Result: Down-regulated in Transcription
  misc_feature: MA Experiment 20000794 PARAMETER Experiment Name: At_Petals_P Parameter: Age (day) Value: 23-25 days
  misc_feature: MA Experiment 20000794 PARAMETER Experiment Name: At_Petals_P Parameter: Plant Line Value: WS
  misc_feature: MA Experiment 20000794 PARAMETER Experiment Name: At_Petals_P Parameter: Tissue Value: Petals vs. Whole plant
  misc_feature: MA Experiment ID: 20001451 Result: Down-regulated in Transcription
  misc_feature: MA Experiment 20001451 PARAMETER Experiment Name: At_Far-red-induction_P Parameter: Age (day) Value: 7
  misc_feature: MA Experiment 20001451 PARAMETER Experiment Name: At_Far-red-induction_P Parameter: Light Value: Far-red vs. White
  misc_feature: MA Experiment 20001451 PARAMETER Experiment Name: At_Far-red-induction_P Parameter: Organism Value: A. thaliana
  misc_feature: MA Experiment 20001451 PARAMETER Experiment Name: At_Far-red-induction_P Parameter: Plant Line Value: Columbia
  misc_feature: MA Experiment 20001451 PARAMETER Experiment Name: At_Far-red-induction_P Parameter: Timepoint (hr) Value: 24
  misc_feature: MA Experiment 20001451 PARAMETER Experiment Name: At_Far-red-induction_P Parameter: Tissue Value: Whole Plant
catcatcttcattaatctgatcaaataatagggttaatcaaaagtccagaaaccaacacagttcaattttacgaaacctctcagaaatggagaagtacgagaagctagagaaggtcggagaaggaacatacgggaaagtctacaaagcgatggagaaaggaactggtaagcttgttgctctgaagaaaactcgtctcgagatggacgaagaaggtattccaccaactgctcttcgtgagatctcgcttctccagatgttatcaacatcgatctatgttgttcgattactctgcgtcgaacatgttcatcaaccatcaaccaaatctcaatctaccaaatccaatctctatctcgttttcgagtatctcgatactgatcttaagaaattcatcgattcgtataggaaaggacctaatcctaagcctcttgagccttttttgattcagaagttgatgtttcagctttgtaaaggtgttgcgcattgtcatagtcatggtgtgcttcaccgtgatcttaaaccgcagaatcttcttctggtgaaagataaagagcttcttaagattgctgatttgggtcttggtcgtgcttttactgttcctcttaagtcttatacgcatgagattgttactctttggtatagagctcctgaagttcttcttggatctactcattattcaactggtgttgacatgtggtctgttggttgtatctttgctgagatggttcggaggcaagctcttttccctggtgattctgagtttcagcaattgcttcatatcttcaggttgctaggaacaccaactgagcagcaatggccgggtgtttccacactgcgtgactggcatgtttaccctaagtgggagccgcaagacttaactcttgctgttccttctctttcacctcaaggagttgatcttctcacgaaaatgctcaagtacaatccagccgaaagaatttcagcaaaaacagcacttgatcacccatattttgacagccttgacaagtctcagttctgaagttcattgctgtatctgttgtcatcgtcttggtgaatttaaacatttgatctatctttgtttccgacacattagtgtcttatgtttggtttagagatttgtagtctttcagaagaaactggtaaagcttgtattctcaagtgaatgtaaaacacaatggtgtggtagcaatgagatgattttctatc

SEQ ID NO: 106270 - protein, 309 aa, Arabidopsis thaliana
  peptide (1)..(309): Ceres Seq. ID no. 13619104
  misc_feature (4)..(301): Pfam Name: Protein kinase domain Pfam Description: Protein kinase domain
  misc_feature (1)..(309): Homolog of NCBI NO: 15232441 NR Description: cell division control protein 2 homolog B (CDC2B) thaliana] >gi|1168811|sp|P25859|CC2B_ARATH Cell division control
  misc_feature (1)..(309): Homolog of NCBI NO: 15224912 NR Description: cell divsion control protein, putative thaliana] >gi|25287592|pir||C84807 probable cell division control
  misc_feature (1)..(309): Homolog of NCBI NO: 9885799 NR Description: cyclin-dependent kinase B1-1 [Nicotiana tabacum]
  misc_feature (1)..(309): Homolog of NCBI NO: 9885801 NR Description: cyclin-dependent kinase B1-2 [Nicotiana tabacum]
  misc_feature (1)..(309): Homolog of NCBI NO: 7434326 NR Description: probable cdc2-like protein kinase cdc2MsD -
  misc_feature (1)..(309): Homolog of NCBI NO: 11125683 NR Description: B1-type cyclin dependent kinase [Lycopersicon
  misc_feature (2)..(309): Homolog of NCBI NO: 25989353 NR Description: cyclin-dependent kinase [Helianthus tuberosus]
  misc_feature (1)..(309): Homolog of NCBI NO: 5921446 NR Description: CELL DIVISION CONTROL PROTEIN 2 HOMOLOG C
  misc_feature (1)..(309): Homolog of NCBI NO: 34907628 NR Description: putative cyclin-dependent kinase B1-1 [Oryza
  misc_feature (1)..(309): Homolog of NCBI NO: 27542763 NR Description: cyclin-dependent kinase-like protein [Sorghum
MEKYEKLEKVGEGTYGKVYKAMEKGTGKLVALKKTRLEMDEEGIPPTALREISLLQMLSTSIYVVRLLCVEHVHQPSTKSQSTKSNLYLVFEYLDTDLKKFIDSYRKGPNPKPLEPFLIQKLMFQLCKGVAHCHSHGVLHRDLKPQNLLLVKDKELLKIADLGLGRAFTVPLKSYTHEIVTLWYRAPEVLLGSTHYSTGVDMWSVGCIFAEMVRRQALFPGDSEFQQLLHIFRLLGTPTEQQWPGVSTLRDWHVYPKWEPQDLTLAVPSLSPQGVDLLTKMLKYNPAERISAKTALDHPYFDSLDKSQF

SEQ ID NO: 106271 - protein, 288 aa, Arabidopsis thaliana
  peptide (1)..(288): Ceres Seq. ID no. 13619105
  misc_feature (1)..(280): Pfam Name: Protein kinase domain Pfam Description: Protein kinase domain
  misc_feature (1)..(288): Homolog of NCBI NO: 15232441 NR Description: cell division control protein 2 homolog B (CDC2B) thaliana] >gi|1168811|sp|P25859|CC2B_ARATH Cell division control
  misc_feature (1)..(288): Homolog of NCBI NO: 15224912 NR Description: cell divsion control protein, putative thaliana] >gi|25287592|pir||C84807 probable cell division control
  misc_feature (1)..(288): Homolog of NCBI NO: 9885799 NR Description: cyclin-dependent kinase B1-1 [Nicotiana tabacum]
  misc_feature (1)..(288): Homolog of NCBI NO: 9885801 NR Description: cyclin-dependent kinase B1-2 [Nicotiana tabacum]
  misc_feature (1)..(288): Homolog of NCBI NO: 7434326 NR Description: probable cdc2-like protein kinase cdc2MsD -
  misc_feature (1)..(288): Homolog of NCBI NO: 11125683 NR Description: B1-type cyclin dependent kinase [Lycopersicon
  misc_feature (1)..(288): Homolog of NCBI NO: 25989353 NR Description: cyclin-dependent kinase [Helianthus tuberosus]
  misc_feature (1)..(288): Homolog of NCBI NO: 5921446 NR Description: CELL DIVISION CONTROL PROTEIN 2 HOMOLOG C
  misc_feature (1)..(288): Homolog of NCBI NO: 34907628 NR Description: putative cyclin-dependent kinase B1-1 [Oryza
  misc_feature (1)..(288): Homolog of NCBI NO: 27542763 NR Description: cyclin-dependent kinase-like protein [Sorghum
MEKGTGKLVALKKTRLEMDEEGIPPTALREISLLQMLSTSIYVVRLLCVEHVHQPSTKSQSTKSNLYLVFEYLDTDLKKFIDSYRKGPNPKPLEPFLIQKLMFQLCKGVAHCHSHGVLHRDLKPQNLLLVKDKELLKIADLGLGRAFTVPLKSYTHEIVTLWYRAPEVLLGSTHYSTGVDMWSVGCIFAEMVRRQALFPGDSEFQQLLHIFRLLGTPTEQQWPGVSTLRDWHVYPKWEPQDLTLAVPSLSPQGVDLLTKMLKYNPAERISAKTALDHPYFDSLDKSQF

SEQ ID NO: 106272 - protein, 271 aa, Arabidopsis thaliana
  peptide (1)..(271): Ceres Seq. ID no. 13619106
  misc_feature (1)..(263): Pfam Name: Protein kinase domain Pfam Description: Protein kinase domain
  misc_feature (1)..(271): Homolog of NCBI NO: 15232441 NR Description: cell division control protein 2 homolog B (CDC2B) thaliana] >gi|1168811|sp|P25859|CC2B_ARATH Cell division control
  misc_feature (1)..(271): Homolog of NCBI NO: 15224912 NR Description: cell divsion control protein, putative thaliana] >gi|25287592|pir||C84807 probable cell division control
  misc_feature (1)..(271): Homolog of NCBI NO: 9885799 NR Description: cyclin-dependent kinase B1-1 [Nicotiana tabacum]
  misc_feature (1)..(271): Homolog of NCBI NO: 9885801 NR Description: cyclin-dependent kinase B1-2 [Nicotiana tabacum]
  misc_feature (1)..(271): Homolog of NCBI NO: 7434326 NR Description: probable cdc2-like protein kinase cdc2MsD -
  misc_feature (1)..(271): Homolog of NCBI NO: 11125683 NR Description: B1-type cyclin dependent kinase [Lycopersicon
  misc_feature (1)..(271): Homolog of NCBI NO: 25989353 NR Description: cyclin-dependent kinase [Helianthus tuberosus]
  misc_feature (1)..(271): Homolog of NCBI NO: 5921446 NR Description: CELL DIVISION CONTROL PROTEIN 2 HOMOLOG C
  misc_feature (1)..(271): Homolog of NCBI NO: 34907628 NR Description: putative cyclin-dependent kinase B1-1 [Oryza
  misc_feature (1)..(271): Homolog of NCBI NO: 27542763 NR Description: cyclin-dependent kinase-like protein [Sorghum
MDEEGIPPTALREISLLQMLSTSIYVVRLLCVEHVHQPSTKSQSTKSNLYLVFEYLDTDLKKFIDSYRKGPNPKPLEPFLIQKLMFQLCKGVAHCHSHGVLHRDLKPQNLLLVKDKELLKIADLGLGRAFTVPLKSYTHEIVTLWYRAPEVLLGSTHYSTGVDMWSVGCIFAEMVRRQALFPGDSEFQQLLHIFRLLGTPTEQQWPGVSTLRDWHVYPKWEPQDLTLAVPSLSPQGVDLLTKMLKYNPAERISAKTALDHPYFDSLDKSQF

SEQ ID NO: 106273 - DNA, 789 bp, Arabidopsis thaliana
  misc_feature (1)..(789): Ceres Seq. ID no. 13619111
  misc_feature: MA Experiment ID: 20000307 Result: Up-regulated in Transcription
  misc_feature: MA Experiment 20000307 PARAMETER Experiment Name: At_Germinating_Seeds_Sub_P Parameter: Age (hr) Value: 24 vs. 0
  misc_feature: MA Experiment 20000307 PARAMETER Experiment Name: At_Germinating_Seeds_Sub_P Parameter: Organism Value: A. thaliana
  misc_feature: MA Experiment 20000307 PARAMETER Experiment Name: At_Germinating_Seeds_Sub_P Parameter: Plant Line Value: WS
  misc_feature: MA Experiment 20000307 PARAMETER Experiment Name: At_Germinating_Seeds_Sub_P Parameter: Tissue Value: Germinating Seeds
  misc_feature: MA Experiment ID: 20000355 Result: Down-regulated in Transcription
  misc_feature: MA Experiment 20000355 PARAMETER Experiment Name: At_Siliques_Sub_P Parameter: Age (day) Value: 21
  misc_feature: MA Experiment 20000355 PARAMETER Experiment Name: At_Siliques_Sub_P Parameter: Organism Value: A. thaliana
  misc_feature: MA Experiment 20000355 PARAMETER Experiment Name: At_Siliques_Sub_P Parameter: Plant Line Value: WS
  misc_feature: MA Experiment 20000355 PARAMETER Experiment Name: At_Siliques_Sub_P Parameter: Tissue Value: Less Than 5mm Siliques vs. Whole Plant
ctctttcttcttctctgcgtctttgaggcaagaaaaaaagagaagatgaaagcacccaacatggagacgataacggagtctctagagaaatcgatgatgaattgttctctgaatgatcggagaagaagggtcgtcggagatgggtttgggagatcgtcgagcaacgaacacatgactccgatctcagatagaacattggagctcaattctcacttatctcttccttgtcactgggaacagtgtcttgatcttaagacaggagagatttactacataaactggaaaaacggaatgagagtgaaagaggatccaaggaaagtgatgaatgcagatcctgacagtggagactcatatggaaccgtgtgttcagaagaagatagctcatattacgacagcgaagagtcttcatcagagtcatctccatcatcaagagagaatcataaagaagaagaagaagaagaagaagaggaggaagaagaagaagaagatgtgctagtggttgctggttgcaaagcttgtttcatgtacttcatggttcctaagcttgttgaggactgtcctaaatgtgcagcacagcttcttcactttgatcgacctcattctgcatcttcttgaaacccttgtctttgtttggattttccctttattcagatgagaatttgtttaggtttccactttaatcttatattgttgttataatttagtggtttctcatgtgagtggcattaacacgagtttcaaaggcaatgtatcagacagtaaaatgttaaaatgagtctgaaaatttcc

SEQ ID NO: 106274 - protein, 204 aa, Arabidopsis thaliana
  peptide (1)..(204): Ceres Seq. ID no. 13619112
  misc_feature (112)..(167): Pfam Name: Myc amino-terminal region Pfam Description: Myc amino-terminal region
  misc_feature (16)..(204): Homolog of NCBI NO: 30685734 NR Description: expressed protein [Arabidopsis thaliana]
  misc_feature (16)..(204): Homolog of NCBI NO: 28393658 NR Description: unknown protein [Arabidopsis thaliana]
  misc_feature (21)..(204): Homolog of NCBI NO: 25408280 NR Description: hypothetical protein At2g33510 [imported] - thaliana >gi|2459433|gb|AAB80668.1| hypothetical protein
  misc_feature (21)..(203): Homolog of NCBI NO: 15217816 NR Description: hypothetical protein [Arabidopsis thaliana]
  misc_feature (59)..(203): Homolog of NCBI NO: 33113263 NR Description: Humj1 [Humulus japonicus]
LFLLLCVFEARKKEKMKAPNMETITESLEKSMMNCSLNDRRRRVVGDGFGRSSSNEHMTPISDRTLELNSHLSLPCHWEQCLDLKTGEIYYINWKNGMRVKEDPRKVMNADPDSGDSYGTVCSEEDSSYYDSEESSSESSPSSRENHKEEEEEEEEEEEEEEDVLVVAGCKACFMYFMVPKLVEDCPKCAAQLLHFDRPHSASS

SEQ ID NO: 106275 - protein, 189 aa, Arabidopsis thaliana
  peptide (1)..(189): Ceres Seq. ID no. 13619113
  misc_feature (97)..(152): Pfam Name: Myc amino-terminal region Pfam Description: Myc amino-terminal region
  misc_feature (1)..(189): Homolog of NCBI NO: 30685734 NR Description: expressed protein [Arabidopsis thaliana]
  misc_feature (1)..(189): Homolog of NCBI NO: 28393658 NR Description: unknown protein [Arabidopsis thaliana]
  misc_feature (6)..(189): Homolog of NCBI NO: 25408280 NR Description: hypothetical protein At2g33510 [imported] - thaliana >gi|2459433|gb|AAB80668.1| hypothetical protein
  misc_feature (6)..(188): Homolog of NCBI NO: 15217816 NR Description: hypothetical protein [Arabidopsis thaliana]
  misc_feature (44)..(188): Homolog of NCBI NO: 33113263 NR Description: Humj1 [Humulus japonicus]
MKAPNMETITESLEKSMMNCSLNDRRRRVVGDGFGRSSSNEHMTPISDRTLELNSHLSLPCHWEQCLDLKTGEIYYINWKNGMRVKEDPRKVMNADPDSGDSYGTVCSEEDSSYYDSEESSSESSPSSRENHKEEEEEEEEEEEEEEDVLVVAGCKACFMYFMVPKLVEDCPKCAAQLLHFDRPHSASS

SEQ ID NO: 106276 - protein, 184 aa, Arabidopsis thaliana
  peptide (1)..(184): Ceres Seq. ID no. 13619114
  misc_feature (92)..(147): Pfam Name: Myc amino-terminal region Pfam Description: Myc amino-terminal region
  misc_feature (1)..(184): Homolog of NCBI NO: 30685734 NR Description: expressed protein [Arabidopsis thaliana]
  misc_feature (1)..(184): Homolog of NCBI NO: 28393658 NR Description: unknown protein [Arabidopsis thaliana]
  misc_feature (1)..(184): Homolog of NCBI NO: 25408280 NR Description: hypothetical protein At2g33510 [imported] - thaliana >gi|2459433|gb|AAB80668.1| hypothetical protein
  misc_feature (1)..(183): Homolog of NCBI NO: 15217816 NR Description: hypothetical protein [Arabidopsis thaliana]
  misc_feature (39)..(183): Homolog of NCBI NO: 33113263 NR Description: Humj1 [Humulus japonicus]
METITESLEKSMMNCSLNDRRRRVVGDGFGRSSSNEHMTPISDRTLELNSHLSLPCHWEQCLDLKTGEIYYINWKNGMRVKEDPRKVMNADPDSGDSYGTVCSEEDSSYYDSEESSSESSPSSRENHKEEEEEEEEEEEEEEDVLVVAGCKACFMYFMVPKLVEDCPKCAAQLLHFDRPHSASS

SEQ ID NO: 106277 - DNA, 1179 bp, Arabidopsis thaliana
  misc_feature (1)..(1179): Ceres Seq. ID no. 13619119
  misc_feature: MA Experiment ID: 20000180 Result: Up-regulated in Transcription
  misc_feature: MA Experiment 20000180 PARAMETER Experiment Name: At_Germinating_Seeds_P Parameter: Age (hr) Value: 24 vs. 0
  misc_feature: MA Experiment 20000180 PARAMETER Experiment Name: At_Germinating_Seeds_P Parameter: Tissue Value: Germinating Seeds
agtgtcgcttggcctaaaagctcacaatgtctctcgttctctctctttgcttggtcttcctttgttctcttgttcatggttctcatagcttaccagcacaacggactcctcatcttgatgggcttctcccaaatgggaactttgagcaaattcctaacaaatcaaacatgagaaagaggcaaataattggcaaatactctcttccacattgggaaatctccggccacgtagagctagtctctggcggtccacagcccggtggtttttacttcgcagtgccacgtggagtccacgcagctaggctagggaacttagcatcaatatctcagtatgtgaaagtgaaaagcggcttggtctattctctaacgtttggtgtcacgaggacttgtgctcaagacgagaacatcagaatctctgtgcctggtcagaccaatgagctaccaatccaaacattgttcagtaccaacggtggtgatacgtacgcatgggcttttaaggcaacgtctgacttggttaaggtcactttttataatcctggtgttcaagaagaccctacttgtggcccaatcgttgacgctgttgccattaaggagattcttcctctccggtataccaaagggaaccttgtgaaaaacggcggatttgagaccggtccacacgtattcagcaacttctctaccggaattttaattccggcgaagatacaagacctaatctcaccgcttccgggatggatcgtcgaatctctaaaaccggttaagtacatcgataaccgccacttcaaggttccctcaggtctcgcagcaatcgagcttgttgccggaagagaaagcgcaatcgctcagatcatccgtaccgtctccggtaaaaactacattctctcgtttgttgtgggagacgcacacaatggttgtcacggatcgatgatggtggaggcgtttgcgggaatatcggcgtttaaggttacattcgaatctaatgataaaggagcgttcaaagtggggcgtttcgcgtttcgtgccgattcgaatcgcacaaggataactttctatagtgggttttatcataccaagcttcatgattttggacatctttgtgggcctgtgcttgataatgttagtgtttttttggcccattaaattattacaaaagtaaaataaatattgttcgatttcaatt

SEQ ID NO: 106278 - protein, 370 aa, Arabidopsis thaliana
  peptide (1)..(370): Ceres Seq. ID no. 13619120
  misc_feature (48)..(370): Pfam Name: Protein of unknown function, DUF642 Pfam Description: Protein of unknown function, DUF642
  misc_feature (1)..(370): Homolog of NCBI NO: 15227439 NR Description: expressed protein [Arabidopsis thaliana]
  misc_feature (1)..(369): Homolog of NCBI NO: 15227437 NR Description: expressed protein [Arabidopsis thaliana]
  misc_feature (28)..(366): Homolog of NCBI NO: 18398135 NR Description: expressed protein [Arabidopsis thaliana] unknown protein [Arabidopsis thaliana] unknown protein [Arabidopsis thaliana]
  misc_feature (48)..(366): Homolog of NCBI NO: 12321555 NR Description: unknown protein, 5' partial [Arabidopsis thaliana]
  misc_feature (23)..(366): Homolog of NCBI NO: 30102997 NR Description: unknown protein [Oryza sativa (japonica
  misc_feature (31)..(366): Homolog of NCBI NO: 7488898 NR Description: hypothetical protein - castor bean
  misc_feature (31)..(369): Homolog of NCBI NO: 15239049 NR Description: expressed protein [Arabidopsis thaliana]
  misc_feature (31)..(369): Homolog of NCBI NO: 21554402 NR Description: unknown [Arabidopsis thaliana]
  misc_feature (4)..(366): Homolog of NCBI NO: 15239438 NR Description: expressed protein [Arabidopsis thaliana] Unknown protein [Arabidopsis thaliana]
  misc_feature (31)..(369): Homolog of NCBI NO: 23397043 NR Description: unknown protein [Arabidopsis thaliana]
MSLVLSLCLVFLCSLVHGSHSLPAQRTPHLDGLLPNGNFEQIPNKSNMRKRQIIGKYSLPHWEISGHVELVSGGPQPGGFYFAVPRGVHAARLGNLASISQYVKVKSGLVYSLTFGVTRTCAQDENIRISVPGQTNELPIQTLFSTNGGDTYAWAFKATSDLVKVTFYNPGVQEDPTCGPIVDAVAIKEILPLRYTKGNLVKNGGFETGPHVFSNFSTGILIPAKIQDLISPLPGWIVESLKPVKYIDNRHFKVPSGLAAIELVAGRESAIAQIIRTVSGKNYILSFVVGDAHNGCHGSMMVEAFAGISAFKVTFESNDKGAFKVGRFAFRADSNRTRITFYSGFYHTKLHDFGHLCGPVLDNVSVFLAH

SEQ ID NO: 106279 - protein, 323 aa, Arabidopsis thaliana
  peptide (1)..(323): Ceres Seq. ID no. 13619121
  misc_feature (1)..(323): Pfam Name: Protein of unknown function, DUF642 Pfam Description: Protein of unknown function, DUF642
  misc_feature (1)..(323): Homolog of NCBI NO: 15227439 NR Description: expressed protein [Arabidopsis thaliana]
  misc_feature (1)..(322): Homolog of NCBI NO: 15227437 NR Description: expressed protein [Arabidopsis thaliana]
  misc_feature (1)..(319): Homolog of NCBI NO: 18398135 NR Description: expressed protein [Arabidopsis thaliana] unknown protein [Arabidopsis thaliana] unknown protein [Arabidopsis thaliana]
  misc_feature (1)..(319): Homolog of NCBI NO: 12321555 NR Description: unknown protein, 5' partial [Arabidopsis thaliana]
  misc_feature (1)..(319): Homolog of NCBI NO: 30102997 NR Description: unknown protein [Oryza sativa (japonica
  misc_feature (1)..(319): Homolog of NCBI NO: 7488898 NR Description: hypothetical protein - castor bean
  misc_feature (1)..(322): Homolog of NCBI NO: 15239049 NR Description: expressed protein [Arabidopsis thaliana]
  misc_feature (1)..(322): Homolog of NCBI NO: 21554402 NR Description: unknown [Arabidopsis thaliana]
  misc_feature (1)..(319): Homolog of NCBI NO: 15239438 NR Description: expressed protein [Arabidopsis thaliana] Unknown protein [Arabidopsis thaliana]
  misc_feature (1)..(322): Homolog of NCBI NO: 23397043 NR Description: unknown protein [Arabidopsis thaliana]
MRKRQIIGKYSLPHWEISGHVELVSGGPQPGGFYFAVPRGVHAARLGNLASISQYVKVKSGLVYSLTFGVTRTCAQDENIRISVPGQTNELPIQTLFSTNGGDTYAWAFKATSDLVKVTFYNPGVQEDPTCGPIVDAVAIKEILPLRYTKGNLVKNGGFETGPHVFSNFSTGILIPAKIQDLISPLPGWIVESLKPVKYIDNRHFKVPSGLAAIELVAGRESAIAQIIRTVSGKNYILSFVVGDAHNGCHGSMMVEAFAGISAFKVTFESNDKGAFKVGRFAFRADSNRTRITFYSGFYHTKLHDFGHLCGPVLDNVSVFLAH

SEQ ID NO: 106280 - DNA, 1674 bp, Arabidopsis thaliana
  misc_feature (1)..(1674): Ceres Seq. ID no. 13619133
  misc_feature: MA Experiment ID: 20000173 Result: Down-regulated in Transcription
  misc_feature: MA Experiment 20000173 PARAMETER Experiment Name: At_42deg_Heat_P Parameter: Age (day) Value: 14
  misc_feature: MA Experiment 20000173 PARAMETER Experiment Name: At_42deg_Heat_P Parameter: Organism Value: A. thaliana
  misc_feature: MA Experiment 20000173 PARAMETER Experiment Name: At_42deg_Heat_P Parameter: Plant Line Value: WS
  misc_feature: MA Experiment 20000173 PARAMETER Experiment Name: At_42deg_Heat_P Parameter: Temperature (deg C) Value: 42 vs. 22
  misc_feature: MA Experiment 20000173 PARAMETER Experiment Name: At_42deg_Heat_P Parameter: Timepoint (hr) Value: 6
  misc_feature: MA Experiment 20000173 PARAMETER Experiment Name: At_42deg_Heat_P Parameter: Tissue Value: Aerial
  misc_feature: MA Experiment ID: 20000185 Result: Down-regulated in Transcription
  misc_feature: MA Experiment 20000185 PARAMETER Experiment Name: At_Roots__P Parameter: Age (day) Value: 7 vs. 21
  misc_feature: MA Experiment 20000185 PARAMETER Experiment Name: At_Roots__P Parameter: Organism Value: A. thaliana
  misc_feature: MA Experiment 20000185 PARAMETER Experiment Name: At_Roots__P Parameter: Tissue Value: Roots vs. Whole Plant
  misc_feature: MA Experiment ID: 20000234 Result: Up-regulated in Transcription
  misc_feature: MA Experiment 20000234 PARAMETER Experiment Name: At_Siliques_P Parameter: Age (day) Value: 21
  misc_feature: MA Experiment 20000234 PARAMETER Experiment Name: At_Siliques_P Parameter: Organism Value: A. thaliana
  misc_feature: MA Experiment 20000234 PARAMETER Experiment Name: At_Siliques_P Parameter: Plant Line Value: WS
  misc_feature: MA Experiment 20000234 PARAMETER Experiment Name: At_Siliques_P Parameter: Tissue Value: Less Than 5mm Siliques vs. Whole Plant
  misc_feature: MA Experiment ID: 20000264 Result: Up-regulated in Transcription
  misc_feature: MA Experiment 20000264 PARAMETER Experiment Name: At_Open_Flower_P Parameter: Age (day) Value: 21
  misc_feature: MA Experiment 20000264 PARAMETER Experiment Name: At_Open_Flower_P Parameter: Plant Line Value: WS
  misc_feature: MA Experiment 20000264 PARAMETER Experiment Name: At_Open_Flower_P Parameter: Tissue Value: Open Flower vs. Whole Plant
  misc_feature: MA Experiment ID: 20000265 Result: Up-regulated in Transcription
  misc_feature: MA Experiment 20000265 PARAMETER Experiment Name: At_Open_Flower_P Parameter: Age (day) Value: 21
  misc_feature: MA Experiment 20000265 PARAMETER Experiment Name: At_Open_Flower_P Parameter: Plant Line Value: WS
  misc_feature: MA Experiment 20000265 PARAMETER Experiment Name: At_Open_Flower_P Parameter: Tissue Value: Closed Flower vs. Whole Plant
  misc_feature: MA Experiment ID: 20000286 Result: Up-regulated in Transcription
  misc_feature: MA Experiment 20000286 PARAMETER Experiment Name: At_Open_Flower_P Parameter: Age (day) Value: 21
  misc_feature: MA Experiment 20000286 PARAMETER Experiment Name: At_Open_Flower_P Parameter: Plant Line Value: WS
  misc_feature: MA Experiment 20000286 PARAMETER Experiment Name: At_Open_Flower_P Parameter: Tissue Value: Half Open vs. Whole Plant
  misc_feature: MA Experiment ID: 20000439 Result: Down-regulated in Transcription
  misc_feature: MA Experiment 20000439 PARAMETER Experiment Name: At_Roots__P Parameter: Age (day) Value: 14 vs. 21
  misc_feature: MA Experiment 20000439 PARAMETER Experiment Name: At_Roots__P Parameter: Organism Value: A. thaliana
  misc_feature: MA Experiment 20000439 PARAMETER Experiment Name: At_Roots__P Parameter: Tissue Value: Roots vs. Whole Plant
  misc_feature: MA Experiment ID: 20001247 Result: Down-regulated in Transcription
  misc_feature: MA Experiment 20001247 PARAMETER Experiment Name: At_Far-red-induction_P Parameter: Age (day) Value: 7
  misc_feature: MA Experiment 20001247 PARAMETER Experiment Name: At_Far-red-induction_P Parameter: Light Value: Far-red vs. White
  misc_feature: MA Experiment 20001247 PARAMETER Experiment Name: At_Far-red-induction_P Parameter: Organism Value: A. thaliana
  misc_feature: MA Experiment 20001247 PARAMETER Experiment Name: At_Far-red-induction_P Parameter: Plant Line Value: Columbia
  misc_feature: MA Experiment 20001247 PARAMETER Experiment Name: At_Far-red-induction_P Parameter: Timepoint (hr) Value: 1
  misc_feature: MA Experiment 20001247 PARAMETER Experiment Name: At_Far-red-induction_P Parameter: Tissue Value: Whole Plant
  misc_feature: MA Experiment ID: 20001248 Result: Down-regulated in Transcription
  misc_feature: MA Experiment 20001248 PARAMETER Experiment Name: At_Far-red-induction_P Parameter: Age (day) Value: 7
  misc_feature: MA Experiment 20001248 PARAMETER Experiment Name: At_Far-red-induction_P Parameter: Light Value: Far-red vs. White
  misc_feature: MA Experiment 20001248 PARAMETER Experiment Name: At_Far-red-induction_P Parameter: Organism Value: A. thaliana
  misc_feature: MA Experiment 20001248 PARAMETER Experiment Name: At_Far-red-induction_P Parameter: Plant Line Value: Columbia
  misc_feature: MA Experiment 20001248 PARAMETER Experiment Name: At_Far-red-induction_P Parameter: Timepoint (hr) Value: 4
  misc_feature: MA Experiment 20001248 PARAMETER Experiment Name: At_Far-red-induction_P Parameter: Tissue Value: Whole Plant
  misc_feature: MA Experiment ID: 20001905 Result: Down-regulated in Transcription
  misc_feature: MA Experiment 20001905 PARAMETER Experiment Name: At_Drought_Reproduction_P Parameter: Age (day) Value: 40
  misc_feature: MA Experiment 20001905 PARAMETER Experiment Name: At_Drought_Reproduction_P Parameter: Organism Value: A. thaliana
  misc_feature: MA Experiment 20001905 PARAMETER Experiment Name: At_Drought_Reproduction_P Parameter: Plant Line Value: WS
  misc_feature: MA Experiment 20001905 PARAMETER Experiment Name: At_Drought_Reproduction_P Parameter: Timepoint (day) Value: 10
  misc_feature: MA Experiment 20001905 PARAMETER Experiment Name: At_Drought_Reproduction_P Parameter: Tissue Value: Rosettes
  misc_feature: MA Experiment 20001905 PARAMETER Experiment Name: At_Drought_Reproduction_P Parameter: Treatment Value: Drought vs. No Drought
  misc_feature: MA Experiment ID: 20001906 Result: Down-regulated in Transcription
  misc_feature: MA Experiment 20001906 PARAMETER Experiment Name: At_Drought_Reproduction_P Parameter: Age (day) Value: 35
  misc_feature: MA Experiment 20001906 PARAMETER Experiment Name: At_Drought_Reproduction_P Parameter: Organism Value: A. thaliana
  misc_feature: MA Experiment 20001906 PARAMETER Experiment Name: At_Drought_Reproduction_P Parameter: Plant Line Value: WS
  misc_feature: MA Experiment 20001906 PARAMETER Experiment Name: At_Drought_Reproduction_P Parameter: Timepoint (day) Value: 5
  misc_feature: MA Experiment 20001906 PARAMETER Experiment Name: At_Drought_Reproduction_P Parameter: Tissue Value: Siliques
  misc_feature: MA Experiment 20001906 PARAMETER Experiment Name: At_Drought_Reproduction_P Parameter: Treatment Value: Drought vs. No Drought
aaagacctctccaatgttcacttgctccagtttctccaagattagaaactgctacgtctctctctatagctccctcgttttgctatgtggtaattaacaacagacaacagtttttgtttgtccgtaccgttttacttactctctcactgtctttgtctattaccactctcgtctctttcttttttccttctgttctgtttctctctctaaacccaaaacagtcaaaatcagggaagccgaaattttctttgctttcttctcctttggtcctttctttaaacccgagacagttaggtttgtgtgagagagagaatgatgagtaaaaccctttctgtctgagtaagaggaaaccaacatggagatgggttccaactcgggtccgggtcatggtccgggtcaggcagagtcgggtggttcctccactgagtcatcctctttcagtggagggctcatgtttggccagaagatctacttcgaggacggtggtggtggatccgggtcttcttcctcaggtggtcgttcaaacagacgtgtccgtggaggcgggtcgggtcagtcgggtcagataccaaggtgccaagtggaaggttgtgggatggatctaaccaatgcaaaaggttattactcgagacaccgagtttgtggagtgcactctaaaacacctaaagtcactgtggctggtatcgaacagaggttttgtcaacagtgcagcaggtttcatcagcttccggaatttgacctagagaaaaggagttgccgcaggagactcgctggtcataatgagcgacgaaggaagccacagcctgcgtctctctctgtgttagcttctcgttacgggaggatcgcaccttcgctttacgaaaatggtgatgctggaatgaatggaagctttcttgggaaccaagagataggatggccaagttcaagaacattggatacaagagtgatgaggcggccagtgtcgtcaccgtcatggcagatcaatccaatgaatgtatttagtcaaggttcagttggtggaggagggacaagcttctcatctccagagattatggacactaaactagagagctacaagggaattggcgactcaaactgtgctctctctcttctgtcaaatccacatcaaccacatgacaacaacaacaacaacaacaacaacaacaacaacaacaacaatacatggcgagcttcttcaggttttggcccgatgacggttacaatggctcaaccaccacctgcacctagccagcatcagtatctgaacccgccttgggtattcaaggacaatgataatgatatgtctcctgttttgaatttaggtcgatacaccgagccagataattgtcagataagtagtggcacggcaatgggtgagttcgagttatctgatcaccatcatcaaagtaggagacagtacatggaagatgagaacacaagggcttatgactcttcttctcaccataccaactggtctctctgacttgtctttgcatcagagaatcttcttacaatgaacgattctgcaatatcttatctttttgcttctttgtttattctgttatctgctatcaataaaccagacaattgttgccagataatggcttttgattttgatttgttgttttatctccatgaaaatccaagttatgagatcagattgatttctttagc

SEQ ID NO: 106281 - protein, 375 aa, Arabidopsis thaliana
  peptide (1)..(375): Ceres Seq. ID no. 13619134
  misc_feature (73)..(151): Pfam Name: SBP domain Pfam Description: SBP domain
  misc_feature (1)..(375): Homolog of NCBI NO: 15227896 NR Description: squamosa-promoter binding protein -related
  misc_feature (1)..(375): Homolog of NCBI NO: 15028115 NR Description: putative squamosa-promoter binding protein
  misc_feature (1)..(375): Homolog of NCBI NO: 30688933 NR Description: squamosa-promoter binding protein -related
  misc_feature (1)..(375): Homolog of NCBI NO: 25352586 NR Description: squamosa promoter binding protein homolog 9 - Arabidopsis thaliana >gi|5931675|emb|CAB56591.1| squamosa
  misc_feature (14)..(375): Homolog of NCBI NO: 15230904 NR Description: squamosa promoter-binding protein homolog
  misc_feature (25)..(273): Homolog of NCBI NO: 25352584 NR Description: squamosa promoter binding protein-homolog 4 - garden snapdragon (fragment) >gi|5931641|emb|CAB56569.1|
  misc_feature (45)..(375): Homolog of NCBI NO: 25352582 NR Description: squamosa promoter binding protein-homolog 5 - garden snapdragon (fragment) >gi|5931643|emb|CAB56570.1|
  misc_feature (16)..(307): Homolog of NCBI NO: 28411864 NR Description: putative SBP-domain protein 5 [Oryza sativa
  misc_feature (73)..(312): Homolog of NCBI NO: 5931786 NR Description: SBP-domain protein 5 [Zea mays]
  misc_feature (13)..(255): Homolog of NCBI NO: 25456646 NR Description: squamosa promoter binding protein 2 [imported] -
MEMGSNSGPGHGPGQAESGGSSTESSSFSGGLMFGQKIYFEDGGGGSGSSSSGGRSNRRVRGGGSGQSGQIPRCQVEGCGMDLTNAKGYYSRHRVCGVHSKTPKVTVAGIEQRFCQQCSRFHQLPEFDLEKRSCRRRLAGHNERRRKPQPASLSVLASRYGRIAPSLYENGDAGMNGSFLGNQEIGWPSSRTLDTRVMRRPVSSPSWQINPMNVFSQGSVGGGGTSFSSPEIMDTKLESYKGIGDSNCALSLLSNPHQPHDNNNNNNNNNNNNNNTWRASSGFGPMTVTMAQPPPAPSQHQYLNPPWVFKDNDNDMSPVLNLGRYTEPDNCQISSGTAMGEFELSDHHHQSRRQYMEDENTRAYDSSSHHTNWSL

SEQ ID NO: 106282 - protein, 373 aa, Arabidopsis thaliana
  peptide (1)..(373): Ceres Seq. ID no. 13619135
  misc_feature (71)..(149): Pfam Name: SBP domain Pfam Description: SBP domain
  misc_feature (1)..(373): Homolog of NCBI NO: 15227896 NR Description: squamosa-promoter binding protein -related
  misc_feature (1)..(373): Homolog of NCBI NO: 15028115 NR Description: putative squamosa-promoter binding protein
  misc_feature (1)..(373): Homolog of NCBI NO: 30688933 NR Description: squamosa-promoter binding protein -related
  misc_feature (1)..(373): Homolog of NCBI NO: 25352586 NR Description: squamosa promoter binding protein homolog 9 - Arabidopsis thaliana >gi|5931675|emb|CAB56591.1| squamosa
  misc_feature (12)..(373): Homolog of NCBI NO: 15230904 NR Description: squamosa promoter-binding protein homolog
  misc_feature (23)..(271): Homolog of NCBI NO: 25352584 NR Description: squamosa promoter binding protein-homolog 4 - garden snapdragon (fragment) >gi|5931641|emb|CAB56569.1|
  misc_feature (43)..(373): Homolog of NCBI NO: 25352582 NR Description: squamosa promoter binding protein-homolog 5 - garden snapdragon (fragment) >gi|5931643|emb|CAB56570.1|
  misc_feature (14)..(305): Homolog of NCBI NO: 28411864 NR Description: putative SBP-domain protein 5 [Oryza sativa
  misc_feature (71)..(310): Homolog of NCBI NO: 5931786 NR Description: SBP-domain protein 5 [Zea mays]
  misc_feature (11)..(253): Homolog of NCBI NO: 25456646 NR Description: squamosa promoter binding protein 2 [imported] -
MGSNSGPGHGPGQAESGGSSTESSSFSGGLMFGQKIYFEDGGGGSGSSSSGGRSNRRVRGGGSGQSGQIPRCQVEGCGMDLTNAKGYYSRHRVCGVHSKTPKVTVAGIEQRFCQQCSRFHQLPEFDLEKRSCRRRLAGHNERRRKPQPASLSVLASRYGRIAPSLYENGDAGMNGSFLGNQEIGWPSSRTLDTRVMRRPVSSPSWQINPMNVFSQGSVGGGGTSFSSPEIMDTKLESYKGIGDSNCALSLLSNPHQPHDNNNNNNNNNNNNNNTWRASSGFGPMTVTMAQPPPAPSQHQYLNPPWVFKDNDNDMSPVLNLGRYTEPDNCQISSGTAMGEFELSDHHHQSRRQYMEDENTRAYDSSSHHTNWSL

SEQ ID NO: 106283 - protein, 343 aa, Arabidopsis thaliana
  peptide (1)..(343): Ceres Seq. ID no. 13619136
  misc_feature (41)..(119): Pfam Name: SBP domain Pfam Description: SBP domain
  misc_feature (1)..(343): Homolog of NCBI NO: 15227896 NR Description: squamosa-promoter binding protein -related
  misc_feature (1)..(343): Homolog of NCBI NO: 15028115 NR Description: putative squamosa-promoter binding protein
  misc_feature (1)..(343): Homolog of NCBI NO: 30688933 NR Description: squamosa-promoter binding protein -related
  misc_feature (1)..(343): Homolog of NCBI NO: 25352586 NR Description: squamosa promoter binding protein homolog 9 - Arabidopsis thaliana >gi|5931675|emb|CAB56591.1| squamosa
  misc_feature (1)..(343): Homolog of NCBI NO: 15230904 NR Description: squamosa promoter-binding protein homolog
  misc_feature (1)..(241): Homolog of NCBI NO: 25352584 NR Description: squamosa promoter binding protein-homolog 4 - garden snapdragon (fragment) >gi|5931641|emb|CAB56569.1|
  misc_feature (13)..(343): Homolog of NCBI NO: 25352582 NR Description: squamosa promoter binding protein-homolog 5 - garden snapdragon (fragment) >gi|5931643|emb|CAB56570.1|
  misc_feature (1)..(275): Homolog of NCBI NO: 28411864 NR Description: putative SBP-domain protein 5 [Oryza sativa
  misc_feature (41)..(280): Homolog of NCBI NO: 5931786 NR Description: SBP-domain protein 5 [Zea mays]
  misc_feature (1)..(223): Homolog of NCBI NO: 25456646 NR Description: squamosa promoter binding protein 2 [imported] -
MFGQKIYFEDGGGGSGSSSSGGRSNRRVRGGGSGQSGQIPRCQVEGCGMDLTNAKGYYSRHRVCGVHSKTPKVTVAGIEQRFCQQCSRFHQLPEFDLEKRSCRRRLAGHNERRRKPQPASLSVLASRYGRIAPSLYENGDAGMNGSFLGNQEIGWPSSRTLDTRVMRRPVSSPSWQINPMNVFSQGSVGGGGTSFSSPEIMDTKLESYKGIGDSNCALSLLSNPHQPHDNNNNNNNNNNNNNNTWRASSGFGPMTVTMAQPPPAPSQHQYLNPPWVFKDNDNDMSPVLNLGRYTEPDNCQISSGTAMGEFELSDHHHQSRRQYMEDENTRAYDSSSHHTNWSL

SEQ ID NO: 106284 - DNA, 944 bp, Arabidopsis thaliana
  misc_feature (1)..(944): Ceres Seq. ID no. 13619141
  misc_feature: MA Experiment ID: 20000185 Result: Down-regulated in Transcription
  misc_feature: MA Experiment 20000185 PARAMETER Experiment Name: At_Roots__P Parameter: Age (day) Value: 7 vs. 21
  misc_feature: MA Experiment 20000185 PARAMETER Experiment Name: At_Roots__P Parameter: Organism Value: A. thaliana
  misc_feature: MA Experiment 20000185 PARAMETER Experiment Name: At_Roots__P Parameter: Tissue Value: Roots vs. Whole Plant
  misc_feature: MA Experiment ID: 20000234 Result: Down-regulated in Transcription
  misc_feature: MA Experiment 20000234 PARAMETER Experiment Name: At_Siliques_P Parameter: Age (day) Value: 21
  misc_feature: MA Experiment 20000234 PARAMETER Experiment Name: At_Siliques_P Parameter: Organism Value: A. thaliana
  misc_feature: MA Experiment 20000234 PARAMETER Experiment Name: At_Siliques_P Parameter: Plant Line Value: WS
  misc_feature: MA Experiment 20000234 PARAMETER Experiment Name: At_Siliques_P Parameter: Tissue Value: Less Than 5mm Siliques vs. Whole Plant
  misc_feature: MA Experiment ID: 20000265 Result: Down-regulated in Transcription
  misc_feature: MA Experiment 20000265 PARAMETER Experiment Name: At_Open_Flower_P Parameter: Age (day) Value: 21
  misc_feature: MA Experiment 20000265 PARAMETER Experiment Name: At_Open_Flower_P Parameter: Plant Line Value: WS
  misc_feature: MA Experiment 20000265 PARAMETER Experiment Name: At_Open_Flower_P Parameter: Tissue Value: Closed Flower vs. Whole Plant
  misc_feature: MA Experiment ID: 20000436 Result: Down-regulated in Transcription
  misc_feature: MA Experiment 20000436 PARAMETER Experiment Name: At_Drought_P Parameter: Age (day) Value: 7
  misc_feature: MA Experiment 20000436 PARAMETER Experiment Name: At_Drought_P Parameter: Organism Value: A. thaliana
  misc_feature: MA Experiment 20000436 PARAMETER Experiment Name: At_Drought_P Parameter: Plant Line Value: WS
  misc_feature: MA Experiment 20000436 PARAMETER Experiment Name: At_Drought_P Parameter: Timepoint (hr) Value: 12
  misc_feature: MA Experiment 20000436 PARAMETER Experiment Name: At_Drought_P Parameter: Tissue Value: Whole Plant
  misc_feature: MA Experiment 20000436 PARAMETER Experiment Name: At_Drought_P Parameter: Treatment Value: Drought vs. No Drought
  misc_feature: MA Experiment ID: 20000437 Result: Down-regulated in Transcription
  misc_feature: MA Experiment 20000437 PARAMETER Experiment Name: At_Drought_P Parameter: Age (day) Value: 8
  misc_feature: MA Experiment 20000437 PARAMETER Experiment Name: At_Drought_P Parameter: Organism Value: A. thaliana
  misc_feature: MA Experiment 20000437 PARAMETER Experiment Name: At_Drought_P Parameter: Plant Line Value: WS
  misc_feature: MA Experiment 20000437 PARAMETER Experiment Name: At_Drought_P Parameter: Timepoint (hr) Value: 24
  misc_feature: MA Experiment 20000437 PARAMETER Experiment Name: At_Drought_P Parameter: Tissue Value: Whole Plant
  misc_feature: MA Experiment 20000437 PARAMETER Experiment Name: At_Drought_P Parameter: Treatment Value: Drought vs. No Drought
  misc_feature: MA Experiment ID: 20000439 Result: Down-regulated in Transcription
  misc_feature: MA Experiment 20000439 PARAMETER Experiment Name: At_Roots__P Parameter: Age (day) Value: 14 vs. 21
  misc_feature: MA Experiment 20000439 PARAMETER Experiment Name: At_Roots__P Parameter: Organism Value: A. thaliana
  misc_feature: MA Experiment 20000439 PARAMETER Experiment Name: At_Roots__P Parameter: Tissue Value: Roots vs. Whole Plant
aattcttcagatccataaaacaaattgatcccttaaccttcttcaccaacatctctcttacactcaacaagagatcatatcatgtcctctccaagagaaagaggaaagagtttgatggaatcatcaggatcagagccaccggtgacaccaagccgttacgagtcgcagaagagacgtgactggaacactttcggacagtacttgaagaatcagagaccgcctgtgccgatgtctcactgcagctgtaaccacgtgcttgatttcctcaggtacttagaccagttcggtaagacaaaggtgcacgtgcctggctgtatgttctacggccagcctgagccaccagctccttgcacgtgccctctcagacaagcttggggaagtcttgacgctttgatcggacggctgagagcggcttacgaggagaacggtggacctccggagactaaccctttcgctagcggagcgataagggtttatctgagggaggttagggagtgtcaggctaaggctagagggattccttacaagaagaagaagaagaagaagccaacgccggagatgggaggtgggagagaggactcttcttcctcctcctcttccttcagcttctcttaagagattctccatcgtcgtgaaagactttgtgaacttggcaggatcagtaagtctcaaagagggatcaaatgtaaaagagacctcaaatctatctactggtatcttcaacatatctttcgggaccatttttgcagctcttcgtcccctcctcttcatttccgcagatctccgtcgtcataaatatcttcatctattctcttattaagctctattcatatttattctcttattaagcacttttcttttgaataaagtaagtgtaaagagtttatatattgaattcaggtgtgttttgtacttcttatgtggatcagcgtacttctatgtct

SEQ ID NO: 106285 - protein, 177 aa, Arabidopsis thaliana
  peptide (1)..(177): Ceres Seq. ID no. 13619142
  misc_feature (7)..(139): Pfam Name: Protein of unknown function (DUF640) Pfam Description: Protein of unknown function (DUF640)
  misc_feature (1)..(177): Homolog of NCBI NO: 18406012 NR Description: expressed protein [Arabidopsis thaliana]
  misc_feature (14)..(173): Homolog of NCBI NO: 34907938 NR Description: B1088C09.17 [Oryza sativa (japonica
  misc_feature (17)..(173): Homolog of NCBI NO: 18390725 NR Description: expressed protein [Arabidopsis thaliana]
  misc_feature (14)..(174): Homolog of NCBI NO: 18402578 NR Description: expressed protein [Arabidopsis thaliana]
  misc_feature (8)..(172): Homolog of NCBI NO: 37535384 NR Description: hypothetical protein [Oryza sativa (japonica group)] >gi|10140752|gb|AAG13584.1| hypothetical protein [Oryza >gi|31432676|gb|AAP54281.1| hypothetical protein [Oryza sativa
  misc_feature (1)..(175): Homolog of NCBI NO: 21592379 NR Description: unknown [Arabidopsis thaliana]
  misc_feature (14)..(168): Homolog of NCBI NO: 38344650 NR Description: OSJNBb0072M01.12 [Oryza sativa (japonica
  misc_feature (2)..(175): Homolog of NCBI NO: 18412120 NR Description: expressed protein [Arabidopsis thaliana]
  misc_feature (1)..(177): Homolog of NCBI NO: 15233942 NR Description: expressed protein [Arabidopsis thaliana]
  misc_feature (8)..(173): Homolog of NCBI NO: 15237680 NR Description: hypothetical protein [Arabidopsis thaliana] gb|AAC63835.1~gene_id:MQJ2.11~similar to unknown protein
MSSPRERGKSLMESSGSEPPVTPSRYESQKRRDWNTFGQYLKNQRPPVPMSHCSCNHVLDFLRYLDQFGKTKVHVPGCMFYGQPEPPAPCTCPLRQAWGSLDALIGRLRAAYEENGGPPETNPFASGAIRVYLREVRECQAKARGIPYKKKKKKKPTPEMGGGREDSSSSSSSFSFS

SEQ ID NO: 106286 - protein, 166 aa, Arabidopsis thaliana
  peptide (1)..(166): Ceres Seq. ID no. 13619143
  misc_feature (1)..(128): Pfam Name: Protein of unknown function (DUF640) Pfam Description: Protein of unknown function (DUF640)
  misc_feature (1)..(166): Homolog of NCBI NO: 18406012 NR Description: expressed protein [Arabidopsis thaliana]
  misc_feature (3)..(162): Homolog of NCBI NO: 34907938 NR Description: B1088C09.17 [Oryza sativa (japonica
  misc_feature (6)..(162): Homolog of NCBI NO: 18390725 NR Description: expressed protein [Arabidopsis thaliana]
  misc_feature (3)..(163): Homolog of NCBI NO: 18402578 NR Description: expressed protein [Arabidopsis thaliana]
  misc_feature (1)..(161): Homolog of NCBI NO: 37535384 NR Description: hypothetical protein [Oryza sativa (japonica group)] >gi|10140752|gb|AAG13584.1| hypothetical protein [Oryza >gi|31432676|gb|AAP54281.1| hypothetical protein [Oryza sativa
  misc_feature (1)..(164): Homolog of NCBI NO: 21592379 NR Description: unknown [Arabidopsis thaliana]
  misc_feature (3)..(157): Homolog of NCBI NO: 38344650 NR Description: OSJNBb0072M01.12 [Oryza sativa (japonica
  misc_feature (1)..(164): Homolog of NCBI NO: 18412120 NR Description: expressed protein [Arabidopsis thaliana]
  misc_feature (1)..(166): Homolog of NCBI NO: 15233942 NR Description: expressed protein [Arabidopsis thaliana]
  misc_feature (1)..(162): Homolog of NCBI NO: 15237680 NR Description: hypothetical protein [Arabidopsis thaliana] gb|AAC63835.1~gene_id:MQJ2.11~similar to unknown protein
MESSGSEPPVTPSRYESQKRRDWNTFGQYLKNQRPPVPMSHCSCNHVLDFLRYLDQFGKTKVHVPGCMFYGQPEPPAPCTCPLRQAWGSLDALIGRLRAAYEENGGPPETNPFASGAIRVYLREVRECQAKARGIPYKKKKKKKPTPEMGGGREDSSSSSSSFSFS

SEQ ID NO: 106287 - protein, 128 aa, Arabidopsis thaliana
  peptide (1)..(128): Ceres Seq. ID no. 13619144
  misc_feature (1)..(90): Pfam Name: Protein of unknown function (DUF640) Pfam Description: Protein of unknown function (DUF640)
  misc_feature (1)..(128): Homolog of NCBI NO: 18406012 NR Description: expressed protein [Arabidopsis thaliana]
  misc_feature (1)..(124): Homolog of NCBI NO: 34907938 NR Description: B1088C09.17 [Oryza sativa (japonica
  misc_feature (1)..(124): Homolog of NCBI NO: 18390725 NR Description: expressed protein [Arabidopsis thaliana]
  misc_feature (1)..(125): Homolog of NCBI NO: 18402578 NR Description: expressed protein [Arabidopsis thaliana]
  misc_feature (1)..(123): Homolog of NCBI NO: 37535384 NR Description: hypothetical protein [Oryza sativa (japonica group)] >gi|10140752|gb|AAG13584.1| hypothetical protein [Oryza >gi|31432676|gb|AAP54281.1| hypothetical protein [Oryza sativa
  misc_feature (1)..(126): Homolog of NCBI NO: 21592379 NR Description: unknown [Arabidopsis thaliana]
  misc_feature (1)..(119): Homolog of NCBI NO: 38344650 NR Description: OSJNBb0072M01.12 [Oryza sativa (japonica
  misc_feature (1)..(126): Homolog of NCBI NO: 18412120 NR Description: expressed protein [Arabidopsis thaliana]
  misc_feature (1)..(128): Homolog of NCBI NO: 15233942 NR Description: expressed protein [Arabidopsis thaliana]
  misc_feature (1)..(124): Homolog of NCBI NO: 15237680 NR Description: hypothetical protein [Arabidopsis thaliana] gb|AAC63835.1~gene_id:MQJ2.11~similar to unknown protein
MSHCSCNHVLDFLRYLDQFGKTKVHVPGCMFYGQPEPPAPCTCPLRQAWGSLDALIGRLRAAYEENGGPPETNPFASGAIRVYLREVRECQAKARGIPYKKKKKKKPTPEMGGGREDSSSSSSSFSFS

SEQ ID NO: 106288 - DNA, 966 bp, Arabidopsis thaliana
  misc_feature (1)..(966): Ceres Seq. ID no. 13619156
  misc_feature: MA Experiment ID: 20000307 Result: Down-regulated in Transcription
  misc_feature: MA Experiment 20000307 PARAMETER Experiment Name: At_Germinating_Seeds_Sub_P Parameter: Age (hr) Value: 24 vs. 0
  misc_feature: MA Experiment 20000307 PARAMETER Experiment Name: At_Germinating_Seeds_Sub_P Parameter: Organism Value: A. thaliana
  misc_feature: MA Experiment 20000307 PARAMETER Experiment Name: At_Germinating_Seeds_Sub_P Parameter: Plant Line Value: WS
  misc_feature: MA Experiment 20000307 PARAMETER Experiment Name: At_Germinating_Seeds_Sub_P Parameter: Tissue Value: Germinating Seeds
  misc_feature: MA Experiment ID: 20000314 Result: Up-regulated in Transcription
  misc_feature: MA Experiment 20000314 PARAMETER Experiment Name: At_14day_Shoots-Roots_Sub_P Parameter: Age (day) Value: 14
  misc_feature: MA Experiment 20000314 PARAMETER Experiment Name: At_14day_Shoots-Roots_Sub_P Parameter: Organism Value: A. thaliana
  misc_feature: MA Experiment 20000314 PARAMETER Experiment Name: At_14day_Shoots-Roots_Sub_P Parameter: Plant Line Value: WS
  misc_feature: MA Experiment 20000314 PARAMETER Experiment Name: At_14day_Shoots-Roots_Sub_P Parameter: Tissue Value: Roots vs. Whole Plant
  misc_feature: MA Experiment ID: 20000315 Result: Up-regulated in Transcription
  misc_feature: MA Experiment 20000315 PARAMETER Experiment Name: At_14day_Shoots-Roots_Sub_P Parameter: Age (day) Value: 14
  misc_feature: MA Experiment 20000315 PARAMETER Experiment Name: At_14day_Shoots-Roots_Sub_P Parameter: Organism Value: A. thaliana
  misc_feature: MA Experiment 20000315 PARAMETER Experiment Name: At_14day_Shoots-Roots_Sub_P Parameter: Plant Line Value: WS
  misc_feature: MA Experiment 20000315 PARAMETER Experiment Name: At_14day_Shoots-Roots_Sub_P Parameter: Tissue Value: Shoots vs. Whole Plant
aacaagaacccaaagatggctctcacaaaaatcttcttaatccttctcctatccctcttaggtttatattctgaaaccgtcaaatctcaaaactgcgattgcgcccctaacctatgttgcagtcagttcggttattgcggtaccactgcagattactgtggttctacgtgccaatcaggtccttgtagagtcggtggaccccctaccggtgccggtttggttggtaatatcgtgacacaaattttctttaacaacattatcaaccaagccggtaatggatgcgcgggaaaaagtttttacacccgggactctttcattaacgccaccaatactttccccagctttgctaataccgttactagacgtgaaattgctaccatgtttgctcatttcacttacgagacaggacacttctgctacatagaagagataaacggggcgtcacgtgtcatgtgcgaccagaacaacaggcaatatccatgtgcaccggccaagagctaccatggccgtggtccgctcctactatcatggaacttcaactatggagcatgcggccagagtctcggcttagacctcctacgccagcccgagctggtgagtagtaacccagtcgtggctttcaggacggctctgtggttttggatgaagagcgtgaggcctgtattgaaccagggatttggagccaccataagagccatcagcggtttcgactgtgacggtaggaacttaggtggggtgaacgcaaggattggctactatagagactattgtgggcagcttggtttggaccctggcgccaacataacttgctaaaacgctcttgggacatacatggcacgaaagtattaaaggtgaaataagaagtgttgttgtaattgtagtacttttttttttttttttttgataaaaagctagagtaatcttgtgaagtgaaatcacattattaaaagattaataaatcgactt

SEQ ID NO: 106289 - protein, 270 aa, Arabidopsis thaliana
  peptide (1)..(270): Ceres Seq. ID no. 13619157
  misc_feature (77)..(270): Pfam Name: Chitinase class I Pfam Description: Chitinase class I
  misc_feature (6)..(270): Homolog of NCBI NO: 15224310 NR Description: glycosyl hydrolase family 19 (chitinase)
  misc_feature (6)..(270): Homolog of NCBI NO: 15224312 NR Description: glycosyl hydrolase family 19 (chitinase)
  misc_feature (6)..(270): Homolog of NCBI NO: 584929 NR Description: Basic endochitinase CHB4 precursor
  misc_feature (11)..(270): Homolog of NCBI NO: 15232509 NR Description: glycosyl hydrolase family 19 (class IV chitinase)
  misc_feature (5)..(270): Homolog of NCBI NO: 38345417 NR Description: OSJNBb0091E11.8 [Oryza sativa (japonica
  misc_feature (10)..(270): Homolog of NCBI NO: 1403522 NR Description: chitinase [Phaseolus vulgaris]
  misc_feature (13)..(270): Homolog of NCBI NO: 15213852 NR Description: chitinase-B [Sorghum halepense]
  misc_feature (10)..(270): Homolog of NCBI NO: 116324 NR Description: ENDOCHITINASE PR4 PRECURSOR
  misc_feature (11)..(270): Homolog of NCBI NO: 2597826 NR Description: class IV chitinase [Arabidopsis thaliana]
  misc_feature (29)..(270): Homolog of NCBI NO: 15213848 NR Description: chitinase-B [Saccharum officinarum]
NKNPKMALTKIFLILLLSLLGLYSETVKSQNCDCAPNLCCSQFGYCGTTADYCGSTCQSGPCRVGGPPTGAGLVGNIVTQIFFNNIINQAGNGCAGKSFYTRDSFINATNTFPSFANTVTRREIATMFAHFTYETGHFCYIEEINGASRVMCDQNNRQYPCAPAKSYHGRGPLLLSWNFNYGACGQSLGLDLLRQPELVSSNPVVAFRTALWFWMKSVRPVLNQGFGATIRAISGFDCDGRNLGGVNARIGYYRDYCGQLGLDPGANITC

SEQ ID NO: 106290 - protein, 265 aa, Arabidopsis thaliana
  peptide (1)..(265): Ceres Seq. ID no. 13619158
  misc_feature (72)..(265): Pfam Name: Chitinase class I Pfam Description: Chitinase class I
  misc_feature (1)..(265): Homolog of NCBI NO: 15224310 NR Description: glycosyl hydrolase family 19 (chitinase)
  misc_feature (1)..(265): Homolog of NCBI NO: 15224312 NR Description: glycosyl hydrolase family 19 (chitinase)
  misc_feature (1)..(265): Homolog of NCBI NO: 584929 NR Description: Basic endochitinase CHB4 precursor
  misc_feature (6)..(265): Homolog of NCBI NO: 15232509 NR Description: glycosyl hydrolase family 19 (class IV chitinase)
  misc_feature (1)..(265): Homolog of NCBI NO: 38345417 NR Description: OSJNBb0091E11.8 [Oryza sativa (japonica
  misc_feature (5)..(265): Homolog of NCBI NO: 1403522 NR Description: chitinase [Phaseolus vulgaris]
  misc_feature (8)..(265): Homolog of NCBI NO: 15213852 NR Description: chitinase-B [Sorghum halepense]
  misc_feature (5)..(265): Homolog of NCBI NO: 116324 NR Description: ENDOCHITINASE PR4 PRECURSOR
  misc_feature (6)..(265): Homolog of NCBI NO: 2597826 NR Description: class IV chitinase [Arabidopsis thaliana]
  misc_feature (24)..(265): Homolog of NCBI NO: 15213848 NR Description: chitinase-B [Saccharum officinarum]
MALTKIFLILLLSLLGLYSETVKSQNCDCAPNLCCSQFGYCGTTADYCGSTCQSGPCRVGGPPTGAGLVGNIVTQIFFNNIINQAGNGCAGKSFYTRDSFINATNTFPSFANTVTRREIATMFAHFTYETGHFCYIEEINGASRVMCDQNNRQYPCAPAKSYHGRGPLLLSWNFNYGACGQSLGLDLLRQPELVSSNPVVAFRTALWFWMKSVRPVLNQGFGATIRAISGFDCDGRNLGGVNARIGYYRDYCGQLGLDPGANITC

SEQ ID NO: 106291 - protein, 144 aa, Arabidopsis thaliana
  peptide (1)..(144): Ceres Seq. ID no. 13619159
  misc_feature (1)..(144): Pfam Name: Chitinase class I Pfam Description: Chitinase class I
  misc_feature (1)..(144): Homolog of NCBI NO: 15224310 NR Description: glycosyl hydrolase family 19 (chitinase)
  misc_feature (1)..(144): Homolog of NCBI NO: 15224312 NR Description: glycosyl hydrolase family 19 (chitinase)
  misc_feature (1)..(144): Homolog of NCBI NO: 584929 NR Description: Basic endochitinase CHB4 precursor
  misc_feature (1)..(144): Homolog of NCBI NO: 15232509 NR Description: glycosyl hydrolase family 19 (class IV chitinase)
  misc_feature (1)..(144): Homolog of NCBI NO: 38345417 NR Description: OSJNBb0091E11.8 [Oryza sativa (japonica
  misc_feature (1)..(144): Homolog of NCBI NO: 1403522 NR Description: chitinase [Phaseolus vulgaris]
  misc_feature (1)..(144): Homolog of NCBI NO: 15213852 NR Description: chitinase-B [Sorghum halepense]
  misc_feature (1)..(144): Homolog of NCBI NO: 116324 NR Description: ENDOCHITINASE PR4 PRECURSOR
  misc_feature (1)..(144): Homolog of NCBI NO: 2597826 NR Description: class IV chitinase [Arabidopsis thaliana]
  misc_feature (1)..(144): Homolog of NCBI NO: 15213848 NR Description: chitinase-B [Saccharum officinarum]
MFAHFTYETGHFCYIEEINGASRVMCDQNNRQYPCAPAKSYHGRGPLLLSWNFNYGACGQSLGLDLLRQPELVSSNPVVAFRTALWFWMKSVRPVLNQGFGATIRAISGFDCDGRNLGGVNARIGYYRDYCGQLGLDPGANITC

SEQ ID NO: 106292 - DNA, 739 bp, Arabidopsis thaliana
  misc_feature (1)..(739): Ceres Seq. ID no. 13619172
  misc_feature: MA Experiment ID: 108462 Result: Down-regulated in Transcription
  misc_feature: MA Experiment 108462 PARAMETER Experiment Name: At_Germinating_Seeds_cDNA_P Parameter: Age (day) Value: 2 vs. 0
  misc_feature: MA Experiment 108462 PARAMETER Experiment Name: At_Germinating_Seeds_cDNA_P Parameter: Tissue Value: Germinating Seeds
  misc_feature: MA Experiment ID: 108463 Result: Down-regulated in Transcription
  misc_feature: MA Experiment 108463 PARAMETER Experiment Name: At_Germinating_Seeds_cDNA_P Parameter: Age (day) Value: 3 vs. 0
  misc_feature: MA Experiment 108463 PARAMETER Experiment Name: At_Germinating_Seeds_cDNA_P Parameter: Tissue Value: Germinating Seeds
  misc_feature: MA Experiment ID: 108464 Result: Down-regulated in Transcription
  misc_feature: MA Experiment 108464 PARAMETER Experiment Name: At_Germinating_Seeds_cDNA_P Parameter: Age (day) Value: 4 vs. 0
  misc_feature: MA Experiment 108464 PARAMETER Experiment Name: At_Germinating_Seeds_cDNA_P Parameter: Tissue Value: Germinating Seeds
  misc_feature: MA Experiment ID: 20000315 Result: Down-regulated in Transcription
  misc_feature: MA Experiment 20000315 PARAMETER Experiment Name: At_14day_Shoots-Roots_Sub_P Parameter: Age (day) Value: 14
  misc_feature: MA Experiment 20000315 PARAMETER Experiment Name: At_14day_Shoots-Roots_Sub_P Parameter: Organism Value: A. thaliana
  misc_feature: MA Experiment 20000315 PARAMETER Experiment Name: At_14day_Shoots-Roots_Sub_P Parameter: Plant Line Value: WS
  misc_feature: MA Experiment 20000315 PARAMETER Experiment Name: At_14day_Shoots-Roots_Sub_P Parameter: Tissue Value: Shoots vs. Whole Plant
agagaatctgacgaagctcgaagggatttgagaaaaagaagagatgacgacgatacgtagattcagctgcaatgaccttctccgattcacttccgtgaatctggaccacctcactgaaacattcaatatgtccttctacatgacctatttagcgagatggcctgactattttcatgttgctgaaggtcccggcaatcgtgtcatgggttatattatgggtaaagttgaaggacagggtgaatcttggcatggtcatgtgacagccgtcactgtctctccagaataccgcaggcagcaacttgcaaagaaactgatgaaccttctggaagatataagtgataagattgataaagcctactttgtggatctttttgtaagagcttccaacacaccagccatcaagatgtatgaaaagcttggatacataatttataggcgggttttacgctattattcaggagaggaagatggattagatatgaggaaggcattatcaagagatgtagagaaaaagtctgtgattcctctcaagagacctatcacacctgatgaattagagtatgattaagaccctaacttggttcacaattgttatctgcattaaaaatttctccaagagcctttagatgatgttactattcctgttgtttcgtatttgaactattatgtttcgttttcttccacacaaatttataattagttttgattaaactttaatctatatatacatttttggagg

SEQ ID NO: 106293 - protein, 174 aa, Arabidopsis thaliana
  peptide (1)..(174): Ceres Seq. ID no. 13619173
  misc_feature (45)..(128): Pfam Name: Acetyltransferase (GNAT) family Pfam Description: Acetyltransferase (GNAT) family
  misc_feature (1)..(174): Homolog of NCBI NO: 18379062 NR Description: GCN5-related N-acetyltransferase (GNAT) family thaliana] >gi|21536510|gb|AAM60842.1| unknown [Arabidopsis
  misc_feature (1)..(174): Homolog of NCBI NO: 14423552 NR Description: Unknown protein [Arabidopsis thaliana]
  misc_feature (1)..(124): Homolog of NCBI NO: 25518612 NR Description: hypothetical protein F10O3.2 [imported] - thaliana >gi|4587562|gb|AAD25793.1|AC006550_1 Belongs to PF|00583
  misc_feature (116)..(174): Homolog of NCBI NO: 25518612 NR Description: hypothetical protein F10O3.2 [imported] - thaliana >gi|4587562|gb|AAD25793.1|AC006550_1 Belongs to PF|00583
  misc_feature (1)..(174): Homolog of NCBI NO: 14550118 NR Description: silencing group B protein [Zea mays]
  misc_feature (1)..(174): Homolog of NCBI NO: 28273362 NR Description: silencing group B protein [Oryza sativa (japonica
  misc_feature (1)..(172): Homolog of NCBI NO: 31241517 NR Description: ENSANGP00000020842 [Anopheles gambiae]
  misc_feature (1)..(172): Homolog of NCBI NO: 19920354 NR Description: CG14222-PA [Drosophila melanogaster]
  misc_feature (1)..(172): Homolog of NCBI NO: 7705823 NR Description: N-terminal acetyltransferase complex ard1subunit
  misc_feature (1)..(172): Homolog of NCBI NO: 28278699 NR Description: Unknown (protein for MGC:53877) [Xenopus laevis]
MTTIRRFSCNDLLRFTSVNLDHLTETFNMSFYMTYLARWPDYFHVAEGPGNRVMGYIMGKVEGQGESWHGHVTAVTVSPEYRRQQLAKKLMNLLEDISDKIDKAYFVDLFVRASNTPAIKMYEKLGYIIYRRVLRYYSGEEDGLDMRKALSRDVEKKSVIPLKRPITPDELEYD

SEQ ID NO: 106294 - protein, 146 aa, Arabidopsis thaliana
  peptide (1)..(146): Ceres Seq. ID no. 13619174
  misc_feature (17)..(100): Pfam Name: Acetyltransferase (GNAT) family Pfam Description: Acetyltransferase (GNAT) family
  misc_feature (1)..(146): Homolog of NCBI NO: 18379062 NR Description: GCN5-related N-acetyltransferase (GNAT) family thaliana] >gi|21536510|gb|AAM60842.1| unknown [Arabidopsis
  misc_feature (1)..(146): Homolog of NCBI NO: 14423552 NR Description: Unknown protein [Arabidopsis thaliana]
  misc_feature (1)..(96): Homolog of NCBI NO: 25518612 NR Description: hypothetical protein F10O3.2 [imported] - thaliana >gi|4587562|gb|AAD25793.1|AC006550_1 Belongs to PF|00583
  misc_feature (88)..(146): Homolog of NCBI NO: 25518612 NR Description: hypothetical protein F10O3.2 [imported] - thaliana >gi|4587562|gb|AAD25793.1|AC006550_1 Belongs to PF|00583
  misc_feature (1)..(146): Homolog of NCBI NO: 14550118 NR Description: silencing group B protein [Zea mays]
  misc_feature (1)..(146): Homolog of NCBI NO: 28273362 NR Description: silencing group B protein [Oryza sativa (japonica
  misc_feature (1)..(144): Homolog of NCBI NO: 31241517 NR Description: ENSANGP00000020842 [Anopheles gambiae]
  misc_feature (1)..(144): Homolog of NCBI NO: 19920354 NR Description: CG14222-PA [Drosophila melanogaster]
  misc_feature (1)..(144): Homolog of NCBI NO: 7705823 NR Description: N-terminal acetyltransferase complex ard1subunit
  misc_feature (1)..(144): Homolog of NCBI NO: 28278699 NR Description: Unknown (protein for MGC:53877) [Xenopus laevis]
MSFYMTYLARWPDYFHVAEGPGNRVMGYIMGKVEGQGESWHGHVTAVTVSPEYRRQQLAKKLMNLLEDISDKIDKAYFVDLFVRASNTPAIKMYEKLGYIIYRRVLRYYSGEEDGLDMRKALSRDVEKKSVIPLKRPITPDELEYD

SEQ ID NO: 106295 - protein, 142 aa, Arabidopsis thaliana
  peptide (1)..(142): Ceres Seq. ID no. 13619175
  misc_feature (13)..(96): Pfam Name: Acetyltransferase (GNAT) family Pfam Description: Acetyltransferase (GNAT) family
  misc_feature (1)..(142): Homolog of NCBI NO: 18379062 NR Description: GCN5-related N-acetyltransferase (GNAT) family thaliana] >gi|21536510|gb|AAM60842.1| unknown [Arabidopsis
  misc_feature (1)..(142): Homolog of NCBI NO: 14423552 NR Description: Unknown protein [Arabidopsis thaliana]
  misc_feature (1)..(92): Homolog of NCBI NO: 25518612 NR Description: hypothetical protein F10O3.2 [imported] - thaliana >gi|4587562|gb|AAD25793.1|AC006550_1 Belongs to PF|00583
  misc_feature (84)..(142): Homolog of NCBI NO: 25518612 NR Description: hypothetical protein F10O3.2 [imported] - thaliana >gi|4587562|gb|AAD25793.1|AC006550_1 Belongs to PF|00583
  misc_feature (1)..(142): Homolog of NCBI NO: 14550118 NR Description: silencing group B protein [Zea mays]
  misc_feature (1)..(142): Homolog of NCBI NO: 28273362 NR Description: silencing group B protein [Oryza sativa (japonica
  misc_feature (1)..(140): Homolog of NCBI NO: 31241517 NR Description: ENSANGP00000020842 [Anopheles gambiae]
  misc_feature (1)..(140): Homolog of NCBI NO: 19920354 NR Description: CG14222-PA [Drosophila melanogaster]
  misc_feature (1)..(140): Homolog of NCBI NO: 7705823 NR Description: N-terminal acetyltransferase complex ard1subunit
  misc_feature (1)..(140): Homolog of NCBI NO: 28278699 NR Description: Unknown (protein for MGC:53877) [Xenopus laevis]
MTYLARWPDYFHVAEGPGNRVMGYIMGKVEGQGESWHGHVTAVTVSPEYRRQQLAKKLMNLLEDISDKIDKAYFVDLFVRASNTPAIKMYEKLGYIIYRRVLRYYSGEEDGLDMRKALSRDVEKKSVIPLKRPITPDELEYD

SEQ ID NO: 106296 - DNA, 5073 bp, Arabidopsis thaliana
  misc_feature (1)..(5073): Ceres Seq. ID no. 13619180
  misc_feature: MA Experiment ID: 108572 Result: Up-regulated in Transcription
  misc_feature: MA Experiment 108572 PARAMETER Experiment Name: At_Drought_cDNA_P Parameter: Timepoint (hr) Value: 1
  misc_feature: MA Experiment 108572 PARAMETER Experiment Name: At_Drought_cDNA_P Parameter: Tissue Value: Aerial
  misc_feature: MA Experiment 108572 PARAMETER Experiment Name: At_Drought_cDNA_P Parameter: Treatment Value: Drought vs. No Drought
  misc_feature: MA Experiment ID: 108574 Result: Up-regulated in Transcription
  misc_feature: MA Experiment 108574 PARAMETER Experiment Name: At_Wounding__cDNA_P Parameter: Timepoint (hr) Value: 1
  misc_feature: MA Experiment 108574 PARAMETER Experiment Name: At_Wounding__cDNA_P Parameter: Tissue Value: Aerial
  misc_feature: MA Experiment 108574 PARAMETER Experiment Name: At_Wounding__cDNA_P Parameter: Treatment Value: Wounding vs. No Wounding
  misc_feature: MA Experiment ID: 108595 Result: Up-regulated in Transcription
  misc_feature: MA Experiment 108595 PARAMETER Experiment Name: At_Ler-pi_Ovule_cDNA_P Parameter: Plant Line Value: null
  misc_feature: MA Experiment ID: 108668 Result: Up-regulated in Transcription
  misc_feature: MA Experiment 108668 PARAMETER Experiment Name: At_2mM_SA_cDNA_P Parameter: Plant Line Value: WS
  misc_feature: MA Experiment 108668 PARAMETER Experiment Name: At_2mM_SA_cDNA_P Parameter: Timepoint (hr) Value: 6
  misc_feature: MA Experiment 108668 PARAMETER Experiment Name: At_2mM_SA_cDNA_P Parameter: Treatment Value: 2mM SA vs. No Treatment
  misc_feature: MA Experiment ID: 20000185 Result: Up-regulated in Transcription
  misc_feature: MA Experiment 20000185 PARAMETER Experiment Name: At_Roots__P Parameter: Age (day) Value: 7 vs. 21
  misc_feature: MA Experiment 20000185 PARAMETER Experiment Name: At_Roots__P Parameter: Organism Value: A. thaliana
  misc_feature: MA Experiment 20000185 PARAMETER Experiment Name: At_Roots__P Parameter: Tissue Value: Roots vs. Whole Plant
  misc_feature: MA Experiment ID: 20000224 Result: Up-regulated in Transcription
  misc_feature: MA Experiment ID: 20000227 Result: Up-regulated in Transcription
  misc_feature: MA Experiment 20000227 PARAMETER Experiment Name: At_Root-Tips-vs-Tops_P Parameter: Tissue Value: Root Tips vs. Root Tops
  misc_feature: MA Experiment ID: 20000234 Result: Up-regulated in Transcription
  misc_feature: MA Experiment 20000234 PARAMETER Experiment Name: At_Siliques_P Parameter: Age (day) Value: 21
  misc_feature: MA Experiment 20000234 PARAMETER Experiment Name: At_Siliques_P Parameter: Organism Value: A. thaliana
  misc_feature: MA Experiment 20000234 PARAMETER Experiment Name: At_Siliques_P Parameter: Plant Line Value: WS
  misc_feature: MA Experiment 20000234 PARAMETER Experiment Name: At_Siliques_P Parameter: Tissue Value: Less Than 5mm Siliques vs. Whole Plant
  misc_feature: MA Experiment ID: 20000235 Result: Up-regulated in Transcription
  misc_feature: MA Experiment 20000235 PARAMETER Experiment Name: At_Siliques_P Parameter: Age (day) Value: 21
  misc_feature: MA Experiment 20000235 PARAMETER Experiment Name: At_Siliques_P Parameter: Organism Value: A. thaliana
  misc_feature: MA Experiment 20000235 PARAMETER Experiment Name: At_Siliques_P Parameter: Plant Line Value: WS
  misc_feature: MA Experiment 20000235 PARAMETER Experiment Name: At_Siliques_P Parameter: Tissue Value: 5-10mm Siliques vs. Whole Plant
  misc_feature: MA Experiment ID: 20000264 Result: Up-regulated in Transcription
  misc_feature: MA Experiment 20000264 PARAMETER Experiment Name: At_Open_Flower_P Parameter: Age (day) Value: 21
  misc_feature: MA Experiment 20000264 PARAMETER Experiment Name: At_Open_Flower_P Parameter: Plant Line Value: WS
  misc_feature: MA Experiment 20000264 PARAMETER Experiment Name: At_Open_Flower_P Parameter: Tissue Value: Open Flower vs. Whole Plant
  misc_feature: MA Experiment ID: 20000265 Result: Up-regulated in Transcription
  misc_feature: MA Experiment 20000265 PARAMETER Experiment Name: At_Open_Flower_P Parameter: Age (day) Value: 21
  misc_feature: MA Experiment 20000265 PARAMETER Experiment Name: At_Open_Flower_P Parameter: Plant Line Value: WS
  misc_feature: MA Experiment 20000265 PARAMETER Experiment Name: At_Open_Flower_P Parameter: Tissue Value: Closed Flower vs. Whole Plant
  misc_feature: MA Experiment ID: 20000286 Result: Up-regulated in Transcription
  misc_feature: MA Experiment 20000286 PARAMETER Experiment Name: At_Open_Flower_P Parameter: Age (day) Value: 21
  misc_feature: MA Experiment 20000286 PARAMETER Experiment Name: At_Open_Flower_P Parameter: Plant Line Value: WS
  misc_feature: MA Experiment 20000286 PARAMETER Experiment Name: At_Open_Flower_P Parameter: Tissue Value: Half Open vs. Whole Plant
  misc_feature: MA Experiment ID: 20000439 Result: Up-regulated in Transcription
  misc_feature: MA Experiment 20000439 PARAMETER Experiment Name: At_Roots__P Parameter: Age (day) Value: 14 vs. 21
  misc_feature: MA Experiment 20000439 PARAMETER Experiment Name: At_Roots__P Parameter: Organism Value: A. thaliana
  misc_feature: MA Experiment 20000439 PARAMETER Experiment Name: At_Roots__P Parameter: Tissue Value: Roots vs. Whole Plant
  misc_feature: MA Experiment ID: 20000495 Result: Up-regulated in Transcription
  misc_feature: MA Experiment 20000495 PARAMETER Experiment Name: At_Guard_Cells_P Parameter: Harvest Date Value: 8/2/2002
  misc_feature: MA Experiment 20000495 PARAMETER Experiment Name: At_Guard_Cells_P Parameter: Organism Value: A. thaliana
  misc_feature: MA Experiment 20000495 PARAMETER Experiment Name: At_Guard_Cells_P Parameter: Tissue Value: Guard Cells vs. Leaves
  misc_feature: MA Experiment ID: 20000794 Result: Up-regulated in Transcription
  misc_feature: MA Experiment 20000794 PARAMETER Experiment Name: At_Petals_P Parameter: Age (day) Value: 23-25 days
  misc_feature: MA Experiment 20000794 PARAMETER Experiment Name: At_Petals_P Parameter: Plant Line Value: WS
  misc_feature: MA Experiment 20000794 PARAMETER Experiment Name: At_Petals_P Parameter: Tissue Value: Petals vs. Whole plant
  misc_feature: MA Experiment ID: 20001557 Result: Up-regulated in Transcription
  misc_feature: MA Experiment 20001557 PARAMETER Experiment Name: At_Drought_Soil_Dry_P Parameter: Age (day) Value: 27
  misc_feature: MA Experiment 20001557 PARAMETER Experiment Name: At_Drought_Soil_Dry_P Parameter: Organism Value: A. thaliana
  misc_feature: MA Experiment 20001557 PARAMETER Experiment Name: At_Drought_Soil_Dry_P Parameter: Plant Line Value: WS
  misc_feature: MA Experiment 20001557 PARAMETER Experiment Name: At_Drought_Soil_Dry_P Parameter: Post Timepoint (hr) Value: 3
  misc_feature: MA Experiment 20001557 PARAMETER Experiment Name: At_Drought_Soil_Dry_P Parameter: Post-Treatment Value: Re-Water vs. No Drought
  misc_feature: MA Experiment 20001557 PARAMETER Experiment Name: At_Drought_Soil_Dry_P Parameter: Timepoint (day) Value: 13
  misc_feature: MA Experiment 20001557 PARAMETER Experiment Name: At_Drought_Soil_Dry_P Parameter: Treatment Value: Drought vs. No Drought
  misc_feature: MA Experiment ID: 20001757 Result: Down-regulated in Transcription
  misc_feature: MA Experiment 20001757 PARAMETER Experiment Name: At_50mM_NH4NO3_L-to-H_P Parameter: Timepoint (hr) Value: 6
  misc_feature: MA Experiment 20001757 PARAMETER Experiment Name: At_50mM_NH4NO3_L-to-H_P Parameter: Tissue Value: Leaf
  misc_feature: MA Experiment 20001757 PARAMETER Experiment Name: At_50mM_NH4NO3_L-to-H_P Parameter: Treatment Value: 50mM NH4NO3 vs 100mM Mannitol
aagagaagagagatctctcttctcgattgctctcaagaacccaagtgacgtctggtttcagctgatttgtttcttctcattctctatcttcttctctgggaaatatcgattttgatctattaagagctgctacgagctttgggatgtggtgagatgcttgttctatctcgaacaatccgccggttgttgattttaaacaaactctctatcacaaatctttcccgatcatggattttattgagatctcgttgatctttcgagagcatttgccactactggaactatgttcggtcatcatcaacctcctactctttcttgtctttctatttgctgtctccgcgaggcagattctcgtctgcgtgagaagaggcagagataggctctctaaggacgatacggtttcagcttctaatcttagcttggaaagagaggttaaccatgttagtgttgggtttgggtttaatctgtctttgctctgttgcttatatgtgttaggcgtccaagttttggtgttagtatatgatggggttaaggttagaagagaagtcagtgactggtttgttctttgctttccagcttctcagagtttagcttggtttgtccttagcttcttagttcttcatttgaaatacaagtcttcagagaagctacccttcttggtgaggatatggtggttcctggcgttttcgatttgcctctgtactatgtatgtcgatggaagaaggctagccattgaaggttggagcagatgttcttctcatgttgtcgccaatttagctgttacacctgctcttgggtttctctgctttctggcctggagaggcgtttctggtattcaagttaccagaagctcctctgatcttcaagagcctttgcttgttgaagaagaggcagcttgtcttaaagttactccatatagtactgctgggctagttagccttattacgctttcatggttggatccacttctctcggctggttcaaaaagaccgcttgagcttaaggatataccgcttcttgcaccaagagatagagccaaatcaagttacaaggtcttgaagtcgaattggaagagatgcaagtccgagaatccttcaaagcctccttctttagctcgtgcaattatgaaatcattttggaaagaagctgcttgcaatgccgtatttgctgggttgaatactcttgtgtcctatgtcggtccttacttgatcagctactttgttgattatcttggagggaaggagattttccctcatgaaggatacgtactcgctgggatattctttacgtccaagcttatagagacagtcaccacccgccagtggtatatgggtgttgatatcctagggatgcatgttagatcagctcttacagcaatggtataccgaaaaggtctcaaactttcaagtatagccaagcagaaccacacgagcggtgaaattgtaaactacatggcagtcgatgtccagcgcataggagattactcatggtatcttcatgatatttggatgcttccgatgcaaatagttcttgctcttgcaatcctatataaaagcgtgggcatagctgctgtagctacattggttgctacaataatctcgattcttgtcacgattccactcgctaaggtccaggaagactatcaagataagttgatgactgcgaaagatgaaagaatgaggaaaacctcagagtgtcttaggaacatgagagttctgaaattgcaggcatgggaagatcgttatagagtgagattggaagaaatgagggaagaggagtatggttggcttcgcaaagccttatattctcaggcttttgttacttttatcttttggagttcccccatttttgtcgccgcagttacattcgctacttcgatatttctaggcactcaacttaccgctggaggtgttctttctgctctggcgacattcagaattcttcaggagccacttcggaactttcctgatctggtttcaatgatggctcagacaaaggtttctcttgataggatttctgggttcttgcaggaggaagaacttcaagaagatgcaactgttgttattccacggggactttcgaatatagccatagagattaaagatggtgtgttttgttgggaccctttttcttcaaggccgacattatctgggattcagatgaaagtggagaagggtatgcgtgtggctgtctgtggcacagttggctctggaaaatcaagttttatctcttgcatcctaggggaaatcccaaaaatctctggcgaagttagaatatgtggtactactggttatgtgtctcaatcggcttggattcagtctggtaacattgaagaaaacattctatttggcagtccaatggagaaaacaaagtacaagaatgtgatacaagcatgttccctaaagaaagatatagagcttttctcacatggggaccaaactattatcggggagagaggtataaatctcagcggaggtcagaaacagcgtgtacaacttgcaagggcattatatcaagatgctgacatttatttactagacgacccttttagtgctcttgatgcacacactggctctgatttgtttagggattatattctatctgcattggctgagaaaactgtggtttttgtaacgcatcaagttgagtttctccctgcagctgatctaatattggttctgaaggaaggcaggattattcaatcgggtaaatatgatgatctgctgcaagcaggtactgattttaaggccttagtgtctgcccaccatgaagcaatcgaggcaatggacatcccaagtccctcctcagaagactctgatgaaaatcctattcgcgatagtttggtcttgcataatccaaagtctgatgtttttgaaaatgacatcgagactttggcaaaggaagtacaagagggaggatctgcttcagatctaaaggcaatcaaagagaagaagaagaaagctaagcgttcccgcaaaaagcagcttgttcaagaagaggaacgagtaaagggaaaagtcagcatgaaggtgtacttgtcatacatgggtgctgcatataaaggggctctgattcctcttattatactcgcacaagctgctttccaatttcttcagattgctagtaattggtggatggcttgggcaaatcctcaaactgaaggtgacgaatctaaagtggatcctactctgcttctcatcgtttatacggctttagctttcgggagctctgtgttcatatttgttcgagctgctctggttgcaacttttggtcttgcagctgcacagaaactgttcttaaatatgctcagaagtgtgttccgagcgccaatgtcattctttgattccactcctgcaggaagaattttgaatcgggtttctattgatcaaagtgttgtagatcttgacattccttttagactcggtgggtttgcttcaacaacaatacaactctgtggcattgtcgctgtaatgaccaatgttacctggcaagttttccttcttgttgttccggtagctgttgcttgcttttggatgcagaaatattacatggcttcttcaagagaattggttcggatagttagtatccagaagtctccaataattcatctttttggagaatcaattgctggtgctgccacaataagaggatttggccaggaaaaaagatttatcaaaaggaatctttatcttctagattgttttgttcgacctttcttctgcagtatcgctgctatcgaatggctttgtttacgcatggaattactttccacacttgtatttgctttctgtatggttttactcgtcagttttccacatggaaccattgatccaagcatggcaggtcttgctgtgacatatggacttaacttgaatggacgtctatcacgatggatacttagcttttgtaagcttgaaaacaaaataatctcaatcgaaaggatttatcagtacagtcagattgtaggagaggccccagcaattatagaagatttccgcccgccttcctcgtggcctgcaacgggaacaattgagctagttgatgttaaggttcgttatgctgagaatcttccaacagtactccatggggtgagctgtgtgtttccgggtggaaaaaagattgggattgttgggcgaacgggaagcggaaagtcgactttgattcaagctttgtttcgattgattgagccaactgctggaaaaattactattgacaacattgacatttctcaaattggtcttcatgatcttcgtagtcgccttgggattatacctcaagatcctacattatttgaaggaacaatccgagcaaatcttgacccacttgaagaacattcagatgataaaatctgggaggcgcttgataaatcccagcttggagacgttgttagaggaaaagacctaaaacttgactctccagtactggaaaatggagataactggagtgtagggcagagacagcttgtgtcacttggacgagcattactgaaacaagccaaaatacttgttcttgatgaagcaacagcatcggttgacacagcaacagacaatctgatccagaagataatcagaacagagtttgaagactgcacggtctgcaccattgctcaccggataccaactgttatagacagtgacctagttttggttctcagcgacggtagagtagcagagtttgatactcctgcacggctattagaagacaaatcatcgatgttcttgaaattggtaacagaatactcctcaagatctactggaatccctgaattatgatcctccatgttaaaaattcagtttagggggtttcttttctcaagaggatataaaagaactgatatgtgacaaaagcttaaggtctaaagtaagagagagttttccacagggtttaagaaaagaaaaagcatgaaaggatgccaaaatctccgcgcttaaaaaactttgggtttaaatctcttctgtcgaacattgggagaaactttttttgtatggaacagttagtttctttggttttcatgtttatcaataaactgcaaaaacaaacaaagattagagtagaaactactaatcattcgtc

SEQ ID NO: 106297 - protein, 1514 aa, Arabidopsis thaliana; identical to SEQ ID NO: 39531
  peptide (1)..(1514): Ceres Seq. ID no. 13619181
  misc_feature (304)..(576): Pfam Name: ABC transporter transmembrane region Pfam Description: ABC transporter transmembrane region
  misc_feature (67)..(1511): Homolog of NCBI NO: 15227133 NR Description: glutathione-conjugate transporter AtMRP4
  misc_feature (1)..(632): Homolog of NCBI NO: 27368875 NR Description: MRP-like ABC transporter [Oryza sativa (japonica
  misc_feature (919)..(1511): Homolog of NCBI NO: 27368875 NR Description: MRP-like ABC transporter [Oryza sativa (japonica
  misc_feature (640)..(854): Homolog of NCBI NO: 27368875 NR Description: MRP-like ABC transporter [Oryza sativa (japonica
  misc_feature (233)..(931): Homolog of NCBI NO: 19172038 NR Description: ABC transporter ABCC.8 [Dictyostelium discoideum]
  misc_feature (848)..(1507): Homolog of NCBI NO: 19172038 NR Description: ABC transporter ABCC.8 [Dictyostelium discoideum]
  misc_feature (295)..(930): Homolog of NCBI NO: 19569597 NR Description: multidrug resistance-associated protein Mrp2
  misc_feature (908)..(1503): Homolog of NCBI NO: 19569597 NR Description: multidrug resistance-associated protein Mrp2
  misc_feature (205)..(291): Homolog of NCBI NO: 19569597 NR Description: multidrug resistance-associated protein Mrp2
  misc_feature (285)..(1497): Homolog of NCBI NO: 6678848 NR Description: ATP-binding cassette, sub-family C, member 1;

SEQ ID NO: 106298 - protein, 1355 aa, Arabidopsis thaliana; identical to SEQ ID NO: 39532
  peptide (1)..(1355): Ceres Seq. ID no. 13619182
  misc_feature (145)..(417): Pfam Name: ABC transporter transmembrane region Pfam Description: ABC transporter transmembrane region
  misc_feature (1)..(1352): Homolog of NCBI NO: 15227133 NR Description: glutathione-conjugate transporter AtMRP4
  misc_feature (1)..(473): Homolog of NCBI NO: 27368875 NR Description: MRP-like ABC transporter [Oryza sativa (japonica
  misc_feature (760)..(1352): Homolog of NCBI NO: 27368875 NR Description: MRP-like ABC transporter [Oryza sativa (japonica
  misc_feature (481)..(695): Homolog of NCBI NO: 27368875 NR Description: MRP-like ABC transporter [Oryza sativa (japonica
  misc_feature (74)..(772): Homolog of NCBI NO: 19172038 NR Description: ABC transporter ABCC.8 [Dictyostelium discoideum]
  misc_feature (689)..(1348): Homolog of NCBI NO: 19172038 NR Description: ABC transporter ABCC.8 [Dictyostelium discoideum]
  misc_feature (136)..(771): Homolog of NCBI NO: 19569597 NR Description: multidrug resistance-associated protein Mrp2
  misc_feature (749)..(1344): Homolog of NCBI NO: 19569597 NR Description: multidrug resistance-associated protein Mrp2
  misc_feature (46)..(132): Homolog of NCBI NO: 19569597 NR Description: multidrug resistance-associated protein Mrp2
  misc_feature (126)..(1338): Homolog of NCBI NO: 6678848 NR Description: ATP-binding cassette, sub-family C, member 1;

SEQ ID NO: 106299 - protein, 1215 aa, Arabidopsis thaliana; identical to SEQ ID NO: 39533
  peptide (1)..(1215): Ceres Seq. ID no. 13619183
  misc_feature (5)..(277): Pfam Name: ABC transporter transmembrane region Pfam Description: ABC transporter transmembrane region
  misc_feature (1)..(1212): Homolog of NCBI NO: 15227133 NR Description: glutathione-conjugate transporter AtMRP4
  misc_feature (1)..(333): Homolog of NCBI NO: 27368875 NR Description: MRP-like ABC transporter [Oryza sativa (japonica
  misc_feature (620)..(1212): Homolog of NCBI NO: 27368875 NR Description: MRP-like ABC transporter [Oryza sativa (japonica
  misc_feature (341)..(555): Homolog of NCBI NO: 27368875 NR Description: MRP-like ABC transporter [Oryza sativa (japonica
  misc_feature (1)..(632): Homolog of NCBI NO: 19172038 NR Description: ABC transporter ABCC.8 [Dictyostelium discoideum]
  misc_feature (549)..(1208): Homolog of NCBI NO: 19172038 NR Description: ABC transporter ABCC.8 [Dictyostelium discoideum]
  misc_feature (1)..(631): Homolog of NCBI NO: 19569597 NR Description: multidrug resistance-associated protein Mrp2
  misc_feature (609)..(1204): Homolog of NCBI NO: 19569597 NR Description: multidrug resistance-associated protein Mrp2
  misc_feature (1)..(1198): Homolog of NCBI NO: 6678848 NR Description: ATP-binding cassette, sub-family C, member 1;
  misc_feature (1)..(1198): Homolog of NCBI NO: 29893528 NR Description: multidrug resistance protein 1A [Macaca

SEQ ID NO: 106300 - DNA, 1351 bp, Arabidopsis thaliana
  misc_feature (1)..(1351): Ceres Seq. ID no. 13619184
  misc_feature: MA Experiment ID: 108434 Result: Up-regulated in Transcription
  misc_feature: MA Experiment 108434 PARAMETER Experiment Name: At_Root_Tips_cDNA_P Parameter: Tissue Value: Root Tips
  misc_feature: MA Experiment ID: 108573 Result: Up-regulated in Transcription
  misc_feature: MA Experiment 108573 PARAMETER Experiment Name: At_Drought_cDNA_P Parameter: Timepoint (hr) Value: 6
  misc_feature: MA Experiment 108573 PARAMETER Experiment Name: At_Drought_cDNA_P Parameter: Tissue Value: Aerial
  misc_feature: MA Experiment 108573 PARAMETER Experiment Name: At_Drought_cDNA_P Parameter: Treatment Value: Drought vs. No Drought
  misc_feature: MA Experiment ID: 108595 Result: Down-regulated in Transcription
  misc_feature: MA Experiment 108595 PARAMETER Experiment Name: At_Ler-pi_Ovule_cDNA_P Parameter: Plant Line Value: null
atcttcgataaatacgcaagagtgagcttcacggtcagacaaaagctgactctacgctctctcaaaagtcgaatatcccaaattcgatccgttttccggcgataatctccgatctagatccgatggcgaaagaaccagttcgtgtgctcgttactggagctgcaggacaaatcggatatgctcttgtacctatgattgcaaggggtatcatgcttggtgctgaccaacctgttatcctccacatgttggatattcctccagctgctgaagctttgaacggtgttaagatggagttgatcgatgctgctttccctcttcttaaaggtgttgttgctacaactgatgccgttgagggatgtactggagtcaatgttgctgttatggttggtggtttcccgaggaaagaaggtatggagaggaaggatgtgatgtccaagaatgtttccatctacaagtctcaggctgctgccttggagaagcatgccgctcctaactgcaaggttcttgttgtggccaacccggcaaacaccaacgcattgatcctcaaggaatttgcaccatcaatccctgaaaagaacatctcttgtttgacaaggcttgaccacaacagggctttgggacagatctctgagaggttgagcgtgccagtgtctgatgttaagaacgtgatcatctggggaaaccactcatcctcacagtacccagatgtcaaccatgctaaagtgcagacctcgtctggagagaagcctgtccgtgagctcgtcaaggacgatgcatggttggacggagaatttatctctacagttcaacaacgtggagctgcaatcatcaaggcgaggaagttgtctagtgcgctctctgctgctagctctgcttgtgaccacatccgtgactgggtccttggaactccagagggtacgttcgtttccatgggagtatactccgatggctcttacagcgttccatcaggacttatctactccttccctgtaacttgtcgcaatggagactggagtattgtccaaggccttccgattgatgaagtatcaaggaagaagatggatttgactgcagaggagctcaaggaagagaaggacttggcgtactcatgcctctcttaaacccttctggagcaaaattttcatctataaggtgtgagatcagttaaagcctttcagggctttgtccgaataagaagtgtgtttgaaagatctccaaacactgttttataacctctttggtctctttgatgagtattgtccctggtctgtttctaaaccaggatatcgtttttttcaatgtgtctgatttggtttacccatgaaaagaagaaaattggcagttgcatggt

SEQ ID NO: 106301 - protein, 332 aa, Arabidopsis thaliana; identical to SEQ ID NO: 25356
  peptide (1)..(332): Ceres Seq. ID no. 13619185
  misc_feature (157)..(331): Pfam Name: lactate/malate dehydrogenase, alpha/beta Pfam Description: lactate/malate dehydrogenase, alpha/beta
  misc_feature (1)..(332): Homolog of NCBI NO: 15219721 NR Description: malate dehydrogenase, cytosolic, putative thaliana] >gi|11133509|sp|P93819|MDHC_ARATH Malate dehydrogenase,
  misc_feature (1)..(332): Homolog of NCBI NO: 21593565 NR Description: cytosolic malate dehydrogenase [Arabidopsis
  misc_feature (1)..(332): Homolog of NCBI NO: 15239843 NR Description: malate dehydrogenase, cytosolic, putative thaliana] >gi|11133446|sp|P57106|MDHD_ARATH Malate dehydrogenase,
  misc_feature (1)..(332): Homolog of NCBI NO: 10798652 NR Description: malate dehydrogenase [Nicotiana tabacum]
  misc_feature (1)..(331): Homolog of NCBI NO: 18202485 NR Description: Malate dehydrogenase, cytoplasmic
  misc_feature (1)..(332): Homolog of NCBI NO: 11133373 NR Description: Malate dehydrogenase, cytoplasmic
  misc_feature (1)..(332): Homolog of NCBI NO: 10334493 NR Description: cytosolic malate dehydrogenase [Cicer arietinum]
  misc_feature (1)..(332): Homolog of NCBI NO: 15982948 NR Description: NAD-dependent malate dehydrogenase [Prunus
  misc_feature (1)..(332): Homolog of NCBI NO: 12229778 NR Description: Malate dehydrogenase, cytoplasmic
  misc_feature (1)..(324): Homolog of NCBI NO: 15837813 NR Description: malate dehydrogenase [Xylella fastidiosa 9a5c]

SEQ ID NO: 106302 - protein, 309 aa, Arabidopsis thaliana; identical to SEQ ID NO: 25357
  peptide (1)..(309): Ceres Seq. ID no. 13619186
  misc_feature (134)..(308): Pfam Name: lactate/malate dehydrogenase, alpha/beta Pfam Description: lactate/malate dehydrogenase, alpha/beta
  misc_feature (1)..(309): Homolog of NCBI NO: 15219721 NR Description: malate dehydrogenase, cytosolic, putative thaliana] >gi|11133509|sp|P93819|MDHC_ARATH Malate dehydrogenase,
  misc_feature (1)..(309): Homolog of NCBI NO: 21593565 NR Description: cytosolic malate dehydrogenase [Arabidopsis
  misc_feature (1)..(309): Homolog of NCBI NO: 15239843 NR Description: malate dehydrogenase, cytosolic, putative thaliana] >gi|11133446|sp|P57106|MDHD_ARATH Malate dehydrogenase,
  misc_feature (1)..(309): Homolog of NCBI NO: 10798652 NR Description: malate dehydrogenase [Nicotiana tabacum]
  misc_feature (1)..(308): Homolog of NCBI NO: 18202485 NR Description: Malate dehydrogenase, cytoplasmic
  misc_feature (1)..(309): Homolog of NCBI NO: 11133373 NR Description: Malate dehydrogenase, cytoplasmic
  misc_feature (1)..(309): Homolog of NCBI NO: 10334493 NR Description: cytosolic malate dehydrogenase [Cicer arietinum]
  misc_feature (1)..(309): Homolog of NCBI NO: 15982948 NR Description: NAD-dependent malate dehydrogenase [Prunus
  misc_feature (1)..(309): Homolog of NCBI NO: 12229778 NR Description: Malate dehydrogenase, cytoplasmic
  misc_feature (1)..(301): Homolog of NCBI NO: 15837813 NR Description: malate dehydrogenase [Xylella fastidiosa 9a5c]

SEQ ID NO: 106303 - protein, 303 aa, Arabidopsis thaliana; identical to SEQ ID NO: 25358
  peptide (1)..(303): Ceres Seq. ID no. 13619187
  misc_feature (128)..(302): Pfam Name: lactate/malate dehydrogenase, alpha/beta Pfam Description: lactate/malate dehydrogenase, alpha/beta
  misc_feature (1)..(303): Homolog of NCBI NO: 15219721 NR Description: malate dehydrogenase, cytosolic, putative thaliana] >gi|11133509|sp|P93819|MDHC_ARATH Malate dehydrogenase,
  misc_feature (1)..(303): Homolog of NCBI NO: 21593565 NR Description: cytosolic malate dehydrogenase [Arabidopsis
  misc_feature (1)..(303): Homolog of NCBI NO: 15239843 NR Description: malate dehydrogenase, cytosolic, putative thaliana] >gi|11133446|sp|P57106|MDHD_ARATH Malate dehydrogenase,
  misc_feature (1)..(303): Homolog of NCBI NO: 10798652 NR Description: malate dehydrogenase [Nicotiana tabacum]
  misc_feature (1)..(302): Homolog of NCBI NO: 18202485 NR Description: Malate dehydrogenase, cytoplasmic
  misc_feature (1)..(303): Homolog of NCBI NO: 11133373 NR Description: Malate dehydrogenase, cytoplasmic
  misc_feature (1)..(303): Homolog of NCBI NO: 10334493 NR Description: cytosolic malate dehydrogenase [Cicer arietinum]
  misc_feature (1)..(303): Homolog of NCBI NO: 15982948 NR Description: NAD-dependent malate dehydrogenase [Prunus
  misc_feature (1)..(303): Homolog of NCBI NO: 12229778 NR Description: Malate dehydrogenase, cytoplasmic
  misc_feature (1)..(295): Homolog of NCBI NO: 15837813 NR Description: malate dehydrogenase [Xylella fastidiosa 9a5c]

SEQ ID NO: 106304 - DNA, 717 bp, Arabidopsis thaliana
  misc_feature (1)..(717): Ceres Seq. ID no. 13619188
  misc_feature: MA Experiment ID: 20000179 Result: Up-regulated in Transcription
  misc_feature: MA Experiment 20000179 PARAMETER Experiment Name: At_Germinating_Seeds_P Parameter: Age (hr) Value: 6 vs. 0
  misc_feature: MA Experiment 20000179 PARAMETER Experiment Name: At_Germinating_Seeds_P Parameter: Tissue Value: Germinating Seeds
  misc_feature: MA Experiment ID: 20000234 Result: Up-regulated in Transcription
  misc_feature: MA Experiment 20000234 PARAMETER Experiment Name: At_Siliques_P Parameter: Age (day) Value: 21
  misc_feature: MA Experiment 20000234 PARAMETER Experiment Name: At_Siliques_P Parameter: Organism Value: A. thaliana
  misc_feature: MA Experiment 20000234 PARAMETER Experiment Name: At_Siliques_P Parameter: Plant Line Value: WS
  misc_feature: MA Experiment 20000234 PARAMETER Experiment Name: At_Siliques_P Parameter: Tissue Value: Less Than 5mm Siliques vs. Whole Plant
  misc_feature: MA Experiment ID: 20000235 Result: Up-regulated in Transcription
  misc_feature: MA Experiment 20000235 PARAMETER Experiment Name: At_Siliques_P Parameter: Age (day) Value: 21
  misc_feature: MA Experiment 20000235 PARAMETER Experiment Name: At_Siliques_P Parameter: Organism Value: A. thaliana
  misc_feature: MA Experiment 20000235 PARAMETER Experiment Name: At_Siliques_P Parameter: Plant Line Value: WS
  misc_feature: MA Experiment 20000235 PARAMETER Experiment Name: At_Siliques_P Parameter: Tissue Value: 5-10mm Siliques vs. Whole Plant
  misc_feature: MA Experiment ID: 20000265 Result: Up-regulated in Transcription
  misc_feature: MA Experiment 20000265 PARAMETER Experiment Name: At_Open_Flower_P Parameter: Age (day) Value: 21
  misc_feature: MA Experiment 20000265 PARAMETER Experiment Name: At_Open_Flower_P Parameter: Plant Line Value: WS
  misc_feature: MA Experiment 20000265 PARAMETER Experiment Name: At_Open_Flower_P Parameter: Tissue Value: Closed Flower vs. Whole Plant
  misc_feature: MA Experiment ID: 20000286 Result: Up-regulated in Transcription
  misc_feature: MA Experiment 20000286 PARAMETER Experiment Name: At_Open_Flower_P Parameter: Age (day) Value: 21
  misc_feature: MA Experiment 20000286 PARAMETER Experiment Name: At_Open_Flower_P Parameter: Plant Line Value: WS
  misc_feature: MA Experiment 20000286 PARAMETER Experiment Name: At_Open_Flower_P Parameter: Tissue Value: Half Open vs. Whole Plant
  misc_feature: MA Experiment ID: 20001248 Result: Down-regulated in Transcription
  misc_feature: MA Experiment 20001248 PARAMETER Experiment Name: At_Far-red-induction_P Parameter: Age (day) Value: 7
  misc_feature: MA Experiment 20001248 PARAMETER Experiment Name: At_Far-red-induction_P Parameter: Light Value: Far-red vs. White
  misc_feature: MA Experiment 20001248 PARAMETER Experiment Name: At_Far-red-induction_P Parameter: Organism Value: A. thaliana
  misc_feature: MA Experiment 20001248 PARAMETER Experiment Name: At_Far-red-induction_P Parameter: Plant Line Value: Columbia
  misc_feature: MA Experiment 20001248 PARAMETER Experiment Name: At_Far-red-induction_P Parameter: Timepoint (hr) Value: 4
  misc_feature: MA Experiment 20001248 PARAMETER Experiment Name: At_Far-red-induction_P Parameter: Tissue Value: Whole Plant
  misc_feature: MA Experiment ID: 20001911 Result: Down-regulated in Transcription
  misc_feature: MA Experiment 20001911 PARAMETER Experiment Name: At_Drought_Reproduction_P Parameter: Age (day) Value: 40
  misc_feature: MA Experiment 20001911 PARAMETER Experiment Name: At_Drought_Reproduction_P Parameter: Organism Value: A. thaliana
  misc_feature: MA Experiment 20001911 PARAMETER Experiment Name: At_Drought_Reproduction_P Parameter: Plant Line Value: WS
  misc_feature: MA Experiment 20001911 PARAMETER Experiment Name: At_Drought_Reproduction_P Parameter: Timepoint (day) Value: 10
  misc_feature: MA Experiment 20001911 PARAMETER Experiment Name: At_Drought_Reproduction_P Parameter: Tissue Value: Flowers
  misc_feature: MA Experiment 20001911 PARAMETER Experiment Name: At_Drought_Reproduction_P Parameter: Treatment Value: Drought vs. No Drought
gagccatttaaatctgattcatatcaaaaaattttcgatttaaaaaaaaaaccctcaaaaggtgttgatacggaaaaagaaaagggaaagaagaagagaatggatctagaatcggtgaaaaagtatctggaaggagatgaagacgaaaaggccaaggaaccaatggtggcgaaattaccacacagattcctcgaacgattcgtaaccaatggtcttaaagtggatctcatcgaacctggccgtatcgtctgctccatgaaaatccctcctcatctcctgaacgcagggaaattcttacacggaggagcaacggcgacgctggtggatttgataggatcagcagtgatctacacagccggagcttcacattccggagtttcagtggagatcaatgtttcataccttgatgctgcttttctcgatgaagagatagagatagaatcaaaggcattgcgtgttggtaaagctgtagcagtagtgagtgtggagctgaggaagaagacgactggtaagattattgctcaaggtcgtcataccaagtactttgctcctcgttccaacctttgatcgttcaaccaacctttcttcttttttacattcaataaacaacatcaaggtgtttttagtctttgtcccatttgcttcttattattattgatactaataaaactacattactatatgtttttctaataatacaaacaaccttactttttc

SEQ ID NO: 106305 - protein, 188 aa, Arabidopsis thaliana; identical to SEQ ID NO: 28057
  peptide (1)..(188): Ceres Seq. ID no. 13619189
  misc_feature (34)..(188): Homolog of NCBI NO: 18379308 NR Description: thioesterase-related [Arabidopsis thaliana]
  misc_feature (34)..(187): Homolog of NCBI NO: 13605902 NR Description: At1g04290/F19P19_27 [Arabidopsis thaliana]
  misc_feature (34)..(188): Homolog of NCBI NO: 21740488 NR Description: OSJNBa0006B20.3 [Oryza sativa (japonica
  misc_feature (99)..(188): Homolog of NCBI NO: 20161439 NR Description: B1065E10.13 [Oryza sativa (japonica
  misc_feature (49)..(181): Homolog of NCBI NO: 8923812 NR Description: thioesterase superfamily member 2; hypothalamus protein HT012 [Homo sapiens]
  misc_feature (73)..(181): Homolog of NCBI NO: 13385260 NR Description: thioesterase superfamily member 2 [Mus musculus]
  misc_feature (36)..(188): Homolog of NCBI NO: 18402093 NR Description: thioesterase-related [Arabidopsis thaliana] expressed protein [Arabidopsis thaliana] unknown protein [Arabidopsis thaliana]
  misc_feature (36)..(188): Homolog of NCBI NO: 25408036 NR Description: hypothetical protein At2g29590 [imported] - thaliana >gi|21593450|gb|AAM65417.1| unknown [Arabidopsis
  misc_feature (73)..(181): Homolog of NCBI NO: 27685797 NR Description: similar to RIKEN cDNA 0610006O17 [Mus musculus]
  misc_feature (80)..(181): Homolog of NCBI NO: 31199225 NR Description: ENSANGP00000009567 [Anopheles gambiae]

SEQ ID NO: 106306 - protein, 155 aa, Arabidopsis thaliana; identical to SEQ ID NO: 28058
  peptide (1)..(155): Ceres Seq. ID no. 13619190
  misc_feature (1)..(155): Homolog of NCBI NO: 18379308 NR Description: thioesterase-related [Arabidopsis thaliana]
  misc_feature (1)..(154): Homolog of NCBI NO: 13605902 NR Description: At1g04290/F19P19_27 [Arabidopsis thaliana]
  misc_feature (1)..(155): Homolog of NCBI NO: 21740488 NR Description: OSJNBa0006B20.3 [Oryza sativa (japonica
  misc_feature (66)..(155): Homolog of NCBI NO: 20161439 NR Description: B1065E10.13 [Oryza sativa (japonica
  misc_feature (16)..(148): Homolog of NCBI NO: 8923812 NR Description: thioesterase superfamily member 2; hypothalamus protein HT012 [Homo sapiens]
  misc_feature (40)..(148): Homolog of NCBI NO: 13385260 NR Description: thioesterase superfamily member 2 [Mus musculus]
  misc_feature (3)..(155): Homolog of NCBI NO: 18402093 NR Description: thioesterase-related [Arabidopsis thaliana] expressed protein [Arabidopsis thaliana] unknown protein [Arabidopsis thaliana]
  misc_feature (3)..(155): Homolog of NCBI NO: 25408036 NR Description: hypothetical protein At2g29590 [imported] - thaliana >gi|21593450|gb|AAM65417.1| unknown [Arabidopsis
  misc_feature (40)..(148): Homolog of NCBI NO: 27685797 NR Description: similar to RIKEN cDNA 0610006O17 [Mus musculus]
  misc_feature (47)..(148): Homolog of NCBI NO: 31199225 NR Description: ENSANGP00000009567 [Anopheles gambiae]

SEQ ID NO: 106307 - protein, 134 aa, Arabidopsis thaliana; identical to SEQ ID NO: 28059
  peptide (1)..(134): Ceres Seq. ID no. 13619191
  misc_feature (1)..(134): Homolog of NCBI NO: 18379308 NR Description: thioesterase-related [Arabidopsis thaliana]
  misc_feature (1)..(133): Homolog of NCBI NO: 13605902 NR Description: At1g04290/F19P19_27 [Arabidopsis thaliana]
  misc_feature (1)..(134): Homolog of NCBI NO: 21740488 NR Description: OSJNBa0006B20.3 [Oryza sativa (japonica
  misc_feature (45)..(134): Homolog of NCBI NO: 20161439 NR Description: B1065E10.13 [Oryza sativa (japonica
  misc_feature (1)..(127): Homolog of NCBI NO: 8923812 NR Description: thioesterase superfamily member 2; hypothalamus protein HT012 [Homo sapiens]
  misc_feature (19)..(127): Homolog of NCBI NO: 13385260 NR Description: thioesterase superfamily member 2 [Mus musculus]
  misc_feature (1)..(134): Homolog of NCBI NO: 18402093 NR Description: thioesterase-related [Arabidopsis thaliana] expressed protein [Arabidopsis thaliana] unknown protein [Arabidopsis thaliana]
  misc_feature (1)..(134): Homolog of NCBI NO: 25408036 NR Description: hypothetical protein At2g29590 [imported] - thaliana >gi|21593450|gb|AAM65417.1| unknown [Arabidopsis
  misc_feature (19)..(127): Homolog of NCBI NO: 27685797 NR Description: similar to RIKEN cDNA 0610006O17 [Mus musculus]
  misc_feature (26)..(127): Homolog of NCBI NO: 31199225 NR Description: ENSANGP00000009567 [Anopheles gambiae]

SEQ ID NO: 106308 - DNA, 1112 bp, Arabidopsis thaliana
  misc_feature (1)..(1112): Ceres Seq. ID no. 13619200
  misc_feature: MA Experiment ID: 20000184 Result: Down-regulated in Transcription
  misc_feature: MA Experiment 20000184 PARAMETER Experiment Name: At_Shoots__P Parameter: Age (day) Value: 7
  misc_feature: MA Experiment 20000184 PARAMETER Experiment Name: At_Shoots__P Parameter: Tissue Value: Shoots vs. Whole Plant
  misc_feature: MA Experiment ID: 20000527 Result: Down-regulated in Transcription
  misc_feature: MA Experiment 20000527 PARAMETER Experiment Name: At_10percent_PEG_P Parameter: Age (day) Value: 20
  misc_feature: MA Experiment 20000527 PARAMETER Experiment Name: At_10percent_PEG_P Parameter: Organism Value: A. thaliana
  misc_feature: MA Experiment 20000527 PARAMETER Experiment Name: At_10percent_PEG_P Parameter: Plant Line Value: WS
  misc_feature: MA Experiment 20000527 PARAMETER Experiment Name: At_10percent_PEG_P Parameter: Timepoint (day) Value: 20
  misc_feature: MA Experiment 20000527 PARAMETER Experiment Name: At_10percent_PEG_P Parameter: Tissue Value: Whole Plant
  misc_feature: MA Experiment 20000527 PARAMETER Experiment Name: At_10percent_PEG_P Parameter: Treatment Value: 10percent PEG vs. No Treatment
  misc_feature: MA Experiment ID: 20001904 Result: Up-regulated in Transcription
  misc_feature: MA Experiment 20001904 PARAMETER Experiment Name: At_Drought_Reproduction_P Parameter: Age (day) Value: 37
  misc_feature: MA Experiment 20001904 PARAMETER Experiment Name: At_Drought_Reproduction_P Parameter: Organism Value: A. thaliana
  misc_feature: MA Experiment 20001904 PARAMETER Experiment Name: At_Drought_Reproduction_P Parameter: Plant Line Value: WS
  misc_feature: MA Experiment 20001904 PARAMETER Experiment Name: At_Drought_Reproduction_P Parameter: Timepoint (day) Value: 7
  misc_feature: MA Experiment 20001904 PARAMETER Experiment Name: At_Drought_Reproduction_P Parameter: Tissue Value: Rosettes
  misc_feature: MA Experiment 20001904 PARAMETER Experiment Name: At_Drought_Reproduction_P Parameter: Treatment Value: Drought vs. No Drought
  misc_feature: MA Experiment ID: 20001905 Result: Up-regulated in Transcription
  misc_feature: MA Experiment 20001905 PARAMETER Experiment Name: At_Drought_Reproduction_P Parameter: Age (day) Value: 40
  misc_feature: MA Experiment 20001905 PARAMETER Experiment Name: At_Drought_Reproduction_P Parameter: Organism Value: A. thaliana
  misc_feature: MA Experiment 20001905 PARAMETER Experiment Name: At_Drought_Reproduction_P Parameter: Plant Line Value: WS
  misc_feature: MA Experiment 20001905 PARAMETER Experiment Name: At_Drought_Reproduction_P Parameter: Timepoint (day) Value: 10
  misc_feature: MA Experiment 20001905 PARAMETER Experiment Name: At_Drought_Reproduction_P Parameter: Tissue Value: Rosettes
  misc_feature: MA Experiment 20001905 PARAMETER Experiment Name: At_Drought_Reproduction_P Parameter: Treatment Value: Drought vs. No Drought
atgaagttcggcaagagcctaagcaaccagatcgaagaaactttacctgaatggcgcgacaaattcctctcatacaaagaactcaagaagaagctcaagcttatggagccacgaagcgtcgagaatcgtccaaataaacgttcgagatccgattccaattctgtcgacacagatccaacggttggtatgaccaaggaagagcttgatttcattagtcttcttgaagatgagcttgagaaattcaattccttcttcgttgagcaagaggaagagtatatcattagattgaaggaattgaaggaccaagtggcgaaagcgaagaattctaatgaagagatgataaatataaagaaagagattgttgattttcatggagaaatggttttgttgatgaattatagtgctcttaactatacaggattggcaaagattctcaaaaagtatgacaaaagaaccggtgctttaatccgtttaccatttatccaaaaggttttgcaagaacctttcttcacaactgacctactcaacacatttgtgaaagagtgcgaggctatgctggaccgcctctttccgtctaacaaaagtcggaatctggatgaagaaggagagccgacaacttctggaatggtcaagacaggaacggacgattctgaacttcttagagtaccaaaagaactgtctgagattgagtacatggagagcttgtatatgaagagcactgtgtcggcattaaaagtattaaaggaaatccgcagtggtagctcaacagttagcgtcttctcgttgccaccgttaccggcaagtggattagaagatgattcatggaagaagaaagttggtgtccttgaacaagtagcgaaatgaattatgagtattattatttttaaatctctctttttttttgtactttctttaaatagtacaagtaattgtatacgcttacagctgtaaaagatgaatcaaataaaacatagaagtgtgatcatctttcaacatttaaacttggttgcgtgtactttttcttttgctgcatatcatgtatgaaaaatcttctgtaagactgtaacaccactttcaagcagagagaacaatgaaatacatacgccatttcc

SEQ ID NO: 106309 - protein, 287 aa, Arabidopsis thaliana
  peptide (1)..(287): Ceres Seq. ID no. 13619201
  misc_feature (1)..(165): Pfam Name: SPX domain Pfam Description: SPX domain
  misc_feature (1)..(287): Homolog of NCBI NO: 15225770 NR Description: expressed protein [Arabidopsis thaliana]
  misc_feature (127)..(287): Homolog of NCBI NO: 26452101 NR Description: unknown protein [Arabidopsis thaliana]
  misc_feature (1)..(226): Homolog of NCBI NO: 21592813 NR Description: ids4-like protein [Arabidopsis thaliana]
  misc_feature (1)..(226): Homolog of NCBI NO: 15241275 NR Description: ids4-related protein [Arabidopsis thaliana] AT5g20150/F5O24_40 [Arabidopsis thaliana]
  misc_feature (66)..(271): Homolog of NCBI NO: 16506648 NR Description: IDS-4-like protein [Castanea sativa]
  misc_feature (1)..(272): Homolog of NCBI NO: 37533962 NR Description: hypothetical protein [Oryza sativa (japonica group)] >gi|15451632|gb|AAK98756.1| Hypothetical protein [Oryza >gi|31431851|gb|AAP53570.1| hypothetical protein [Oryza sativa
  misc_feature (26)..(192): Homolog of NCBI NO: 31415907 NR Description: putative SPX domain containing protein [Oryza
  misc_feature (233)..(275): Homolog of NCBI NO: 31415907 NR Description: putative SPX domain containing protein [Oryza
  misc_feature (1)..(262): Homolog of NCBI NO: 34897330 NR Description: putative signal transduction protein [Oryza >gi|18855067|gb|AAL79759.1| putative signal transduction protein
  misc_feature (70)..(191): Homolog of NCBI NO: 15225414 NR Description: hypothetical protein [Arabidopsis thaliana]
MKFGKSLSNQIEETLPEWRDKFLSYKELKKKLKLMEPRSVENRPNKRSRSDSNSVDTDPTVGMTKEELDFISLLEDELEKFNSFFVEQEEEYIIRLKELKDQVAKAKNSNEEMINIKKEIVDFHGEMVLLMNYSALNYTGLAKILKKYDKRTGALIRLPFIQKVLQEPFFTTDLLNTFVKECEAMLDRLFPSNKSRNLDEEGEPTTSGMVKTGTDDSELLRVPKELSEIEYMESLYMKSTVSALKVLKEIRSGSSTVSVFSLPPLPASGLEDDSWKKKVGVLEQVAK

SEQ ID NO: 106310 - protein, 253 aa, Arabidopsis thaliana
  peptide (1)..(253): Ceres Seq. ID no. 13619202
  misc_feature (1)..(131): Pfam Name: SPX domain Pfam Description: SPX domain
  misc_feature (1)..(253): Homolog of NCBI NO: 15225770 NR Description: expressed protein [Arabidopsis thaliana]
  misc_feature (93)..(253): Homolog of NCBI NO: 26452101 NR Description: unknown protein [Arabidopsis thaliana]
  misc_feature (1)..(192): Homolog of NCBI NO: 21592813 NR Description: ids4-like protein [Arabidopsis thaliana]
  misc_feature (1)..(192): Homolog of NCBI NO: 15241275 NR Description: ids4-related protein [Arabidopsis thaliana] AT5g20150/F5O24_40 [Arabidopsis thaliana]
  misc_feature (32)..(237): Homolog of NCBI NO: 16506648 NR Description: IDS-4-like protein [Castanea sativa]
  misc_feature (1)..(238): Homolog of NCBI NO: 37533962 NR Description: hypothetical protein [Oryza sativa (japonica group)] >gi|15451632|gb|AAK98756.1| Hypothetical protein [Oryza >gi|31431851|gb|AAP53570.1| hypothetical protein [Oryza sativa
  misc_feature (1)..(158): Homolog of NCBI NO: 31415907 NR Description: putative SPX domain containing protein [Oryza
  misc_feature (199)..(241): Homolog of NCBI NO: 31415907 NR Description: putative SPX domain containing protein [Oryza
  misc_feature (1)..(228): Homolog of NCBI NO: 34897330 NR Description: putative signal transduction protein [Oryza >gi|18855067|gb|AAL79759.1| putative signal transduction protein
  misc_feature (36)..(157): Homolog of NCBI NO: 15225414 NR Description: hypothetical protein [Arabidopsis thaliana]
MEPRSVENRPNKRSRSDSNSVDTDPTVGMTKEELDFISLLEDELEKFNSFFVEQEEEYIIRLKELKDQVAKAKNSNEEMINIKKEIVDFHGEMVLLMNYSALNYTGLAKILKKYDKRTGALIRLPFIQKVLQEPFFTTDLLNTFVKECEAMLDRLFPSNKSRNLDEEGEPTTSGMVKTGTDDSELLRVPKELSEIEYMESLYMKSTVSALKVLKEIRSGSSTVSVFSLPPLPASGLEDDSWKKKVGVLEQVAK

SEQ ID NO: 106311 - protein, 225 aa, Arabidopsis thaliana
  peptide (1)..(225): Ceres Seq. ID no. 13619203
  misc_feature (1)..(103): Pfam Name: SPX domain Pfam Description: SPX domain
  misc_feature (1)..(225): Homolog of NCBI NO: 15225770 NR Description: expressed protein [Arabidopsis thaliana]
  misc_feature (65)..(225): Homolog of NCBI NO: 26452101 NR Description: unknown protein [Arabidopsis thaliana]
  misc_feature (1)..(164): Homolog of NCBI NO: 21592813 NR Description: ids4-like protein [Arabidopsis thaliana]
  misc_feature (1)..(164): Homolog of NCBI NO: 15241275 NR Description: ids4-related protein [Arabidopsis thaliana] AT5g20150/F5O24_40 [Arabidopsis thaliana]
  misc_feature (4)..(209): Homolog of NCBI NO: 16506648 NR Description: IDS-4-like protein [Castanea sativa]
  misc_feature (1)..(210): Homolog of NCBI NO: 37533962 NR Description: hypothetical protein [Oryza sativa (japonica group)] >gi|15451632|gb|AAK98756.1| Hypothetical protein [Oryza >gi|31431851|gb|AAP53570.1| hypothetical protein [Oryza sativa
  misc_feature (1)..(130): Homolog of NCBI NO: 31415907 NR Description: putative SPX domain containing protein [Oryza
  misc_feature (171)..(213): Homolog of NCBI NO: 31415907 NR Description: putative SPX domain containing protein [Oryza
  misc_feature (1)..(200): Homolog of NCBI NO: 34897330 NR Description: putative signal transduction protein [Oryza >gi|18855067|gb|AAL79759.1| putative signal transduction protein
  misc_feature (8)..(129): Homolog of NCBI NO: 15225414 NR Description: hypothetical protein [Arabidopsis thaliana]
MTKEELDFISLLEDELEKFNSFFVEQEEEYIIRLKELKDQVAKAKNSNEEMINIKKEIVDFHGEMVLLMNYSALNYTGLAKILKKYDKRTGALIRLPFIQKVLQEPFFTTDLLNTFVKECEAMLDRLFPSNKSRNLDEEGEPTTSGMVKTGTDDSELLRVPKELSEIEYMESLYMKSTVSALKVLKEIRSGSSTVSVFSLPPLPASGLEDDSWKKKVGVLEQVAK

SEQ ID NO: 106312 - DNA, 1561 bp, Arabidopsis thaliana
  misc_feature (1)..(1561): Ceres Seq. ID no. 13619208
  misc_feature: MA Experiment ID: 20000171 Result: Down-regulated in Transcription
  misc_feature: MA Experiment 20000171 PARAMETER Experiment Name: At_42deg_Heat_P Parameter: Age (day) Value: 14
  misc_feature: MA Experiment 20000171 PARAMETER Experiment Name: At_42deg_Heat_P Parameter: Organism Value: A. thaliana
  misc_feature: MA Experiment 20000171 PARAMETER Experiment Name: At_42deg_Heat_P Parameter: Plant Line Value: WS
  misc_feature: MA Experiment 20000171 PARAMETER Experiment Name: At_42deg_Heat_P Parameter: Temperature (deg C) Value: 42 vs. 22
  misc_feature: MA Experiment 20000171 PARAMETER Experiment Name: At_42deg_Heat_P Parameter: Timepoint (hr) Value: 1
  misc_feature: MA Experiment 20000171 PARAMETER Experiment Name: At_42deg_Heat_P Parameter: Tissue Value: Aerial
  misc_feature: MA Experiment ID: 20000173 Result: Down-regulated in Transcription
  misc_feature: MA Experiment 20000173 PARAMETER Experiment Name: At_42deg_Heat_P Parameter: Age (day) Value: 14
  misc_feature: MA Experiment 20000173 PARAMETER Experiment Name: At_42deg_Heat_P Parameter: Organism Value: A. thaliana
  misc_feature: MA Experiment 20000173 PARAMETER Experiment Name: At_42deg_Heat_P Parameter: Plant Line Value: WS
  misc_feature: MA Experiment 20000173 PARAMETER Experiment Name: At_42deg_Heat_P Parameter: Temperature (deg C) Value: 42 vs. 22
  misc_feature: MA Experiment 20000173 PARAMETER Experiment Name: At_42deg_Heat_P Parameter: Timepoint (hr) Value: 6
  misc_feature: MA Experiment 20000173 PARAMETER Experiment Name: At_42deg_Heat_P Parameter: Tissue Value: Aerial
  misc_feature: MA Experiment ID: 20000438 Result: Up-regulated in Transcription
  misc_feature: MA Experiment 20000438 PARAMETER Experiment Name: At_Shoots__P Parameter: Age (day) Value: 14
  misc_feature: MA Experiment 20000438 PARAMETER Experiment Name: At_Shoots__P Parameter: Tissue Value: Shoots vs. Whole Plant
  misc_feature: MA Experiment ID: 20000496 Result: Down-regulated in Transcription
  misc_feature: MA Experiment 20000496 PARAMETER Experiment Name: At_Guard_Cells_P Parameter: Harvest Date Value: 7/19/2002
  misc_feature: MA Experiment 20000496 PARAMETER Experiment Name: At_Guard_Cells_P Parameter: Organism Value: Canola
  misc_feature: MA Experiment 20000496 PARAMETER Experiment Name: At_Guard_Cells_P Parameter: Tissue Value: Guard Cells vs. Leaves
cttagcacacacacagagaccttaatccatttctctctctccctctctctcattaagaaaaaaaaagagaatcagagaagaaataaaaagaaagcaactcaaatctttaacctacaaaaacccagatttgttaactctctcattcttcttcttcttctcaacaacatttgatctttttgattctcaaagtattctcaaagtaaaagagaaacacactttgttgtctcaacaagcaagcaaacaaaacccatcttgggaaaatctcatttctttcccaagaaaatctcattttttctgttacaattttttcctaagaaaatgagagatttggtgtcatgtttcagtgagaactcaataaacgtgacacatcccttatcaatatcatcttcatcatcatcatgttcaaaatacagtaccaacaatgtttgtatctcaccatctctcataccatcaatacaaacctccattacaagcatctacagaatcactttatcgaaacatctcatcatcaaagtcacatggtgcaatccacacaacaacaatggcttaagcatctctgttgcatccgcagatcaaaacccttcaacaactctcaaactcaacacttcttctcgtttcttccgtaagaagaaaggtaacaaatcggttgattccgatctcggtaaaatcgaggttttttgggatctttcttcagctaaatatgattctaacttgtgtggtcctgaacctatcaatggcttctacgttatcgtcctcgttgatggtcaaatgggtcttcttcttggagattcatctgaagaaactctccgtaaaaaaggtttctccggcgatatcggtttcgatttctctcttgtttctcgacaagaacatttcacagggaacaatactttttactcgactaaagtaagattcgttgagacaggagattcacatgaaatcgtcatcagatgtaataaagaaacagagggtctaaaacagagcaatcattaccctgttctctctgtttgtattgataagaagacggtgataaaagtgaagaggcttcaatggaatttcagagggaatcaaacgattttcttggatggattgcttgtggatctgatgtgggatgttcatgattggttctttagtaatcaaggagcttgtggaagagctgtgttcatgtttaggacaaggaatggtttagacagcagcaggctttggttagaagagaagattgttaagaaagatcaacaagacaagcttgacttctctctcttcatttacgcctgtaagacttgaaaaacattataaaaaaaaaactcaatttttttttgagatttacaagaaaaaggttattgattgattgattctgtttttaatatttgagatatttttatggggttttttttttttttgaacttacaatttcttcttgggaggagtatagattttattttctttcttacattcttttttttttttggttggagttgtgatttaatattgagagattccaaaagatgtgaatttcttcataggagttgttgttttatttttattttaaatttggttttcttac

SEQ ID NO: 106313 - protein, 320 aa, Arabidopsis thaliana
  peptide (1)..(320): Ceres Seq. ID no. 13619209
  misc_feature (43)..(320): Pfam Name: Plant protein of unknown function (DUF868) Pfam Description: Plant protein of unknown function (DUF868)
  misc_feature (1)..(320): Homolog of NCBI NO: 15226242 NR Description: expressed protein [Arabidopsis thaliana]
  misc_feature (1)..(320): Homolog of NCBI NO: 21805715 NR Description: hypothetical protein [Arabidopsis thaliana]
  misc_feature (47)..(319): Homolog of NCBI NO: 30102999 NR Description: hypothetical protein [Oryza sativa (japonica
  misc_feature (26)..(320): Homolog of NCBI NO: 34394221 NR Description: unknown protein [Oryza sativa (japonica
  misc_feature (27)..(319): Homolog of NCBI NO: 18397034 NR Description: expressed protein [Arabidopsis thaliana]
  misc_feature (27)..(319): Homolog of NCBI NO: 21593854 NR Description: unknown [Arabidopsis thaliana]
  misc_feature (47)..(320): Homolog of NCBI NO: 15241702 NR Description: expressed protein [Arabidopsis thaliana] AT5g28150/T24G3_80 [Arabidopsis thaliana]
  misc_feature (20)..(270): Homolog of NCBI NO: 18404143 NR Description: expressed protein [Arabidopsis thaliana]
  misc_feature (20)..(270): Homolog of NCBI NO: 21536715 NR Description: unknown [Arabidopsis thaliana]
  misc_feature (19)..(319): Homolog of NCBI NO: 15235452 NR Description: expressed protein [Arabidopsis thaliana]
MRDLVSCFSENSINVTHPLSISSSSSSCSKYSTNNVCISPSLIPSIQTSITSIYRITLSKHLIIKVTWCNPHNNNGLSISVASADQNPSTTLKLNTSSRFFRKKKGNKSVDSDLGKIEVFWDLSSAKYDSNLCGPEPINGFYVIVLVDGQMGLLLGDSSEETLRKKGFSGDIGFDFSLVSRQEHFTGNNTFYSTKVRFVETGDSHEIVIRCNKETEGLKQSNHYPVLSVCIDKKTVIKVKRLQWNFRGNQTIFLDGLLVDLMWDVHDWFFSNQGACGRAVFMFRTRNGLDSSRLWLEEKIVKKDQQDKLDFSLFIYACKT

SEQ ID NO: 106314 - protein, 170 aa, Arabidopsis thaliana
  peptide (1)..(170): Ceres Seq. ID no. 13619210
  misc_feature (1)..(170): Pfam Name: Plant protein of unknown function (DUF868) Pfam Description: Plant protein of unknown function (DUF868)
  misc_feature (1)..(170): Homolog of NCBI NO: 15226242 NR Description: expressed protein [Arabidopsis thaliana]
  misc_feature (1)..(170): Homolog of NCBI NO: 21805715 NR Description: hypothetical protein [Arabidopsis thaliana]
  misc_feature (1)..(169): Homolog of NCBI NO: 30102999 NR Description: hypothetical protein [Oryza sativa (japonica
  misc_feature (1)..(170): Homolog of NCBI NO: 34394221 NR Description: unknown protein [Oryza sativa (japonica
  misc_feature (1)..(169): Homolog of NCBI NO: 18397034 NR Description: expressed protein [Arabidopsis thaliana]
  misc_feature (1)..(169): Homolog of NCBI NO: 21593854 NR Description: unknown [Arabidopsis thaliana]
  misc_feature (1)..(170): Homolog of NCBI NO: 15241702 NR Description: expressed protein [Arabidopsis thaliana] AT5g28150/T24G3_80 [Arabidopsis thaliana]
  misc_feature (1)..(120): Homolog of NCBI NO: 18404143 NR Description: expressed protein [Arabidopsis thaliana]
  misc_feature (1)..(120): Homolog of NCBI NO: 21536715 NR Description: unknown [Arabidopsis thaliana]
  misc_feature (1)..(169): Homolog of NCBI NO: 15235452 NR Description: expressed protein [Arabidopsis thaliana]
MGLLLGDSSEETLRKKGFSGDIGFDFSLVSRQEHFTGNNTFYSTKVRFVETGDSHEIVIRCNKETEGLKQSNHYPVLSVCIDKKTVIKVKRLQWNFRGNQTIFLDGLLVDLMWDVHDWFFSNQGACGRAVFMFRTRNGLDSSRLWLEEKIVKKDQQDKLDFSLFIYACKT

SEQ ID NO: 106315 - DNA, 2655 bp, Arabidopsis thaliana
  misc_feature (1)..(2655): Ceres Seq. ID no. 13619219
  misc_feature: MA Experiment ID: 20000315 Result: Down-regulated in Transcription
  misc_feature: MA Experiment 20000315 PARAMETER Experiment Name: At_14day_Shoots-Roots_Sub_P Parameter: Age (day) Value: 14
  misc_feature: MA Experiment 20000315 PARAMETER Experiment Name: At_14day_Shoots-Roots_Sub_P Parameter: Organism Value: A. thaliana
  misc_feature: MA Experiment 20000315 PARAMETER Experiment Name: At_14day_Shoots-Roots_Sub_P Parameter: Plant Line Value: WS
  misc_feature: MA Experiment 20000315 PARAMETER Experiment Name: At_14day_Shoots-Roots_Sub_P Parameter: Tissue Value: Shoots vs. Whole Plant
  misc_feature: MA Experiment ID: 20000355 Result: Up-regulated in Transcription
  misc_feature: MA Experiment 20000355 PARAMETER Experiment Name: At_Siliques_Sub_P Parameter: Age (day) Value: 21
  misc_feature: MA Experiment 20000355 PARAMETER Experiment Name: At_Siliques_Sub_P Parameter: Organism Value: A. thaliana
  misc_feature: MA Experiment 20000355 PARAMETER Experiment Name: At_Siliques_Sub_P Parameter: Plant Line Value: WS
  misc_feature: MA Experiment 20000355 PARAMETER Experiment Name: At_Siliques_Sub_P Parameter: Tissue Value: Less Than 5mm Siliques vs. Whole Plant
  misc_feature: MA Experiment ID: 20000440 Result: Up-regulated in Transcription
  misc_feature: MA Experiment 20000440 PARAMETER Experiment Name: At_Closed-Flower__Sub_P Parameter: Tissue Value: Closed Flower vs. Whole Plant
atgaaaatacattcttctgatcattcatggcttttactagccgttctcgtgattctcctctccttctctggagctctctcaataacttatgatggaacgtctttgatcatcaatggaaatagagaactcctttactctggctccatacattaccctcgtagcactcctgaaatgtggccaaacatcatcaagagagcgaaacaaggcggtttgaacacgattcagacatacgttttttggaacgttcatgagcctgagcagggaaagttcaatttttcgggtagagccgacttggtgaagttcataaaattaattgagaagaatggtttgtatgtaaccttgaggcttggaccttttattcaagctgaatggactcatggaggacttccttactggctgagggaagttcccgggatcttcttccgtaccgataatgaacctttcaaggaacatacagagagatatgttaaggtggtacttgacatgatgaaggaggagaagctttttgcttcacaaggaggccccattatattaggacagattgagaatgagtatagtgcggttcaacgagcatataaagaagatggattaaactacattaagtgggcatctaaactggtacactcgatggatttggggatcccatgggttatgtgtaagcaaaatgatgctcctgatcctatgatcaacgcttgtaacggaagacattgcggtgatacattccctggtccaaacaaagacaacaagccatctttatggacagagaactggactactcagttccgcgtttttggcgatcccccagcacaaagatctgtagaagatatagcatattctgttgcccggtttttctccaagaatggaacccatgttaactactatatgtatcacggaggtactaactttggaagaacctctgcacattatgtgacaactcgttactacgacgatgcacctcttgatgaattcggactggaaagggagcctaagtacggtcatctaaagcatcttcacaacgcccttaacttgtgcaagaaggcacttctctggggccagcctcgagtcgagaagcctagcaatgaaacagagattcgatactacgagcagcctggaactaaagtttgtgcagcatttttggctaacaataacacagaagctgcagaaaaaatcaaattcagaggcaaggaatatcttatcccgcaccgctccatcagtattctccctgactgcaaaaccgttgtttataacaccggggagatcatctctcatcatacttcaagaaacttcatgaaatcgaaaaaagcgaataagaactttgatttcaaagtgttcaccgagtcagtgccaagtaagatcaagggtgactcttttatacccgttgaactctacggcttgaccaaagatgagtctgattacggatggtacacaacaagctttaaaatagatgacaatgacctctctaagaagaaaggaggtaagcctaatctgaggattgctagtcttggccacgcgttgcatgtatggctcaatggagaataccttggaaacggacatggtagccatgaagagaagagtttcgtctttcagaagccagttactctaaaagaaggagagaaccacttaaccatgctaggtgttttgacgggatttccggatagtggatcttatatggagcatagatacacaggtccacgtagtgtttccatcttaggtttgggctctggaacacttgatctcactgaagaaaacaaatggggaaacaaggtgggtatggaaggcgaaaggcttggtatccacgccgaagaaggattgaagaaggttaaatgggagaaagcttcagggaaagaaccgggaatgacatggtaccagacatacttcgatgcaccagagagccaaagtgcagcagcaattaggatgaacggaatggggaaaggtttgatttgggtgaacggagaaggtgttggtcgatattggatgtcgtttctatcgcctttaggacagcctacgcaaatcgagtatcacatccctaggtctttcttgaagcccaagaaaaatcttctggttatatttgaggaagaaccaaatgtgaagccagagcttatcgactttgtcatcgtcaatagagatacggtgtgttcttatattggagaaaactacactcctagtgtccgtcactggaccaggaagaatgaccaagttcaggccatcactgatgacgtgcatctcacggctaatctcaaatgttccggcacaaagaaaatctccgctgtggaattcgcaagctttgggaatcctaatgggacttgtggcaacttcactcttggaagttgtaatgctcctgtttctaagaaagtcgttgaaaagtactgtttgggtaaagcagagtgtgtgattccggtgaacaagagtacgttcgagcaagacaaaaaggattcatgtcccaaagtcgagaagaagcttgcggtacaagtcaagtgtggccgtgacaagaagaactaaggatatatattttatttgcttcgctgaacggttttatacctaatgtttttgtagatactaaaattatgcattgattttttgttccatttttgaatttattaactaaaatgtttatcatacagatatatacgcgtgattgtatatagtgaagtttct

SEQ ID NO: 106316 - protein, 832 aa, Arabidopsis thaliana
  peptide (1)..(832): Ceres Seq. ID no. 13619220
  misc_feature (746)..(826): Pfam Name: Galactose binding lectin domain Pfam Description: Galactose binding lectin domain
  misc_feature (58)..(831): Homolog of NCBI NO: 22329242 NR Description: glycosyl hydrolase family 35 (beta-galactosidase)
  misc_feature (89)..(831): Homolog of NCBI NO: 7484825 NR Description: beta-galactosidase homolog F20M13.150 - thaliana >gi|4467146|emb|CAB37515.1| galactosidase like protein thaliana] >gi|7270842|emb|CAB80523.1| galactosidase like protein
  misc_feature (1)..(710): Homolog of NCBI NO: 10862896 NR Description: putative beta-galactosidase [Nicotiana tabacum]
  misc_feature (11)..(826): Homolog of NCBI NO: 30699255 NR Description: glycosyl hydrolase family 35 (beta-galactosidase)
  misc_feature (10)..(661): Homolog of NCBI NO: 18419821 NR Description: glycosyl hydrolase family 35 (beta-galactosidase)
  misc_feature (615)..(826): Homolog of NCBI NO: 18419821 NR Description: glycosyl hydrolase family 35 (beta-galactosidase)
  misc_feature (12)..(827): Homolog of NCBI NO: 34913072 NR Description: putative beta-galactosidase [Oryza sativa
  misc_feature (13)..(661): Homolog of NCBI NO: 7682680 NR Description: beta galactosidase [Vigna radiata]
  misc_feature (1)..(661): Homolog of NCBI NO: 15241969 NR Description: glycosyl hydrolase family 35 (beta-galactosidase)
  misc_feature (1)..(661): Homolog of NCBI NO: 15451018 NR Description: beta-galactosidase [Arabidopsis thaliana]
MKIHSSDHSWLLLAVLVILLSFSGALSITYDGTSLIINGNRELLYSGSIHYPRSTPEMWPNIIKRAKQGGLNTIQTYVFWNVHEPEQGKFNFSGRADLVKFIKLIEKNGLYVTLRLGPFIQAEWTHGGLPYWLREVPGIFFRTDNEPFKEHTERYVKVVLDMMKEEKLFASQGGPIILGQIENEYSAVQRAYKEDGLNYIKWASKLVHSMDLGIPWVMCKQNDAPDPMINACNGRHCGDTFPGPNKDNKPSLWTENWTTQFRVFGDPPAQRSVEDIAYSVARFFSKNGTHVNYYMYHGGTNFGRTSAHYVTTRYYDDAPLDEFGLEREPKYGHLKHLHNALNLCKKALLWGQPRVEKPSNETEIRYYEQPGTKVCAAFLANNNTEAAEKIKFRGKEYLIPHRSISILPDCKTVVYNTGEIISHHTSRNFMKSKKANKNFDFKVFTESVPSKIKGDSFIPVELYGLTKDESDYGWYTTSFKIDDNDLSKKKGGKPNLRIASLGHALHVWLNGEYLGNGHGSHEEKSFVFQKPVTLKEGENHLTMLGVLTGFPDSGSYMEHRYTGPRSVSILGLGSGTLDLTEENKWGNKVGMEGERLGIHAEEGLKKVKWEKASGKEPGMTWYQTYFDAPESQSAAAIRMNGMGKGLIWVNGEGVGRYWMSFLSPLGQPTQIEYHIPRSFLKPKKNLLVIFEEEPNVKPELIDFVIVNRDTVCSYIGENYTPSVRHWTRKNDQVQAITDDVHLTANLKCSGTKKISAVEFASFGNPNGTCGNFTLGSCNAPVSKKVVEKYCLGKAECVIPVNKSTFEQDKKDSCPKVEKKLAVQVKCGRDKKN

SEQ ID NO: 106317 - protein, 775 aa, Arabidopsis thaliana; identical to SEQ ID NO: 84187
  peptide (1)..(775): Ceres Seq. ID no. 13619221
  misc_feature (689)..(769): Pfam Name: Galactose binding lectin domain Pfam Description: Galactose binding lectin domain
  misc_feature (1)..(774): Homolog of NCBI NO: 22329242 NR Description: glycosyl hydrolase family 35 (beta-galactosidase)
  misc_feature (32)..(774): Homolog of NCBI NO: 7484825 NR Description: beta-galactosidase homolog F20M13.150 - thaliana >gi|4467146|emb|CAB37515.1| galactosidase like protein thaliana] >gi|7270842|emb|CAB80523.1| galactosidase like protein
  misc_feature (1)..(653): Homolog of NCBI NO: 10862896 NR Description: putative beta-galactosidase [Nicotiana tabacum]
  misc_feature (1)..(769): Homolog of NCBI NO: 30699255 NR Description: glycosyl hydrolase family 35 (beta-galactosidase)
  misc_feature (1)..(604): Homolog of NCBI NO: 18419821 NR Description: glycosyl hydrolase family 35 (beta-galactosidase)
  misc_feature (558)..(769): Homolog of NCBI NO: 18419821 NR Description: glycosyl hydrolase family 35 (beta-galactosidase)
  misc_feature (1)..(770): Homolog of NCBI NO: 34913072 NR Description: putative beta-galactosidase [Oryza sativa
  misc_feature (1)..(604): Homolog of NCBI NO: 7682680 NR Description: beta galactosidase [Vigna radiata]
  misc_feature (1)..(604): Homolog of NCBI NO: 15241969 NR Description: glycosyl hydrolase family 35 (beta-galactosidase)
  misc_feature (1)..(604): Homolog of NCBI NO: 15451018 NR Description: beta-galactosidase [Arabidopsis thaliana]

SEQ ID NO: 106318 - protein, 671 aa, Arabidopsis thaliana
  peptide (1)..(671): Ceres Seq. ID no. 13619222
  misc_feature (585)..(665): Pfam Name: Galactose binding lectin domain Pfam Description: Galactose binding lectin domain
  misc_feature (1)..(670): Homolog of NCBI NO: 22329242 NR Description: glycosyl hydrolase family 35 (beta-galactosidase)
  misc_feature (1)..(670): Homolog of NCBI NO: 7484825 NR Description: beta-galactosidase homolog F20M13.150 - thaliana >gi|4467146|emb|CAB37515.1| galactosidase like protein thaliana] >gi|7270842|emb|CAB80523.1| galactosidase like protein
  misc_feature (1)..(549): Homolog of NCBI NO: 10862896 NR Description: putative beta-galactosidase [Nicotiana tabacum]
  misc_feature (1)..(665): Homolog of NCBI NO: 30699255 NR Description: glycosyl hydrolase family 35 (beta-galactosidase)
  misc_feature (1)..(500): Homolog of NCBI NO: 18419821 NR Description: glycosyl hydrolase family 35 (beta-galactosidase)
  misc_feature (454)..(665): Homolog of NCBI NO: 18419821 NR Description: glycosyl hydrolase family 35 (beta-galactosidase)
  misc_feature (1)..(666): Homolog of NCBI NO: 34913072 NR Description: putative beta-galactosidase [Oryza sativa
  misc_feature (1)..(500): Homolog of NCBI NO: 7682680 NR Description: beta galactosidase [Vigna radiata]
  misc_feature (1)..(500): Homolog of NCBI NO: 15241969 NR Description: glycosyl hydrolase family 35 (beta-galactosidase)
  misc_feature (1)..(500): Homolog of NCBI NO: 15451018 NR Description: beta-galactosidase [Arabidopsis thaliana]
MMKEEKLFASQGGPIILGQIENEYSAVQRAYKEDGLNYIKWASKLVHSMDLGIPWVMCKQNDAPDPMINACNGRHCGDTFPGPNKDNKPSLWTENWTTQFRVFGDPPAQRSVEDIAYSVARFFSKNGTHVNYYMYHGGTNFGRTSAHYVTTRYYDDAPLDEFGLEREPKYGHLKHLHNALNLCKKALLWGQPRVEKPSNETEIRYYEQPGTKVCAAFLANNNTEAAEKIKFRGKEYLIPHRSISILPDCKTVVYNTGEIISHHTSRNFMKSKKANKNFDFKVFTESVPSKIKGDSFIPVELYGLTKDESDYGWYTTSFKIDDNDLSKKKGGKPNLRIASLGHALHVWLNGEYLGNGHGSHEEKSFVFQKPVTLKEGENHLTMLGVLTGFPDSGSYMEHRYTGPRSVSILGLGSGTLDLTEENKWGNKVGMEGERLGIHAEEGLKKVKWEKASGKEPGMTWYQTYFDAPESQSAAAIRMNGMGKGLIWVNGEGVGRYWMSFLSPLGQPTQIEYHIPRSFLKPKKNLLVIFEEEPNVKPELIDFVIVNRDTVCSYIGENYTPSVRHWTRKNDQVQAITDDVHLTANLKCSGTKKISAVEFASFGNPNGTCGNFTLGSCNAPVSKKVVEKYCLGKAECVIPVNKSTFEQDKKDSCPKVEKKLAVQVKCGRDKKN

SEQ ID NO: 106319 - DNA, 1785 bp, Arabidopsis thaliana
  misc_feature (1)..(1785): Ceres Seq. ID no. 13619227
  misc_feature: MA Experiment ID: 108462 Result: Up-regulated in Transcription
  misc_feature: MA Experiment 108462 PARAMETER Experiment Name: At_Germinating_Seeds_cDNA_P Parameter: Age (day) Value: 2 vs. 0
  misc_feature: MA Experiment 108462 PARAMETER Experiment Name: At_Germinating_Seeds_cDNA_P Parameter: Tissue Value: Germinating Seeds
  misc_feature: MA Experiment ID: 108464 Result: Up-regulated in Transcription
  misc_feature: MA Experiment 108464 PARAMETER Experiment Name: At_Germinating_Seeds_cDNA_P Parameter: Age (day) Value: 4 vs. 0
  misc_feature: MA Experiment 108464 PARAMETER Experiment Name: At_Germinating_Seeds_cDNA_P Parameter: Tissue Value: Germinating Seeds
  misc_feature: MA Experiment ID: 20000185 Result: Up-regulated in Transcription
  misc_feature: MA Experiment 20000185 PARAMETER Experiment Name: At_Roots__P Parameter: Age (day) Value: 7 vs. 21
  misc_feature: MA Experiment 20000185 PARAMETER Experiment Name: At_Roots__P Parameter: Organism Value: A. thaliana
  misc_feature: MA Experiment 20000185 PARAMETER Experiment Name: At_Roots__P Parameter: Tissue Value: Roots vs. Whole Plant
  misc_feature: MA Experiment ID: 20000439 Result: Up-regulated in Transcription
  misc_feature: MA Experiment 20000439 PARAMETER Experiment Name: At_Roots__P Parameter: Age (day) Value: 14 vs. 21
  misc_feature: MA Experiment 20000439 PARAMETER Experiment Name: At_Roots__P Parameter: Organism Value: A. thaliana
  misc_feature: MA Experiment 20000439 PARAMETER Experiment Name: At_Roots__P Parameter: Tissue Value: Roots vs. Whole Plant
  misc_feature: MA Experiment ID: 20000496 Result: Up-regulated in Transcription
  misc_feature: MA Experiment 20000496 PARAMETER Experiment Name: At_Guard_Cells_P Parameter: Harvest Date Value: 7/19/2002
  misc_feature: MA Experiment 20000496 PARAMETER Experiment Name: At_Guard_Cells_P Parameter: Organism Value: Canola
  misc_feature: MA Experiment 20000496 PARAMETER Experiment Name: At_Guard_Cells_P Parameter: Tissue Value: Guard Cells vs. Leaves
  misc_feature: MA Experiment ID: 20000794 Result: Up-regulated in Transcription
  misc_feature: MA Experiment 20000794 PARAMETER Experiment Name: At_Petals_P Parameter: Age (day) Value: 23-25 days
  misc_feature: MA Experiment 20000794 PARAMETER Experiment Name: At_Petals_P Parameter: Plant Line Value: WS
  misc_feature: MA Experiment 20000794 PARAMETER Experiment Name: At_Petals_P Parameter: Tissue Value: Petals vs. Whole plant
  misc_feature: MA Experiment ID: 20001451 Result: Down-regulated in Transcription
  misc_feature: MA Experiment 20001451 PARAMETER Experiment Name: At_Far-red-induction_P Parameter: Age (day) Value: 7
  misc_feature: MA Experiment 20001451 PARAMETER Experiment Name: At_Far-red-induction_P Parameter: Light Value: Far-red vs. White
  misc_feature: MA Experiment 20001451 PARAMETER Experiment Name: At_Far-red-induction_P Parameter: Organism Value: A. thaliana
  misc_feature: MA Experiment 20001451 PARAMETER Experiment Name: At_Far-red-induction_P Parameter: Plant Line Value: Columbia
  misc_feature: MA Experiment 20001451 PARAMETER Experiment Name: At_Far-red-induction_P Parameter: Timepoint (hr) Value: 24
  misc_feature: MA Experiment 20001451 PARAMETER Experiment Name: At_Far-red-induction_P Parameter: Tissue Value: Whole Plant
  misc_feature: MA Experiment ID: 20001905 Result: Up-regulated in Transcription
  misc_feature: MA Experiment 20001905 PARAMETER Experiment Name: At_Drought_Reproduction_P Parameter: Age (day) Value: 40
  misc_feature: MA Experiment 20001905 PARAMETER Experiment Name: At_Drought_Reproduction_P Parameter: Organism Value: A. thaliana
  misc_feature: MA Experiment 20001905 PARAMETER Experiment Name: At_Drought_Reproduction_P Parameter: Plant Line Value: WS
  misc_feature: MA Experiment 20001905 PARAMETER Experiment Name: At_Drought_Reproduction_P Parameter: Timepoint (day) Value: 10
  misc_feature: MA Experiment 20001905 PARAMETER Experiment Name: At_Drought_Reproduction_P Parameter: Tissue Value: Rosettes
  misc_feature: MA Experiment 20001905 PARAMETER Experiment Name: At_Drought_Reproduction_P Parameter: Treatment Value: Drought vs. No Drought
atttgctcacctttcgccgattgattttgtacatcacacgcagacgcagcttttagtatttttttcaacaatcgcttttttttttctcgatctccgtgaagctctcgaatctctggttttgagttttggagaatggtgtttttccgcagcgtatcggcctttactaggctgaggtctcgcgtcggccaacaatcttcactcagcaattctgtcagatggattcagatgcagagctctaccgacctggacctgaagtcgcagctgcaagagttaattccggaacagcaggaccgtctgaagaaactgaagtcagaacatgggaaggtccaactgggaaacatcactgttgatatggttattggtggaatgagagggatgactggattgctttgggaaacctcattgcttgacccggaagagggtattcgctttaggggattgtcgattcctgagtgccagaaagtattacctactgcccagtctggagctgaaccattaccggagggtcttttgtggcttctcttaactggaaaggtacctagcaaagagcaagttgaagcactgtcgaaagacttggcgaaccgtgctgctgtgccagattatgtgtacaatgccatcgatgctctgccttccacagctcatccaatgactcaatttgctagcggtgttatggccctccaggtgcaaagtgagtttcaaaaggcatatgagaatggaattcataagtcaaagttctgggagccaacatatgaggattgcctcaacctgattgctcgtgttcctgttgtagctgcatatgtttatcgaaggatgtataagaatggtgattccattccctcagataaatctttggattatggtgcaaatttttcccacatgttgggatttgatgatgaaaaggtgaaagagctcatgaggctttacatcaccatccacagtgatcatgaaggtggaaatgttagtgctcacactggtcacctggttggtagtgcactttcagacccatatctgtcatttgcagctgcattaaatggtttagctgggccactccatggtttggctaatcaggaagttttgctttggatcaaatcagtcgtagaggaatgtggagaagatatatcaaaagaacagttgaaagaatatgtttggaaaacattaaacagtggcaaggttattccgggatatggtcacggtgttctgcgcaatactgatccaagatatgtatgccaaagagaatttgccttgaagcatctacctgacgaccctcttttccagctggtgtcaaagctttatgaagttgtgcctcctgttctcactgagcttggaaaggtgaagaacccgtggccaaatgttgatgctcacagtggggtcttgctgaaccactatggtctaaccgaagcaaggtactacaccgtgctctttggtgtttcaaggagtcttggcatctgctctcagcttatatgggaccgagctcttggacttgcacttgagaggccaaagagtgttaccatggactggcttgaagcccattgtaagaaagcttcatctgcttaagtcaccaccgagtcctgagttgtcgcactctctcgtgtttcaacaaaagtcattctcttccacactggatagctttttttgtttttaccttctattgacagaagaaacatttgttcatgtagaaattgttcctgagaaacacatgcttggtgcaaatttgcatttccgggaaactcgtgataataaataaacagttgtattcagtttgcgtaaaaatcaaacatcaatatc

SEQ ID NO: 106320 - protein, 473 aa, Arabidopsis thaliana; identical to SEQ ID NO: 30072
  peptide (1)..(473): Ceres Seq. ID no. 13619228
  misc_feature (78)..(455): Pfam Name: Citrate synthase Pfam Description: Citrate synthase
  misc_feature (1)..(473): Homolog of NCBI NO: 18406515 NR Description: citrate synthase [Arabidopsis thaliana] Citrate synthase, mitochondrial precursor citrate synthase [Arabidopsis thaliana]
  misc_feature (1)..(473): Homolog of NCBI NO: 21553775 NR Description: citrate synthase [Arabidopsis thaliana]
  misc_feature (1)..(473): Homolog of NCBI NO: 30689693 NR Description: citrate synthase [Arabidopsis thaliana]
  misc_feature (1)..(471): Homolog of NCBI NO: 8928010 NR Description: Citrate synthase, mitochondrial precursor
  misc_feature (1)..(464): Homolog of NCBI NO: 40646744 NR Description: mitochondrial citrate synthase precursor [Citrus
  misc_feature (1)..(471): Homolog of NCBI NO: 1352088 NR Description: Citrate synthase, mitochondrial precursor
  misc_feature (1)..(472): Homolog of NCBI NO: 11066954 NR Description: citrate synthase [Oryza sativa]
  misc_feature (1)..(473): Homolog of NCBI NO: 15982952 NR Description: citrate synthase [Prunus persica]
  misc_feature (1)..(470): Homolog of NCBI NO: 1556429 NR Description: citrate synthase [Nicotiana tabacum]
  misc_feature (1)..(473): Homolog of NCBI NO: 68230 NR Description: citrate (si)-synthase (EC 4.1.3.7) precursor,

SEQ ID NO: 106321 - protein, 442 aa, Arabidopsis thaliana; identical to SEQ ID NO: 30073
  peptide (1)..(442): Ceres Seq. ID no. 13619229
  misc_feature (47)..(424): Pfam Name: Citrate synthase Pfam Description: Citrate synthase
  misc_feature (1)..(442): Homolog of NCBI NO: 18406515 NR Description: citrate synthase [Arabidopsis thaliana] Citrate synthase, mitochondrial precursor citrate synthase [Arabidopsis thaliana]
  misc_feature (1)..(442): Homolog of NCBI NO: 21553775 NR Description: citrate synthase [Arabidopsis thaliana]
  misc_feature (1)..(442): Homolog of NCBI NO: 30689693 NR Description: citrate synthase [Arabidopsis thaliana]
  misc_feature (1)..(440): Homolog of NCBI NO: 8928010 NR Description: Citrate synthase, mitochondrial precursor
  misc_feature (1)..(433): Homolog of NCBI NO: 40646744 NR Description: mitochondrial citrate synthase precursor [Citrus
  misc_feature (1)..(440): Homolog of NCBI NO: 1352088 NR Description: Citrate synthase, mitochondrial precursor
  misc_feature (1)..(441): Homolog of NCBI NO: 11066954 NR Description: citrate synthase [Oryza sativa]
  misc_feature (1)..(442): Homolog of NCBI NO: 15982952 NR Description: citrate synthase [Prunus persica]
  misc_feature (1)..(439): Homolog of NCBI NO: 1556429 NR Description: citrate synthase [Nicotiana tabacum]
  misc_feature (1)..(442): Homolog of NCBI NO: 68230 NR Description: citrate (si)-synthase (EC 4.1.3.7) precursor,

SEQ ID NO: 106322 - protein, 400 aa, Arabidopsis thaliana; identical to SEQ ID NO: 30074
  peptide (1)..(400): Ceres Seq. ID no. 13619230
  misc_feature (5)..(382): Pfam Name: Citrate synthase Pfam Description: Citrate synthase
  misc_feature (1)..(400): Homolog of NCBI NO: 18406515 NR Description: citrate synthase [Arabidopsis thaliana] Citrate synthase, mitochondrial precursor citrate synthase [Arabidopsis thaliana]
  misc_feature (1)..(400): Homolog of NCBI NO: 21553775 NR Description: citrate synthase [Arabidopsis thaliana]
  misc_feature (1)..(400): Homolog of NCBI NO: 30689693 NR Description: citrate synthase [Arabidopsis thaliana]
  misc_feature (1)..(398): Homolog of NCBI NO: 8928010 NR Description: Citrate synthase, mitochondrial precursor
  misc_feature (1)..(391): Homolog of NCBI NO: 40646744 NR Description: mitochondrial citrate synthase precursor [Citrus
  misc_feature (1)..(398): Homolog of NCBI NO: 1352088 NR Description: Citrate synthase, mitochondrial precursor
  misc_feature (1)..(399): Homolog of NCBI NO: 11066954 NR Description: citrate synthase [Oryza sativa]
  misc_feature (1)..(400): Homolog of NCBI NO: 15982952 NR Description: citrate synthase [Prunus persica]
  misc_feature (1)..(397): Homolog of NCBI NO: 1556429 NR Description: citrate synthase [Nicotiana tabacum]
  misc_feature (1)..(400): Homolog of NCBI NO: 68230 NR Description: citrate (si)-synthase (EC 4.1.3.7) precursor,

SEQ ID NO: 106323 - DNA, 2094 bp, Arabidopsis thaliana
  misc_feature (1)..(2094): Ceres Seq. ID no. 13619235
atattgaaaacgcccgctctctgttttttctcgtttctcctcccttcgttctcgggtccatctgcgttcgtatcaagtccttgcactcttcttcttcgtatctggattgtttcgaagttctctaacgaacgacaatggagagtttgatcgtgttgattaatacgatacaaagagcatgcaccgtagtcggcgatcatggcggcgatagcaacgctctatcttctctatgggaagctcttccttccgtcgccgtcgttggtggccagagttctggtaaatcttcggttctagagagtatcgtcgggagagattttcttcccagaggatccggtattgttacgagacggcctttggttttacaacttcataagactgaaaatggaacagaggataacgcagagtttctccaccttaccaataaaaaattcaccaatttctctttggttagaaaggagattgaggatgagactgatagaatcactgggaagaacaaacagatttcttcaattcctattcacctcagtattttctctcccaatgaaggacagccagaaactattgttgaggatatcgaatccatggttcgctcatacgtcgaaaagcctaactgtcttatactggcaatatctcctgctaatcaagacatagctacatccgacgcgatgaagctcgcgaaagaagtggatccaataggtgatagaacgtttggagttttgacaaagttagacttaatggacaagggaactaatgcattggacgttatcaacggaagatcttacaagctgaaatatccttgggttgggatagtgaaccgttcacaagccgacattaataagaatgtcgacatgatggttgcaagaaggaaagagcgagagtactttgaaaccagtcctgactatggtcacttagccacaagaatgggctcagaatatcttgcaaagctcctctctaagctcttagaatctgttataaggtcacgtattccaagtatcctatccttgataaacaacaacatcgaggaactcgaaagagagttagaccaattgggcaggcctatcgctattgatgctggagctcaactatacactatcttgggaatgtgtagagcattcgaaaagatattcaaagagcatttggatggcgggcgtcccggaggtgcacggatctatggaatctttgactacaatcttccaacagccataaaaaaacttccatttgatcgtcatctttcattgcaaagtgttaagagaattgtctcagaatctgatggctatcaacctcacttgatagcaccagaattaggttatcgtcgtcttattgaaggatccctaaatcattttagaggtccagctgaagcttctgtgaatgctattcaccttatcttaaaagagcttgtaaggaaagcaatcgcagaaactgaggagctaaaacgtttcccttcactacaaattgagttagttgctgcagcaaactcatcattagacaagtttcgtgaagaaagcatgaagtcagttcttagattagtcgacatggaatcttcatatctaacggttgacttctttcgcaagcttcatgtagaaagccaaaacatgtctctttcttcaccaacatcagcaatagaccaatacggtgatgggcatttcagaaagatagcttcaaatgtagctgcttatatcaagatggttgcagagacacttgttaacactattcctaaggctgttgttcattgccaagtcagacaagcgaaactctctttgcttaattacttctatgcacagattagtcagagtcagcaggggaaacgattgggacagttgctagatgagaacccggcattgatggaaaggagaatgcaatgtgcaaagaggctcgagctatacaagaaggctagagatgagattgatgcagcggtttgggttcgatgaacgaagccggtttgattttattggttgacatattaaaccttttaagttgataaacagacaactattgtagtacttgtggttatctccggtataatcgttgctatttcttgcacacacaaaattaacttaagttttttacttggtaataaaatttccttttctttgaccc

SEQ ID NO: 106324 - protein, 596 aa, Arabidopsis thaliana
  peptide (1)..(596): Ceres Seq. ID no. 13619236
  misc_feature (206)..(493): Pfam Name: Dynamin central region Pfam Description: Dynamin central region
  misc_feature (1)..(596): Homolog of NCBI NO: 30689760 NR Description: phragmoplastin -related [Arabidopsis thaliana]
  misc_feature (1)..(596): Homolog of NCBI NO: 30689765 NR Description: phragmoplastin -related [Arabidopsis thaliana]
  misc_feature (136)..(596): Homolog of NCBI NO: 7484944 NR Description: probable phragmoplastin At2g44590 [imported] - thaliana >gi|3341679|gb|AAC27461.1| putative phragmoplastin
  misc_feature (1)..(161): Homolog of NCBI NO: 7484944 NR Description: probable phragmoplastin At2g44590 [imported] - thaliana >gi|3341679|gb|AAC27461.1| putative phragmoplastin
  misc_feature (136)..(596): Homolog of NCBI NO: 30689768 NR Description: phragmoplastin -related [Arabidopsis thaliana]
  misc_feature (1)..(161): Homolog of NCBI NO: 30689768 NR Description: phragmoplastin -related [Arabidopsis thaliana]
  misc_feature (136)..(596): Homolog of NCBI NO: 18411520 NR Description: dynamin-related protein 4 (ADL4) [Arabidopsis
  misc_feature (1)..(135): Homolog of NCBI NO: 18411520 NR Description: dynamin-related protein 4 (ADL4) [Arabidopsis
  misc_feature (136)..(596): Homolog of NCBI NO: 11357275 NR Description: dynamin-like protein 4 (ADL4) - Arabidopsis
  misc_feature (1)..(135): Homolog of NCBI NO: 11357275 NR Description: dynamin-like protein 4 (ADL4) - Arabidopsis
MESLIVLINTIQRACTVVGDHGGDSNALSSLWEALPSVAVVGGQSSGKSSVLESIVGRDFLPRGSGIVTRRPLVLQLHKTENGTEDNAEFLHLTNKKFTNFSLVRKEIEDETDRITGKNKQISSIPIHLSIFSPNEGQPETIVEDIESMVRSYVEKPNCLILAISPANQDIATSDAMKLAKEVDPIGDRTFGVLTKLDLMDKGTNALDVINGRSYKLKYPWVGIVNRSQADINKNVDMMVARRKEREYFETSPDYGHLATRMGSEYLAKLLSKLLESVIRSRIPSILSLINNNIEELERELDQLGRPIAIDAGAQLYTILGMCRAFEKIFKEHLDGGRPGGARIYGIFDYNLPTAIKKLPFDRHLSLQSVKRIVSESDGYQPHLIAPELGYRRLIEGSLNHFRGPAEASVNAIHLILKELVRKAIAETEELKRFPSLQIELVAAANSSLDKFREESMKSVLRLVDMESSYLTVDFFRKLHVESQNMSLSSPTSAIDQYGDGHFRKIASNVAAYIKMVAETLVNTIPKAVVHCQVRQAKLSLLNYFYAQISQSQQGKRLGQLLDENPALMERRMQCAKRLELYKKARDEIDAAVWVR

SEQ ID NO: 106325 - protein, 448 aa, Arabidopsis thaliana
  peptide (1)..(448): Ceres Seq. ID no. 13619237
  misc_feature (58)..(345): Pfam Name: Dynamin central region Pfam Description: Dynamin central region
  misc_feature (1)..(448): Homolog of NCBI NO: 30689760 NR Description: phragmoplastin -related [Arabidopsis thaliana]
  misc_feature (1)..(448): Homolog of NCBI NO: 30689765 NR Description: phragmoplastin -related [Arabidopsis thaliana]
  misc_feature (1)..(448): Homolog of NCBI NO: 7484944 NR Description: probable phragmoplastin At2g44590 [imported] - thaliana >gi|3341679|gb|AAC27461.1| putative phragmoplastin
  misc_feature (1)..(13): Homolog of NCBI NO: 7484944 NR Description: probable phragmoplastin At2g44590 [imported] - thaliana >gi|3341679|gb|AAC27461.1| putative phragmoplastin
  misc_feature (1)..(448): Homolog of NCBI NO: 30689768 NR Description: phragmoplastin -related [Arabidopsis thaliana]
  misc_feature (1)..(13): Homolog of NCBI NO: 30689768 NR Description: phragmoplastin -related [Arabidopsis thaliana]
  misc_feature (1)..(448): Homolog of NCBI NO: 18411520 NR Description: dynamin-related protein 4 (ADL4) [Arabidopsis
  misc_feature (1)..(448): Homolog of NCBI NO: 11357275 NR Description: dynamin-like protein 4 (ADL4) - Arabidopsis
  misc_feature (1)..(448): Homolog of NCBI NO: 6651401 NR Description: dynamin-like protein 4 [Arabidopsis thaliana]
  misc_feature (1)..(448): Homolog of NCBI NO: 37536976 NR Description: putative phragmoplastin [Oryza sativa (japonica group)] >gi|18854996|gb|AAL79688.1| putative phragmoplastin sativa] >gi|31433579|gb|AAP55077.1| putative phragmoplastin
MVRSYVEKPNCLILAISPANQDIATSDAMKLAKEVDPIGDRTFGVLTKLDLMDKGTNALDVINGRSYKLKYPWVGIVNRSQADINKNVDMMVARRKEREYFETSPDYGHLATRMGSEYLAKLLSKLLESVIRSRIPSILSLINNNIEELERELDQLGRPIAIDAGAQLYTILGMCRAFEKIFKEHLDGGRPGGARIYGIFDYNLPTAIKKLPFDRHLSLQSVKRIVSESDGYQPHLIAPELGYRRLIEGSLNHFRGPAEASVNAIHLILKELVRKAIAETEELKRFPSLQIELVAAANSSLDKFREESMKSVLRLVDMESSYLTVDFFRKLHVESQNMSLSSPTSAIDQYGDGHFRKIASNVAAYIKMVAETLVNTIPKAVVHCQVRQAKLSLLNYFYAQISQSQQGKRLGQLLDENPALMERRMQCAKRLELYKKARDEIDAAVWVR

SEQ ID NO: 106326 - protein, 420 aa, Arabidopsis thaliana
  peptide (1)..(420): Ceres Seq. ID no. 13619238
  misc_feature (30)..(317): Pfam Name: Dynamin central region Pfam Description: Dynamin central region
  misc_feature (1)..(420): Homolog of NCBI NO: 30689760 NR Description: phragmoplastin -related [Arabidopsis thaliana]
  misc_feature (1)..(420): Homolog of NCBI NO: 30689765 NR Description: phragmoplastin -related [Arabidopsis thaliana]
  misc_feature (1)..(420): Homolog of NCBI NO: 7484944 NR Description: probable phragmoplastin At2g44590 [imported] - thaliana >gi|3341679|gb|AAC27461.1| putative phragmoplastin
  misc_feature (1)..(420): Homolog of NCBI NO: 30689768 NR Description: phragmoplastin -related [Arabidopsis thaliana]
  misc_feature (1)..(420): Homolog of NCBI NO: 18411520 NR Description: dynamin-related protein 4 (ADL4) [Arabidopsis
  misc_feature (1)..(420): Homolog of NCBI NO: 11357275 NR Description: dynamin-like protein 4 (ADL4) - Arabidopsis
  misc_feature (1)..(420): Homolog of NCBI NO: 6651401 NR Description: dynamin-like protein 4 [Arabidopsis thaliana]
  misc_feature (1)..(420): Homolog of NCBI NO: 37536976 NR Description: putative phragmoplastin [Oryza sativa (japonica group)] >gi|18854996|gb|AAL79688.1| putative phragmoplastin sativa] >gi|31433579|gb|AAP55077.1| putative phragmoplastin
  misc_feature (1)..(418): Homolog of NCBI NO: 15223914 NR Description: dynamin -related [Arabidopsis thaliana]
  misc_feature (1)..(418): Homolog of NCBI NO: 21537304 NR Description: dynamin, putative [Arabidopsis thaliana]
MKLAKEVDPIGDRTFGVLTKLDLMDKGTNALDVINGRSYKLKYPWVGIVNRSQADINKNVDMMVARRKEREYFETSPDYGHLATRMGSEYLAKLLSKLLESVIRSRIPSILSLINNNIEELERELDQLGRPIAIDAGAQLYTILGMCRAFEKIFKEHLDGGRPGGARIYGIFDYNLPTAIKKLPFDRHLSLQSVKRIVSESDGYQPHLIAPELGYRRLIEGSLNHFRGPAEASVNAIHLILKELVRKAIAETEELKRFPSLQIELVAAANSSLDKFREESMKSVLRLVDMESSYLTVDFFRKLHVESQNMSLSSPTSAIDQYGDGHFRKIASNVAAYIKMVAETLVNTIPKAVVHCQVRQAKLSLLNYFYAQISQSQQGKRLGQLLDENPALMERRMQCAKRLELYKKARDEIDAAVWVR

SEQ ID NO: 106327 - DNA, 672 bp, Arabidopsis thaliana
  misc_feature (1)..(672): Ceres Seq. ID no. 13619247
  misc_feature: MA Experiment ID: 20000171 Result: Up-regulated in Transcription
  misc_feature: MA Experiment 20000171 PARAMETER Experiment Name: At_42deg_Heat_P Parameter: Age (day) Value: 14
  misc_feature: MA Experiment 20000171 PARAMETER Experiment Name: At_42deg_Heat_P Parameter: Organism Value: A. thaliana
  misc_feature: MA Experiment 20000171 PARAMETER Experiment Name: At_42deg_Heat_P Parameter: Plant Line Value: WS
  misc_feature: MA Experiment 20000171 PARAMETER Experiment Name: At_42deg_Heat_P Parameter: Temperature (deg C) Value: 42 vs. 22
  misc_feature: MA Experiment 20000171 PARAMETER Experiment Name: At_42deg_Heat_P Parameter: Timepoint (hr) Value: 1
  misc_feature: MA Experiment 20000171 PARAMETER Experiment Name: At_42deg_Heat_P Parameter: Tissue Value: Aerial
cttaagacttgttcactaaattatatattaaagtacaatggctctttaaatatcaacttgtaacaaatttgcttggacgtcttcatcctctctgaaaaatctttagcacaaatttgaaatcctcgaatatttggtcggcgatgagaaagcaagtattagcattgagtgacacggcggctgcgaggattcgccaacttctgcagcatcagcaaaaacctttcctccgccttgctgttgaagccaaaggatgcaatggcctatcttacgtcctcaattacgcccaggagaaagggaagtttgatgaggtggtcgaggagaaaggtgtaaagatccttgtggatccaaaggcggtgatgcatgtgattgggacagagatggatttcgtggacgataagcttaggtctgagtttgtgttcgtcaatccaaacgcgacaaagtgtggatgtggtgagtcattcacgacaacatgaaaggcaaaattacacatataacataataagacatatataactctattactctaccacagtagtcgatgaaatttgctttgtaaatacaactatcttaaggctgtcttccgtgtaggttcgcaatttgcgacgtttgcgatgatttaatgtaatgtgaataagtgtgtgtggaaatgggtttcgtttctacgtattactctgt

SEQ ID NO: 106328 - protein, 109 aa, Arabidopsis thaliana
  peptide (1)..(109): Ceres Seq. ID no. 13619248
  misc_feature (5)..(107): Pfam Name: HesB-like domain Pfam Description: HesB-like domain
  misc_feature (1)..(109): Homolog of NCBI NO: 15227614 NR Description: expressed protein [Arabidopsis thaliana]
  misc_feature (1)..(109): Homolog of NCBI NO: 21805702 NR Description: hypothetical protein [Arabidopsis thaliana]
  misc_feature (1)..(109): Homolog of NCBI NO: 15227287 NR Description: HesB protein -related [Arabidopsis thaliana]
  misc_feature (1)..(109): Homolog of NCBI NO: 21592728 NR Description: putative HesB-like protein [Arabidopsis thaliana]
  misc_feature (1)..(108): Homolog of NCBI NO: 16798390 NR Description: iron-sulfur cluster assembly protein IscA
  misc_feature (6)..(106): Homolog of NCBI NO: 23013039 NR Description: hypothetical protein [Magnetospirillum
  misc_feature (3)..(106): Homolog of NCBI NO: 15892651 NR Description: hesB protein [Rickettsia conorii]
  misc_feature (2)..(106): Homolog of NCBI NO: 6323001 NR Description: Iron Sulfur Assembly -- IscA/NifA homolog; Isa1p
  misc_feature (3)..(107): Homolog of NCBI NO: 15604345 NR Description: HESB PROTEIN (hesB2) [Rickettsia prowazekii]
  misc_feature (1)..(106): Homolog of NCBI NO: 11359495 NR Description: hypothetical protein B24M22.180 [imported] - crassa >gi|9453818|emb|CAB99386.1| conserved hypothetical protein
MRKQVLALSDTAAARIRQLLQHQQKPFLRLAVEAKGCNGLSYVLNYAQEKGKFDEVVEEKGVKILVDPKAVMHVIGTEMDFVDDKLRSEFVFVNPNATKCGCGESFTTT

SEQ ID NO: 106329 - DNA, 1441 bp, Arabidopsis thaliana
  misc_feature (1)..(1441): Ceres Seq. ID no. 13619261
  misc_feature: MA Experiment ID: 20000185 Result: Down-regulated in Transcription
  misc_feature: MA Experiment 20000185 PARAMETER Experiment Name: At_Roots__P Parameter: Age (day) Value: 7 vs. 21
  misc_feature: MA Experiment 20000185 PARAMETER Experiment Name: At_Roots__P Parameter: Organism Value: A. thaliana
  misc_feature: MA Experiment 20000185 PARAMETER Experiment Name: At_Roots__P Parameter: Tissue Value: Roots vs. Whole Plant
  misc_feature: MA Experiment ID: 20000234 Result: Up-regulated in Transcription
  misc_feature: MA Experiment 20000234 PARAMETER Experiment Name: At_Siliques_P Parameter: Age (day) Value: 21
  misc_feature: MA Experiment 20000234 PARAMETER Experiment Name: At_Siliques_P Parameter: Organism Value: A. thaliana
  misc_feature: MA Experiment 20000234 PARAMETER Experiment Name: At_Siliques_P Parameter: Plant Line Value: WS
  misc_feature: MA Experiment 20000234 PARAMETER Experiment Name: At_Siliques_P Parameter: Tissue Value: Less Than 5mm Siliques vs. Whole Plant
  misc_feature: MA Experiment ID: 20000235 Result: Up-regulated in Transcription
  misc_feature: MA Experiment 20000235 PARAMETER Experiment Name: At_Siliques_P Parameter: Age (day) Value: 21
  misc_feature: MA Experiment 20000235 PARAMETER Experiment Name: At_Siliques_P Parameter: Organism Value: A. thaliana
  misc_feature: MA Experiment 20000235 PARAMETER Experiment Name: At_Siliques_P Parameter: Plant Line Value: WS
  misc_feature: MA Experiment 20000235 PARAMETER Experiment Name: At_Siliques_P Parameter: Tissue Value: 5-10mm Siliques vs. Whole Plant
  misc_feature: MA Experiment ID: 20000264 Result: Down-regulated in Transcription
  misc_feature: MA Experiment 20000264 PARAMETER Experiment Name: At_Open_Flower_P Parameter: Age (day) Value: 21
  misc_feature: MA Experiment 20000264 PARAMETER Experiment Name: At_Open_Flower_P Parameter: Plant Line Value: WS
  misc_feature: MA Experiment 20000264 PARAMETER Experiment Name: At_Open_Flower_P Parameter: Tissue Value: Open Flower vs. Whole Plant
  misc_feature: MA Experiment ID: 20000265 Result: Down-regulated in Transcription
  misc_feature: MA Experiment 20000265 PARAMETER Experiment Name: At_Open_Flower_P Parameter: Age (day) Value: 21
  misc_feature: MA Experiment 20000265 PARAMETER Experiment Name: At_Open_Flower_P Parameter: Plant Line Value: WS
  misc_feature: MA Experiment 20000265 PARAMETER Experiment Name: At_Open_Flower_P Parameter: Tissue Value: Closed Flower vs. Whole Plant
  misc_feature: MA Experiment ID: 20000286 Result: Down-regulated in Transcription
  misc_feature: MA Experiment 20000286 PARAMETER Experiment Name: At_Open_Flower_P Parameter: Age (day) Value: 21
  misc_feature: MA Experiment 20000286 PARAMETER Experiment Name: At_Open_Flower_P Parameter: Plant Line Value: WS
  misc_feature: MA Experiment 20000286 PARAMETER Experiment Name: At_Open_Flower_P Parameter: Tissue Value: Half Open vs. Whole Plant
  misc_feature: MA Experiment ID: 20000439 Result: Down-regulated in Transcription
  misc_feature: MA Experiment 20000439 PARAMETER Experiment Name: At_Roots__P Parameter: Age (day) Value: 14 vs. 21
  misc_feature: MA Experiment 20000439 PARAMETER Experiment Name: At_Roots__P Parameter: Organism Value: A. thaliana
  misc_feature: MA Experiment 20000439 PARAMETER Experiment Name: At_Roots__P Parameter: Tissue Value: Roots vs. Whole Plant
  misc_feature: MA Experiment ID: 20000451 Result: Up-regulated in Transcription
  misc_feature: MA Experiment 20000451 PARAMETER Experiment Name: At_CS6879_Shoots-Roots_P Parameter: Age (day) Value: 14
  misc_feature: MA Experiment 20000451 PARAMETER Experiment Name: At_CS6879_Shoots-Roots_P Parameter: Organism Value: A. thaliana
  misc_feature: MA Experiment 20000451 PARAMETER Experiment Name: At_CS6879_Shoots-Roots_P Parameter: Plant Line Value: CS6879 vs. WS
  misc_feature: MA Experiment 20000451 PARAMETER Experiment Name: At_CS6879_Shoots-Roots_P Parameter: Tissue Value: Roots
  misc_feature: MA Experiment ID: 20001910 Result: Up-regulated in Transcription
  misc_feature: MA Experiment 20001910 PARAMETER Experiment Name: At_Drought_Reproduction_P Parameter: Age (day) Value: 37
  misc_feature: MA Experiment 20001910 PARAMETER Experiment Name: At_Drought_Reproduction_P Parameter: Organism Value: A. thaliana
  misc_feature: MA Experiment 20001910 PARAMETER Experiment Name: At_Drought_Reproduction_P Parameter: Plant Line Value: WS
  misc_feature: MA Experiment 20001910 PARAMETER Experiment Name: At_Drought_Reproduction_P Parameter: Timepoint (day) Value: 7
  misc_feature: MA Experiment 20001910 PARAMETER Experiment Name: At_Drought_Reproduction_P Parameter: Tissue Value: Flowers
  misc_feature: MA Experiment 20001910 PARAMETER Experiment Name: At_Drought_Reproduction_P Parameter: Treatment Value: Drought vs. No Drought
  misc_feature: MA Experiment ID: 20001911 Result: Up-regulated in Transcription
  misc_feature: MA Experiment 20001911 PARAMETER Experiment Name: At_Drought_Reproduction_P Parameter: Age (day) Value: 40
  misc_feature: MA Experiment 20001911 PARAMETER Experiment Name: At_Drought_Reproduction_P Parameter: Organism Value: A. thaliana
  misc_feature: MA Experiment 20001911 PARAMETER Experiment Name: At_Drought_Reproduction_P Parameter: Plant Line Value: WS
  misc_feature: MA Experiment 20001911 PARAMETER Experiment Name: At_Drought_Reproduction_P Parameter: Timepoint (day) Value: 10
  misc_feature: MA Experiment 20001911 PARAMETER Experiment Name: At_Drought_Reproduction_P Parameter: Tissue Value: Flowers
  misc_feature: MA Experiment 20001911 PARAMETER Experiment Name: At_Drought_Reproduction_P Parameter: Treatment Value: Drought vs. No Drought
tcatcgctgtctggaacagcgatgacttttaactagttgagacacactaaacccatctactattatcttaaacatgcccatcaaaccggttttaaccaccctaatagctcttttatccatcattcttgctctctacacgatccaattgccatcctctagatctctctcttctatagctacaactatcggagcattagcaaaatattcaacattttttggacacaaacaccaccatcatcaccatcaccaccatcaccatcatcattatcaccaccatgaaccaataaaatgttgtgagaaatggacgtcaaggcttagacaccaatacaagacttctcttgtgttgactgttgatttgcatggttgtggtaacttcagcaatgttcaaagcgccattgatgttgtccctgatttaagctcttccaagactctcatcatcgttaattcgggttcttatagggaaaaggttacggttaatgaaaacaagacaaaccttgttattcaaggaagaggatatcaaaacacatccatcgaatggaacgacacagcaaaatccgccggaaacactgctgatagcttctcctttgtagtgtttgcagctaacttcacagcttacaacattagtttcaagaacaatgcaccagaaccagatcctggtgaagctgatgcacaagcagtagctctaaggattgaaggagaccaagctgccttttatggttgtggattctatggggctcaagatacacttctagatgataaaggaagacatttcttcaaagagtgcttcattcaagggtccatagattttatatttggcaatggaagatcactctaccaggattgtactatcaattcaatagcaaaggggaatacatccggagttaccggatctatcacagctcaaggaagacaatcagaagatgaacagtcaggattctcttttgtgaattgtaagatcgatggcagtggggaaatattgcttggaagagcttggggagcctatgctacagtcgtgttctcaaatacttacatgtctggaatcattactccagaaggatggaataactggggagactcgaccaaagaaaagacggtgacttttggagagcataaatgctatggaccgggagcagattacaaagagagggttttgtttgggaaacaactcacagattcagaagcatcttctttcatagatgtatcttttatagatggtgatgaatggctccgtcacactaacatagtctctgagcatacatctaaagacattggagatgatcttataggattttactaacatatataaggatacacatgaataaaaaacatttagatgtagatacatacatattataagtatatgtagtcacattgagatctgatttgcgatgaagatgaaactcatgtactgtatatcttaatatgagatttcggtatgttt

SEQ ID NO: 106330 - protein, 407 aa, Arabidopsis thaliana
  peptide (1)..(407): Ceres Seq. ID no. 13619262
  misc_feature (90)..(382): Pfam Name: Pectinesterase Pfam Description: Pectinesterase
  misc_feature (1)..(407): Homolog of NCBI NO: 15228023 NR Description: pectinesterase family [Arabidopsis thaliana]
  misc_feature (1)..(407): Homolog of NCBI NO: 27754550 NR Description: putative pectinesterase family protein
  misc_feature (68)..(385): Homolog of NCBI NO: 15228022 NR Description: pectinesterase family [Arabidopsis thaliana]
  misc_feature (11)..(390): Homolog of NCBI NO: 15220471 NR Description: pectinesterase family [Arabidopsis thaliana]
  misc_feature (11)..(390): Homolog of NCBI NO: 25325338 NR Description: hypothetical protein [imported] - Arabidopsis >gi|2388565|gb|AAB71446.1| Similar to Prunus pectinesterase
  misc_feature (88)..(386): Homolog of NCBI NO: 34909402 NR Description: putative pectin methylesterase [Oryza sativa
  misc_feature (99)..(386): Homolog of NCBI NO: 15241163 NR Description: pectinesterase family [Arabidopsis thaliana] putative pectin methylesterase [Arabidopsis thaliana]
  misc_feature (74)..(385): Homolog of NCBI NO: 38345478 NR Description: OSJNBa0010H02.16 [Oryza sativa (japonica
  misc_feature (66)..(385): Homolog of NCBI NO: 15238111 NR Description: pectinesterase family [Arabidopsis thaliana] AT5g47500/MNJ7_9 [Arabidopsis thaliana]
  misc_feature (85)..(386): Homolog of NCBI NO: 15226598 NR Description: pectinesterase family [Arabidopsis thaliana]
MPIKPVLTTLIALLSIILALYTIQLPSSRSLSSIATTIGALAKYSTFFGHKHHHHHHHHHHHHHYHHHEPIKCCEKWTSRLRHQYKTSLVLTVDLHGCGNFSNVQSAIDVVPDLSSSKTLIIVNSGSYREKVTVNENKTNLVIQGRGYQNTSIEWNDTAKSAGNTADSFSFVVFAANFTAYNISFKNNAPEPDPGEADAQAVALRIEGDQAAFYGCGFYGAQDTLLDDKGRHFFKECFIQGSIDFIFGNGRSLYQDCTINSIAKGNTSGVTGSITAQGRQSEDEQSGFSFVNCKIDGSGEILLGRAWGAYATVVFSNTYMSGIITPEGWNNWGDSTKEKTVTFGEHKCYGPGADYKERVLFGKQLTDSEASSFIDVSFIDGDEWLRHTNIVSEHTSKDIGDDLIGFY

SEQ ID NO: 106331 - DNA, 1612 bp, Arabidopsis thaliana
  misc_feature (1)..(1612): Ceres Seq. ID no. 13619263
  misc_feature: MA Experiment ID: 20000328 Result: Up-regulated in Transcription
  misc_feature: MA Experiment 20000328 PARAMETER Experiment Name: At_42deg_Heat_Sub_P Parameter: Age (day) Value: 14
  misc_feature: MA Experiment 20000328 PARAMETER Experiment Name: At_42deg_Heat_Sub_P Parameter: Organism Value: A. thaliana
  misc_feature: MA Experiment 20000328 PARAMETER Experiment Name: At_42deg_Heat_Sub_P Parameter: Plant Line Value: WS
  misc_feature: MA Experiment 20000328 PARAMETER Experiment Name: At_42deg_Heat_Sub_P Parameter: Temperature (deg C) Value: 42 vs. 22
  misc_feature: MA Experiment 20000328 PARAMETER Experiment Name: At_42deg_Heat_Sub_P Parameter: Timepoint (hr) Value: 6
  misc_feature: MA Experiment 20000328 PARAMETER Experiment Name: At_42deg_Heat_Sub_P Parameter: Tissue Value: Aerial
gaaacaaaacttgagaggttcttactaaagttgcatcgtcatggctttcgaaaaaaacaacgaaccttttcctcttcactttgttctcttccctttcatggctcaaggccacatgattcccatggttgatattgcaaggctcttggctcagcgaggtgtgcttataacaattgtcacgacgcctcacaatgcagcaaggttcaagaatgtcctaaaccgtgccattgagtctggtttgcccatcaacctagtgcaagtcaagtttccatatcaagaagctggtctgcaagaaggacaagaaaatatggatttgcttaccacgatggagcagataacatctttctttaaagcggttaacttactcaaagaaccagtccagaaccttattgaagagatgagcccgcgaccaagctgtctaatctctgatatgtgtttgtcgtatacaagcgaaatcgccaagaagttcaaaataccaaagatcctcttccatggcatgggttgcttttgtcttctgtgtgttaacgttctgcgcaagaaccgtgagatcttggacaatttaaagtctgataaggagtacttcattgttccttattttcctgatagagttgaattcacaagacctcaagttccggtggaaacatatgttcctgcaggctggaaagagatcttggaggatatggtagaagcggataagacatcttatggtgttatagtcaactcatttcaagagctcgaacctgcgtatgccaaagacttcaaggaggcaaggtctggtaaagcatggaccattggacctgtttccttgtgcaacaaggtaggagtagacaaagcagagaggggaaacaaatcagatattgatcaagatgagtgccttgaatggctcgattctaaggaaccgggatctgtgctctacgtttgccttggaagtatttgtaatcttcctctgtctcagctccttgagctgggactaggcctagaggaatcccaaagacctttcatctgggtcataagaggttgggagaaatacaaagagttagttgagtggttctcggaaagcggctttgaagatagaatccaagatagaggacttctcatcaaaggatggtcccctcaaatgcttatcctttcacatccttctgttggagggttcttaacgcactgcggatggaactcgactcttgaggggataactgctggtctaccaatgcttacatggccactatttgcagaccaattctgcaacgagaaactggtcgtacaaatactaaaagtcggtgtaagtgccgaggttaaagaggtcatgaaatggggagaagaagagaagataggagtgttggtggataaagaaggagtgaagaaggcagtggaagaactaatgggtgagagtgatgatgcaaaagagagaagaagaagagccaaagagcttggagaatcagctcacaaggctgtggaagaaggaggctcctctcattctaatatcactttcttgctacaagacataatgcaactagcacagtccaataattgagtatatgtcatattttcaaaggaatttaaacattctatagtttttgttttctgtatttgtgaaatttaaaacagagtcttagtt

SEQ ID NO: 106332 - protein, 495 aa, Arabidopsis thaliana
  peptide (1)..(495): Ceres Seq. ID no. 13619264
  misc_feature (13)..(491): Pfam Name: UDP-glucoronosyl and UDP-glucosyl transferase Pfam Description: UDP-glucoronosyl and UDP-glucosyl transferase
  misc_feature (1)..(495): Homolog of NCBI NO: 15228035 NR Description: glucosyl transferase -related [Arabidopsis
  misc_feature (1)..(495): Homolog of NCBI NO: 26450153 NR Description: putative glucosyl transferase [Arabidopsis
  misc_feature (11)..(495): Homolog of NCBI NO: 15228037 NR Description: glucosyl transferase -related [Arabidopsis
  misc_feature (1)..(495): Homolog of NCBI NO: 15228034 NR Description: UDP-glycosyltransferase family [Arabidopsis
  misc_feature (1)..(495): Homolog of NCBI NO: 15228033 NR Description: glycosyltransferase family [Arabidopsis thaliana]
  misc_feature (11)..(492): Homolog of NCBI NO: 15228031 NR Description: UDP-glycosyltransferase family [Arabidopsis
  misc_feature (1)..(495): Homolog of NCBI NO: 15228032 NR Description: glycosyltransferase family [Arabidopsis thaliana]
  misc_feature (11)..(493): Homolog of NCBI NO: 15231758 NR Description: UDP-glycosyltransferase family [Arabidopsis
  misc_feature (1)..(494): Homolog of NCBI NO: 19911201 NR Description: glucosyltransferase-9 [Vigna angularis]
  misc_feature (25)..(492): Homolog of NCBI NO: 19911211 NR Description: glucosyltransferase-14 [Vigna angularis]
MAFEKNNEPFPLHFVLFPFMAQGHMIPMVDIARLLAQRGVLITIVTTPHNAARFKNVLNRAIESGLPINLVQVKFPYQEAGLQEGQENMDLLTTMEQITSFFKAVNLLKEPVQNLIEEMSPRPSCLISDMCLSYTSEIAKKFKIPKILFHGMGCFCLLCVNVLRKNREILDNLKSDKEYFIVPYFPDRVEFTRPQVPVETYVPAGWKEILEDMVEADKTSYGVIVNSFQELEPAYAKDFKEARSGKAWTIGPVSLCNKVGVDKAERGNKSDIDQDECLEWLDSKEPGSVLYVCLGSICNLPLSQLLELGLGLEESQRPFIWVIRGWEKYKELVEWFSESGFEDRIQDRGLLIKGWSPQMLILSHPSVGGFLTHCGWNSTLEGITAGLPMLTWPLFADQFCNEKLVVQILKVGVSAEVKEVMKWGEEEKIGVLVDKEGVKKAVEELMGESDDAKERRRRAKELGESAHKAVEEGGSSHSNITFLLQDIMQLAQSNN

SEQ ID NO: 106333 - protein, 476 aa, Arabidopsis thaliana
  peptide (1)..(476): Ceres Seq. ID no. 13619265
  misc_feature (1)..(472): Pfam Name: UDP-glucoronosyl and UDP-glucosyl transferase Pfam Description: UDP-glucoronosyl and UDP-glucosyl transferase
  misc_feature (1)..(476): Homolog of NCBI NO: 15228035 NR Description: glucosyl transferase -related [Arabidopsis
  misc_feature (1)..(476): Homolog of NCBI NO: 26450153 NR Description: putative glucosyl transferase [Arabidopsis
  misc_feature (1)..(476): Homolog of NCBI NO: 15228037 NR Description: glucosyl transferase -related [Arabidopsis
  misc_feature (1)..(476): Homolog of NCBI NO: 15228034 NR Description: UDP-glycosyltransferase family [Arabidopsis
  misc_feature (1)..(476): Homolog of NCBI NO: 15228033 NR Description: glycosyltransferase family [Arabidopsis thaliana]
  misc_feature (1)..(473): Homolog of NCBI NO: 15228031 NR Description: UDP-glycosyltransferase family [Arabidopsis
  misc_feature (1)..(476): Homolog of NCBI NO: 15228032 NR Description: glycosyltransferase family [Arabidopsis thaliana]
  misc_feature (1)..(474): Homolog of NCBI NO: 15231758 NR Description: UDP-glycosyltransferase family [Arabidopsis
  misc_feature (1)..(475): Homolog of NCBI NO: 19911201 NR Description: glucosyltransferase-9 [Vigna angularis]
  misc_feature (6)..(473): Homolog of NCBI NO: 19911211 NR Description: glucosyltransferase-14 [Vigna angularis]
MAQGHMIPMVDIARLLAQRGVLITIVTTPHNAARFKNVLNRAIESGLPINLVQVKFPYQEAGLQEGQENMDLLTTMEQITSFFKAVNLLKEPVQNLIEEMSPRPSCLISDMCLSYTSEIAKKFKIPKILFHGMGCFCLLCVNVLRKNREILDNLKSDKEYFIVPYFPDRVEFTRPQVPVETYVPAGWKEILEDMVEADKTSYGVIVNSFQELEPAYAKDFKEARSGKAWTIGPVSLCNKVGVDKAERGNKSDIDQDECLEWLDSKEPGSVLYVCLGSICNLPLSQLLELGLGLEESQRPFIWVIRGWEKYKELVEWFSESGFEDRIQDRGLLIKGWSPQMLILSHPSVGGFLTHCGWNSTLEGITAGLPMLTWPLFADQFCNEKLVVQILKVGVSAEVKEVMKWGEEEKIGVLVDKEGVKKAVEELMGESDDAKERRRRAKELGESAHKAVEEGGSSHSNITFLLQDIMQLAQSNN

SEQ ID NO: 106334 - protein, 471 aa, Arabidopsis thaliana
  peptide (1)..(471): Ceres Seq. ID no. 13619266
  misc_feature (1)..(467): Pfam Name: UDP-glucoronosyl and UDP-glucosyl transferase Pfam Description: UDP-glucoronosyl and UDP-glucosyl transferase
  misc_feature (1)..(471): Homolog of NCBI NO: 15228035 NR Description: glucosyl transferase -related [Arabidopsis
  misc_feature (1)..(471): Homolog of NCBI NO: 26450153 NR Description: putative glucosyl transferase [Arabidopsis
  misc_feature (1)..(471): Homolog of NCBI NO: 15228037 NR Description: glucosyl transferase -related [Arabidopsis
  misc_feature (1)..(471): Homolog of NCBI NO: 15228034 NR Description: UDP-glycosyltransferase family [Arabidopsis
  misc_feature (1)..(471): Homolog of NCBI NO: 15228033 NR Description: glycosyltransferase family [Arabidopsis thaliana]
  misc_feature (1)..(468): Homolog of NCBI NO: 15228031 NR Description: UDP-glycosyltransferase family [Arabidopsis
  misc_feature (1)..(471): Homolog of NCBI NO: 15228032 NR Description: glycosyltransferase family [Arabidopsis thaliana]
  misc_feature (1)..(469): Homolog of NCBI NO: 15231758 NR Description: UDP-glycosyltransferase family [Arabidopsis
  misc_feature (1)..(470): Homolog of NCBI NO: 19911201 NR Description: glucosyltransferase-9 [Vigna angularis]
  misc_feature (1)..(468): Homolog of NCBI NO: 19911211 NR Description: glucosyltransferase-14 [Vigna angularis]
MIPMVDIARLLAQRGVLITIVTTPHNAARFKNVLNRAIESGLPINLVQVKFPYQEAGLQEGQENMDLLTTMEQITSFFKAVNLLKEPVQNLIEEMSPRPSCLISDMCLSYTSEIAKKFKIPKILFHGMGCFCLLCVNVLRKNREILDNLKSDKEYFIVPYFPDRVEFTRPQVPVETYVPAGWKEILEDMVEADKTSYGVIVNSFQELEPAYAKDFKEARSGKAWTIGPVSLCNKVGVDKAERGNKSDIDQDECLEWLDSKEPGSVLYVCLGSICNLPLSQLLELGLGLEESQRPFIWVIRGWEKYKELVEWFSESGFEDRIQDRGLLIKGWSPQMLILSHPSVGGFLTHCGWNSTLEGITAGLPMLTWPLFADQFCNEKLVVQILKVGVSAEVKEVMKWGEEEKIGVLVDKEGVKKAVEELMGESDDAKERRRRAKELGESAHKAVEEGGSSHSNITFLLQDIMQLAQSNN

SEQ ID NO: 106335 - DNA, 1165 bp, Arabidopsis thaliana
  misc_feature (1)..(1165): Ceres Seq. ID no. 13619287
  misc_feature: MA Experiment ID: 20000166 Result: Up-regulated in Transcription
  misc_feature: MA Experiment 20000166 PARAMETER Experiment Name: At_100uM_ABA_P Parameter: Age (day) Value: 14
  misc_feature: MA Experiment 20000166 PARAMETER Experiment Name: At_100uM_ABA_P Parameter: Organism Value: A. thaliana
  misc_feature: MA Experiment 20000166 PARAMETER Experiment Name: At_100uM_ABA_P Parameter: Plant Line Value: WS
  misc_feature: MA Experiment 20000166 PARAMETER Experiment Name: At_100uM_ABA_P Parameter: Timepoint (hr) Value: 1
  misc_feature: MA Experiment 20000166 PARAMETER Experiment Name: At_100uM_ABA_P Parameter: Tissue Value: Aerial
  misc_feature: MA Experiment 20000166 PARAMETER Experiment Name: At_100uM_ABA_P Parameter: Treatment Value: 100uM ABA vs. No Treatment
  misc_feature: MA Experiment ID: 20000169 Result: Up-regulated in Transcription
  misc_feature: MA Experiment 20000169 PARAMETER Experiment Name: At_100uM_ABA_P Parameter: Age (day) Value: 14
  misc_feature: MA Experiment 20000169 PARAMETER Experiment Name: At_100uM_ABA_P Parameter: Organism Value: A. thaliana
  misc_feature: MA Experiment 20000169 PARAMETER Experiment Name: At_100uM_ABA_P Parameter: Plant Line Value: WS
  misc_feature: MA Experiment 20000169 PARAMETER Experiment Name: At_100uM_ABA_P Parameter: Timepoint (hr) Value: 6
  misc_feature: MA Experiment 20000169 PARAMETER Experiment Name: At_100uM_ABA_P Parameter: Tissue Value: Aerial
  misc_feature: MA Experiment 20000169 PARAMETER Experiment Name: At_100uM_ABA_P Parameter: Treatment Value: 100uM ABA vs. No Treatment
  misc_feature: MA Experiment ID: 20000182 Result: Up-regulated in Transcription
  misc_feature: MA Experiment 20000182 PARAMETER Experiment Name: At_2mM_SA_P Parameter: Age (day) Value: 14
  misc_feature: MA Experiment 20000182 PARAMETER Experiment Name: At_2mM_SA_P Parameter: Organism Value: A. thaliana
  misc_feature: MA Experiment 20000182 PARAMETER Experiment Name: At_2mM_SA_P Parameter: Plant Line Value: WS
  misc_feature: MA Experiment 20000182 PARAMETER Experiment Name: At_2mM_SA_P Parameter: Timepoint (hr) Value: 6
  misc_feature: MA Experiment 20000182 PARAMETER Experiment Name: At_2mM_SA_P Parameter: Tissue Value: Aerial
  misc_feature: MA Experiment 20000182 PARAMETER Experiment Name: At_2mM_SA_P Parameter: Treatment Value: 2mM SA vs. No Treatment
  misc_feature: MA Experiment ID: 20000185 Result: Down-regulated in Transcription
  misc_feature: MA Experiment 20000185 PARAMETER Experiment Name: At_Roots__P Parameter: Age (day) Value: 7 vs. 21
  misc_feature: MA Experiment 20000185 PARAMETER Experiment Name: At_Roots__P Parameter: Organism Value: A. thaliana
  misc_feature: MA Experiment 20000185 PARAMETER Experiment Name: At_Roots__P Parameter: Tissue Value: Roots vs. Whole Plant
  misc_feature: MA Experiment ID: 20000264 Result: Up-regulated in Transcription
  misc_feature: MA Experiment 20000264 PARAMETER Experiment Name: At_Open_Flower_P Parameter: Age (day) Value: 21
  misc_feature: MA Experiment 20000264 PARAMETER Experiment Name: At_Open_Flower_P Parameter: Plant Line Value: WS
  misc_feature: MA Experiment 20000264 PARAMETER Experiment Name: At_Open_Flower_P Parameter: Tissue Value: Open Flower vs. Whole Plant
  misc_feature: MA Experiment ID: 20000265 Result: Up-regulated in Transcription
  misc_feature: MA Experiment 20000265 PARAMETER Experiment Name: At_Open_Flower_P Parameter: Age (day) Value: 21
  misc_feature: MA Experiment 20000265 PARAMETER Experiment Name: At_Open_Flower_P Parameter: Plant Line Value: WS
  misc_feature: MA Experiment 20000265 PARAMETER Experiment Name: At_Open_Flower_P Parameter: Tissue Value: Closed Flower vs. Whole Plant
  misc_feature: MA Experiment ID: 20000268 Result: Up-regulated in Transcription
  misc_feature: MA Experiment 20000268 PARAMETER Experiment Name: At_100mM_NaCl__P Parameter: Age (day) Value: 14
  misc_feature: MA Experiment 20000268 PARAMETER Experiment Name: At_100mM_NaCl__P Parameter: Organism Value: A. thaliana
  misc_feature: MA Experiment 20000268 PARAMETER Experiment Name: At_100mM_NaCl__P Parameter: Plant Line Value: WS
  misc_feature: MA Experiment 20000268 PARAMETER Experiment Name: At_100mM_NaCl__P Parameter: Timepoint (hr) Value: 6
  misc_feature: MA Experiment 20000268 PARAMETER Experiment Name: At_100mM_NaCl__P Parameter: Tissue Value: Whole Plant
  misc_feature: MA Experiment 20000268 PARAMETER Experiment Name: At_100mM_NaCl__P Parameter: Treatment Value: 100mM NaCl vs. No Treatment
  misc_feature: MA Experiment ID: 20000286 Result: Up-regulated in Transcription
  misc_feature: MA Experiment 20000286 PARAMETER Experiment Name: At_Open_Flower_P Parameter: Age (day) Value: 21
  misc_feature: MA Experiment 20000286 PARAMETER Experiment Name: At_Open_Flower_P Parameter: Plant Line Value: WS
  misc_feature: MA Experiment 20000286 PARAMETER Experiment Name: At_Open_Flower_P Parameter: Tissue Value: Half Open vs. Whole Plant
  misc_feature: MA Experiment ID: 20000436 Result: Up-regulated in Transcription
  misc_feature: MA Experiment 20000436 PARAMETER Experiment Name: At_Drought_P Parameter: Age (day) Value: 7
  misc_feature: MA Experiment 20000436 PARAMETER Experiment Name: At_Drought_P Parameter: Organism Value: A. thaliana
  misc_feature: MA Experiment 20000436 PARAMETER Experiment Name: At_Drought_P Parameter: Plant Line Value: WS
  misc_feature: MA Experiment 20000436 PARAMETER Experiment Name: At_Drought_P Parameter: Timepoint (hr) Value: 12
  misc_feature: MA Experiment 20000436 PARAMETER Experiment Name: At_Drought_P Parameter: Tissue Value: Whole Plant
  misc_feature: MA Experiment 20000436 PARAMETER Experiment Name: At_Drought_P Parameter: Treatment Value: Drought vs. No Drought
  misc_feature: MA Experiment ID: 20000437 Result: Up-regulated in Transcription
  misc_feature: MA Experiment 20000437 PARAMETER Experiment Name: At_Drought_P Parameter: Age (day) Value: 8
  misc_feature: MA Experiment 20000437 PARAMETER Experiment Name: At_Drought_P Parameter: Organism Value: A. thaliana
  misc_feature: MA Experiment 20000437 PARAMETER Experiment Name: At_Drought_P Parameter: Plant Line Value: WS
  misc_feature: MA Experiment 20000437 PARAMETER Experiment Name: At_Drought_P Parameter: Timepoint (hr) Value: 24
  misc_feature: MA Experiment 20000437 PARAMETER Experiment Name: At_Drought_P Parameter: Tissue Value: Whole Plant
  misc_feature: MA Experiment 20000437 PARAMETER Experiment Name: At_Drought_P Parameter: Treatment Value: Drought vs. No Drought
  misc_feature: MA Experiment ID: 20000439 Result: Down-regulated in Transcription
  misc_feature: MA Experiment 20000439 PARAMETER Experiment Name: At_Roots__P Parameter: Age (day) Value: 14 vs. 21
  misc_feature: MA Experiment 20000439 PARAMETER Experiment Name: At_Roots__P Parameter: Organism Value: A. thaliana
  misc_feature: MA Experiment 20000439 PARAMETER Experiment Name: At_Roots__P Parameter: Tissue Value: Roots vs. Whole Plant
  misc_feature: MA Experiment ID: 20000445 Result: Up-regulated in Transcription
  misc_feature: MA Experiment 20000445 PARAMETER Experiment Name: At_100uM_NAA__P Parameter: Age (day) Value: 14
  misc_feature: MA Experiment 20000445 PARAMETER Experiment Name: At_100uM_NAA__P Parameter: Organism Value: A. thaliana
  misc_feature: MA Experiment 20000445 PARAMETER Experiment Name: At_100uM_NAA__P Parameter: Plant Line Value: WS
  misc_feature: MA Experiment 20000445 PARAMETER Experiment Name: At_100uM_NAA__P Parameter: Timepoint (hr) Value: 6
  misc_feature: MA Experiment 20000445 PARAMETER Experiment Name: At_100uM_NAA__P Parameter: Tissue Value: Aerial
  misc_feature: MA Experiment 20000445 PARAMETER Experiment Name: At_100uM_NAA__P Parameter: Treatment Value: 100uM NAA vs. No Treatment
  misc_feature: MA Experiment ID: 20000453 Result: Up-regulated in Transcription
  misc_feature: MA Experiment 20000453 PARAMETER Experiment Name: At_100uM_ABA_P Parameter: Age (day) Value: 15
  misc_feature: MA Experiment 20000453 PARAMETER Experiment Name: At_100uM_ABA_P Parameter: Organism Value: A. thaliana
  misc_feature: MA Experiment 20000453 PARAMETER Experiment Name: At_100uM_ABA_P Parameter: Plant Line Value: WS
  misc_feature: MA Experiment 20000453 PARAMETER Experiment Name: At_100uM_ABA_P Parameter: Timepoint (hr) Value: 24
  misc_feature: MA Experiment 20000453 PARAMETER Experiment Name: At_100uM_ABA_P Parameter: Tissue Value: Aerial
  misc_feature: MA Experiment 20000453 PARAMETER Experiment Name: At_100uM_ABA_P Parameter: Treatment Value: 100uM ABA vs. No Treatment
  misc_feature: MA Experiment ID: 20000455 Result: Up-regulated in Transcription
  misc_feature: MA Experiment 20000455 PARAMETER Experiment Name: At_100uM_ABA_P Parameter: Age (day) Value: 16
  misc_feature: MA Experiment 20000455 PARAMETER Experiment Name: At_100uM_ABA_P Parameter: Organism Value: A. thaliana
  misc_feature: MA Experiment 20000455 PARAMETER Experiment Name: At_100uM_ABA_P Parameter: Plant Line Value: WS
  misc_feature: MA Experiment 20000455 PARAMETER Experiment Name: At_100uM_ABA_P Parameter: Timepoint (hr) Value: 48
  misc_feature: MA Experiment 20000455 PARAMETER Experiment Name: At_100uM_ABA_P Parameter: Tissue Value: Aerial
  misc_feature: MA Experiment 20000455 PARAMETER Experiment Name: At_100uM_ABA_P Parameter: Treatment Value: 100uM ABA vs. No Treatment
  misc_feature: MA Experiment ID: 20000495 Result: Down-regulated in Transcription
  misc_feature: MA Experiment 20000495 PARAMETER Experiment Name: At_Guard_Cells_P Parameter: Harvest Date Value: 8/2/2002
  misc_feature: MA Experiment 20000495 PARAMETER Experiment Name: At_Guard_Cells_P Parameter: Organism Value: A. thaliana
  misc_feature: MA Experiment 20000495 PARAMETER Experiment Name: At_Guard_Cells_P Parameter: Tissue Value: Guard Cells vs. Leaves
  misc_feature: MA Experiment ID: 20000506 Result: Up-regulated in Transcription
  misc_feature: MA Experiment 20000506 PARAMETER Experiment Name: At_Wounding_P Parameter: Organism Value: A. thaliana
  misc_feature: MA Experiment 20000506 PARAMETER Experiment Name: At_Wounding_P Parameter: Plant Line Value: WS
  misc_feature: MA Experiment 20000506 PARAMETER Experiment Name: At_Wounding_P Parameter: Timepoint (hr) Value: 6
  misc_feature: MA Experiment 20000506 PARAMETER Experiment Name: At_Wounding_P Parameter: Tissue Value: Aerial
  misc_feature: MA Experiment 20000506 PARAMETER Experiment Name: At_Wounding_P Parameter: Treatment Value: Wounding vs. No Wounding
  misc_feature: MA Experiment ID: 20000527 Result: Down-regulated in Transcription
  misc_feature: MA Experiment 20000527 PARAMETER Experiment Name: At_10percent_PEG_P Parameter: Age (day) Value: 20
  misc_feature: MA Experiment 20000527 PARAMETER Experiment Name: At_10percent_PEG_P Parameter: Organism Value: A. thaliana
  misc_feature: MA Experiment 20000527 PARAMETER Experiment Name: At_10percent_PEG_P Parameter: Plant Line Value: WS
  misc_feature: MA Experiment 20000527 PARAMETER Experiment Name: At_10percent_PEG_P Parameter: Timepoint (day) Value: 20
  misc_feature: MA Experiment 20000527 PARAMETER Experiment Name: At_10percent_PEG_P Parameter: Tissue Value: Whole Plant
  misc_feature: MA Experiment 20000527 PARAMETER Experiment Name: At_10percent_PEG_P Parameter: Treatment Value: 10percent PEG vs. No Treatment
  misc_feature: MA Experiment ID: 20000575 Result: Up-regulated in Transcription
  misc_feature: MA Experiment 20000575 PARAMETER Experiment Name: At_100uM_ABA_Mutants__P Parameter: Organism Value: A. thaliana
  misc_feature: MA Experiment 20000575 PARAMETER Experiment Name: At_100uM_ABA_Mutants__P Parameter: Plant Line Value: CS22
  misc_feature: MA Experiment 20000575 PARAMETER Experiment Name: At_100uM_ABA_Mutants__P Parameter: Timepoint (hr) Value: 6
  misc_feature: MA Experiment 20000575 PARAMETER Experiment Name: At_100uM_ABA_Mutants__P Parameter: Tissue Value: Whole Plant
  misc_feature: MA Experiment 20000575 PARAMETER Experiment Name: At_100uM_ABA_Mutants__P Parameter: Treatment Value: 1uM ABA vs. No Treatment
  misc_feature: MA Experiment ID: 20001247 Result: Down-regulated in Transcription
  misc_feature: MA Experiment 20001247 PARAMETER Experiment Name: At_Far-red-induction_P Parameter: Age (day) Value: 7
  misc_feature: MA Experiment 20001247 PARAMETER Experiment Name: At_Far-red-induction_P Parameter: Light Value: Far-red vs. White
  misc_feature: MA Experiment 20001247 PARAMETER Experiment Name: At_Far-red-induction_P Parameter: Organism Value: A. thaliana
  misc_feature: MA Experiment 20001247 PARAMETER Experiment Name: At_Far-red-induction_P Parameter: Plant Line Value: Columbia
  misc_feature: MA Experiment 20001247 PARAMETER Experiment Name: At_Far-red-induction_P Parameter: Timepoint (hr) Value: 1
  misc_feature: MA Experiment 20001247 PARAMETER Experiment Name: At_Far-red-induction_P Parameter: Tissue Value: Whole Plant
  misc_feature: MA Experiment ID: 20001248 Result: Down-regulated in Transcription
  misc_feature: MA Experiment 20001248 PARAMETER Experiment Name: At_Far-red-induction_P Parameter: Age (day) Value: 7
  misc_feature: MA Experiment 20001248 PARAMETER Experiment Name: At_Far-red-induction_P Parameter: Light Value: Far-red vs. White
  misc_feature: MA Experiment 20001248 PARAMETER Experiment Name: At_Far-red-induction_P Parameter: Organism Value: A. thaliana
  misc_feature: MA Experiment 20001248 PARAMETER Experiment Name: At_Far-red-induction_P Parameter: Plant Line Value: Columbia
  misc_feature: MA Experiment 20001248 PARAMETER Experiment Name: At_Far-red-induction_P Parameter: Timepoint (hr) Value: 4
  misc_feature: MA Experiment 20001248 PARAMETER Experiment Name: At_Far-red-induction_P Parameter: Tissue Value: Whole Plant
  misc_feature: MA Experiment ID: 20001450 Result: Down-regulated in Transcription
  misc_feature: MA Experiment 20001450 PARAMETER Experiment Name: At_Far-red-induction_P Parameter: Age (day) Value: 7
  misc_feature: MA Experiment 20001450 PARAMETER Experiment Name: At_Far-red-induction_P Parameter: Light Value: Far-red vs. White
  misc_feature: MA Experiment 20001450 PARAMETER Experiment Name: At_Far-red-induction_P Parameter: Organism Value: A. thaliana
  misc_feature: MA Experiment 20001450 PARAMETER Experiment Name: At_Far-red-induction_P Parameter: Plant Line Value: Columbia
  misc_feature: MA Experiment 20001450 PARAMETER Experiment Name: At_Far-red-induction_P Parameter: Timepoint (hr) Value: 8
  misc_feature: MA Experiment 20001450 PARAMETER Experiment Name: At_Far-red-induction_P Parameter: Tissue Value: Whole Plant
  misc_feature: MA Experiment ID: 20001451 Result: Down-regulated in Transcription
  misc_feature: MA Experiment 20001451 PARAMETER Experiment Name: At_Far-red-induction_P Parameter: Age (day) Value: 7
  misc_feature: MA Experiment 20001451 PARAMETER Experiment Name: At_Far-red-induction_P Parameter: Light Value: Far-red vs. White
  misc_feature: MA Experiment 20001451 PARAMETER Experiment Name: At_Far-red-induction_P Parameter: Organism Value: A. thaliana
  misc_feature: MA Experiment 20001451 PARAMETER Experiment Name: At_Far-red-induction_P Parameter: Plant Line Value: Columbia
  misc_feature: MA Experiment 20001451 PARAMETER Experiment Name: At_Far-red-induction_P Parameter: Timepoint (hr) Value: 24
  misc_feature: MA Experiment 20001451 PARAMETER Experiment Name: At_Far-red-induction_P Parameter: Tissue Value: Whole Plant
  misc_feature: MA Experiment ID: 20001555 Result: Up-regulated in Transcription
  misc_feature: MA Experiment 20001555 PARAMETER Experiment Name: At_Drought_Soil_Dry_P Parameter: Age (day) Value: 24
  misc_feature: MA Experiment 20001555 PARAMETER Experiment Name: At_Drought_Soil_Dry_P Parameter: Organism Value: A. thaliana
  misc_feature: MA Experiment 20001555 PARAMETER Experiment Name: At_Drought_Soil_Dry_P Parameter: Plant Line Value: WS
  misc_feature: MA Experiment 20001555 PARAMETER Experiment Name: At_Drought_Soil_Dry_P Parameter: Post Timepoint (hr) Value: None
  misc_feature: MA Experiment 20001555 PARAMETER Experiment Name: At_Drought_Soil_Dry_P Parameter: Post-Treatment Value: None
  misc_feature: MA Experiment 20001555 PARAMETER Experiment Name: At_Drought_Soil_Dry_P Parameter: Timepoint (day) Value: 10
  misc_feature: MA Experiment 20001555 PARAMETER Experiment Name: At_Drought_Soil_Dry_P Parameter: Treatment Value: Drought vs. No Drought
  misc_feature: MA Experiment ID: 20001556 Result: Up-regulated in Transcription
  misc_feature: MA Experiment 20001556 PARAMETER Experiment Name: At_Drought_Soil_Dry_P Parameter: Age (day) Value: 26
  misc_feature: MA Experiment 20001556 PARAMETER Experiment Name: At_Drought_Soil_Dry_P Parameter: Organism Value: A. thaliana
  misc_feature: MA Experiment 20001556 PARAMETER Experiment Name: At_Drought_Soil_Dry_P Parameter: Plant Line Value: WS
  misc_feature: MA Experiment 20001556 PARAMETER Experiment Name: At_Drought_Soil_Dry_P Parameter: Post Timepoint (hr) Value: None
  misc_feature: MA Experiment 20001556 PARAMETER Experiment Name: At_Drought_Soil_Dry_P Parameter: Post-Treatment Value: None
  misc_feature: MA Experiment 20001556 PARAMETER Experiment Name: At_Drought_Soil_Dry_P Parameter: Timepoint (day) Value: 12
  misc_feature: MA Experiment 20001556 PARAMETER Experiment Name: At_Drought_Soil_Dry_P Parameter: Treatment Value: Drought vs. No Drought
  misc_feature: MA Experiment ID: 20001557 Result: Up-regulated in Transcription
  misc_feature: MA Experiment 20001557 PARAMETER Experiment Name: At_Drought_Soil_Dry_P Parameter: Age (day) Value: 27
  misc_feature: MA Experiment 20001557 PARAMETER Experiment Name: At_Drought_Soil_Dry_P Parameter: Organism Value: A. thaliana
  misc_feature: MA Experiment 20001557 PARAMETER Experiment Name: At_Drought_Soil_Dry_P Parameter: Plant Line Value: WS
  misc_feature: MA Experiment 20001557 PARAMETER Experiment Name: At_Drought_Soil_Dry_P Parameter: Post Timepoint (hr) Value: 3
  misc_feature: MA Experiment 20001557 PARAMETER Experiment Name: At_Drought_Soil_Dry_P Parameter: Post-Treatment Value: Re-Water vs. No Drought
  misc_feature: MA Experiment 20001557 PARAMETER Experiment Name: At_Drought_Soil_Dry_P Parameter: Timepoint (day) Value: 13
  misc_feature: MA Experiment 20001557 PARAMETER Experiment Name: At_Drought_Soil_Dry_P Parameter: Treatment Value: Drought vs. No Drought
  misc_feature: MA Experiment ID: 20001558 Result: Up-regulated in Transcription
  misc_feature: MA Experiment 20001558 PARAMETER Experiment Name: At_Drought_Soil_Dry_P Parameter: Age (day) Value: 27
  misc_feature: MA Experiment 20001558 PARAMETER Experiment Name: At_Drought_Soil_Dry_P Parameter: Organism Value: A. thaliana
  misc_feature: MA Experiment 20001558 PARAMETER Experiment Name: At_Drought_Soil_Dry_P Parameter: Plant Line Value: WS
  misc_feature: MA Experiment 20001558 PARAMETER Experiment Name: At_Drought_Soil_Dry_P Parameter: Post Timepoint (hr) Value: 6
  misc_feature: MA Experiment 20001558 PARAMETER Experiment Name: At_Drought_Soil_Dry_P Parameter: Post-Treatment Value: Re-Water vs. No Drought
  misc_feature: MA Experiment 20001558 PARAMETER Experiment Name: At_Drought_Soil_Dry_P Parameter: Timepoint (day) Value: 13
  misc_feature: MA Experiment 20001558 PARAMETER Experiment Name: At_Drought_Soil_Dry_P Parameter: Treatment Value: Drought vs. No Drought
  misc_feature: MA Experiment ID: 20001560 Result: Up-regulated in Transcription
  misc_feature: MA Experiment 20001560 PARAMETER Experiment Name: At_Drought_Soil_Dry_P Parameter: Age (day) Value: 28
  misc_feature: MA Experiment 20001560 PARAMETER Experiment Name: At_Drought_Soil_Dry_P Parameter: Organism Value: A. thaliana
  misc_feature: MA Experiment 20001560 PARAMETER Experiment Name: At_Drought_Soil_Dry_P Parameter: Plant Line Value: WS
  misc_feature: MA Experiment 20001560 PARAMETER Experiment Name: At_Drought_Soil_Dry_P Parameter: Post Timepoint (hr) Value: None
  misc_feature: MA Experiment 20001560 PARAMETER Experiment Name: At_Drought_Soil_Dry_P Parameter: Post-Treatment Value: None
  misc_feature: MA Experiment 20001560 PARAMETER Experiment Name: At_Drought_Soil_Dry_P Parameter: Timepoint (day) Value: 14
  misc_feature: MA Experiment 20001560 PARAMETER Experiment Name: At_Drought_Soil_Dry_P Parameter: Treatment Value: Drought vs. No Drought
  misc_feature: MA Experiment ID: 20001757 Result: Down-regulated in Transcription
  misc_feature: MA Experiment 20001757 PARAMETER Experiment Name: At_50mM_NH4NO3_L-to-H_P Parameter: Timepoint (hr) Value: 6
  misc_feature: MA Experiment 20001757 PARAMETER Experiment Name: At_50mM_NH4NO3_L-to-H_P Parameter: Tissue Value: Leaf
  misc_feature: MA Experiment 20001757 PARAMETER Experiment Name: At_50mM_NH4NO3_L-to-H_P Parameter: Treatment Value: 50mM NH4NO3 vs 100mM Mannitol
  misc_feature: MA Experiment ID: 20001904 Result: Up-regulated in Transcription
  misc_feature: MA Experiment 20001904 PARAMETER Experiment Name: At_Drought_Reproduction_P Parameter: Age (day) Value: 37
  misc_feature: MA Experiment 20001904 PARAMETER Experiment Name: At_Drought_Reproduction_P Parameter: Organism Value: A. thaliana
  misc_feature: MA Experiment 20001904 PARAMETER Experiment Name: At_Drought_Reproduction_P Parameter: Plant Line Value: WS
  misc_feature: MA Experiment 20001904 PARAMETER Experiment Name: At_Drought_Reproduction_P Parameter: Timepoint (day) Value: 7
  misc_feature: MA Experiment 20001904 PARAMETER Experiment Name: At_Drought_Reproduction_P Parameter: Tissue Value: Rosettes
  misc_feature: MA Experiment 20001904 PARAMETER Experiment Name: At_Drought_Reproduction_P Parameter: Treatment Value: Drought vs. No Drought
  misc_feature: MA Experiment ID: 20001905 Result: Up-regulated in Transcription
  misc_feature: MA Experiment 20001905 PARAMETER Experiment Name: At_Drought_Reproduction_P Parameter: Age (day) Value: 40
  misc_feature: MA Experiment 20001905 PARAMETER Experiment Name: At_Drought_Reproduction_P Parameter: Organism Value: A. thaliana
  misc_feature: MA Experiment 20001905 PARAMETER Experiment Name: At_Drought_Reproduction_P Parameter: Plant Line Value: WS
  misc_feature: MA Experiment 20001905 PARAMETER Experiment Name: At_Drought_Reproduction_P Parameter: Timepoint (day) Value: 10
  misc_feature: MA Experiment 20001905 PARAMETER Experiment Name: At_Drought_Reproduction_P Parameter: Tissue Value: Rosettes
  misc_feature: MA Experiment 20001905 PARAMETER Experiment Name: At_Drought_Reproduction_P Parameter: Treatment Value: Drought vs. No Drought
atggcaaatgcgatcacatttttcaagctcaacaccggcgctaagttcccttcggtgggtcttggaacatggcaagcttctcctggcctcgtcggtgatgcagtcgccgcggctgttaagattggctatcgtcacattgattgtgctcagatctatggcaacgaaaaagagattggggcagttctgaaaaaattgtttgaagacagagtagtgaaacgcgaggatttgttcatcacctccaaactctggtgtactgatcatgaccctcaagatgtcccggaggcattgaacagaactctcaaggatctgcagcttgaatacgtcgatctttatctgatacactggcctgcacggataaagaaaggttctgttggaataaagccagagaaccttttgcctgtagatattcctagtacatggaaagcgatggaagcactatacgattcgggcaaggcacgagccataggtgtaagcaatttctctaccaagaaactagctgatctcttggagttagctcgtgttcctcctgctgttaatcaggtcgaatgtcatccttcttggcgacaaactaagctacaagaattctgcaaatccaaaggggttcacctaagtgcatactcgccattaggttctccagggacaacatggctgaagagcgatgttttgaagaacccgatactgaatatggttgcggaaaaactcggaaagagtcctgcgcaagtcgcccttcgttggggactccaaatgggtcacagtgtgcttcccaagagtacaaatgaaggaaggatcaaagagaactttaatgttttcgactggtcaatacccgattacatgttcgctaagtttgctgagattgaacaggctaggttagtcactggttccttccttgttcatgagacactaagcccttacaagtctattgaagaattatgggatggcgagatatgatttttagctgatctaaataatgggagctaggtttctctctctgatgaactagtcagtatcttttttttttaatgaatgttaaatttattcaaccagaaaaaaccttctttacattatatgcaactttgagtagaacatgaaactgtattgtgcttgtcagtttcttatggatgttatttatttacaaagtttttttttatagaaaaaggatctattt

SEQ ID NO: 106336 - protein, 315 aa, Arabidopsis thaliana; identical to SEQ ID NO: 70899
  peptide (1)..(315): Ceres Seq. ID no. 13619288
  misc_feature (1)..(315): Homolog of NCBI NO: 30687247 NR Description: aldo/keto reductase family [Arabidopsis thaliana]
  misc_feature (12)..(315): Homolog of NCBI NO: 28393400 NR Description: putative aldo/keto reductase [Arabidopsis
  misc_feature (1)..(289): Homolog of NCBI NO: 7431114 NR Description: aldehyde dehydrogenase homolog At2g37770 - thaliana >gi|3236259|gb|AAC23647.1| putative alcohol
  misc_feature (1)..(315): Homolog of NCBI NO: 30687261 NR Description: aldo/keto reductase family [Arabidopsis thaliana]
  misc_feature (1)..(315): Homolog of NCBI NO: 15232354 NR Description: aldo/keto reductase family [Arabidopsis thaliana]
  misc_feature (1)..(288): Homolog of NCBI NO: 25283479 NR Description: probable alcohol dehydrogenase [imported] -
  misc_feature (287)..(315): Homolog of NCBI NO: 25283479 NR Description: probable alcohol dehydrogenase [imported] -
  misc_feature (1)..(315): Homolog of NCBI NO: 13160397 NR Description: aldose reductase [Digitalis purpurea]
  misc_feature (1)..(315): Homolog of NCBI NO: 13160399 NR Description: aldose reductase [Digitalis purpurea]
  misc_feature (1)..(315): Homolog of NCBI NO: 7431112 NR Description: abscisic acid activated protein - alfalfa

SEQ ID NO: 106337 - protein, 173 aa, Arabidopsis thaliana; identical to SEQ ID NO: 70900
  peptide (1)..(173): Ceres Seq. ID no. 13619289
  misc_feature (1)..(173): Homolog of NCBI NO: 30687247 NR Description: aldo/keto reductase family [Arabidopsis thaliana]
  misc_feature (1)..(173): Homolog of NCBI NO: 28393400 NR Description: putative aldo/keto reductase [Arabidopsis
  misc_feature (1)..(147): Homolog of NCBI NO: 7431114 NR Description: aldehyde dehydrogenase homolog At2g37770 - thaliana >gi|3236259|gb|AAC23647.1| putative alcohol
  misc_feature (1)..(173): Homolog of NCBI NO: 30687261 NR Description: aldo/keto reductase family [Arabidopsis thaliana]
  misc_feature (1)..(173): Homolog of NCBI NO: 15232354 NR Description: aldo/keto reductase family [Arabidopsis thaliana]
  misc_feature (1)..(146): Homolog of NCBI NO: 25283479 NR Description: probable alcohol dehydrogenase [imported] -
  misc_feature (145)..(173): Homolog of NCBI NO: 25283479 NR Description: probable alcohol dehydrogenase [imported] -
  misc_feature (1)..(173): Homolog of NCBI NO: 13160397 NR Description: aldose reductase [Digitalis purpurea]
  misc_feature (1)..(173): Homolog of NCBI NO: 13160399 NR Description: aldose reductase [Digitalis purpurea]
  misc_feature (1)..(173): Homolog of NCBI NO: 7431112 NR Description: abscisic acid activated protein - alfalfa

SEQ ID NO: 106338 - DNA, 1360 bp, Arabidopsis thaliana
  misc_feature (1)..(1360): Ceres Seq. ID no. 13619301
  misc_feature: MA Experiment ID: 108573 Result: Up-regulated in Transcription
  misc_feature: MA Experiment 108573 PARAMETER Experiment Name: At_Drought_cDNA_P Parameter: Timepoint (hr) Value: 6
  misc_feature: MA Experiment 108573 PARAMETER Experiment Name: At_Drought_cDNA_P Parameter: Tissue Value: Aerial
  misc_feature: MA Experiment 108573 PARAMETER Experiment Name: At_Drought_cDNA_P Parameter: Treatment Value: Drought vs. No Drought
  misc_feature: MA Experiment ID: 20000182 Result: Up-regulated in Transcription
  misc_feature: MA Experiment 20000182 PARAMETER Experiment Name: At_2mM_SA_P Parameter: Age (day) Value: 14
  misc_feature: MA Experiment 20000182 PARAMETER Experiment Name: At_2mM_SA_P Parameter: Organism Value: A. thaliana
  misc_feature: MA Experiment 20000182 PARAMETER Experiment Name: At_2mM_SA_P Parameter: Plant Line Value: WS
  misc_feature: MA Experiment 20000182 PARAMETER Experiment Name: At_2mM_SA_P Parameter: Timepoint (hr) Value: 6
  misc_feature: MA Experiment 20000182 PARAMETER Experiment Name: At_2mM_SA_P Parameter: Tissue Value: Aerial
  misc_feature: MA Experiment 20000182 PARAMETER Experiment Name: At_2mM_SA_P Parameter: Treatment Value: 2mM SA vs. No Treatment
  misc_feature: MA Experiment ID: 20000227 Result: Down-regulated in Transcription
  misc_feature: MA Experiment 20000227 PARAMETER Experiment Name: At_Root-Tips-vs-Tops_P Parameter: Tissue Value: Root Tips vs. Root Tops
aaatcaaaggatctcaatttctttagtcaacaggtgttccttctcttcttcctcgattcggaggtagagaagaaaaatggcagctccggcgatcctaaacggcggcgatgcgacggagagagaaacacgaatggctcactctgcaatgacattggttcaggtcataaatggaggataccatgtggttacgaaagtagctcttaacgttggtgtaaatcagctcgttttttgtgtctttcgcgatcttcttgctctctccattctcgcacctctcgcttttttccgtgaaagaacgatcagacctcctatgaatagaagcatcttcttttcactcttctttcttggtttagcagggatatttgggaaccagttactatttcttatgggtttatcttacacgaatccaacttatgctgctgctatacaaccatcaatccctgtctttacatttctcttggctgtcttgatgggtacagaaaaagtgaacttgttgaaagtcgagggccaaacgaaagttggaggtactcttgtttgtgtttcgggtgctatagcgatggctttgtttcgtggtccagccttgtttggaggtaaagatgcagcagattcagtgaaaagtgtaattattgatagaagtcaaccagagcttaatgggtggttagtctctagttttcttggtcttgggtttgatcaatggcacattggagttttatgtttgattggaaactgtatgtgtatggctgcttttctcgctgtccaagcaccggttttgaagaagtatcctgcctacctttcggttgctgcgtattcatacttcttcggtgcatcaataatgatcacaacagctatcttgtttgttagagagcctaaagattggagcttaacacaatctgaggttcttgctgttatattcgcaggagtgtttgcctcagctctaaactatggactcttgacttggtccaataaaattcttggagctgctttggtttccctatacaatcctcttcagcctgcaacatcggcctttttatcgacaattttcctcggcagcccgatctatcttggaagcgttttgggtggaatcctcatcatttgcgggctttatatggttacttgggcatcttacagagagcaacaaacaacatcagctgggaatgagattgcttcttctagtgatgtaagaatctcggaacctttcatttacagagatgagactggtaaataaataagaaaaggtaaagaaaggatacttgtaccgttgtacgtagttaatatcagacaaaaacttgacaaatcatacaattttttcgagttcaaacattgattctttaaacggtaaataattcaaaataattacttcgcc

SEQ ID NO: 106339 - protein, 381 aa, Arabidopsis thaliana
  peptide (1)..(381): Ceres Seq. ID no. 13619302
  misc_feature (219)..(346): Pfam Name: Integral membrane protein DUF6 Pfam Description: Integral membrane protein DUF6
  misc_feature (94)..(381): Homolog of NCBI NO: 9758727 NR Description: nodulin-like protein [Arabidopsis thaliana]
  misc_feature (1)..(72): Homolog of NCBI NO: 9758727 NR Description: nodulin-like protein [Arabidopsis thaliana]
  misc_feature (188)..(381): Homolog of NCBI NO: 30694751 NR Description: nodulin N21 family protein [Arabidopsis thaliana]
  misc_feature (1)..(170): Homolog of NCBI NO: 30694751 NR Description: nodulin N21 family protein [Arabidopsis thaliana]
  misc_feature (1)..(375): Homolog of NCBI NO: 18415262 NR Description: nodulin-related protein [Arabidopsis thaliana] AT4g19180/T18B16_150 [Arabidopsis thaliana] At4g19180/T18B16_150 [Arabidopsis thaliana]
  misc_feature (24)..(375): Homolog of NCBI NO: 21593145 NR Description: unknown [Arabidopsis thaliana]
  misc_feature (14)..(174): Homolog of NCBI NO: 15231274 NR Description: notdulin N21 family protein [Arabidopsis thaliana]
  misc_feature (226)..(381): Homolog of NCBI NO: 15231274 NR Description: notdulin N21 family protein [Arabidopsis thaliana]
  misc_feature (1)..(220): Homolog of NCBI NO: 7487133 NR Description: hypothetical protein T18B16.150 - Arabidopsis >gi|2828293|emb|CAA16707.1| putative protein [Arabidopsis >gi|7268713|emb|CAB78920.1| putative protein [Arabidopsis
  misc_feature (226)..(329): Homolog of NCBI NO: 7487133 NR Description: hypothetical protein T18B16.150 - Arabidopsis >gi|2828293|emb|CAA16707.1| putative protein [Arabidopsis >gi|7268713|emb|CAB78920.1| putative protein [Arabidopsis
MAAPAILNGGDATERETRMAHSAMTLVQVINGGYHVVTKVALNVGVNQLVFCVFRDLLALSILAPLAFFRERTIRPPMNRSIFFSLFFLGLAGIFGNQLLFLMGLSYTNPTYAAAIQPSIPVFTFLLAVLMGTEKVNLLKVEGQTKVGGTLVCVSGAIAMALFRGPALFGGKDAADSVKSVIIDRSQPELNGWLVSSFLGLGFDQWHIGVLCLIGNCMCMAAFLAVQAPVLKKYPAYLSVAAYSYFFGASIMITTAILFVREPKDWSLTQSEVLAVIFAGVFASALNYGLLTWSNKILGAALVSLYNPLQPATSAFLSTIFLGSPIYLGSVLGGILIICGLYMVTWASYREQQTTSAGNEIASSSDVRISEPFIYRDETGK

SEQ ID NO: 106340 - protein, 363 aa, Arabidopsis thaliana
  peptide (1)..(363): Ceres Seq. ID no. 13619303
  misc_feature (201)..(328): Pfam Name: Integral membrane protein DUF6 Pfam Description: Integral membrane protein DUF6
  misc_feature (76)..(363): Homolog of NCBI NO: 9758727 NR Description: nodulin-like protein [Arabidopsis thaliana]
  misc_feature (1)..(54): Homolog of NCBI NO: 9758727 NR Description: nodulin-like protein [Arabidopsis thaliana]
  misc_feature (170)..(363): Homolog of NCBI NO: 30694751 NR Description: nodulin N21 family protein [Arabidopsis thaliana]
  misc_feature (1)..(152): Homolog of NCBI NO: 30694751 NR Description: nodulin N21 family protein [Arabidopsis thaliana]
  misc_feature (1)..(357): Homolog of NCBI NO: 18415262 NR Description: nodulin-related protein [Arabidopsis thaliana] AT4g19180/T18B16_150 [Arabidopsis thaliana] At4g19180/T18B16_150 [Arabidopsis thaliana]
  misc_feature (6)..(357): Homolog of NCBI NO: 21593145 NR Description: unknown [Arabidopsis thaliana]
  misc_feature (1)..(156): Homolog of NCBI NO: 15231274 NR Description: notdulin N21 family protein [Arabidopsis thaliana]
  misc_feature (208)..(363): Homolog of NCBI NO: 15231274 NR Description: notdulin N21 family protein [Arabidopsis thaliana]
  misc_feature (1)..(202): Homolog of NCBI NO: 7487133 NR Description: hypothetical protein T18B16.150 - Arabidopsis >gi|2828293|emb|CAA16707.1| putative protein [Arabidopsis >gi|7268713|emb|CAB78920.1| putative protein [Arabidopsis
  misc_feature (208)..(311): Homolog of NCBI NO: 7487133 NR Description: hypothetical protein T18B16.150 - Arabidopsis >gi|2828293|emb|CAA16707.1| putative protein [Arabidopsis >gi|7268713|emb|CAB78920.1| putative protein [Arabidopsis
MAHSAMTLVQVINGGYHVVTKVALNVGVNQLVFCVFRDLLALSILAPLAFFRERTIRPPMNRSIFFSLFFLGLAGIFGNQLLFLMGLSYTNPTYAAAIQPSIPVFTFLLAVLMGTEKVNLLKVEGQTKVGGTLVCVSGAIAMALFRGPALFGGKDAADSVKSVIIDRSQPELNGWLVSSFLGLGFDQWHIGVLCLIGNCMCMAAFLAVQAPVLKKYPAYLSVAAYSYFFGASIMITTAILFVREPKDWSLTQSEVLAVIFAGVFASALNYGLLTWSNKILGAALVSLYNPLQPATSAFLSTIFLGSPIYLGSVLGGILIICGLYMVTWASYREQQTTSAGNEIASSSDVRISEPFIYRDETGK

SEQ ID NO: 106341 - protein, 358 aa, Arabidopsis thaliana
  peptide (1)..(358): Ceres Seq. ID no. 13619304
  misc_feature (196)..(323): Pfam Name: Integral membrane protein DUF6 Pfam Description: Integral membrane protein DUF6
  misc_feature (71)..(358): Homolog of NCBI NO: 9758727 NR Description: nodulin-like protein [Arabidopsis thaliana]
  misc_feature (1)..(49): Homolog of NCBI NO: 9758727 NR Description: nodulin-like protein [Arabidopsis thaliana]
  misc_feature (165)..(358): Homolog of NCBI NO: 30694751 NR Description: nodulin N21 family protein [Arabidopsis thaliana]
  misc_feature (1)..(147): Homolog of NCBI NO: 30694751 NR Description: nodulin N21 family protein [Arabidopsis thaliana]
  misc_feature (1)..(352): Homolog of NCBI NO: 18415262 NR Description: nodulin-related protein [Arabidopsis thaliana] AT4g19180/T18B16_150 [Arabidopsis thaliana] At4g19180/T18B16_150 [Arabidopsis thaliana]
  misc_feature (1)..(352): Homolog of NCBI NO: 21593145 NR Description: unknown [Arabidopsis thaliana]
  misc_feature (1)..(151): Homolog of NCBI NO: 15231274 NR Description: notdulin N21 family protein [Arabidopsis thaliana]
  misc_feature (203)..(358): Homolog of NCBI NO: 15231274 NR Description: notdulin N21 family protein [Arabidopsis thaliana]
  misc_feature (1)..(197): Homolog of NCBI NO: 7487133 NR Description: hypothetical protein T18B16.150 - Arabidopsis >gi|2828293|emb|CAA16707.1| putative protein [Arabidopsis >gi|7268713|emb|CAB78920.1| putative protein [Arabidopsis
  misc_feature (203)..(306): Homolog of NCBI NO: 7487133 NR Description: hypothetical protein T18B16.150 - Arabidopsis >gi|2828293|emb|CAA16707.1| putative protein [Arabidopsis >gi|7268713|emb|CAB78920.1| putative protein [Arabidopsis
MTLVQVINGGYHVVTKVALNVGVNQLVFCVFRDLLALSILAPLAFFRERTIRPPMNRSIFFSLFFLGLAGIFGNQLLFLMGLSYTNPTYAAAIQPSIPVFTFLLAVLMGTEKVNLLKVEGQTKVGGTLVCVSGAIAMALFRGPALFGGKDAADSVKSVIIDRSQPELNGWLVSSFLGLGFDQWHIGVLCLIGNCMCMAAFLAVQAPVLKKYPAYLSVAAYSYFFGASIMITTAILFVREPKDWSLTQSEVLAVIFAGVFASALNYGLLTWSNKILGAALVSLYNPLQPATSAFLSTIFLGSPIYLGSVLGGILIICGLYMVTWASYREQQTTSAGNEIASSSDVRISEPFIYRDETGK

SEQ ID NO: 106342 - DNA, 1580 bp, Arabidopsis thaliana
  misc_feature (1)..(1580): Ceres Seq. ID no. 13619309
  misc_feature: MA Experiment ID: 108434 Result: Down-regulated in Transcription
  misc_feature: MA Experiment 108434 PARAMETER Experiment Name: At_Root_Tips_cDNA_P Parameter: Tissue Value: Root Tips
  misc_feature: MA Experiment ID: 108435 Result: Down-regulated in Transcription
  misc_feature: MA Experiment 108435 PARAMETER Experiment Name: At_stm_Mutants_cDNA_P Parameter: Plant Line Value: wt Landsburg vs stm
  misc_feature: MA Experiment 108435 PARAMETER Experiment Name: At_stm_Mutants_cDNA_P Parameter: Tissue Value: Shoot Apical Meristem Region
  misc_feature: MA Experiment ID: 108461 Result: Up-regulated in Transcription
  misc_feature: MA Experiment 108461 PARAMETER Experiment Name: At_Germinating_Seeds_cDNA_P Parameter: Age (day) Value: 1 vs. 0
  misc_feature: MA Experiment 108461 PARAMETER Experiment Name: At_Germinating_Seeds_cDNA_P Parameter: Tissue Value: Germinating Seeds
  misc_feature: MA Experiment ID: 108462 Result: Up-regulated in Transcription
  misc_feature: MA Experiment 108462 PARAMETER Experiment Name: At_Germinating_Seeds_cDNA_P Parameter: Age (day) Value: 2 vs. 0
  misc_feature: MA Experiment 108462 PARAMETER Experiment Name: At_Germinating_Seeds_cDNA_P Parameter: Tissue Value: Germinating Seeds
  misc_feature: MA Experiment ID: 108463 Result: Up-regulated in Transcription
  misc_feature: MA Experiment 108463 PARAMETER Experiment Name: At_Germinating_Seeds_cDNA_P Parameter: Age (day) Value: 3 vs. 0
  misc_feature: MA Experiment 108463 PARAMETER Experiment Name: At_Germinating_Seeds_cDNA_P Parameter: Tissue Value: Germinating Seeds
  misc_feature: MA Experiment ID: 108488 Result: Up-regulated in Transcription
  misc_feature: MA Experiment ID: 108489 Result: Down-regulated in Transcription
  misc_feature: MA Experiment ID: 108573 Result: Up-regulated in Transcription
  misc_feature: MA Experiment 108573 PARAMETER Experiment Name: At_Drought_cDNA_P Parameter: Timepoint (hr) Value: 6
  misc_feature: MA Experiment 108573 PARAMETER Experiment Name: At_Drought_cDNA_P Parameter: Tissue Value: Aerial
  misc_feature: MA Experiment 108573 PARAMETER Experiment Name: At_Drought_cDNA_P Parameter: Treatment Value: Drought vs. No Drought
  misc_feature: MA Experiment ID: 108594 Result: Down-regulated in Transcription
  misc_feature: MA Experiment 108594 PARAMETER Experiment Name: At_Ler-rhl_Root_cDNA_P Parameter: Plant Line Value: null
  misc_feature: MA Experiment ID: 108595 Result: Down-regulated in Transcription
  misc_feature: MA Experiment 108595 PARAMETER Experiment Name: At_Ler-pi_Ovule_cDNA_P Parameter: Plant Line Value: null
  misc_feature: MA Experiment ID: 20000113 Result: Down-regulated in Transcription
  misc_feature: MA Experiment 20000113 PARAMETER Experiment Name: At_42deg_Heat_cDNA_P Parameter: Temperature (deg C) Value: 42 vs. 22
  misc_feature: MA Experiment 20000113 PARAMETER Experiment Name: At_42deg_Heat_cDNA_P Parameter: Timepoint (hr) Value: 8
  misc_feature: MA Experiment 20000113 PARAMETER Experiment Name: At_42deg_Heat_cDNA_P Parameter: Tissue Value: Aerial
  misc_feature: MA Experiment ID: 20000179 Result: Up-regulated in Transcription
  misc_feature: MA Experiment 20000179 PARAMETER Experiment Name: At_Germinating_Seeds_P Parameter: Age (hr) Value: 6 vs. 0
  misc_feature: MA Experiment 20000179 PARAMETER Experiment Name: At_Germinating_Seeds_P Parameter: Tissue Value: Germinating Seeds
  misc_feature: MA Experiment ID: 20000180 Result: Up-regulated in Transcription
  misc_feature: MA Experiment 20000180 PARAMETER Experiment Name: At_Germinating_Seeds_P Parameter: Age (hr) Value: 24 vs. 0
  misc_feature: MA Experiment 20000180 PARAMETER Experiment Name: At_Germinating_Seeds_P Parameter: Tissue Value: Germinating Seeds
  misc_feature: MA Experiment ID: 20000185 Result: Down-regulated in Transcription
  misc_feature: MA Experiment 20000185 PARAMETER Experiment Name: At_Roots__P Parameter: Age (day) Value: 7 vs. 21
  misc_feature: MA Experiment 20000185 PARAMETER Experiment Name: At_Roots__P Parameter: Organism Value: A. thaliana
  misc_feature: MA Experiment 20000185 PARAMETER Experiment Name: At_Roots__P Parameter: Tissue Value: Roots vs. Whole Plant
  misc_feature: MA Experiment ID: 20000227 Result: Down-regulated in Transcription
  misc_feature: MA Experiment 20000227 PARAMETER Experiment Name: At_Root-Tips-vs-Tops_P Parameter: Tissue Value: Root Tips vs. Root Tops
  misc_feature: MA Experiment ID: 20000269 Result: Down-regulated in Transcription
  misc_feature: MA Experiment 20000269 PARAMETER Experiment Name: At_1mM_KNO3_L-vs-H_Roots_P Parameter: Age (day) Value: 7,10,12
  misc_feature: MA Experiment 20000269 PARAMETER Experiment Name: At_1mM_KNO3_L-vs-H_Roots_P Parameter: Organism Value: A. thaliana
  misc_feature: MA Experiment 20000269 PARAMETER Experiment Name: At_1mM_KNO3_L-vs-H_Roots_P Parameter: Plant Line Value: WS
  misc_feature: MA Experiment 20000269 PARAMETER Experiment Name: At_1mM_KNO3_L-vs-H_Roots_P Parameter: Timepoint (day) Value: 7,10,12
  misc_feature: MA Experiment 20000269 PARAMETER Experiment Name: At_1mM_KNO3_L-vs-H_Roots_P Parameter: Tissue Value: Roots
  misc_feature: MA Experiment 20000269 PARAMETER Experiment Name: At_1mM_KNO3_L-vs-H_Roots_P Parameter: Treatment Value: 1mM KNO3 vs. 50mM KNO3
  misc_feature: MA Experiment ID: 20000437 Result: Down-regulated in Transcription
  misc_feature: MA Experiment 20000437 PARAMETER Experiment Name: At_Drought_P Parameter: Age (day) Value: 8
  misc_feature: MA Experiment 20000437 PARAMETER Experiment Name: At_Drought_P Parameter: Organism Value: A. thaliana
  misc_feature: MA Experiment 20000437 PARAMETER Experiment Name: At_Drought_P Parameter: Plant Line Value: WS
  misc_feature: MA Experiment 20000437 PARAMETER Experiment Name: At_Drought_P Parameter: Timepoint (hr) Value: 24
  misc_feature: MA Experiment 20000437 PARAMETER Experiment Name: At_Drought_P Parameter: Tissue Value: Whole Plant
  misc_feature: MA Experiment 20000437 PARAMETER Experiment Name: At_Drought_P Parameter: Treatment Value: Drought vs. No Drought
  misc_feature: MA Experiment ID: 20000439 Result: Down-regulated in Transcription
  misc_feature: MA Experiment 20000439 PARAMETER Experiment Name: At_Roots__P Parameter: Age (day) Value: 14 vs. 21
  misc_feature: MA Experiment 20000439 PARAMETER Experiment Name: At_Roots__P Parameter: Organism Value: A. thaliana
  misc_feature: MA Experiment 20000439 PARAMETER Experiment Name: At_Roots__P Parameter: Tissue Value: Roots vs. Whole Plant
  misc_feature: MA Experiment ID: 20001557 Result: Down-regulated in Transcription
  misc_feature: MA Experiment 20001557 PARAMETER Experiment Name: At_Drought_Soil_Dry_P Parameter: Age (day) Value: 27
  misc_feature: MA Experiment 20001557 PARAMETER Experiment Name: At_Drought_Soil_Dry_P Parameter: Organism Value: A. thaliana
  misc_feature: MA Experiment 20001557 PARAMETER Experiment Name: At_Drought_Soil_Dry_P Parameter: Plant Line Value: WS
  misc_feature: MA Experiment 20001557 PARAMETER Experiment Name: At_Drought_Soil_Dry_P Parameter: Post Timepoint (hr) Value: 3
  misc_feature: MA Experiment 20001557 PARAMETER Experiment Name: At_Drought_Soil_Dry_P Parameter: Post-Treatment Value: Re-Water vs. No Drought
  misc_feature: MA Experiment 20001557 PARAMETER Experiment Name: At_Drought_Soil_Dry_P Parameter: Timepoint (day) Value: 13
  misc_feature: MA Experiment 20001557 PARAMETER Experiment Name: At_Drought_Soil_Dry_P Parameter: Treatment Value: Drought vs. No Drought
  misc_feature: MA Experiment ID: 20001558 Result: Down-regulated in Transcription
  misc_feature: MA Experiment 20001558 PARAMETER Experiment Name: At_Drought_Soil_Dry_P Parameter: Age (day) Value: 27
  misc_feature: MA Experiment 20001558 PARAMETER Experiment Name: At_Drought_Soil_Dry_P Parameter: Organism Value: A. thaliana
  misc_feature: MA Experiment 20001558 PARAMETER Experiment Name: At_Drought_Soil_Dry_P Parameter: Plant Line Value: WS
  misc_feature: MA Experiment 20001558 PARAMETER Experiment Name: At_Drought_Soil_Dry_P Parameter: Post Timepoint (hr) Value: 6
  misc_feature: MA Experiment 20001558 PARAMETER Experiment Name: At_Drought_Soil_Dry_P Parameter: Post-Treatment Value: Re-Water vs. No Drought
  misc_feature: MA Experiment 20001558 PARAMETER Experiment Name: At_Drought_Soil_Dry_P Parameter: Timepoint (day) Value: 13
  misc_feature: MA Experiment 20001558 PARAMETER Experiment Name: At_Drought_Soil_Dry_P Parameter: Treatment Value: Drought vs. No Drought
  misc_feature: MA Experiment ID: 20001559 Result: Down-regulated in Transcription
  misc_feature: MA Experiment 20001559 PARAMETER Experiment Name: At_Drought_Soil_Dry_P Parameter: Age (day) Value: 28
  misc_feature: MA Experiment 20001559 PARAMETER Experiment Name: At_Drought_Soil_Dry_P Parameter: Organism Value: A. thaliana
  misc_feature: MA Experiment 20001559 PARAMETER Experiment Name: At_Drought_Soil_Dry_P Parameter: Plant Line Value: WS
  misc_feature: MA Experiment 20001559 PARAMETER Experiment Name: At_Drought_Soil_Dry_P Parameter: Post Timepoint (hr) Value: 29
  misc_feature: MA Experiment 20001559 PARAMETER Experiment Name: At_Drought_Soil_Dry_P Parameter: Post-Treatment Value: Re-Water vs. No Drought
  misc_feature: MA Experiment 20001559 PARAMETER Experiment Name: At_Drought_Soil_Dry_P Parameter: Timepoint (day) Value: 14
  misc_feature: MA Experiment 20001559 PARAMETER Experiment Name: At_Drought_Soil_Dry_P Parameter: Treatment Value: Drought vs. No Drought
  misc_feature: MA Experiment ID: 20001560 Result: Down-regulated in Transcription
  misc_feature: MA Experiment 20001560 PARAMETER Experiment Name: At_Drought_Soil_Dry_P Parameter: Age (day) Value: 28
  misc_feature: MA Experiment 20001560 PARAMETER Experiment Name: At_Drought_Soil_Dry_P Parameter: Organism Value: A. thaliana
  misc_feature: MA Experiment 20001560 PARAMETER Experiment Name: At_Drought_Soil_Dry_P Parameter: Plant Line Value: WS
  misc_feature: MA Experiment 20001560 PARAMETER Experiment Name: At_Drought_Soil_Dry_P Parameter: Post Timepoint (hr) Value: None
  misc_feature: MA Experiment 20001560 PARAMETER Experiment Name: At_Drought_Soil_Dry_P Parameter: Post-Treatment Value: None
  misc_feature: MA Experiment 20001560 PARAMETER Experiment Name: At_Drought_Soil_Dry_P Parameter: Timepoint (day) Value: 14
  misc_feature: MA Experiment 20001560 PARAMETER Experiment Name: At_Drought_Soil_Dry_P Parameter: Treatment Value: Drought vs. No Drought
  misc_feature: MA Experiment ID: 20001757 Result: Up-regulated in Transcription
  misc_feature: MA Experiment 20001757 PARAMETER Experiment Name: At_50mM_NH4NO3_L-to-H_P Parameter: Timepoint (hr) Value: 6
  misc_feature: MA Experiment 20001757 PARAMETER Experiment Name: At_50mM_NH4NO3_L-to-H_P Parameter: Tissue Value: Leaf
  misc_feature: MA Experiment 20001757 PARAMETER Experiment Name: At_50mM_NH4NO3_L-to-H_P Parameter: Treatment Value: 50mM NH4NO3 vs 100mM Mannitol
  misc_feature: MA Experiment ID: 20001904 Result: Down-regulated in Transcription
  misc_feature: MA Experiment 20001904 PARAMETER Experiment Name: At_Drought_Reproduction_P Parameter: Age (day) Value: 37
  misc_feature: MA Experiment 20001904 PARAMETER Experiment Name: At_Drought_Reproduction_P Parameter: Organism Value: A. thaliana
  misc_feature: MA Experiment 20001904 PARAMETER Experiment Name: At_Drought_Reproduction_P Parameter: Plant Line Value: WS
  misc_feature: MA Experiment 20001904 PARAMETER Experiment Name: At_Drought_Reproduction_P Parameter: Timepoint (day) Value: 7
  misc_feature: MA Experiment 20001904 PARAMETER Experiment Name: At_Drought_Reproduction_P Parameter: Tissue Value: Rosettes
  misc_feature: MA Experiment 20001904 PARAMETER Experiment Name: At_Drought_Reproduction_P Parameter: Treatment Value: Drought vs. No Drought
  misc_feature: MA Experiment ID: 20001905 Result: Down-regulated in Transcription
  misc_feature: MA Experiment 20001905 PARAMETER Experiment Name: At_Drought_Reproduction_P Parameter: Age (day) Value: 40
  misc_feature: MA Experiment 20001905 PARAMETER Experiment Name: At_Drought_Reproduction_P Parameter: Organism Value: A. thaliana
  misc_feature: MA Experiment 20001905 PARAMETER Experiment Name: At_Drought_Reproduction_P Parameter: Plant Line Value: WS
  misc_feature: MA Experiment 20001905 PARAMETER Experiment Name: At_Drought_Reproduction_P Parameter: Timepoint (day) Value: 10
  misc_feature: MA Experiment 20001905 PARAMETER Experiment Name: At_Drought_Reproduction_P Parameter: Tissue Value: Rosettes
  misc_feature: MA Experiment 20001905 PARAMETER Experiment Name: At_Drought_Reproduction_P Parameter: Treatment Value: Drought vs. No Drought
  misc_feature: MA Experiment ID: 20001906 Result: Down-regulated in Transcription
  misc_feature: MA Experiment 20001906 PARAMETER Experiment Name: At_Drought_Reproduction_P Parameter: Age (day) Value: 35
  misc_feature: MA Experiment 20001906 PARAMETER Experiment Name: At_Drought_Reproduction_P Parameter: Organism Value: A. thaliana
  misc_feature: MA Experiment 20001906 PARAMETER Experiment Name: At_Drought_Reproduction_P Parameter: Plant Line Value: WS
  misc_feature: MA Experiment 20001906 PARAMETER Experiment Name: At_Drought_Reproduction_P Parameter: Timepoint (day) Value: 5
  misc_feature: MA Experiment 20001906 PARAMETER Experiment Name: At_Drought_Reproduction_P Parameter: Tissue Value: Siliques
  misc_feature: MA Experiment 20001906 PARAMETER Experiment Name: At_Drought_Reproduction_P Parameter: Treatment Value: Drought vs. No Drought
  misc_feature: MA Experiment ID: 20001908 Result: Down-regulated in Transcription
  misc_feature: MA Experiment 20001908 PARAMETER Experiment Name: At_Drought_Reproduction_P Parameter: Age (day) Value: 40
  misc_feature: MA Experiment 20001908 PARAMETER Experiment Name: At_Drought_Reproduction_P Parameter: Organism Value: A. thaliana
  misc_feature: MA Experiment 20001908 PARAMETER Experiment Name: At_Drought_Reproduction_P Parameter: Plant Line Value: WS
  misc_feature: MA Experiment 20001908 PARAMETER Experiment Name: At_Drought_Reproduction_P Parameter: Timepoint (day) Value: 10
  misc_feature: MA Experiment 20001908 PARAMETER Experiment Name: At_Drought_Reproduction_P Parameter: Tissue Value: Siliques
  misc_feature: MA Experiment 20001908 PARAMETER Experiment Name: At_Drought_Reproduction_P Parameter: Treatment Value: Drought vs. No Drought
ccctctttgctctcactatcaaaactctgaatttcgatttcaatggagtcacgcgtgctgttacgcgccaccgcgaatgtcgttggaattccgaaattgagacgaccaatcggagcgatccaccgtcaattcagcactgcatcgtcttcctcgttctcggttaaaccaatcggaggaatcggagagggagcgaatctgatctccggtcgtcagcttcgtccaattcttcttctcgattcgtcggcgatcaacggaggagagaaaagagaaattctcaaaccggttaaagccgccgctgctgaaggtggagataccgctggggatgctaaagttggattcctcgccaagtatccatggctagtcactggattcttcttcttcatgtggtacttcttgaatgtgattttcaacatccttaacaagaagatctataattacttcccttatccctattttgtatcggtgatacacttgttcgtgggagttgtttactgcttgatcagctggtccgtgggtcttcctaaacgtgccccgattgactcgaacctcctcaaggtattgataccagtcgcagtctgtcacgccttaggccatgtcactagcaatgtctctttcgctgcggttgctgtctccttcactcacaccatcaaagcacttgagccattcttcaatgcggctgcttctcaattcattatgggacaatccatccccataacactatggttgtctctagctcctgttgttcttggtgttgcaatggcttcactaactgagctatcattcaactggctcggtttcatcagtgctatgatatcaaacatttctttcacttaccgaagcatcttctccaagaaagccatgactgatatggacagtacaaatgtctacgcttacatctccatcatcgcactcttcgtctgcattcctcctgccatcatcgttgaaggtcctaaactacttaaccatggtttcgccgacgcgattgctaaagttggaatgactaaattcatctctgatctcttctgggttggaatgttttaccatctctacaatcagctggctaccaataccttggagagggttgcaccgctgactcacgcggttggaaacgttctgaaacgtgtgttcgtgatcggtttctccatcgttatcttcggaaacaagatatcgacacagacaggtataggaacaggaatagccattgctggagttgcaatgtactctatcattaaggccaagatcgaagaagagaaacggcaaggaaagaaagcatagaaagcagctgaagacggcggtcgacagttgcataaacaagttctccgatggatatatatatatctatataataaataaccaaatgcaatagtatgttgtattgtaccatcaaccattgttttcgagtttttcctttctttgttttttttttgctttctgaaaagttatatataaattttttattctgcttcttctctttttaatggagaacattttcatttccatttcttctgatatgcaattatcttaacggataaaaggcataataatgtatttatttgctctttctcttggagcatataccc

SEQ ID NO: 106343 - protein, 410 aa, Arabidopsis thaliana
  peptide (1)..(410): Ceres Seq. ID no. 13619310
  misc_feature (1)..(410): Homolog of NCBI NO: 30694881 NR Description: phosphate/triose-phosphate translocator, putative
  misc_feature (1)..(410): Homolog of NCBI NO: 21593093 NR Description: phosphate/triose-phosphate translocator precursor
  misc_feature (1)..(405): Homolog of NCBI NO: 9757731 NR Description: phosphate/triose-phosphate translocator precursor
  misc_feature (1)..(410): Homolog of NCBI NO: 1706107 NR Description: TRIOSE PHOSPHATE/PHOSPHATE TRANSLOCATOR,
  misc_feature (1)..(410): Homolog of NCBI NO: 9295273 NR Description: triose phosphate/phosphate translocator precursor
  misc_feature (1)..(410): Homolog of NCBI NO: 629694 NR Description: phosphate translocator, chloroplast - common >gi|403023|emb|CAA52979.1| phosphate translocator [Nicotiana
  misc_feature (1)..(408): Homolog of NCBI NO: 117291 NR Description: TRIOSE PHOSPHATE/PHOSPHATE TRANSLOCATOR,
  misc_feature (1)..(410): Homolog of NCBI NO: 117290 NR Description: TRIOSE PHOSPHATE/PHOSPHATE TRANSLOCATOR,
  misc_feature (1)..(410): Homolog of NCBI NO: 1352198 NR Description: TRIOSE PHOSPHATE/PHOSPHATE TRANSLOCATOR,
  misc_feature (1)..(410): Homolog of NCBI NO: 1352199 NR Description: Triose phosphate/phosphate translocator,
MESRVLLRATANVVGIPKLRRPIGAIHRQFSTASSSSFSVKPIGGIGEGANLISGRQLRPILLLDSSAINGGEKREILKPVKAAAAEGGDTAGDAKVGFLAKYPWLVTGFFFFMWYFLNVIFNILNKKIYNYFPYPYFVSVIHLFVGVVYCLISWSVGLPKRAPIDSNLLKVLIPVAVCHALGHVTSNVSFAAVAVSFTHTIKALEPFFNAAASQFIMGQSIPITLWLSLAPVVLGVAMASLTELSFNWLGFISAMISNISFTYRSIFSKKAMTDMDSTNVYAYISIIALFVCIPPAIIVEGPKLLNHGFADAIAKVGMTKFISDLFWVGMFYHLYNQLATNTLERVAPLTHAVGNVLKRVFVIGFSIVIFGNKISTQTGIGTGIAIAGVAMYSIIKAKIEEEKRQGKKA

SEQ ID NO: 106344 - protein, 297 aa, Arabidopsis thaliana; identical to SEQ ID NO: 23306
  peptide (1)..(297): Ceres Seq. ID no. 13619311
  misc_feature (1)..(297): Homolog of NCBI NO: 30694881 NR Description: phosphate/triose-phosphate translocator, putative
  misc_feature (1)..(297): Homolog of NCBI NO: 21593093 NR Description: phosphate/triose-phosphate translocator precursor
  misc_feature (1)..(292): Homolog of NCBI NO: 9757731 NR Description: phosphate/triose-phosphate translocator precursor
  misc_feature (1)..(297): Homolog of NCBI NO: 1706107 NR Description: TRIOSE PHOSPHATE/PHOSPHATE TRANSLOCATOR,
  misc_feature (1)..(297): Homolog of NCBI NO: 9295273 NR Description: triose phosphate/phosphate translocator precursor
  misc_feature (1)..(297): Homolog of NCBI NO: 629694 NR Description: phosphate translocator, chloroplast - common >gi|403023|emb|CAA52979.1| phosphate translocator [Nicotiana
  misc_feature (1)..(295): Homolog of NCBI NO: 117291 NR Description: TRIOSE PHOSPHATE/PHOSPHATE TRANSLOCATOR,
  misc_feature (1)..(297): Homolog of NCBI NO: 117290 NR Description: TRIOSE PHOSPHATE/PHOSPHATE TRANSLOCATOR,
  misc_feature (1)..(297): Homolog of NCBI NO: 1352198 NR Description: TRIOSE PHOSPHATE/PHOSPHATE TRANSLOCATOR,
  misc_feature (1)..(297): Homolog of NCBI NO: 1352199 NR Description: Triose phosphate/phosphate translocator,

SEQ ID NO: 106345 - DNA, 1115 bp, Arabidopsis thaliana
  misc_feature (1)..(1115): Ceres Seq. ID no. 13619316
  misc_feature: MA Experiment ID: 20000185 Result: Down-regulated in Transcription
  misc_feature: MA Experiment 20000185 PARAMETER Experiment Name: At_Roots__P Parameter: Age (day) Value: 7 vs. 21
  misc_feature: MA Experiment 20000185 PARAMETER Experiment Name: At_Roots__P Parameter: Organism Value: A. thaliana
  misc_feature: MA Experiment 20000185 PARAMETER Experiment Name: At_Roots__P Parameter: Tissue Value: Roots vs. Whole Plant
  misc_feature: MA Experiment ID: 20000227 Result: Down-regulated in Transcription
  misc_feature: MA Experiment 20000227 PARAMETER Experiment Name: At_Root-Tips-vs-Tops_P Parameter: Tissue Value: Root Tips vs. Root Tops
  misc_feature: MA Experiment ID: 20000264 Result: Down-regulated in Transcription
  misc_feature: MA Experiment 20000264 PARAMETER Experiment Name: At_Open_Flower_P Parameter: Age (day) Value: 21
  misc_feature: MA Experiment 20000264 PARAMETER Experiment Name: At_Open_Flower_P Parameter: Plant Line Value: WS
  misc_feature: MA Experiment 20000264 PARAMETER Experiment Name: At_Open_Flower_P Parameter: Tissue Value: Open Flower vs. Whole Plant
  misc_feature: MA Experiment ID: 20000269 Result: Down-regulated in Transcription
  misc_feature: MA Experiment 20000269 PARAMETER Experiment Name: At_1mM_KNO3_L-vs-H_Roots_P Parameter: Age (day) Value: 7,10,12
  misc_feature: MA Experiment 20000269 PARAMETER Experiment Name: At_1mM_KNO3_L-vs-H_Roots_P Parameter: Organism Value: A. thaliana
  misc_feature: MA Experiment 20000269 PARAMETER Experiment Name: At_1mM_KNO3_L-vs-H_Roots_P Parameter: Plant Line Value: WS
  misc_feature: MA Experiment 20000269 PARAMETER Experiment Name: At_1mM_KNO3_L-vs-H_Roots_P Parameter: Timepoint (day) Value: 7,10,12
  misc_feature: MA Experiment 20000269 PARAMETER Experiment Name: At_1mM_KNO3_L-vs-H_Roots_P Parameter: Tissue Value: Roots
  misc_feature: MA Experiment 20000269 PARAMETER Experiment Name: At_1mM_KNO3_L-vs-H_Roots_P Parameter: Treatment Value: 1mM KNO3 vs. 50mM KNO3
  misc_feature: MA Experiment ID: 20000439 Result: Down-regulated in Transcription
  misc_feature: MA Experiment 20000439 PARAMETER Experiment Name: At_Roots__P Parameter: Age (day) Value: 14 vs. 21
  misc_feature: MA Experiment 20000439 PARAMETER Experiment Name: At_Roots__P Parameter: Organism Value: A. thaliana
  misc_feature: MA Experiment 20000439 PARAMETER Experiment Name: At_Roots__P Parameter: Tissue Value: Roots vs. Whole Plant
  misc_feature: MA Experiment ID: 20000794 Result: Down-regulated in Transcription
  misc_feature: MA Experiment 20000794 PARAMETER Experiment Name: At_Petals_P Parameter: Age (day) Value: 23-25 days
  misc_feature: MA Experiment 20000794 PARAMETER Experiment Name: At_Petals_P Parameter: Plant Line Value: WS
  misc_feature: MA Experiment 20000794 PARAMETER Experiment Name: At_Petals_P Parameter: Tissue Value: Petals vs. Whole plant
  misc_feature: MA Experiment ID: 20001904 Result: Down-regulated in Transcription
  misc_feature: MA Experiment 20001904 PARAMETER Experiment Name: At_Drought_Reproduction_P Parameter: Age (day) Value: 37
  misc_feature: MA Experiment 20001904 PARAMETER Experiment Name: At_Drought_Reproduction_P Parameter: Organism Value: A. thaliana
  misc_feature: MA Experiment 20001904 PARAMETER Experiment Name: At_Drought_Reproduction_P Parameter: Plant Line Value: WS
  misc_feature: MA Experiment 20001904 PARAMETER Experiment Name: At_Drought_Reproduction_P Parameter: Timepoint (day) Value: 7
  misc_feature: MA Experiment 20001904 PARAMETER Experiment Name: At_Drought_Reproduction_P Parameter: Tissue Value: Rosettes
  misc_feature: MA Experiment 20001904 PARAMETER Experiment Name: At_Drought_Reproduction_P Parameter: Treatment Value: Drought vs. No Drought
  misc_feature: MA Experiment ID: 20001905 Result: Down-regulated in Transcription
  misc_feature: MA Experiment 20001905 PARAMETER Experiment Name: At_Drought_Reproduction_P Parameter: Age (day) Value: 40
  misc_feature: MA Experiment 20001905 PARAMETER Experiment Name: At_Drought_Reproduction_P Parameter: Organism Value: A. thaliana
  misc_feature: MA Experiment 20001905 PARAMETER Experiment Name: At_Drought_Reproduction_P Parameter: Plant Line Value: WS
  misc_feature: MA Experiment 20001905 PARAMETER Experiment Name: At_Drought_Reproduction_P Parameter: Timepoint (day) Value: 10
  misc_feature: MA Experiment 20001905 PARAMETER Experiment Name: At_Drought_Reproduction_P Parameter: Tissue Value: Rosettes
  misc_feature: MA Experiment 20001905 PARAMETER Experiment Name: At_Drought_Reproduction_P Parameter: Treatment Value: Drought vs. No Drought
ttcaaaccacacattcaaactaactctgcaaaaaaaaaaaaaactcagagcagaggagatcgagagagacaaagagagagagagagagagagagagatcttaacaaaaaaatgtctatatccatggcgttattctctccgccgatctcttcctcacttcagaaccctaatctcatccccaagatctcaacctctcttctctccaccaagcgtttctctctaatctccgtccctagagcttcctccgacaatggtacgacttcccccgtcgtggagattccgaagcctgcttctgtggctgtagaggaagttccagttaaatctccagccgaaagctcctccgcttctgaaaacggcgccgttggaggtgaagcgactgattcgagtactgagacggtaatcaaatatcagaatgcgaagtgggttaatggaacttgggatctgaaacagttcgagaaagatggcaaaactgattgggattctgttatcgtttctgaggcaaagaggagaaaatggcttgaagataacccggaaacaacgagtaacgacgagcttgttgtcttcgatacttcgattattccatggtgggcatggatgaagagataccatctacctgaagctgaacttctcaatggtcgtgctgcgatgatagggttcttcatggcttactttgttgatagtcttaccggagtaggacttgttgatcaaatgggaaatttcttctgcaaaacactcttgtttgtggctgtagctggagttctcttcatccgtaagaatgaagatttagacaaacttaaggatctgttcgatgagactacgttatatgacaaacaatggcaagctgcatggaaagagccagattcatcaacagtttcttcaaagaagtgaacaagttcttacaatctttcattttcctttttttgttatgcaataatctgtgaatcagtgaaagtttatctctactgaactactgatcttcagattttgtaatctttctgctttaaaaatctctatgaagtagtctcaaagataatgtatcgaaggtctttgacttgtaaagcagacctatttcgttttgacgcttgataatttaatcaataagagattttatttttt

SEQ ID NO: 106346 - protein, 258 aa, Arabidopsis thaliana; identical to SEQ ID NO: 71157
  peptide (1)..(258): Ceres Seq. ID no. 13619317
  misc_feature (1)..(258): Homolog of NCBI NO: 30695110 NR Description: Lil3 protein [Arabidopsis thaliana]
  misc_feature (5)..(258): Homolog of NCBI NO: 8978078 NR Description: Lil3 protein [Arabidopsis thaliana]
  misc_feature (5)..(258): Homolog of NCBI NO: 21555799 NR Description: Lil3 protein [Arabidopsis thaliana]
  misc_feature (5)..(258): Homolog of NCBI NO: 7485188 NR Description: hypothetical protein - Arabidopsis thaliana hypothetical protein [Arabidopsis thaliana]
  misc_feature (5)..(258): Homolog of NCBI NO: 18414927 NR Description: Lil3 protein [Arabidopsis thaliana]

SEQ ID NO: 106347 - protein, 254 aa, Arabidopsis thaliana; identical to SEQ ID NO: 71158
  peptide (1)..(254): Ceres Seq. ID no. 13619318
  misc_feature (1)..(254): Homolog of NCBI NO: 30695110 NR Description: Lil3 protein [Arabidopsis thaliana]
  misc_feature (1)..(254): Homolog of NCBI NO: 8978078 NR Description: Lil3 protein [Arabidopsis thaliana]
  misc_feature (1)..(254): Homolog of NCBI NO: 21555799 NR Description: Lil3 protein [Arabidopsis thaliana]
  misc_feature (1)..(254): Homolog of NCBI NO: 7485188 NR Description: hypothetical protein - Arabidopsis thaliana hypothetical protein [Arabidopsis thaliana]
  misc_feature (1)..(254): Homolog of NCBI NO: 18414927 NR Description: Lil3 protein [Arabidopsis thaliana]

SEQ ID NO: 106348 - DNA, 864 bp, Arabidopsis thaliana
  misc_feature (1)..(864): Ceres Seq. ID no. 13619319
  misc_feature: MA Experiment ID: 108462 Result: Down-regulated in Transcription
  misc_feature: MA Experiment 108462 PARAMETER Experiment Name: At_Germinating_Seeds_cDNA_P Parameter: Age (day) Value: 2 vs. 0
  misc_feature: MA Experiment 108462 PARAMETER Experiment Name: At_Germinating_Seeds_cDNA_P Parameter: Tissue Value: Germinating Seeds
  misc_feature: MA Experiment ID: 108463 Result: Down-regulated in Transcription
  misc_feature: MA Experiment 108463 PARAMETER Experiment Name: At_Germinating_Seeds_cDNA_P Parameter: Age (day) Value: 3 vs. 0
  misc_feature: MA Experiment 108463 PARAMETER Experiment Name: At_Germinating_Seeds_cDNA_P Parameter: Tissue Value: Germinating Seeds
  misc_feature: MA Experiment ID: 108464 Result: Down-regulated in Transcription
  misc_feature: MA Experiment 108464 PARAMETER Experiment Name: At_Germinating_Seeds_cDNA_P Parameter: Age (day) Value: 4 vs. 0
  misc_feature: MA Experiment 108464 PARAMETER Experiment Name: At_Germinating_Seeds_cDNA_P Parameter: Tissue Value: Germinating Seeds
  misc_feature: MA Experiment ID: 108573 Result: Down-regulated in Transcription
  misc_feature: MA Experiment 108573 PARAMETER Experiment Name: At_Drought_cDNA_P Parameter: Timepoint (hr) Value: 6
  misc_feature: MA Experiment 108573 PARAMETER Experiment Name: At_Drought_cDNA_P Parameter: Tissue Value: Aerial
  misc_feature: MA Experiment 108573 PARAMETER Experiment Name: At_Drought_cDNA_P Parameter: Treatment Value: Drought vs. No Drought
  misc_feature: MA Experiment ID: 20000224 Result: Up-regulated in Transcription
  misc_feature: MA Experiment ID: 20000227 Result: Up-regulated in Transcription
  misc_feature: MA Experiment 20000227 PARAMETER Experiment Name: At_Root-Tips-vs-Tops_P Parameter: Tissue Value: Root Tips vs. Root Tops
  misc_feature: MA Experiment ID: 20000234 Result: Up-regulated in Transcription
  misc_feature: MA Experiment 20000234 PARAMETER Experiment Name: At_Siliques_P Parameter: Age (day) Value: 21
  misc_feature: MA Experiment 20000234 PARAMETER Experiment Name: At_Siliques_P Parameter: Organism Value: A. thaliana
  misc_feature: MA Experiment 20000234 PARAMETER Experiment Name: At_Siliques_P Parameter: Plant Line Value: WS
  misc_feature: MA Experiment 20000234 PARAMETER Experiment Name: At_Siliques_P Parameter: Tissue Value: Less Than 5mm Siliques vs. Whole Plant
  misc_feature: MA Experiment ID: 20001560 Result: Up-regulated in Transcription
  misc_feature: MA Experiment 20001560 PARAMETER Experiment Name: At_Drought_Soil_Dry_P Parameter: Age (day) Value: 28
  misc_feature: MA Experiment 20001560 PARAMETER Experiment Name: At_Drought_Soil_Dry_P Parameter: Organism Value: A. thaliana
  misc_feature: MA Experiment 20001560 PARAMETER Experiment Name: At_Drought_Soil_Dry_P Parameter: Plant Line Value: WS
  misc_feature: MA Experiment 20001560 PARAMETER Experiment Name: At_Drought_Soil_Dry_P Parameter: Post Timepoint (hr) Value: None
  misc_feature: MA Experiment 20001560 PARAMETER Experiment Name: At_Drought_Soil_Dry_P Parameter: Post-Treatment Value: None
  misc_feature: MA Experiment 20001560 PARAMETER Experiment Name: At_Drought_Soil_Dry_P Parameter: Timepoint (day) Value: 14
  misc_feature: MA Experiment 20001560 PARAMETER Experiment Name: At_Drought_Soil_Dry_P Parameter: Treatment Value: Drought vs. No Drought
caggcatctagtatggctttctgcactaaacttggcggtcactggaaacaaggggtaaatgttccagtgtcatcaatgctcggttctcttcgctacatgtccacaaaactttatattggtggcctgtcccctggaactgacgagcactccttgaaggacgctttctctagcttcaatggagtgacagaggcaagagtcatgacaaacaaagtgaccgggaggtctagaggttatggatttgttaacttcataagcgaggattctgccaactctgctatttcagcaatgaatggacaggagctgaatgggtttaacataagtgtgaacgttgcaaaagattggccaagtttgccattgtctttggatgagagtatagaagaagctgagaagaaagaaaataagatgatgagccgatctgtatggaaagatccattcgttgatgcgttcctgatgaagaagaagaatgcagctctgaacaggaaaatatggtcaaggagatcgacgattcttcccgagtatgttgattcggcggtgagaatctacaacggcaaaactcatgtgcgttgtaagatcacagaggggaaagttgggcataaattcggagagtttgcgtttacaagaaaagtgaagaagcatgctaaagcaaagtagcatctttgagaatgaattggtcagctgcttgaaaggattgtgttgaaaagccaaaaacgaatcaaatcaataaattctcaataggtaaaactcattagctcacatgatcatgtagacgaatattgagctttagaaagtctttagttttcttgtcgatttcgtatttttggaccacaaaagtgccaatgttattttggaattcgattaacaaat

SEQ ID NO: 106349 - protein, 216 aa, Arabidopsis thaliana
  peptide (1)..(216): Ceres Seq. ID no. 13619320
  misc_feature (138)..(212): Pfam Name: Ribosomal protein S19 Pfam Description: Ribosomal protein S19
  misc_feature (1)..(216): Homolog of NCBI NO: 8809615 NR Description: 40S ribosomal protein S19 [Arabidopsis thaliana]
  misc_feature (5)..(216): Homolog of NCBI NO: 18422781 NR Description: 40S ribosomal protein S19, mitochondrial [Arabidopsis thaliana] >gi|21542438|sp|P39697|RT19_ARATH 40S protein S19, mitochondrial precursor >gi|15028321|gb|AAK76637.1|
  misc_feature (5)..(216): Homolog of NCBI NO: 2129722 NR Description: ribosomal protein S19 precursor, mitochondrial - thaliana >gi|457760|emb|CAA54951.1| ribosomal protein S19
  misc_feature (5)..(120): Homolog of NCBI NO: 15229525 NR Description: RNA-binding protein, putative [Arabidopsis
  misc_feature (5)..(120): Homolog of NCBI NO: 21553972 NR Description: glycine-rich RNA binding protein, putative
  misc_feature (5)..(118): Homolog of NCBI NO: 2826811 NR Description: AtGRP2 [Arabidopsis thaliana]
  misc_feature (5)..(118): Homolog of NCBI NO: 30682622 NR Description: glycine-rich RNA-binding protein (AtGRP2)
  misc_feature (5)..(118): Homolog of NCBI NO: 15236359 NR Description: glycine-rich RNA-binding protein (AtGRP2)
  misc_feature (5)..(118): Homolog of NCBI NO: 7439994 NR Description: glycine-rich RNA-binding protein - garden pea
  misc_feature (20)..(118): Homolog of NCBI NO: 322514 NR Description: glycine-rich RNA-binding protein (clone A81) -
QASSMAFCTKLGGHWKQGVNVPVSSMLGSLRYMSTKLYIGGLSPGTDEHSLKDAFSSFNGVTEARVMTNKVTGRSRGYGFVNFISEDSANSAISAMNGQELNGFNISVNVAKDWPSLPLSLDESIEEAEKKENKMMSRSVWKDPFVDAFLMKKKNAALNRKIWSRRSTILPEYVDSAVRIYNGKTHVRCKITEGKVGHKFGEFAFTRKVKKHAKAK

SEQ ID NO: 106350 - protein, 212 aa, Arabidopsis thaliana; identical to SEQ ID NO: 25892
  peptide (1)..(212): Ceres Seq. ID no. 13619321
  misc_feature (134)..(208): Pfam Name: Ribosomal protein S19 Pfam Description: Ribosomal protein S19
  misc_feature (1)..(212): Homolog of NCBI NO: 8809615 NR Description: 40S ribosomal protein S19 [Arabidopsis thaliana]
  misc_feature (1)..(212): Homolog of NCBI NO: 18422781 NR Description: 40S ribosomal protein S19, mitochondrial [Arabidopsis thaliana] >gi|21542438|sp|P39697|RT19_ARATH 40S protein S19, mitochondrial precursor >gi|15028321|gb|AAK76637.1|
  misc_feature (1)..(212): Homolog of NCBI NO: 2129722 NR Description: ribosomal protein S19 precursor, mitochondrial - thaliana >gi|457760|emb|CAA54951.1| ribosomal protein S19
  misc_feature (1)..(116): Homolog of NCBI NO: 15229525 NR Description: RNA-binding protein, putative [Arabidopsis
  misc_feature (1)..(116): Homolog of NCBI NO: 21553972 NR Description: glycine-rich RNA binding protein, putative
  misc_feature (1)..(114): Homolog of NCBI NO: 2826811 NR Description: AtGRP2 [Arabidopsis thaliana]
  misc_feature (1)..(114): Homolog of NCBI NO: 15236359 NR Description: glycine-rich RNA-binding protein (AtGRP2)
  misc_feature (1)..(114): Homolog of NCBI NO: 30682622 NR Description: glycine-rich RNA-binding protein (AtGRP2)
  misc_feature (1)..(114): Homolog of NCBI NO: 7439994 NR Description: glycine-rich RNA-binding protein - garden pea
  misc_feature (16)..(114): Homolog of NCBI NO: 322514 NR Description: glycine-rich RNA-binding protein (clone A81) -

SEQ ID NO: 106351 - protein, 191 aa, Arabidopsis thaliana; identical to SEQ ID NO: 25893
  peptide (1)..(191): Ceres Seq. ID no. 13619322
  misc_feature (113)..(187): Pfam Name: Ribosomal protein S19 Pfam Description: Ribosomal protein S19
  misc_feature (1)..(191): Homolog of NCBI NO: 8809615 NR Description: 40S ribosomal protein S19 [Arabidopsis thaliana]
  misc_feature (1)..(191): Homolog of NCBI NO: 18422781 NR Description: 40S ribosomal protein S19, mitochondrial [Arabidopsis thaliana] >gi|21542438|sp|P39697|RT19_ARATH 40S protein S19, mitochondrial precursor >gi|15028321|gb|AAK76637.1|
  misc_feature (1)..(191): Homolog of NCBI NO: 2129722 NR Description: ribosomal protein S19 precursor, mitochondrial - thaliana >gi|457760|emb|CAA54951.1| ribosomal protein S19
  misc_feature (1)..(95): Homolog of NCBI NO: 15229525 NR Description: RNA-binding protein, putative [Arabidopsis
  misc_feature (1)..(95): Homolog of NCBI NO: 21553972 NR Description: glycine-rich RNA binding protein, putative
  misc_feature (1)..(93): Homolog of NCBI NO: 2826811 NR Description: AtGRP2 [Arabidopsis thaliana]
  misc_feature (1)..(93): Homolog of NCBI NO: 15236359 NR Description: glycine-rich RNA-binding protein (AtGRP2)
  misc_feature (1)..(93): Homolog of NCBI NO: 30682622 NR Description: glycine-rich RNA-binding protein (AtGRP2)
  misc_feature (1)..(93): Homolog of NCBI NO: 7439994 NR Description: glycine-rich RNA-binding protein - garden pea
  misc_feature (1)..(93): Homolog of NCBI NO: 322514 NR Description: glycine-rich RNA-binding protein (clone A81) -

SEQ ID NO: 106352 - DNA, 893 bp, Arabidopsis thaliana
  misc_feature (1)..(893): Ceres Seq. ID no. 13619331
  misc_feature: MA Experiment ID: 20000185 Result: Up-regulated in Transcription
  misc_feature: MA Experiment 20000185 PARAMETER Experiment Name: At_Roots__P Parameter: Age (day) Value: 7 vs. 21
  misc_feature: MA Experiment 20000185 PARAMETER Experiment Name: At_Roots__P Parameter: Organism Value: A. thaliana
  misc_feature: MA Experiment 20000185 PARAMETER Experiment Name: At_Roots__P Parameter: Tissue Value: Roots vs. Whole Plant
  misc_feature: MA Experiment ID: 20000227 Result: Up-regulated in Transcription
  misc_feature: MA Experiment 20000227 PARAMETER Experiment Name: At_Root-Tips-vs-Tops_P Parameter: Tissue Value: Root Tips vs. Root Tops
  misc_feature: MA Experiment ID: 20000269 Result: Down-regulated in Transcription
  misc_feature: MA Experiment 20000269 PARAMETER Experiment Name: At_1mM_KNO3_L-vs-H_Roots_P Parameter: Age (day) Value: 7,10,12
  misc_feature: MA Experiment 20000269 PARAMETER Experiment Name: At_1mM_KNO3_L-vs-H_Roots_P Parameter: Organism Value: A. thaliana
  misc_feature: MA Experiment 20000269 PARAMETER Experiment Name: At_1mM_KNO3_L-vs-H_Roots_P Parameter: Plant Line Value: WS
  misc_feature: MA Experiment 20000269 PARAMETER Experiment Name: At_1mM_KNO3_L-vs-H_Roots_P Parameter: Timepoint (day) Value: 7,10,12
  misc_feature: MA Experiment 20000269 PARAMETER Experiment Name: At_1mM_KNO3_L-vs-H_Roots_P Parameter: Tissue Value: Roots
  misc_feature: MA Experiment 20000269 PARAMETER Experiment Name: At_1mM_KNO3_L-vs-H_Roots_P Parameter: Treatment Value: 1mM KNO3 vs. 50mM KNO3
  misc_feature: MA Experiment ID: 20000451 Result: Down-regulated in Transcription
  misc_feature: MA Experiment 20000451 PARAMETER Experiment Name: At_CS6879_Shoots-Roots_P Parameter: Age (day) Value: 14
  misc_feature: MA Experiment 20000451 PARAMETER Experiment Name: At_CS6879_Shoots-Roots_P Parameter: Organism Value: A. thaliana
  misc_feature: MA Experiment 20000451 PARAMETER Experiment Name: At_CS6879_Shoots-Roots_P Parameter: Plant Line Value: CS6879 vs. WS
  misc_feature: MA Experiment 20000451 PARAMETER Experiment Name: At_CS6879_Shoots-Roots_P Parameter: Tissue Value: Roots
  misc_feature: MA Experiment ID: 20000460 Result: Up-regulated in Transcription
  misc_feature: MA Experiment 20000460 PARAMETER Experiment Name: At_10percent_PEG_P Parameter: Age (day) Value: 12
  misc_feature: MA Experiment 20000460 PARAMETER Experiment Name: At_10percent_PEG_P Parameter: Organism Value: A. thaliana
  misc_feature: MA Experiment 20000460 PARAMETER Experiment Name: At_10percent_PEG_P Parameter: Plant Line Value: WS
  misc_feature: MA Experiment 20000460 PARAMETER Experiment Name: At_10percent_PEG_P Parameter: Timepoint (day) Value: 12
  misc_feature: MA Experiment 20000460 PARAMETER Experiment Name: At_10percent_PEG_P Parameter: Tissue Value: Whole Plant
  misc_feature: MA Experiment 20000460 PARAMETER Experiment Name: At_10percent_PEG_P Parameter: Treatment Value: 10percent PEG vs. No Treatment
  misc_feature: MA Experiment ID: 20000574 Result: Up-regulated in Transcription
  misc_feature: MA Experiment 20000574 PARAMETER Experiment Name: At_100uM_ABA_Mutants__P Parameter: Organism Value: A. thaliana
  misc_feature: MA Experiment 20000574 PARAMETER Experiment Name: At_100uM_ABA_Mutants__P Parameter: Plant Line Value: CS23 vs. Ler wt
  misc_feature: MA Experiment 20000574 PARAMETER Experiment Name: At_100uM_ABA_Mutants__P Parameter: Timepoint (hr) Value: N/A
  misc_feature: MA Experiment 20000574 PARAMETER Experiment Name: At_100uM_ABA_Mutants__P Parameter: Tissue Value: Whole Plant
  misc_feature: MA Experiment 20000574 PARAMETER Experiment Name: At_100uM_ABA_Mutants__P Parameter: Treatment Value: None
agtcacacacacaaagaaaaacaaaagaacaaagatgggaatcattggtaagagtgtttctctaactctctttgcacttttgtgcttcacttcctctgttttcaccttaggagtgaatcaacctggttcatcagatcccttccatagccttccccaacaccttcccctacctccaatcaaactaccaactcttccaccggccaaagctcccatcaaactaccagcctacccaccagccaaagctccgatcaagctaccaactctcccaccagccaaagctccgattaagttaccaactctcccaccgatcaaacctcctgttctcccaccagtttaccctcctaagtacaacaagaccctagtggcagttagaggtgtggtctactgcaaagcttgcaagtacgcgggcgtcaacaacgtccaaggcgctaaacccgttaaagatgcggtggtgagacttgtgtgcaagaacaagaagaactcaatatcggagacaaagacggacaagaacggatacttcatgctcctggcccctaagacggtgaccaactacgatatcaaaggttgtcgagctttcctcgtgaagtctccagacaccaagtgcagcaaagtgtcgtcactccacgatggaggcaagggctccgttctaaagccggtcttgaaaccaggattttcctcgaccatcatgagatggttcaagtacagtgtgtacaacgttggtccattcgcattcgaacctacctgccccaaatgagatggtgttataagagctacttaaacttttattaatcaatgattgtgttgaatatgtatcagcttggtttctttgtatgggcttttctggtagtgttaatctttctaatttgcttcttaaataaaaagtggtgacgttt

SEQ ID NO: 106353 - protein, 250 aa, Arabidopsis thaliana
  peptide (1)..(250): Ceres Seq. ID no. 13619332
  misc_feature (123)..(250): Pfam Name: Pollen proteins Ole e I family Pfam Description: Pollen proteins Ole e I family
  misc_feature (12)..(250): Homolog of NCBI NO: 15226166 NR Description: proline-rich protein -related [Arabidopsis
  misc_feature (57)..(250): Homolog of NCBI NO: 15217879 NR Description: prolin-rich protein -related [Arabidopsis
  misc_feature (17)..(250): Homolog of NCBI NO: 11322245 NR Description: arabinogalactan protein [Daucus carota]
  misc_feature (49)..(248): Homolog of NCBI NO: 478673 NR Description: proline-rich protein precursor - kidney bean
  misc_feature (48)..(247): Homolog of NCBI NO: 419777 NR Description: proline-rich protein - Persian tobacco
  misc_feature (106)..(248): Homolog of NCBI NO: 15226806 NR Description: proline-rich glyco protein -related [Arabidopsis
  misc_feature (51)..(245): Homolog of NCBI NO: 322756 NR Description: pistil extensin-like protein (clone pMG07) - tobacco (fragment) >gi|19921|emb|CAA78396.1| pistil extensin like
  misc_feature (51)..(245): Homolog of NCBI NO: 322759 NR Description: pistil extensin-like protein (clone pMG14) - tobacco (fragment) >gi|19927|emb|CAA78393.1| pistil extensin like
  misc_feature (43)..(245): Homolog of NCBI NO: 1184100 NR Description: pistil extensin-like protein
  misc_feature (40)..(245): Homolog of NCBI NO: 544262 NR Description: PISTIL-SPECIFIC EXTENSIN-LIKE PROTEIN PRECURSOR
VTHTKKNKRTKMGIIGKSVSLTLFALLCFTSSVFTLGVNQPGSSDPFHSLPQHLPLPPIKLPTLPPAKAPIKLPAYPPAKAPIKLPTLPPAKAPIKLPTLPPIKPPVLPPVYPPKYNKTLVAVRGVVYCKACKYAGVNNVQGAKPVKDAVVRLVCKNKKNSISETKTDKNGYFMLLAPKTVTNYDIKGCRAFLVKSPDTKCSKVSSLHDGGKGSVLKPVLKPGFSSTIMRWFKYSVYNVGPFAFEPTCPK

SEQ ID NO: 106354 - protein, 239 aa, Arabidopsis thaliana
  peptide (1)..(239): Ceres Seq. ID no. 13619333
  misc_feature (112)..(239): Pfam Name: Pollen proteins Ole e I family Pfam Description: Pollen proteins Ole e I family
  misc_feature (1)..(239): Homolog of NCBI NO: 15226166 NR Description: proline-rich protein -related [Arabidopsis
  misc_feature (46)..(239): Homolog of NCBI NO: 15217879 NR Description: prolin-rich protein -related [Arabidopsis
  misc_feature (6)..(239): Homolog of NCBI NO: 11322245 NR Description: arabinogalactan protein [Daucus carota]
  misc_feature (38)..(237): Homolog of NCBI NO: 478673 NR Description: proline-rich protein precursor - kidney bean
  misc_feature (37)..(236): Homolog of NCBI NO: 419777 NR Description: proline-rich protein - Persian tobacco
  misc_feature (95)..(237): Homolog of NCBI NO: 15226806 NR Description: proline-rich glyco protein -related [Arabidopsis
  misc_feature (40)..(234): Homolog of NCBI NO: 322756 NR Description: pistil extensin-like protein (clone pMG07) - tobacco (fragment) >gi|19921|emb|CAA78396.1| pistil extensin like
  misc_feature (40)..(234): Homolog of NCBI NO: 322759 NR Description: pistil extensin-like protein (clone pMG14) - tobacco (fragment) >gi|19927|emb|CAA78393.1| pistil extensin like
  misc_feature (32)..(234): Homolog of NCBI NO: 1184100 NR Description: pistil extensin-like protein
  misc_feature (29)..(234): Homolog of NCBI NO: 544262 NR Description: PISTIL-SPECIFIC EXTENSIN-LIKE PROTEIN PRECURSOR
MGIIGKSVSLTLFALLCFTSSVFTLGVNQPGSSDPFHSLPQHLPLPPIKLPTLPPAKAPIKLPAYPPAKAPIKLPTLPPAKAPIKLPTLPPIKPPVLPPVYPPKYNKTLVAVRGVVYCKACKYAGVNNVQGAKPVKDAVVRLVCKNKKNSISETKTDKNGYFMLLAPKTVTNYDIKGCRAFLVKSPDTKCSKVSSLHDGGKGSVLKPVLKPGFSSTIMRWFKYSVYNVGPFAFEPTCPK

SEQ ID NO: 106355 - DNA, 997 bp, Arabidopsis thaliana
  misc_feature (1)..(997): Ceres Seq. ID no. 13619357
  misc_feature: MA Experiment ID: 20000182 Result: Down-regulated in Transcription
  misc_feature: MA Experiment 20000182 PARAMETER Experiment Name: At_2mM_SA_P Parameter: Age (day) Value: 14
  misc_feature: MA Experiment 20000182 PARAMETER Experiment Name: At_2mM_SA_P Parameter: Organism Value: A. thaliana
  misc_feature: MA Experiment 20000182 PARAMETER Experiment Name: At_2mM_SA_P Parameter: Plant Line Value: WS
  misc_feature: MA Experiment 20000182 PARAMETER Experiment Name: At_2mM_SA_P Parameter: Timepoint (hr) Value: 6
  misc_feature: MA Experiment 20000182 PARAMETER Experiment Name: At_2mM_SA_P Parameter: Tissue Value: Aerial
  misc_feature: MA Experiment 20000182 PARAMETER Experiment Name: At_2mM_SA_P Parameter: Treatment Value: 2mM SA vs. No Treatment
  misc_feature: MA Experiment ID: 20000184 Result: Up-regulated in Transcription
  misc_feature: MA Experiment 20000184 PARAMETER Experiment Name: At_Shoots__P Parameter: Age (day) Value: 7
  misc_feature: MA Experiment 20000184 PARAMETER Experiment Name: At_Shoots__P Parameter: Tissue Value: Shoots vs. Whole Plant
  misc_feature: MA Experiment ID: 20000185 Result: Down-regulated in Transcription
  misc_feature: MA Experiment 20000185 PARAMETER Experiment Name: At_Roots__P Parameter: Age (day) Value: 7 vs. 21
  misc_feature: MA Experiment 20000185 PARAMETER Experiment Name: At_Roots__P Parameter: Organism Value: A. thaliana
  misc_feature: MA Experiment 20000185 PARAMETER Experiment Name: At_Roots__P Parameter: Tissue Value: Roots vs. Whole Plant
  misc_feature: MA Experiment ID: 20000213 Result: Down-regulated in Transcription
  misc_feature: MA Experiment 20000213 PARAMETER Experiment Name: At_4deg_Cold_P Parameter: Timepoint (hr) Value: 2
  misc_feature: MA Experiment ID: 20000234 Result: Up-regulated in Transcription
  misc_feature: MA Experiment 20000234 PARAMETER Experiment Name: At_Siliques_P Parameter: Age (day) Value: 21
  misc_feature: MA Experiment 20000234 PARAMETER Experiment Name: At_Siliques_P Parameter: Organism Value: A. thaliana
  misc_feature: MA Experiment 20000234 PARAMETER Experiment Name: At_Siliques_P Parameter: Plant Line Value: WS
  misc_feature: MA Experiment 20000234 PARAMETER Experiment Name: At_Siliques_P Parameter: Tissue Value: Less Than 5mm Siliques vs. Whole Plant
  misc_feature: MA Experiment ID: 20000235 Result: Up-regulated in Transcription
  misc_feature: MA Experiment 20000235 PARAMETER Experiment Name: At_Siliques_P Parameter: Age (day) Value: 21
  misc_feature: MA Experiment 20000235 PARAMETER Experiment Name: At_Siliques_P Parameter: Organism Value: A. thaliana
  misc_feature: MA Experiment 20000235 PARAMETER Experiment Name: At_Siliques_P Parameter: Plant Line Value: WS
  misc_feature: MA Experiment 20000235 PARAMETER Experiment Name: At_Siliques_P Parameter: Tissue Value: 5-10mm Siliques vs. Whole Plant
  misc_feature: MA Experiment ID: 20000437 Result: Down-regulated in Transcription
  misc_feature: MA Experiment 20000437 PARAMETER Experiment Name: At_Drought_P Parameter: Age (day) Value: 8
  misc_feature: MA Experiment 20000437 PARAMETER Experiment Name: At_Drought_P Parameter: Organism Value: A. thaliana
  misc_feature: MA Experiment 20000437 PARAMETER Experiment Name: At_Drought_P Parameter: Plant Line Value: WS
  misc_feature: MA Experiment 20000437 PARAMETER Experiment Name: At_Drought_P Parameter: Timepoint (hr) Value: 24
  misc_feature: MA Experiment 20000437 PARAMETER Experiment Name: At_Drought_P Parameter: Tissue Value: Whole Plant
  misc_feature: MA Experiment 20000437 PARAMETER Experiment Name: At_Drought_P Parameter: Treatment Value: Drought vs. No Drought
  misc_feature: MA Experiment ID: 20000438 Result: Up-regulated in Transcription
  misc_feature: MA Experiment 20000438 PARAMETER Experiment Name: At_Shoots__P Parameter: Age (day) Value: 14
  misc_feature: MA Experiment 20000438 PARAMETER Experiment Name: At_Shoots__P Parameter: Tissue Value: Shoots vs. Whole Plant
  misc_feature: MA Experiment ID: 20000573 Result: Down-regulated in Transcription
  misc_feature: MA Experiment 20000573 PARAMETER Experiment Name: At_100uM_ABA_Mutants__P Parameter: Organism Value: A. thaliana
  misc_feature: MA Experiment 20000573 PARAMETER Experiment Name: At_100uM_ABA_Mutants__P Parameter: Plant Line Value: CS22 vs. Ler wt
  misc_feature: MA Experiment 20000573 PARAMETER Experiment Name: At_100uM_ABA_Mutants__P Parameter: Timepoint (hr) Value: N/A
  misc_feature: MA Experiment 20000573 PARAMETER Experiment Name: At_100uM_ABA_Mutants__P Parameter: Tissue Value: Whole Plant
  misc_feature: MA Experiment 20000573 PARAMETER Experiment Name: At_100uM_ABA_Mutants__P Parameter: Treatment Value: None
  misc_feature: MA Experiment ID: 20000574 Result: Down-regulated in Transcription
  misc_feature: MA Experiment 20000574 PARAMETER Experiment Name: At_100uM_ABA_Mutants__P Parameter: Organism Value: A. thaliana
  misc_feature: MA Experiment 20000574 PARAMETER Experiment Name: At_100uM_ABA_Mutants__P Parameter: Plant Line Value: CS23 vs. Ler wt
  misc_feature: MA Experiment 20000574 PARAMETER Experiment Name: At_100uM_ABA_Mutants__P Parameter: Timepoint (hr) Value: N/A
  misc_feature: MA Experiment 20000574 PARAMETER Experiment Name: At_100uM_ABA_Mutants__P Parameter: Tissue Value: Whole Plant
  misc_feature: MA Experiment 20000574 PARAMETER Experiment Name: At_100uM_ABA_Mutants__P Parameter: Treatment Value: None
  misc_feature: MA Experiment ID: 20000794 Result: Down-regulated in Transcription
  misc_feature: MA Experiment 20000794 PARAMETER Experiment Name: At_Petals_P Parameter: Age (day) Value: 23-25 days
  misc_feature: MA Experiment 20000794 PARAMETER Experiment Name: At_Petals_P Parameter: Plant Line Value: WS
  misc_feature: MA Experiment 20000794 PARAMETER Experiment Name: At_Petals_P Parameter: Tissue Value: Petals vs. Whole plant
  misc_feature: MA Experiment ID: 20001248 Result: Down-regulated in Transcription
  misc_feature: MA Experiment 20001248 PARAMETER Experiment Name: At_Far-red-induction_P Parameter: Age (day) Value: 7
  misc_feature: MA Experiment 20001248 PARAMETER Experiment Name: At_Far-red-induction_P Parameter: Light Value: Far-red vs. White
  misc_feature: MA Experiment 20001248 PARAMETER Experiment Name: At_Far-red-induction_P Parameter: Organism Value: A. thaliana
  misc_feature: MA Experiment 20001248 PARAMETER Experiment Name: At_Far-red-induction_P Parameter: Plant Line Value: Columbia
  misc_feature: MA Experiment 20001248 PARAMETER Experiment Name: At_Far-red-induction_P Parameter: Timepoint (hr) Value: 4
  misc_feature: MA Experiment 20001248 PARAMETER Experiment Name: At_Far-red-induction_P Parameter: Tissue Value: Whole Plant
  misc_feature: MA Experiment ID: 20001450 Result: Down-regulated in Transcription
  misc_feature: MA Experiment 20001450 PARAMETER Experiment Name: At_Far-red-induction_P Parameter: Age (day) Value: 7
  misc_feature: MA Experiment 20001450 PARAMETER Experiment Name: At_Far-red-induction_P Parameter: Light Value: Far-red vs. White
  misc_feature: MA Experiment 20001450 PARAMETER Experiment Name: At_Far-red-induction_P Parameter: Organism Value: A. thaliana
  misc_feature: MA Experiment 20001450 PARAMETER Experiment Name: At_Far-red-induction_P Parameter: Plant Line Value: Columbia
  misc_feature: MA Experiment 20001450 PARAMETER Experiment Name: At_Far-red-induction_P Parameter: Timepoint (hr) Value: 8
  misc_feature: MA Experiment 20001450 PARAMETER Experiment Name: At_Far-red-induction_P Parameter: Tissue Value: Whole Plant
  misc_feature: MA Experiment ID: 20001557 Result: Down-regulated in Transcription
  misc_feature: MA Experiment 20001557 PARAMETER Experiment Name: At_Drought_Soil_Dry_P Parameter: Age (day) Value: 27
  misc_feature: MA Experiment 20001557 PARAMETER Experiment Name: At_Drought_Soil_Dry_P Parameter: Organism Value: A. thaliana
  misc_feature: MA Experiment 20001557 PARAMETER Experiment Name: At_Drought_Soil_Dry_P Parameter: Plant Line Value: WS
  misc_feature: MA Experiment 20001557 PARAMETER Experiment Name: At_Drought_Soil_Dry_P Parameter: Post Timepoint (hr) Value: 3
  misc_feature: MA Experiment 20001557 PARAMETER Experiment Name: At_Drought_Soil_Dry_P Parameter: Post-Treatment Value: Re-Water vs. No Drought
  misc_feature: MA Experiment 20001557 PARAMETER Experiment Name: At_Drought_Soil_Dry_P Parameter: Timepoint (day) Value: 13
  misc_feature: MA Experiment 20001557 PARAMETER Experiment Name: At_Drought_Soil_Dry_P Parameter: Treatment Value: Drought vs. No Drought
  misc_feature: MA Experiment ID: 20001905 Result: Up-regulated in Transcription
  misc_feature: MA Experiment 20001905 PARAMETER Experiment Name: At_Drought_Reproduction_P Parameter: Age (day) Value: 40
  misc_feature: MA Experiment 20001905 PARAMETER Experiment Name: At_Drought_Reproduction_P Parameter: Organism Value: A. thaliana
  misc_feature: MA Experiment 20001905 PARAMETER Experiment Name: At_Drought_Reproduction_P Parameter: Plant Line Value: WS
  misc_feature: MA Experiment 20001905 PARAMETER Experiment Name: At_Drought_Reproduction_P Parameter: Timepoint (day) Value: 10
  misc_feature: MA Experiment 20001905 PARAMETER Experiment Name: At_Drought_Reproduction_P Parameter: Tissue Value: Rosettes
  misc_feature: MA Experiment 20001905 PARAMETER Experiment Name: At_Drought_Reproduction_P Parameter: Treatment Value: Drought vs. No Drought
  misc_feature: MA Experiment ID: 20001906 Result: Down-regulated in Transcription
  misc_feature: MA Experiment 20001906 PARAMETER Experiment Name: At_Drought_Reproduction_P Parameter: Age (day) Value: 35
  misc_feature: MA Experiment 20001906 PARAMETER Experiment Name: At_Drought_Reproduction_P Parameter: Organism Value: A. thaliana
  misc_feature: MA Experiment 20001906 PARAMETER Experiment Name: At_Drought_Reproduction_P Parameter: Plant Line Value: WS
  misc_feature: MA Experiment 20001906 PARAMETER Experiment Name: At_Drought_Reproduction_P Parameter: Timepoint (day) Value: 5
  misc_feature: MA Experiment 20001906 PARAMETER Experiment Name: At_Drought_Reproduction_P Parameter: Tissue Value: Siliques
  misc_feature: MA Experiment 20001906 PARAMETER Experiment Name: At_Drought_Reproduction_P Parameter: Treatment Value: Drought vs. No Drought
atgtctgcagcattgagctcgtctctctacatttccccaaagaaaccttcatgtccacaacaatctcaatccacattcttatccacgaaaccaaccaccatcaaaaccaatctccatagccatcctctcttcactgtagctgatcagacagtaaccctccagatgaaagagaagatcctctgtctcgagctaatgggaattgactcaggaaaagccctttctctcaacccatgtctctgctcagccccccttgactccatccaatccgtcctccatttccttcaatcaaaaggaatctacccaaatgacctcccaagaatcttggggatgtgtcctaagatcctcacttccgacgtcagaacagaactgtaccctgttttcatgttcctgtcgaatgatctccatgtccctgagaatgcgttcagaagagtgatcaagaaatgtccaaggctccttattagcagtgtagaagaccagctcaaacctgctctcttctacttgcagagacttggtctcaaggatcttgaagctcttgcttaccaagatcctatcttgttggtgtctagtgttgaacacactctcatcccaaagcttagattcttggagagtatagggttctcaagaccagaagcgattggaatgatcctaagatgtccagcattattcacattcagcatagagaacaacttcaaaccaaaactggattacttcatgagtgagatcaaaggaaaactagagaatctaaaggagtttccacagtattttgccttcagtctagagaaaaggataaagccaagacacttagaatcaatggagagaggattagagttgccactgtcattgatgcttaagagcactgatgaagagttcgagcagttgctcacaaacccctcttcagtggcaaacgtgtaacatttattgtatagtggtgaatgttattgattgtgttcatagctttgttgtgtacttgtgtaaaaaataaaaaatcaatttggcg

SEQ ID NO: 106356 - protein, 303 aa, Arabidopsis thaliana
  peptide (1)..(303): Ceres Seq. ID no. 13619358
  misc_feature (23)..(292): Pfam Name: mTERF Pfam Description: mTERF
  misc_feature (1)..(303): Homolog of NCBI NO: 15226787 NR Description: expressed protein [Arabidopsis thaliana]
  misc_feature (64)..(303): Homolog of NCBI NO: 28392870 NR Description: unknown protein [Arabidopsis thaliana]
  misc_feature (56)..(294): Homolog of NCBI NO: 15227524 NR Description: hypothetical protein [Arabidopsis thaliana]
  misc_feature (56)..(294): Homolog of NCBI NO: 28204784 NR Description: hypothetical protein [Arabidopsis thaliana]
  misc_feature (15)..(294): Homolog of NCBI NO: 30686631 NR Description: expressed protein [Arabidopsis thaliana]
  misc_feature (15)..(294): Homolog of NCBI NO: 30686636 NR Description: expressed protein [Arabidopsis thaliana]
  misc_feature (15)..(294): Homolog of NCBI NO: 21537209 NR Description: unknown [Arabidopsis thaliana]
  misc_feature (76)..(290): Homolog of NCBI NO: 15230219 NR Description: hypothetical protein [Arabidopsis thaliana] gb|AAC26693.1~gene_id:MCB22.4~similar to unknown protein
  misc_feature (36)..(290): Homolog of NCBI NO: 27817836 NR Description: OJ1127_E01.4 [Oryza sativa (japonica
  misc_feature (51)..(292): Homolog of NCBI NO: 15227089 NR Description: hypothetical protein [Arabidopsis thaliana]
MSAALSSSLYISPKKPSCPQQSQSTFLSTKPTTIKTNLHSHPLFTVADQTVTLQMKEKILCLELMGIDSGKALSLNPCLCSAPLDSIQSVLHFLQSKGIYPNDLPRILGMCPKILTSDVRTELYPVFMFLSNDLHVPENAFRRVIKKCPRLLISSVEDQLKPALFYLQRLGLKDLEALAYQDPILLVSSVEHTLIPKLRFLESIGFSRPEAIGMILRCPALFTFSIENNFKPKLDYFMSEIKGKLENLKEFPQYFAFSLEKRIKPRHLESMERGLELPLSLMLKSTDEEFEQLLTNPSSVANV

SEQ ID NO: 106357 - protein, 249 aa, Arabidopsis thaliana
  peptide (1)..(249): Ceres Seq. ID no. 13619359
  misc_feature (1)..(238): Pfam Name: mTERF Pfam Description: mTERF
  misc_feature (1)..(249): Homolog of NCBI NO: 15226787 NR Description: expressed protein [Arabidopsis thaliana]
  misc_feature (10)..(249): Homolog of NCBI NO: 28392870 NR Description: unknown protein [Arabidopsis thaliana]
  misc_feature (2)..(240): Homolog of NCBI NO: 15227524 NR Description: hypothetical protein [Arabidopsis thaliana]
  misc_feature (2)..(240): Homolog of NCBI NO: 28204784 NR Description: hypothetical protein [Arabidopsis thaliana]
  misc_feature (1)..(240): Homolog of NCBI NO: 30686631 NR Description: expressed protein [Arabidopsis thaliana]
  misc_feature (1)..(240): Homolog of NCBI NO: 30686636 NR Description: expressed protein [Arabidopsis thaliana]
  misc_feature (1)..(240): Homolog of NCBI NO: 21537209 NR Description: unknown [Arabidopsis thaliana]
  misc_feature (22)..(236): Homolog of NCBI NO: 15230219 NR Description: hypothetical protein [Arabidopsis thaliana] gb|AAC26693.1~gene_id:MCB22.4~similar to unknown protein
  misc_feature (1)..(236): Homolog of NCBI NO: 27817836 NR Description: OJ1127_E01.4 [Oryza sativa (japonica
  misc_feature (1)..(238): Homolog of NCBI NO: 15227089 NR Description: hypothetical protein [Arabidopsis thaliana]
MKEKILCLELMGIDSGKALSLNPCLCSAPLDSIQSVLHFLQSKGIYPNDLPRILGMCPKILTSDVRTELYPVFMFLSNDLHVPENAFRRVIKKCPRLLISSVEDQLKPALFYLQRLGLKDLEALAYQDPILLVSSVEHTLIPKLRFLESIGFSRPEAIGMILRCPALFTFSIENNFKPKLDYFMSEIKGKLENLKEFPQYFAFSLEKRIKPRHLESMERGLELPLSLMLKSTDEEFEQLLTNPSSVANV

SEQ ID NO: 106358 - protein, 239 aa, Arabidopsis thaliana
  peptide (1)..(239): Ceres Seq. ID no. 13619360
  misc_feature (1)..(228): Pfam Name: mTERF Pfam Description: mTERF
  misc_feature (1)..(239): Homolog of NCBI NO: 15226787 NR Description: expressed protein [Arabidopsis thaliana]
  misc_feature (1)..(239): Homolog of NCBI NO: 28392870 NR Description: unknown protein [Arabidopsis thaliana]
  misc_feature (1)..(230): Homolog of NCBI NO: 15227524 NR Description: hypothetical protein [Arabidopsis thaliana]
  misc_feature (1)..(230): Homolog of NCBI NO: 28204784 NR Description: hypothetical protein [Arabidopsis thaliana]
  misc_feature (1)..(230): Homolog of NCBI NO: 30686631 NR Description: expressed protein [Arabidopsis thaliana]
  misc_feature (1)..(230): Homolog of NCBI NO: 30686636 NR Description: expressed protein [Arabidopsis thaliana]
  misc_feature (1)..(230): Homolog of NCBI NO: 21537209 NR Description: unknown [Arabidopsis thaliana]
  misc_feature (12)..(226): Homolog of NCBI NO: 15230219 NR Description: hypothetical protein [Arabidopsis thaliana] gb|AAC26693.1~gene_id:MCB22.4~similar to unknown protein
  misc_feature (1)..(226): Homolog of NCBI NO: 27817836 NR Description: OJ1127_E01.4 [Oryza sativa (japonica
  misc_feature (1)..(228): Homolog of NCBI NO: 15227089 NR Description: hypothetical protein [Arabidopsis thaliana]
MGIDSGKALSLNPCLCSAPLDSIQSVLHFLQSKGIYPNDLPRILGMCPKILTSDVRTELYPVFMFLSNDLHVPENAFRRVIKKCPRLLISSVEDQLKPALFYLQRLGLKDLEALAYQDPILLVSSVEHTLIPKLRFLESIGFSRPEAIGMILRCPALFTFSIENNFKPKLDYFMSEIKGKLENLKEFPQYFAFSLEKRIKPRHLESMERGLELPLSLMLKSTDEEFEQLLTNPSSVANV

SEQ ID NO: 106359 - DNA, 1125 bp, Arabidopsis thaliana
  misc_feature (1)..(1125): Ceres Seq. ID no. 13619361
  misc_feature: MA Experiment ID: 20000348 Result: Up-regulated in Transcription
  misc_feature: MA Experiment 20000348 PARAMETER Experiment Name: At_100uM_ABA_Sub_P Parameter: Age (day) Value: 14
  misc_feature: MA Experiment 20000348 PARAMETER Experiment Name: At_100uM_ABA_Sub_P Parameter: Organism Value: A. thaliana
  misc_feature: MA Experiment 20000348 PARAMETER Experiment Name: At_100uM_ABA_Sub_P Parameter: Plant Line Value: WS
  misc_feature: MA Experiment 20000348 PARAMETER Experiment Name: At_100uM_ABA_Sub_P Parameter: Timepoint (hr) Value: 1
  misc_feature: MA Experiment 20000348 PARAMETER Experiment Name: At_100uM_ABA_Sub_P Parameter: Tissue Value: Aerial
  misc_feature: MA Experiment 20000348 PARAMETER Experiment Name: At_100uM_ABA_Sub_P Parameter: Treatment Value: 100uM ABA vs. No Treatment
  misc_feature: MA Experiment ID: 20000349 Result: Up-regulated in Transcription
  misc_feature: MA Experiment 20000349 PARAMETER Experiment Name: At_100uM_ABA_Sub_P Parameter: Age (day) Value: 14
  misc_feature: MA Experiment 20000349 PARAMETER Experiment Name: At_100uM_ABA_Sub_P Parameter: Organism Value: A. thaliana
  misc_feature: MA Experiment 20000349 PARAMETER Experiment Name: At_100uM_ABA_Sub_P Parameter: Plant Line Value: WS
  misc_feature: MA Experiment 20000349 PARAMETER Experiment Name: At_100uM_ABA_Sub_P Parameter: Timepoint (hr) Value: 6
  misc_feature: MA Experiment 20000349 PARAMETER Experiment Name: At_100uM_ABA_Sub_P Parameter: Tissue Value: Aerial
  misc_feature: MA Experiment 20000349 PARAMETER Experiment Name: At_100uM_ABA_Sub_P Parameter: Treatment Value: 100uM ABA vs. No Treatment
  misc_feature: MA Experiment ID: 20000352 Result: Up-regulated in Transcription
  misc_feature: MA Experiment 20000352 PARAMETER Experiment Name: At_Drought_Sub_P Parameter: Age (day) Value: 7
  misc_feature: MA Experiment 20000352 PARAMETER Experiment Name: At_Drought_Sub_P Parameter: Organism Value: A. thaliana
  misc_feature: MA Experiment 20000352 PARAMETER Experiment Name: At_Drought_Sub_P Parameter: Plant Line Value: WS
  misc_feature: MA Experiment 20000352 PARAMETER Experiment Name: At_Drought_Sub_P Parameter: Timepoint (hr) Value: 6
  misc_feature: MA Experiment 20000352 PARAMETER Experiment Name: At_Drought_Sub_P Parameter: Tissue Value: Whole Plant
  misc_feature: MA Experiment 20000352 PARAMETER Experiment Name: At_Drought_Sub_P Parameter: Treatment Value: Drought vs. No Drought
  misc_feature: MA Experiment ID: 20000355 Result: Up-regulated in Transcription
  misc_feature: MA Experiment 20000355 PARAMETER Experiment Name: At_Siliques_Sub_P Parameter: Age (day) Value: 21
  misc_feature: MA Experiment 20000355 PARAMETER Experiment Name: At_Siliques_Sub_P Parameter: Organism Value: A. thaliana
  misc_feature: MA Experiment 20000355 PARAMETER Experiment Name: At_Siliques_Sub_P Parameter: Plant Line Value: WS
  misc_feature: MA Experiment 20000355 PARAMETER Experiment Name: At_Siliques_Sub_P Parameter: Tissue Value: Less Than 5mm Siliques vs. Whole Plant
  misc_feature: MA Experiment ID: 20000440 Result: Up-regulated in Transcription
  misc_feature: MA Experiment 20000440 PARAMETER Experiment Name: At_Closed-Flower__Sub_P Parameter: Tissue Value: Closed Flower vs. Whole Plant
tcgattggccaaatcggccctcgagggaacctcggtgcagtcaagatcttgcaacaactgtttccggaacctggaaagcttcaattcatttatgctgatcttggagatgcaaatgctgttaacaaaatattttctgaaaacgcatttgacgctgtgatgcattttgctgctgttgcttatgttggagaaagcacacagtttcctctcaatattatcacaatatcacatcgaacacattggtagttttagagacaatggctgctcatggtgtgaagactttgatatattcaagcacatgtgctacttatggagagcctgagaaaatgccaataacagaggaaactccacaggttccaatcaatccatatggaaaggctaaaaagatggcagaagatatcatcttggatttctccaagaattctattatggcagttatgatcctaagatatttcaatgtgattgggtctgatcctgagggtagactaggtgaagctccaagacctgaactcagtgagcatggacggatctctggtgcttgctttgatgctgcacgaggcatcattcccgggctgcagattaaaggaacagactacaagactgttgatgggacttgtgtacgtgattacattgatgtcaccgacttggttgatgctcatgttaaagctcttgaaaaggcgaaaccccgcaaagttggtatcttcaatgttggtaccgggaaaggtagctcggtgaaggagtttgtggaagcgtgcaaaaaggcgaccggcgttgatataaaagtcgattacttggaaagacgggcaggagattacgcagaggtttacagcgatccaagaaaaatcaaagaagagctgaattggacagctaagcacaccaatcttcaagaaagtttaaagatggcatggagatggcaaaagcttcatcgcagtggctatggatcttcttccttggtttctgcatactgaccattatgcattaggtatgtgagcattgcccttcaaggactccttcattagagtcttgattctagatggtagtgaaggtagtagaagaagatggatttattcttagtagaatagtattcatcttatccatatatagagattatatatgagattattgatt

SEQ ID NO: 106360 - protein, 236 aa, Arabidopsis thaliana
  peptide (1)..(236): Ceres Seq. ID no. 13619362
  misc_feature (1)..(224): Pfam Name: NAD dependent epimerase/dehydratase family Pfam Description: NAD dependent epimerase/dehydratase family
  misc_feature (1)..(236): Homolog of NCBI NO: 7437275 NR Description: probable UDPglucose 4-epimerase (EC 5.1.3.2)
  misc_feature (1)..(236): Homolog of NCBI NO: 22329866 NR Description: NAD-dependent epimerase/dehydratase family
  misc_feature (1)..(236): Homolog of NCBI NO: 24417398 NR Description: unknown [Arabidopsis thaliana]
  misc_feature (1)..(230): Homolog of NCBI NO: 15237098 NR Description: NAD-dependent epimerase/dehydratase family
  misc_feature (1)..(229): Homolog of NCBI NO: 15241503 NR Description: NAD-dependent epimerase/dehydratase family
  misc_feature (1)..(228): Homolog of NCBI NO: 27260937 NR Description: OJ1417_E01.21 [Oryza sativa (japonica
  misc_feature (1)..(228): Homolog of NCBI NO: 25553524 NR Description: UDP-galactose 4-epimerase-like protein [Oryza
  misc_feature (1)..(230): Homolog of NCBI NO: 27529690 NR Description: UDP-galactose 4-epimerase-like protein [Oryza
  misc_feature (1)..(230): Homolog of NCBI NO: 26106016 NR Description: UDP-galactose 4-epimerase-like protein [Oryza
  misc_feature (1)..(236): Homolog of NCBI NO: 30686224 NR Description: NAD-dependent epimerase/dehydratase family thaliana] >gi|17979272|gb|AAL49952.1| At2g34850/F19I3.8 thaliana] >gi|20147163|gb|AAM10298.1| At2g34850/F19I3.8
MAAHGVKTLIYSSTCATYGEPEKMPITEETPQVPINPYGKAKKMAEDIILDFSKNSIMAVMILRYFNVIGSDPEGRLGEAPRPELSEHGRISGACFDAARGIIPGLQIKGTDYKTVDGTCVRDYIDVTDLVDAHVKALEKAKPRKVGIFNVGTGKGSSVKEFVEACKKATGVDIKVDYLERRAGDYAEVYSDPRKIKEELNWTAKHTNLQESLKMAWRWQKLHRSGYGSSSLVSAY

SEQ ID NO: 106361 - protein, 213 aa, Arabidopsis thaliana
  peptide (1)..(213): Ceres Seq. ID no. 13619363
  misc_feature (1)..(201): Pfam Name: NAD dependent epimerase/dehydratase family Pfam Description: NAD dependent epimerase/dehydratase family
  misc_feature (1)..(213): Homolog of NCBI NO: 7437275 NR Description: probable UDPglucose 4-epimerase (EC 5.1.3.2)
  misc_feature (1)..(213): Homolog of NCBI NO: 22329866 NR Description: NAD-dependent epimerase/dehydratase family
  misc_feature (1)..(213): Homolog of NCBI NO: 24417398 NR Description: unknown [Arabidopsis thaliana]
  misc_feature (1)..(207): Homolog of NCBI NO: 15237098 NR Description: NAD-dependent epimerase/dehydratase family
  misc_feature (1)..(206): Homolog of NCBI NO: 15241503 NR Description: NAD-dependent epimerase/dehydratase family
  misc_feature (1)..(205): Homolog of NCBI NO: 27260937 NR Description: OJ1417_E01.21 [Oryza sativa (japonica
  misc_feature (1)..(205): Homolog of NCBI NO: 25553524 NR Description: UDP-galactose 4-epimerase-like protein [Oryza
  misc_feature (1)..(207): Homolog of NCBI NO: 27529690 NR Description: UDP-galactose 4-epimerase-like protein [Oryza
  misc_feature (1)..(207): Homolog of NCBI NO: 26106016 NR Description: UDP-galactose 4-epimerase-like protein [Oryza
  misc_feature (1)..(213): Homolog of NCBI NO: 30686224 NR Description: NAD-dependent epimerase/dehydratase family thaliana] >gi|17979272|gb|AAL49952.1| At2g34850/F19I3.8 thaliana] >gi|20147163|gb|AAM10298.1| At2g34850/F19I3.8
MPITEETPQVPINPYGKAKKMAEDIILDFSKNSIMAVMILRYFNVIGSDPEGRLGEAPRPELSEHGRISGACFDAARGIIPGLQIKGTDYKTVDGTCVRDYIDVTDLVDAHVKALEKAKPRKVGIFNVGTGKGSSVKEFVEACKKATGVDIKVDYLERRAGDYAEVYSDPRKIKEELNWTAKHTNLQESLKMAWRWQKLHRSGYGSSSLVSAY

SEQ ID NO: 106362 - protein, 193 aa, Arabidopsis thaliana
  peptide (1)..(193): Ceres Seq. ID no. 13619364
  misc_feature (1)..(181): Pfam Name: NAD dependent epimerase/dehydratase family Pfam Description: NAD dependent epimerase/dehydratase family
  misc_feature (1)..(193): Homolog of NCBI NO: 7437275 NR Description: probable UDPglucose 4-epimerase (EC 5.1.3.2)
  misc_feature (1)..(193): Homolog of NCBI NO: 22329866 NR Description: NAD-dependent epimerase/dehydratase family
  misc_feature (1)..(193): Homolog of NCBI NO: 24417398 NR Description: unknown [Arabidopsis thaliana]
  misc_feature (1)..(187): Homolog of NCBI NO: 15237098 NR Description: NAD-dependent epimerase/dehydratase family
  misc_feature (1)..(186): Homolog of NCBI NO: 15241503 NR Description: NAD-dependent epimerase/dehydratase family
  misc_feature (1)..(185): Homolog of NCBI NO: 27260937 NR Description: OJ1417_E01.21 [Oryza sativa (japonica
  misc_feature (1)..(185): Homolog of NCBI NO: 25553524 NR Description: UDP-galactose 4-epimerase-like protein [Oryza
  misc_feature (1)..(187): Homolog of NCBI NO: 27529690 NR Description: UDP-galactose 4-epimerase-like protein [Oryza
  misc_feature (1)..(187): Homolog of NCBI NO: 26106016 NR Description: UDP-galactose 4-epimerase-like protein [Oryza
  misc_feature (1)..(193): Homolog of NCBI NO: 30686224 NR Description: NAD-dependent epimerase/dehydratase family thaliana] >gi|17979272|gb|AAL49952.1| At2g34850/F19I3.8 thaliana] >gi|20147163|gb|AAM10298.1| At2g34850/F19I3.8
MAEDIILDFSKNSIMAVMILRYFNVIGSDPEGRLGEAPRPELSEHGRISGACFDAARGIIPGLQIKGTDYKTVDGTCVRDYIDVTDLVDAHVKALEKAKPRKVGIFNVGTGKGSSVKEFVEACKKATGVDIKVDYLERRAGDYAEVYSDPRKIKEELNWTAKHTNLQESLKMAWRWQKLHRSGYGSSSLVSAY

SEQ ID NO: 106363 - DNA, 1080 bp, Arabidopsis thaliana
  misc_feature (1)..(1080): Ceres Seq. ID no. 13619374
  misc_feature: MA Experiment ID: 20000185 Result: Up-regulated in Transcription
  misc_feature: MA Experiment 20000185 PARAMETER Experiment Name: At_Roots__P Parameter: Age (day) Value: 7 vs. 21
  misc_feature: MA Experiment 20000185 PARAMETER Experiment Name: At_Roots__P Parameter: Organism Value: A. thaliana
  misc_feature: MA Experiment 20000185 PARAMETER Experiment Name: At_Roots__P Parameter: Tissue Value: Roots vs. Whole Plant
  misc_feature: MA Experiment ID: 20000227 Result: Down-regulated in Transcription
  misc_feature: MA Experiment 20000227 PARAMETER Experiment Name: At_Root-Tips-vs-Tops_P Parameter: Tissue Value: Root Tips vs. Root Tops
  misc_feature: MA Experiment ID: 20000460 Result: Down-regulated in Transcription
  misc_feature: MA Experiment 20000460 PARAMETER Experiment Name: At_10percent_PEG_P Parameter: Age (day) Value: 12
  misc_feature: MA Experiment 20000460 PARAMETER Experiment Name: At_10percent_PEG_P Parameter: Organism Value: A. thaliana
  misc_feature: MA Experiment 20000460 PARAMETER Experiment Name: At_10percent_PEG_P Parameter: Plant Line Value: WS
  misc_feature: MA Experiment 20000460 PARAMETER Experiment Name: At_10percent_PEG_P Parameter: Timepoint (day) Value: 12
  misc_feature: MA Experiment 20000460 PARAMETER Experiment Name: At_10percent_PEG_P Parameter: Tissue Value: Whole Plant
  misc_feature: MA Experiment 20000460 PARAMETER Experiment Name: At_10percent_PEG_P Parameter: Treatment Value: 10percent PEG vs. No Treatment
  misc_feature: MA Experiment ID: 20000573 Result: Down-regulated in Transcription
  misc_feature: MA Experiment 20000573 PARAMETER Experiment Name: At_100uM_ABA_Mutants__P Parameter: Organism Value: A. thaliana
  misc_feature: MA Experiment 20000573 PARAMETER Experiment Name: At_100uM_ABA_Mutants__P Parameter: Plant Line Value: CS22 vs. Ler wt
  misc_feature: MA Experiment 20000573 PARAMETER Experiment Name: At_100uM_ABA_Mutants__P Parameter: Timepoint (hr) Value: N/A
  misc_feature: MA Experiment 20000573 PARAMETER Experiment Name: At_100uM_ABA_Mutants__P Parameter: Tissue Value: Whole Plant
  misc_feature: MA Experiment 20000573 PARAMETER Experiment Name: At_100uM_ABA_Mutants__P Parameter: Treatment Value: None
  misc_feature: MA Experiment ID: 20000574 Result: Down-regulated in Transcription
  misc_feature: MA Experiment 20000574 PARAMETER Experiment Name: At_100uM_ABA_Mutants__P Parameter: Organism Value: A. thaliana
  misc_feature: MA Experiment 20000574 PARAMETER Experiment Name: At_100uM_ABA_Mutants__P Parameter: Plant Line Value: CS23 vs. Ler wt
  misc_feature: MA Experiment 20000574 PARAMETER Experiment Name: At_100uM_ABA_Mutants__P Parameter: Timepoint (hr) Value: N/A
  misc_feature: MA Experiment 20000574 PARAMETER Experiment Name: At_100uM_ABA_Mutants__P Parameter: Tissue Value: Whole Plant
  misc_feature: MA Experiment 20000574 PARAMETER Experiment Name: At_100uM_ABA_Mutants__P Parameter: Treatment Value: None
gagatgaacagaaacacatgacataactttccaaatggagatcaagcagaagaaagtatggctttctttaattgtgctttatgcaattacgacatcagttttgggggactttggagaaccattactgaagggtttctacaaagagagttgcccattggcagaggaaatcgtgaagcataacatcgaagttgctgttctcaaagatcctcgtatggcggcttctcttcttcgtcttcagttccacgattgcttcgtcttgggttgtgatgcgtctgtgctcttggacacacatggagatatgttgagtgagaaacaagcaactccaaatctgaactctttacgtggatttgaagtaatcgattacattaagtacctcctcgaagaagcttgtcctctaactgtctcatgttccgatatccttgccttggccgctcgtgactcagtcttcctgagaggtggcccatggtgggaagttttgctagggagaagagactcattaaaggcaagtttcgccggagcaaaccaattcattccagcaccaaactcctctctcgacagcctcatcatcaatttcaagcaacaagggctcaacattcaagatctcatcgctctttcgggtgctcatacaataggtaaagcgagatgcgtgagcttcaagcaacgcattgttcaaccaaacatggaacaaacgttctacgtcgatgagttcagaagacacagcacgttccgtcgagtcctagggtcacaatgcaaagattcaagccgagacaacgaactgtctccactggatattaagacaccagcttacttcgataaccattatttcatcaatctgttagaagggagagggttgttgatttcggataacgttctggtctcagaagatcatgaaggagagatctttcagaaagtttgggaatatgcagttaatcaagatcttttcttcatagattttgtggaatctatgttaaaaatgggtaatattaatgttcttacaggtattgaaggtgaaattagggagaattgtagatttgtcaatatctgaaatcaaacatcaatcaatacaaattgtttgcactt

SEQ ID NO: 106364 - protein, 336 aa, Arabidopsis thaliana
  peptide (1)..(336): Ceres Seq. ID no. 13619375
  misc_feature (46)..(299): Pfam Name: Peroxidase Pfam Description: Peroxidase
  misc_feature (1)..(336): Homolog of NCBI NO: 15226975 NR Description: peroxidase family [Arabidopsis thaliana]
  misc_feature (7)..(335): Homolog of NCBI NO: 14031051 NR Description: peroxidase [Nicotiana tabacum]
  misc_feature (10)..(335): Homolog of NCBI NO: 34903044 NR Description: unnamed protein product [Oryza sativa (japonica group)] >gi|7242902|dbj|BAA92500.1| unnamed protein product
  misc_feature (3)..(335): Homolog of NCBI NO: 7453855 NR Description: peroxidase prx15 precursor [Spinacia oleracea]
  misc_feature (24)..(335): Homolog of NCBI NO: 15219493 NR Description: peroxidase, putative [Arabidopsis thaliana] Peroxidase 9 precursor (Atperox P9) (ATP18a) peroxidase; peroxidase ATP18a [Arabidopsis thaliana]
  misc_feature (24)..(335): Homolog of NCBI NO: 21554765 NR Description: peroxidase, putative [Arabidopsis thaliana]
  misc_feature (24)..(335): Homolog of NCBI NO: 7453853 NR Description: peroxidase prx14 precursor [Spinacia oleracea]
  misc_feature (24)..(331): Homolog of NCBI NO: 993004 NR Description: peroxidase [Mercurialis annua]
  misc_feature (14)..(335): Homolog of NCBI NO: 25044849 NR Description: peroxidase [Ananas comosus]
  misc_feature (12)..(335): Homolog of NCBI NO: 15224116 NR Description: peroxidase, putative [Arabidopsis thaliana]
MEIKQKKVWLSLIVLYAITTSVLGDFGEPLLKGFYKESCPLAEEIVKHNIEVAVLKDPRMAASLLRLQFHDCFVLGCDASVLLDTHGDMLSEKQATPNLNSLRGFEVIDYIKYLLEEACPLTVSCSDILALAARDSVFLRGGPWWEVLLGRRDSLKASFAGANQFIPAPNSSLDSLIINFKQQGLNIQDLIALSGAHTIGKARCVSFKQRIVQPNMEQTFYVDEFRRHSTFRRVLGSQCKDSSRDNELSPLDIKTPAYFDNHYFINLLEGRGLLISDNVLVSEDHEGEIFQKVWEYAVNQDLFFIDFVESMLKMGNINVLTGIEGEIRENCRFVNI

SEQ ID NO: 106365 - protein, 277 aa, Arabidopsis thaliana
  peptide (1)..(277): Ceres Seq. ID no. 13619376
  misc_feature (1)..(240): Pfam Name: Peroxidase Pfam Description: Peroxidase
  misc_feature (1)..(277): Homolog of NCBI NO: 15226975 NR Description: peroxidase family [Arabidopsis thaliana]
  misc_feature (1)..(276): Homolog of NCBI NO: 14031051 NR Description: peroxidase [Nicotiana tabacum]
  misc_feature (1)..(276): Homolog of NCBI NO: 34903044 NR Description: unnamed protein product [Oryza sativa (japonica group)] >gi|7242902|dbj|BAA92500.1| unnamed protein product
  misc_feature (1)..(276): Homolog of NCBI NO: 7453855 NR Description: peroxidase prx15 precursor [Spinacia oleracea]
  misc_feature (1)..(276): Homolog of NCBI NO: 15219493 NR Description: peroxidase, putative [Arabidopsis thaliana] Peroxidase 9 precursor (Atperox P9) (ATP18a) peroxidase; peroxidase ATP18a [Arabidopsis thaliana]
  misc_feature (1)..(276): Homolog of NCBI NO: 21554765 NR Description: peroxidase, putative [Arabidopsis thaliana]
  misc_feature (1)..(276): Homolog of NCBI NO: 7453853 NR Description: peroxidase prx14 precursor [Spinacia oleracea]
  misc_feature (1)..(272): Homolog of NCBI NO: 993004 NR Description: peroxidase [Mercurialis annua]
  misc_feature (1)..(276): Homolog of NCBI NO: 25044849 NR Description: peroxidase [Ananas comosus]
  misc_feature (1)..(276): Homolog of NCBI NO: 15224116 NR Description: peroxidase, putative [Arabidopsis thaliana]
MAASLLRLQFHDCFVLGCDASVLLDTHGDMLSEKQATPNLNSLRGFEVIDYIKYLLEEACPLTVSCSDILALAARDSVFLRGGPWWEVLLGRRDSLKASFAGANQFIPAPNSSLDSLIINFKQQGLNIQDLIALSGAHTIGKARCVSFKQRIVQPNMEQTFYVDEFRRHSTFRRVLGSQCKDSSRDNELSPLDIKTPAYFDNHYFINLLEGRGLLISDNVLVSEDHEGEIFQKVWEYAVNQDLFFIDFVESMLKMGNINVLTGIEGEIRENCRFVNI

SEQ ID NO: 106366 - protein, 248 aa, Arabidopsis thaliana
  peptide (1)..(248): Ceres Seq. ID no. 13619377
  misc_feature (1)..(211): Pfam Name: Peroxidase Pfam Description: Peroxidase
  misc_feature (1)..(248): Homolog of NCBI NO: 15226975 NR Description: peroxidase family [Arabidopsis thaliana]
  misc_feature (1)..(247): Homolog of NCBI NO: 14031051 NR Description: peroxidase [Nicotiana tabacum]
  misc_feature (1)..(247): Homolog of NCBI NO: 34903044 NR Description: unnamed protein product [Oryza sativa (japonica group)] >gi|7242902|dbj|BAA92500.1| unnamed protein product
  misc_feature (1)..(247): Homolog of NCBI NO: 7453855 NR Description: peroxidase prx15 precursor [Spinacia oleracea]
  misc_feature (1)..(247): Homolog of NCBI NO: 15219493 NR Description: peroxidase, putative [Arabidopsis thaliana] Peroxidase 9 precursor (Atperox P9) (ATP18a) peroxidase; peroxidase ATP18a [Arabidopsis thaliana]
  misc_feature (1)..(247): Homolog of NCBI NO: 21554765 NR Description: peroxidase, putative [Arabidopsis thaliana]
  misc_feature (1)..(247): Homolog of NCBI NO: 7453853 NR Description: peroxidase prx14 precursor [Spinacia oleracea]
  misc_feature (1)..(243): Homolog of NCBI NO: 993004 NR Description: peroxidase [Mercurialis annua]
  misc_feature (1)..(247): Homolog of NCBI NO: 25044849 NR Description: peroxidase [Ananas comosus]
  misc_feature (1)..(247): Homolog of NCBI NO: 15224116 NR Description: peroxidase, putative [Arabidopsis thaliana]
MLSEKQATPNLNSLRGFEVIDYIKYLLEEACPLTVSCSDILALAARDSVFLRGGPWWEVLLGRRDSLKASFAGANQFIPAPNSSLDSLIINFKQQGLNIQDLIALSGAHTIGKARCVSFKQRIVQPNMEQTFYVDEFRRHSTFRRVLGSQCKDSSRDNELSPLDIKTPAYFDNHYFINLLEGRGLLISDNVLVSEDHEGEIFQKVWEYAVNQDLFFIDFVESMLKMGNINVLTGIEGEIRENCRFVNI

SEQ ID NO: 106367 - DNA, 2322 bp, Arabidopsis thaliana
  misc_feature (1)..(2322): Ceres Seq. ID no. 13619382
  misc_feature: MA Experiment ID: 20000227 Result: Down-regulated in Transcription
  misc_feature: MA Experiment 20000227 PARAMETER Experiment Name: At_Root-Tips-vs-Tops_P Parameter: Tissue Value: Root Tips vs. Root Tops
  misc_feature: MA Experiment ID: 20000264 Result: Up-regulated in Transcription
  misc_feature: MA Experiment 20000264 PARAMETER Experiment Name: At_Open_Flower_P Parameter: Age (day) Value: 21
  misc_feature: MA Experiment 20000264 PARAMETER Experiment Name: At_Open_Flower_P Parameter: Plant Line Value: WS
  misc_feature: MA Experiment 20000264 PARAMETER Experiment Name: At_Open_Flower_P Parameter: Tissue Value: Open Flower vs. Whole Plant
  misc_feature: MA Experiment ID: 20000286 Result: Up-regulated in Transcription
  misc_feature: MA Experiment 20000286 PARAMETER Experiment Name: At_Open_Flower_P Parameter: Age (day) Value: 21
  misc_feature: MA Experiment 20000286 PARAMETER Experiment Name: At_Open_Flower_P Parameter: Plant Line Value: WS
  misc_feature: MA Experiment 20000286 PARAMETER Experiment Name: At_Open_Flower_P Parameter: Tissue Value: Half Open vs. Whole Plant
  misc_feature: MA Experiment ID: 20000495 Result: Down-regulated in Transcription
  misc_feature: MA Experiment 20000495 PARAMETER Experiment Name: At_Guard_Cells_P Parameter: Harvest Date Value: 8/2/2002
  misc_feature: MA Experiment 20000495 PARAMETER Experiment Name: At_Guard_Cells_P Parameter: Organism Value: A. thaliana
  misc_feature: MA Experiment 20000495 PARAMETER Experiment Name: At_Guard_Cells_P Parameter: Tissue Value: Guard Cells vs. Leaves
  misc_feature: MA Experiment ID: 20000794 Result: Up-regulated in Transcription
  misc_feature: MA Experiment 20000794 PARAMETER Experiment Name: At_Petals_P Parameter: Age (day) Value: 23-25 days
  misc_feature: MA Experiment 20000794 PARAMETER Experiment Name: At_Petals_P Parameter: Plant Line Value: WS
  misc_feature: MA Experiment 20000794 PARAMETER Experiment Name: At_Petals_P Parameter: Tissue Value: Petals vs. Whole plant
  misc_feature: MA Experiment ID: 20001247 Result: Up-regulated in Transcription
  misc_feature: MA Experiment 20001247 PARAMETER Experiment Name: At_Far-red-induction_P Parameter: Age (day) Value: 7
  misc_feature: MA Experiment 20001247 PARAMETER Experiment Name: At_Far-red-induction_P Parameter: Light Value: Far-red vs. White
  misc_feature: MA Experiment 20001247 PARAMETER Experiment Name: At_Far-red-induction_P Parameter: Organism Value: A. thaliana
  misc_feature: MA Experiment 20001247 PARAMETER Experiment Name: At_Far-red-induction_P Parameter: Plant Line Value: Columbia
  misc_feature: MA Experiment 20001247 PARAMETER Experiment Name: At_Far-red-induction_P Parameter: Timepoint (hr) Value: 1
  misc_feature: MA Experiment 20001247 PARAMETER Experiment Name: At_Far-red-induction_P Parameter: Tissue Value: Whole Plant
aataaataaagagtttagtcattttatcgtaaaaccaaaagaaagagaaaaagattaatcatcatcaatctaaagatttaggaatctacaatttcccagtagacagatttcacttttgcgtcttcttcttattccatttgatctaagtttctcgaaataggtacaaagttcgagtctttttcttgtaaccgcgtgaaaccaccaagaaacctatagtaagagtttccgcaaatgtgaattaaagacagctcatcactctgtcaaacttctacagtattaagttaacgaagcaggtacagccaaactaaaataacgcggagttatgggaatcatcgacggttctttgcttcggcggttgatttgtctctgtctctggtgtcttctcggtggaggagtgacggtggttacggcggaggatgagaagaaagtggtacataaacagcttaatcaaactccgacttgggctgttgctgctgtttgtactttcttcatcgttgtttctgttcttcttgaaaaacttcttcacaaagttggaaaggttctatgggatcggcacaagacagctcttcttgacgctttggagaagatcaaagcagagctgatggttcttggattcatctctttgcttctgacatttggacaaacctacattttggatatttgtatcccttcacatgttgctcgtacgatgctcccgtgtcctgctcctaacttgaaaaaggaggatgatgacaatggtgaaagtcacaggagactcttgtcgtttgagcacagatttttatctggaggtgaagcatctcccactaaatgcacgaaggagggttatgtagagcttatctctgccgaggcactccatcagttgcacatccttatattcttcttagccattttccacgttctttacagcttcttaactatgatgcttggaaggttgaagattcgcggatggaagcattgggagaatgagacatcatcccataattacgagttttcaacagacacttccagattcaggctaactcatgaaacatcttttgtgagagcgcacaccagtttctggacccggattccattctttttctatgttggatgctttttcagacagtttttcagatccgttgggagaactgactatttgacattgagaaatggtttcatcgctgttcatttagctccaggaagtcaatttaacttccaaaaatacattaaaagatcgttggaggatgatttcaaggtagtcgttggagtcagccctgtcttgtggggatcttttgtgctattcctcctcctaaatattgacggcttcaagatgatgttcatcggcactgcaataccggttattatcattttagctgtagggacaaagcttcaagcgattatgacaaggatggctcttggtatcacagatagacatgcggtagttcaaggaatgccgcttgtacaaggcaacgatgagtatttctggttcggtcgtccccatttgattctccatctcatgcatttcgccttgtttcagaacgcatttcagatcacttatttcttctggatatggtattcctttggatcagattcttgctaccatcctaatttcaagattgcacttgtaaaagtagcgattgctttaggagtattgtgtctttgcagctacatcacacttcctctttacgcactcgtaactcagatgggttctcggatgaaaaaatcggtattcgatgaacaaacgtcaaaagcactcaagaaatggagaatggcagtgaagaagaagaaaggtgtgaaagccactactaagagactaggtggagatggaagtgcgagccctacggcatcgacagttaggtctacttcgtctgtacgttcattgcagcgttacaaaaccacaccacattcgatgagatacgaaggacttgaccctgaaacatcggatctcgacacagataatgaagctttgactcctcccaaatctcctccaagcttcgagcttgttgtgaaagttgaaccaaataagaccaataccggtgagactagccgtgacactgaaactgattctaaagagttctctttcgtcaagcctgctccgagtaatgaatcatctcaagaccggtgagactagtcaggattgtgaaggtgtagcctgcgccaagtaaagacttcttttcgagttaagcctgcgccaagtaaagaaccatcgtagtaaagatgtgtcactccagagtttttttttttttggtttcatttatctaatgctattgtaaatcaatgccgtggcgataaagtaatgtattgatgaccatattaattaaaataggctgaagaaaatgaggg

SEQ ID NO: 106368 - protein, 593 aa, Arabidopsis thaliana
  peptide (1)..(593): Ceres Seq. ID no. 13619383
  misc_feature (16)..(588): Homolog of NCBI NO: 15239213 NR Description: seven transmembrane MLO protein family (MLO10)
  misc_feature (1)..(335): Homolog of NCBI NO: 25346302 NR Description: similar to Mlo proteins from H. vulgare
  misc_feature (17)..(540): Homolog of NCBI NO: 33112635 NR Description: MLO-like protein 7 (AtMlo7)
  misc_feature (74)..(540): Homolog of NCBI NO: 30679982 NR Description: seven transmembrane MLO protein family (MLO7)
  misc_feature (17)..(73): Homolog of NCBI NO: 30679982 NR Description: seven transmembrane MLO protein family (MLO7)
  misc_feature (74)..(540): Homolog of NCBI NO: 25346299 NR Description: similar to Mlo proteins from H. vulgare - Arabidopsis thaliana >gi|6598336|gb|AAB86520.2| putative Mlo
  misc_feature (17)..(73): Homolog of NCBI NO: 25346299 NR Description: similar to Mlo proteins from H. vulgare - Arabidopsis thaliana >gi|6598336|gb|AAB86520.2| putative Mlo
  misc_feature (39)..(503): Homolog of NCBI NO: 14091580 NR Description: membrane protein Mlo5 [Arabidopsis thaliana]
  misc_feature (39)..(503): Homolog of NCBI NO: 15226140 NR Description: seven transmembrane MLO protein family (MLO5)
  misc_feature (39)..(481): Homolog of NCBI NO: 15217453 NR Description: seven transmembrane MLO protein family (MLO9)
MGIIDGSLLRRLICLCLWCLLGGGVTVVTAEDEKKVVHKQLNQTPTWAVAAVCTFFIVVSVLLEKLLHKVGKVLWDRHKTALLDALEKIKAELMVLGFISLLLTFGQTYILDICIPSHVARTMLPCPAPNLKKEDDDNGESHRRLLSFEHRFLSGGEASPTKCTKEGYVELISAEALHQLHILIFFLAIFHVLYSFLTMMLGRLKIRGWKHWENETSSHNYEFSTDTSRFRLTHETSFVRAHTSFWTRIPFFFYVGCFFRQFFRSVGRTDYLTLRNGFIAVHLAPGSQFNFQKYIKRSLEDDFKVVVGVSPVLWGSFVLFLLLNIDGFKMMFIGTAIPVIIILAVGTKLQAIMTRMALGITDRHAVVQGMPLVQGNDEYFWFGRPHLILHLMHFALFQNAFQITYFFWIWYSFGSDSCYHPNFKIALVKVAIALGVLCLCSYITLPLYALVTQMGSRMKKSVFDEQTSKALKKWRMAVKKKKGVKATTKRLGGDGSASPTASTVRSTSSVRSLQRYKTTPHSMRYEGLDPETSDLDTDNEALTPPKSPPSFELVVKVEPNKTNTGETSRDTETDSKEFSFVKPAPSNESSQDR

SEQ ID NO: 106369 - protein, 500 aa, Arabidopsis thaliana
  peptide (1)..(500): Ceres Seq. ID no. 13619384
  misc_feature (1)..(495): Homolog of NCBI NO: 15239213 NR Description: seven transmembrane MLO protein family (MLO10)
  misc_feature (1)..(242): Homolog of NCBI NO: 25346302 NR Description: similar to Mlo proteins from H. vulgare
  misc_feature (1)..(447): Homolog of NCBI NO: 33112635 NR Description: MLO-like protein 7 (AtMlo7)
  misc_feature (1)..(447): Homolog of NCBI NO: 30679982 NR Description: seven transmembrane MLO protein family (MLO7)
  misc_feature (1)..(447): Homolog of NCBI NO: 25346299 NR Description: similar to Mlo proteins from H. vulgare - Arabidopsis thaliana >gi|6598336|gb|AAB86520.2| putative Mlo
  misc_feature (1)..(410): Homolog of NCBI NO: 14091580 NR Description: membrane protein Mlo5 [Arabidopsis thaliana]
  misc_feature (1)..(410): Homolog of NCBI NO: 15226140 NR Description: seven transmembrane MLO protein family (MLO5)
  misc_feature (1)..(388): Homolog of NCBI NO: 15217453 NR Description: seven transmembrane MLO protein family (MLO9)
  misc_feature (1)..(492): Homolog of NCBI NO: 13784977 NR Description: seven transmembrane protein Mlo2 [Zea mays]
  misc_feature (1)..(457): Homolog of NCBI NO: 37536520 NR Description: putative Mlo (pathogen resistance) protein [Oryza
MVLGFISLLLTFGQTYILDICIPSHVARTMLPCPAPNLKKEDDDNGESHRRLLSFEHRFLSGGEASPTKCTKEGYVELISAEALHQLHILIFFLAIFHVLYSFLTMMLGRLKIRGWKHWENETSSHNYEFSTDTSRFRLTHETSFVRAHTSFWTRIPFFFYVGCFFRQFFRSVGRTDYLTLRNGFIAVHLAPGSQFNFQKYIKRSLEDDFKVVVGVSPVLWGSFVLFLLLNIDGFKMMFIGTAIPVIIILAVGTKLQAIMTRMALGITDRHAVVQGMPLVQGNDEYFWFGRPHLILHLMHFALFQNAFQITYFFWIWYSFGSDSCYHPNFKIALVKVAIALGVLCLCSYITLPLYALVTQMGSRMKKSVFDEQTSKALKKWRMAVKKKKGVKATTKRLGGDGSASPTASTVRSTSSVRSLQRYKTTPHSMRYEGLDPETSDLDTDNEALTPPKSPPSFELVVKVEPNKTNTGETSRDTETDSKEFSFVKPAPSNESSQDR

SEQ ID NO: 106370 - protein, 471 aa, Arabidopsis thaliana
  peptide (1)..(471): Ceres Seq. ID no. 13619385
  misc_feature (1)..(466): Homolog of NCBI NO: 15239213 NR Description: seven transmembrane MLO protein family (MLO10)
  misc_feature (1)..(213): Homolog of NCBI NO: 25346302 NR Description: similar to Mlo proteins from H. vulgare
  misc_feature (1)..(418): Homolog of NCBI NO: 33112635 NR Description: MLO-like protein 7 (AtMlo7)
  misc_feature (1)..(418): Homolog of NCBI NO: 30679982 NR Description: seven transmembrane MLO protein family (MLO7)
  misc_feature (1)..(418): Homolog of NCBI NO: 25346299 NR Description: similar to Mlo proteins from H. vulgare - Arabidopsis thaliana >gi|6598336|gb|AAB86520.2| putative Mlo
  misc_feature (1)..(381): Homolog of NCBI NO: 14091580 NR Description: membrane protein Mlo5 [Arabidopsis thaliana]
  misc_feature (1)..(381): Homolog of NCBI NO: 15226140 NR Description: seven transmembrane MLO protein family (MLO5)
  misc_feature (1)..(359): Homolog of NCBI NO: 15217453 NR Description: seven transmembrane MLO protein family (MLO9)
  misc_feature (1)..(463): Homolog of NCBI NO: 13784977 NR Description: seven transmembrane protein Mlo2 [Zea mays]
  misc_feature (1)..(428): Homolog of NCBI NO: 37536520 NR Description: putative Mlo (pathogen resistance) protein [Oryza
MLPCPAPNLKKEDDDNGESHRRLLSFEHRFLSGGEASPTKCTKEGYVELISAEALHQLHILIFFLAIFHVLYSFLTMMLGRLKIRGWKHWENETSSHNYEFSTDTSRFRLTHETSFVRAHTSFWTRIPFFFYVGCFFRQFFRSVGRTDYLTLRNGFIAVHLAPGSQFNFQKYIKRSLEDDFKVVVGVSPVLWGSFVLFLLLNIDGFKMMFIGTAIPVIIILAVGTKLQAIMTRMALGITDRHAVVQGMPLVQGNDEYFWFGRPHLILHLMHFALFQNAFQITYFFWIWYSFGSDSCYHPNFKIALVKVAIALGVLCLCSYITLPLYALVTQMGSRMKKSVFDEQTSKALKKWRMAVKKKKGVKATTKRLGGDGSASPTASTVRSTSSVRSLQRYKTTPHSMRYEGLDPETSDLDTDNEALTPPKSPPSFELVVKVEPNKTNTGETSRDTETDSKEFSFVKPAPSNESSQDR

SEQ ID NO: 106371 - DNA, 997 bp, Arabidopsis thaliana
  misc_feature (1)..(997): Ceres Seq. ID no. 13619398
  misc_feature: MA Experiment ID: 108462 Result: Up-regulated in Transcription
  misc_feature: MA Experiment 108462 PARAMETER Experiment Name: At_Germinating_Seeds_cDNA_P Parameter: Age (day) Value: 2 vs. 0
  misc_feature: MA Experiment 108462 PARAMETER Experiment Name: At_Germinating_Seeds_cDNA_P Parameter: Tissue Value: Germinating Seeds
  misc_feature: MA Experiment ID: 108463 Result: Up-regulated in Transcription
  misc_feature: MA Experiment 108463 PARAMETER Experiment Name: At_Germinating_Seeds_cDNA_P Parameter: Age (day) Value: 3 vs. 0
  misc_feature: MA Experiment 108463 PARAMETER Experiment Name: At_Germinating_Seeds_cDNA_P Parameter: Tissue Value: Germinating Seeds
  misc_feature: MA Experiment ID: 108464 Result: Up-regulated in Transcription
  misc_feature: MA Experiment 108464 PARAMETER Experiment Name: At_Germinating_Seeds_cDNA_P Parameter: Age (day) Value: 4 vs. 0
  misc_feature: MA Experiment 108464 PARAMETER Experiment Name: At_Germinating_Seeds_cDNA_P Parameter: Tissue Value: Germinating Seeds
  misc_feature: MA Experiment ID: 108572 Result: Up-regulated in Transcription
  misc_feature: MA Experiment 108572 PARAMETER Experiment Name: At_Drought_cDNA_P Parameter: Timepoint (hr) Value: 1
  misc_feature: MA Experiment 108572 PARAMETER Experiment Name: At_Drought_cDNA_P Parameter: Tissue Value: Aerial
  misc_feature: MA Experiment 108572 PARAMETER Experiment Name: At_Drought_cDNA_P Parameter: Treatment Value: Drought vs. No Drought
  misc_feature: MA Experiment ID: 108579 Result: Up-regulated in Transcription
  misc_feature: MA Experiment 108579 PARAMETER Experiment Name: At_4deg_Cold_cDNA_P Parameter: Temperature (deg C) Value: 4 vs. 22
  misc_feature: MA Experiment 108579 PARAMETER Experiment Name: At_4deg_Cold_cDNA_P Parameter: Timepoint (hr) Value: 6
  misc_feature: MA Experiment 108579 PARAMETER Experiment Name: At_4deg_Cold_cDNA_P Parameter: Tissue Value: Aerial
  misc_feature: MA Experiment ID: 108607 Result: Up-regulated in Transcription
  misc_feature: MA Experiment 108607 PARAMETER Experiment Name: At_100uM_ABA_cDNA_P Parameter: Timepoint (hr) Value: 4
  misc_feature: MA Experiment 108607 PARAMETER Experiment Name: At_100uM_ABA_cDNA_P Parameter: Tissue Value: Aerial
  misc_feature: MA Experiment 108607 PARAMETER Experiment Name: At_100uM_ABA_cDNA_P Parameter: Treatment Value: 100uM ABA vs. No Treatment
  misc_feature: MA Experiment ID: 20000069 Result: Down-regulated in Transcription
  misc_feature: MA Experiment 20000069 PARAMETER Experiment Name: At_100uM_ABA_Mutants_cDNA_P Parameter: Plant Line Value: CS23
  misc_feature: MA Experiment 20000069 PARAMETER Experiment Name: At_100uM_ABA_Mutants_cDNA_P Parameter: Timepoint (hr) Value: 6
  misc_feature: MA Experiment 20000069 PARAMETER Experiment Name: At_100uM_ABA_Mutants_cDNA_P Parameter: Tissue Value: Aerial
  misc_feature: MA Experiment 20000069 PARAMETER Experiment Name: At_100uM_ABA_Mutants_cDNA_P Parameter: Treatment Value: 100uM ABA vs. No Treatment
  misc_feature: MA Experiment ID: 20000071 Result: Down-regulated in Transcription
  misc_feature: MA Experiment 20000071 PARAMETER Experiment Name: At_100uM_ABA_Mutants_cDNA_P Parameter: Plant Line Value: CS8104
  misc_feature: MA Experiment 20000071 PARAMETER Experiment Name: At_100uM_ABA_Mutants_cDNA_P Parameter: Timepoint (hr) Value: 6
  misc_feature: MA Experiment 20000071 PARAMETER Experiment Name: At_100uM_ABA_Mutants_cDNA_P Parameter: Tissue Value: Aerial
  misc_feature: MA Experiment 20000071 PARAMETER Experiment Name: At_100uM_ABA_Mutants_cDNA_P Parameter: Treatment Value: 100uM ABA vs. No Treatment
  misc_feature: MA Experiment ID: 20000087 Result: Down-regulated in Transcription
  misc_feature: MA Experiment 20000087 PARAMETER Experiment Name: At_100uM_ABA_Mutants_cDNA_P Parameter: Plant Line Value: WS
  misc_feature: MA Experiment 20000087 PARAMETER Experiment Name: At_100uM_ABA_Mutants_cDNA_P Parameter: Timepoint (hr) Value: 6
  misc_feature: MA Experiment 20000087 PARAMETER Experiment Name: At_100uM_ABA_Mutants_cDNA_P Parameter: Tissue Value: Aerial
  misc_feature: MA Experiment 20000087 PARAMETER Experiment Name: At_100uM_ABA_Mutants_cDNA_P Parameter: Treatment Value: 100uM ABA vs. No Treatment
  misc_feature: MA Experiment ID: 20000089 Result: Down-regulated in Transcription
  misc_feature: MA Experiment ID: 20000090 Result: Down-regulated in Transcription
  misc_feature: MA Experiment ID: 20000179 Result: Up-regulated in Transcription
  misc_feature: MA Experiment 20000179 PARAMETER Experiment Name: At_Germinating_Seeds_P Parameter: Age (hr) Value: 6 vs. 0
  misc_feature: MA Experiment 20000179 PARAMETER Experiment Name: At_Germinating_Seeds_P Parameter: Tissue Value: Germinating Seeds
  misc_feature: MA Experiment ID: 20000184 Result: Up-regulated in Transcription
  misc_feature: MA Experiment 20000184 PARAMETER Experiment Name: At_Shoots__P Parameter: Age (day) Value: 7
  misc_feature: MA Experiment 20000184 PARAMETER Experiment Name: At_Shoots__P Parameter: Tissue Value: Shoots vs. Whole Plant
  misc_feature: MA Experiment ID: 20000224 Result: Up-regulated in Transcription
  misc_feature: MA Experiment ID: 20000234 Result: Up-regulated in Transcription
  misc_feature: MA Experiment 20000234 PARAMETER Experiment Name: At_Siliques_P Parameter: Age (day) Value: 21
  misc_feature: MA Experiment 20000234 PARAMETER Experiment Name: At_Siliques_P Parameter: Organism Value: A. thaliana
  misc_feature: MA Experiment 20000234 PARAMETER Experiment Name: At_Siliques_P Parameter: Plant Line Value: WS
  misc_feature: MA Experiment 20000234 PARAMETER Experiment Name: At_Siliques_P Parameter: Tissue Value: Less Than 5mm Siliques vs. Whole Plant
  misc_feature: MA Experiment ID: 20000264 Result: Up-regulated in Transcription
  misc_feature: MA Experiment 20000264 PARAMETER Experiment Name: At_Open_Flower_P Parameter: Age (day) Value: 21
  misc_feature: MA Experiment 20000264 PARAMETER Experiment Name: At_Open_Flower_P Parameter: Plant Line Value: WS
  misc_feature: MA Experiment 20000264 PARAMETER Experiment Name: At_Open_Flower_P Parameter: Tissue Value: Open Flower vs. Whole Plant
  misc_feature: MA Experiment ID: 20000265 Result: Up-regulated in Transcription
  misc_feature: MA Experiment 20000265 PARAMETER Experiment Name: At_Open_Flower_P Parameter: Age (day) Value: 21
  misc_feature: MA Experiment 20000265 PARAMETER Experiment Name: At_Open_Flower_P Parameter: Plant Line Value: WS
  misc_feature: MA Experiment 20000265 PARAMETER Experiment Name: At_Open_Flower_P Parameter: Tissue Value: Closed Flower vs. Whole Plant
  misc_feature: MA Experiment ID: 20000286 Result: Up-regulated in Transcription
  misc_feature: MA Experiment 20000286 PARAMETER Experiment Name: At_Open_Flower_P Parameter: Age (day) Value: 21
  misc_feature: MA Experiment 20000286 PARAMETER Experiment Name: At_Open_Flower_P Parameter: Plant Line Value: WS
  misc_feature: MA Experiment 20000286 PARAMETER Experiment Name: At_Open_Flower_P Parameter: Tissue Value: Half Open vs. Whole Plant
  misc_feature: MA Experiment ID: 20000794 Result: Up-regulated in Transcription
  misc_feature: MA Experiment 20000794 PARAMETER Experiment Name: At_Petals_P Parameter: Age (day) Value: 23-25 days
  misc_feature: MA Experiment 20000794 PARAMETER Experiment Name: At_Petals_P Parameter: Plant Line Value: WS
  misc_feature: MA Experiment 20000794 PARAMETER Experiment Name: At_Petals_P Parameter: Tissue Value: Petals vs. Whole plant
  misc_feature: MA Experiment ID: 20001248 Result: Down-regulated in Transcription
  misc_feature: MA Experiment 20001248 PARAMETER Experiment Name: At_Far-red-induction_P Parameter: Age (day) Value: 7
  misc_feature: MA Experiment 20001248 PARAMETER Experiment Name: At_Far-red-induction_P Parameter: Light Value: Far-red vs. White
  misc_feature: MA Experiment 20001248 PARAMETER Experiment Name: At_Far-red-induction_P Parameter: Organism Value: A. thaliana
  misc_feature: MA Experiment 20001248 PARAMETER Experiment Name: At_Far-red-induction_P Parameter: Plant Line Value: Columbia
  misc_feature: MA Experiment 20001248 PARAMETER Experiment Name: At_Far-red-induction_P Parameter: Timepoint (hr) Value: 4
  misc_feature: MA Experiment 20001248 PARAMETER Experiment Name: At_Far-red-induction_P Parameter: Tissue Value: Whole Plant
  misc_feature: MA Experiment ID: 20001450 Result: Down-regulated in Transcription
  misc_feature: MA Experiment 20001450 PARAMETER Experiment Name: At_Far-red-induction_P Parameter: Age (day) Value: 7
  misc_feature: MA Experiment 20001450 PARAMETER Experiment Name: At_Far-red-induction_P Parameter: Light Value: Far-red vs. White
  misc_feature: MA Experiment 20001450 PARAMETER Experiment Name: At_Far-red-induction_P Parameter: Organism Value: A. thaliana
  misc_feature: MA Experiment 20001450 PARAMETER Experiment Name: At_Far-red-induction_P Parameter: Plant Line Value: Columbia
  misc_feature: MA Experiment 20001450 PARAMETER Experiment Name: At_Far-red-induction_P Parameter: Timepoint (hr) Value: 8
  misc_feature: MA Experiment 20001450 PARAMETER Experiment Name: At_Far-red-induction_P Parameter: Tissue Value: Whole Plant
  misc_feature: MA Experiment ID: 20001451 Result: Down-regulated in Transcription
  misc_feature: MA Experiment 20001451 PARAMETER Experiment Name: At_Far-red-induction_P Parameter: Age (day) Value: 7
  misc_feature: MA Experiment 20001451 PARAMETER Experiment Name: At_Far-red-induction_P Parameter: Light Value: Far-red vs. White
  misc_feature: MA Experiment 20001451 PARAMETER Experiment Name: At_Far-red-induction_P Parameter: Organism Value: A. thaliana
  misc_feature: MA Experiment 20001451 PARAMETER Experiment Name: At_Far-red-induction_P Parameter: Plant Line Value: Columbia
  misc_feature: MA Experiment 20001451 PARAMETER Experiment Name: At_Far-red-induction_P Parameter: Timepoint (hr) Value: 24
  misc_feature: MA Experiment 20001451 PARAMETER Experiment Name: At_Far-red-induction_P Parameter: Tissue Value: Whole Plant
aaaactctactgtaactgcaaaatcttgttgttttcttaaacgaagagagaagaaagaaagaaaaaaacgttacggattctctgcttcggtttcgcgattgaagcttgagatttcatcttgaacatccgatatggctgaaatcaaggatgaaggaagcgccaagggctatgctttccctctcaggaaccctaatgttacgctgaatgagagaaactttgcagccttcactcacagatcagctgctgctcatccttggcatgacttggagattggtccagaagctcctactgttttcaactgtgttgttgaaattagcaaaggtggaaaggttaagtacgagctagacaagaacagtggccttattaaggttgatcgcgttctctactcatccattgtgtacccccacaactacggtttcatccctcgaactatctgtgaagacagtgatccaatggatgtcctggtactgatgcaggagcctgtgctaaccggatcattcctccgtgcccgtgctattggtctaatgcccatgattgatcagggtgagaaagacgacaagatcattgcagtatgtgctgatgatcccgagttccgtcactacagagacatcaaagagcttccccctcaccgtctagctgaaatccgtcgcttctttgaggactacaagaagaacgagaacaagaaagtcgacgttgaagctttccttcccgctcaagctgccatagacgctatcaaggactccatggatctttacgcagcttacatcaaagctggcctgcaacgctaatgaagaaaccagtccttttccgttcctcccggtttgcttagacatcactgaagccgccttctatactacatgcatgttagataaaatttcaattggtgcatttaatttcgtaatgctcatcagaaaacattgttgaacttaaagctttctgatgatgatgaaaaatttccagtacaatcataaaatttgaaatattagcttttcttttc

SEQ ID NO: 106372 - protein, 218 aa, Arabidopsis thaliana; identical to SEQ ID NO: 27971
  peptide (1)..(218): Ceres Seq. ID no. 13619399
  misc_feature (1)..(208): Homolog of NCBI NO: 81645 NR Description: inorganic diphosphatase (EC 3.6.1.1) - thaliana >gi|16348|emb|CAA40764.1| inorganic pyrophosphatase
  misc_feature (1)..(218): Homolog of NCBI NO: 15224134 NR Description: inorganic pyrophosphatase -related [Arabidopsis >gi|26454634|sp|P21216|IPYR_ARATH Soluble inorganic
  misc_feature (1)..(218): Homolog of NCBI NO: 21595532 NR Description: putative inorganic pyrophosphatase [Arabidopsis
  misc_feature (23)..(218): Homolog of NCBI NO: 15231849 NR Description: inorganic pyrophosphatase -related protein
  misc_feature (23)..(218): Homolog of NCBI NO: 21593570 NR Description: inorganic pyrophosphatase-like protein
  misc_feature (1)..(218): Homolog of NCBI NO: 38345829 NR Description: OSJNBa0070M12.12 [Oryza sativa (japonica
  misc_feature (24)..(218): Homolog of NCBI NO: 2500047 NR Description: Soluble inorganic pyrophosphatase (Pyrophosphate hydrolase) (PPase) >gi|7436030|pir||T07594 probable inorganic
  misc_feature (5)..(218): Homolog of NCBI NO: 4033424 NR Description: Soluble inorganic pyrophosphatase (Pyrophosphate hydrolase) (PPase) >gi|7436036|pir||T01370 inorganic
  misc_feature (17)..(218): Homolog of NCBI NO: 15223288 NR Description: soluble inorganic pyrophosphatase -related thaliana] >gi|15450699|gb|AAK96621.1| At1g01050/T25K16_5 thaliana] >gi|16323129|gb|AAL15299.1| At1g01050/T25K16_5
  misc_feature (24)..(218): Homolog of NCBI NO: 40642617 NR Description: soluble pyrophosphatase [Beta vulgaris]

SEQ ID NO: 106373 - protein, 111 aa, Arabidopsis thaliana; identical to SEQ ID NO: 27972
  peptide (1)..(111): Ceres Seq. ID no. 13619400
  misc_feature (1)..(101): Homolog of NCBI NO: 81645 NR Description: inorganic diphosphatase (EC 3.6.1.1) - thaliana >gi|16348|emb|CAA40764.1| inorganic pyrophosphatase
  misc_feature (1)..(111): Homolog of NCBI NO: 15224134 NR Description: inorganic pyrophosphatase -related [Arabidopsis >gi|26454634|sp|P21216|IPYR_ARATH Soluble inorganic
  misc_feature (1)..(111): Homolog of NCBI NO: 21595532 NR Description: putative inorganic pyrophosphatase [Arabidopsis
  misc_feature (1)..(111): Homolog of NCBI NO: 15231849 NR Description: inorganic pyrophosphatase -related protein
  misc_feature (1)..(111): Homolog of NCBI NO: 21593570 NR Description: inorganic pyrophosphatase-like protein
  misc_feature (1)..(111): Homolog of NCBI NO: 38345829 NR Description: OSJNBa0070M12.12 [Oryza sativa (japonica
  misc_feature (1)..(111): Homolog of NCBI NO: 2500047 NR Description: Soluble inorganic pyrophosphatase (Pyrophosphate hydrolase) (PPase) >gi|7436030|pir||T07594 probable inorganic
  misc_feature (1)..(111): Homolog of NCBI NO: 4033424 NR Description: Soluble inorganic pyrophosphatase (Pyrophosphate hydrolase) (PPase) >gi|7436036|pir||T01370 inorganic
  misc_feature (1)..(111): Homolog of NCBI NO: 15223288 NR Description: soluble inorganic pyrophosphatase -related thaliana] >gi|15450699|gb|AAK96621.1| At1g01050/T25K16_5 thaliana] >gi|16323129|gb|AAL15299.1| At1g01050/T25K16_5
  misc_feature (1)..(111): Homolog of NCBI NO: 40642617 NR Description: soluble pyrophosphatase [Beta vulgaris]

SEQ ID NO: 106374 - DNA, 1673 bp, Arabidopsis thaliana
  misc_feature (1)..(1673): Ceres Seq. ID no. 13619401
  misc_feature: MA Experiment ID: 20000173 Result: Down-regulated in Transcription
  misc_feature: MA Experiment 20000173 PARAMETER Experiment Name: At_42deg_Heat_P Parameter: Age (day) Value: 14
  misc_feature: MA Experiment 20000173 PARAMETER Experiment Name: At_42deg_Heat_P Parameter: Organism Value: A. thaliana
  misc_feature: MA Experiment 20000173 PARAMETER Experiment Name: At_42deg_Heat_P Parameter: Plant Line Value: WS
  misc_feature: MA Experiment 20000173 PARAMETER Experiment Name: At_42deg_Heat_P Parameter: Temperature (deg C) Value: 42 vs. 22
  misc_feature: MA Experiment 20000173 PARAMETER Experiment Name: At_42deg_Heat_P Parameter: Timepoint (hr) Value: 6
  misc_feature: MA Experiment 20000173 PARAMETER Experiment Name: At_42deg_Heat_P Parameter: Tissue Value: Aerial
  misc_feature: MA Experiment ID: 20000179 Result: Up-regulated in Transcription
  misc_feature: MA Experiment 20000179 PARAMETER Experiment Name: At_Germinating_Seeds_P Parameter: Age (hr) Value: 6 vs. 0
  misc_feature: MA Experiment 20000179 PARAMETER Experiment Name: At_Germinating_Seeds_P Parameter: Tissue Value: Germinating Seeds
  misc_feature: MA Experiment ID: 20000180 Result: Up-regulated in Transcription
  misc_feature: MA Experiment 20000180 PARAMETER Experiment Name: At_Germinating_Seeds_P Parameter: Age (hr) Value: 24 vs. 0
  misc_feature: MA Experiment 20000180 PARAMETER Experiment Name: At_Germinating_Seeds_P Parameter: Tissue Value: Germinating Seeds
  misc_feature: MA Experiment ID: 20000214 Result: Down-regulated in Transcription
  misc_feature: MA Experiment 20000214 PARAMETER Experiment Name: At_4deg_Cold_P Parameter: Timepoint (hr) Value: 6
  misc_feature: MA Experiment ID: 20000227 Result: Down-regulated in Transcription
  misc_feature: MA Experiment 20000227 PARAMETER Experiment Name: At_Root-Tips-vs-Tops_P Parameter: Tissue Value: Root Tips vs. Root Tops
  misc_feature: MA Experiment ID: 20000234 Result: Down-regulated in Transcription
  misc_feature: MA Experiment 20000234 PARAMETER Experiment Name: At_Siliques_P Parameter: Age (day) Value: 21
  misc_feature: MA Experiment 20000234 PARAMETER Experiment Name: At_Siliques_P Parameter: Organism Value: A. thaliana
  misc_feature: MA Experiment 20000234 PARAMETER Experiment Name: At_Siliques_P Parameter: Plant Line Value: WS
  misc_feature: MA Experiment 20000234 PARAMETER Experiment Name: At_Siliques_P Parameter: Tissue Value: Less Than 5mm Siliques vs. Whole Plant
  misc_feature: MA Experiment ID: 20000235 Result: Down-regulated in Transcription
  misc_feature: MA Experiment 20000235 PARAMETER Experiment Name: At_Siliques_P Parameter: Age (day) Value: 21
  misc_feature: MA Experiment 20000235 PARAMETER Experiment Name: At_Siliques_P Parameter: Organism Value: A. thaliana
  misc_feature: MA Experiment 20000235 PARAMETER Experiment Name: At_Siliques_P Parameter: Plant Line Value: WS
  misc_feature: MA Experiment 20000235 PARAMETER Experiment Name: At_Siliques_P Parameter: Tissue Value: 5-10mm Siliques vs. Whole Plant
  misc_feature: MA Experiment ID: 20000265 Result: Down-regulated in Transcription
  misc_feature: MA Experiment 20000265 PARAMETER Experiment Name: At_Open_Flower_P Parameter: Age (day) Value: 21
  misc_feature: MA Experiment 20000265 PARAMETER Experiment Name: At_Open_Flower_P Parameter: Plant Line Value: WS
  misc_feature: MA Experiment 20000265 PARAMETER Experiment Name: At_Open_Flower_P Parameter: Tissue Value: Closed Flower vs. Whole Plant
  misc_feature: MA Experiment ID: 20001248 Result: Up-regulated in Transcription
  misc_feature: MA Experiment 20001248 PARAMETER Experiment Name: At_Far-red-induction_P Parameter: Age (day) Value: 7
  misc_feature: MA Experiment 20001248 PARAMETER Experiment Name: At_Far-red-induction_P Parameter: Light Value: Far-red vs. White
  misc_feature: MA Experiment 20001248 PARAMETER Experiment Name: At_Far-red-induction_P Parameter: Organism Value: A. thaliana
  misc_feature: MA Experiment 20001248 PARAMETER Experiment Name: At_Far-red-induction_P Parameter: Plant Line Value: Columbia
  misc_feature: MA Experiment 20001248 PARAMETER Experiment Name: At_Far-red-induction_P Parameter: Timepoint (hr) Value: 4
  misc_feature: MA Experiment 20001248 PARAMETER Experiment Name: At_Far-red-induction_P Parameter: Tissue Value: Whole Plant
  misc_feature: MA Experiment ID: 20001450 Result: Up-regulated in Transcription
  misc_feature: MA Experiment 20001450 PARAMETER Experiment Name: At_Far-red-induction_P Parameter: Age (day) Value: 7
  misc_feature: MA Experiment 20001450 PARAMETER Experiment Name: At_Far-red-induction_P Parameter: Light Value: Far-red vs. White
  misc_feature: MA Experiment 20001450 PARAMETER Experiment Name: At_Far-red-induction_P Parameter: Organism Value: A. thaliana
  misc_feature: MA Experiment 20001450 PARAMETER Experiment Name: At_Far-red-induction_P Parameter: Plant Line Value: Columbia
  misc_feature: MA Experiment 20001450 PARAMETER Experiment Name: At_Far-red-induction_P Parameter: Timepoint (hr) Value: 8
  misc_feature: MA Experiment 20001450 PARAMETER Experiment Name: At_Far-red-induction_P Parameter: Tissue Value: Whole Plant
  misc_feature: MA Experiment ID: 20001557 Result: Down-regulated in Transcription
  misc_feature: MA Experiment 20001557 PARAMETER Experiment Name: At_Drought_Soil_Dry_P Parameter: Age (day) Value: 27
  misc_feature: MA Experiment 20001557 PARAMETER Experiment Name: At_Drought_Soil_Dry_P Parameter: Organism Value: A. thaliana
  misc_feature: MA Experiment 20001557 PARAMETER Experiment Name: At_Drought_Soil_Dry_P Parameter: Plant Line Value: WS
  misc_feature: MA Experiment 20001557 PARAMETER Experiment Name: At_Drought_Soil_Dry_P Parameter: Post Timepoint (hr) Value: 3
  misc_feature: MA Experiment 20001557 PARAMETER Experiment Name: At_Drought_Soil_Dry_P Parameter: Post-Treatment Value: Re-Water vs. No Drought
  misc_feature: MA Experiment 20001557 PARAMETER Experiment Name: At_Drought_Soil_Dry_P Parameter: Timepoint (day) Value: 13
  misc_feature: MA Experiment 20001557 PARAMETER Experiment Name: At_Drought_Soil_Dry_P Parameter: Treatment Value: Drought vs. No Drought
  misc_feature: MA Experiment ID: 20001558 Result: Down-regulated in Transcription
  misc_feature: MA Experiment 20001558 PARAMETER Experiment Name: At_Drought_Soil_Dry_P Parameter: Age (day) Value: 27
  misc_feature: MA Experiment 20001558 PARAMETER Experiment Name: At_Drought_Soil_Dry_P Parameter: Organism Value: A. thaliana
  misc_feature: MA Experiment 20001558 PARAMETER Experiment Name: At_Drought_Soil_Dry_P Parameter: Plant Line Value: WS
  misc_feature: MA Experiment 20001558 PARAMETER Experiment Name: At_Drought_Soil_Dry_P Parameter: Post Timepoint (hr) Value: 6
  misc_feature: MA Experiment 20001558 PARAMETER Experiment Name: At_Drought_Soil_Dry_P Parameter: Post-Treatment Value: Re-Water vs. No Drought
  misc_feature: MA Experiment 20001558 PARAMETER Experiment Name: At_Drought_Soil_Dry_P Parameter: Timepoint (day) Value: 13
  misc_feature: MA Experiment 20001558 PARAMETER Experiment Name: At_Drought_Soil_Dry_P Parameter: Treatment Value: Drought vs. No Drought
aaatttgtaacaagagagagaggttcaggttcgttttggtggtgaccactcctttattcacctacggtgagatcggcggcggagtctagacgacggcgataacgccggtgaccgacggaatcatgttaagatagtcactggcgaattcgttcttcttccccggagacgacaagcatcgaagaatctgtttagagacagctatgcttgtctctgtttctgcgttttctctttccgatcttgtctctcggatccggtgaagaagctgccgccgatcacatcttccagtttccagagattctaaagcttttgtcttttgatccttcatcgaattcattgagctatcggggagttttgtggtatgctgaaaagagatgtctttgaaaagcatccttcgtgatctgaaggaagtgagggatggacttggaggcatctccaagagaagctggtcaaagtcgtctcacattgctcctgatcaaacaactccaccactggataacataccacagagcccatgggcttctttgccgcctgagttgcttcatgacattatctggagggttgaagagagtgagacagcttggcccgctcgagctgccgttgtctcttgtgcttcagtatgtaaatcatggagaggaatcactatggagattgtgaggatccctgagcagtgtgggaagctcacttttccaatctcattgaaacagccggggcctcgagactctccaattcaatgttttattaagaggaacagagcaacagctacatacattctctattatggtttgatgccttcggagactgagaacgacaaactgttgttagcagcaagaaggattagaagagcgacatgcacagactttataatctccctatctgcaaagaacttctcacggagcagcagtacttatgttggcaaattaaggtctggttttctgggaaccaagttcacaatatatgacaaccaaacagcatcatccacagcacaagcccaacctaaccgaagactccacccgaaacaagcggctcctaaactacctacgaatagctctaccgtaggaaacataacctacgagctcaatgttcttcgcacaaggggacctagaagaatgcactgcgctatggattctatacccctctcttctgttattgctgaaccgtcagtagttcaaggcatagaagaggaagtctcttcctctccttcaccaaaaggagaaaccatcacaacagacaaagagattcctgataattctccaagcttaagggaccaaccgctagttctcaaaaacaaatccccaagatggcatgagcagttgcagtgctggtgcctcaacttcaagggaagagtgactgtggcttcagttaagaatttccagcttgttgcagagattgacgcttctttggatgcgccgcctgaagaacatgagagggtgatcttacagtttggcaaaatcggtaaggatattttcaccatggattatcgctaccctctatctgcttttcaagcctttgctatatgcattagcagctttgacaccaaaccggcatgtgaagggtaaactttaacccaccgagttaaatccatctctgcaaatcatcatagaaggcttttcttatctttaggtttcaatgtatcaatccacgaaaagctctttgtatgtagattgttgtagccc

SEQ ID NO: 106375 - protein, 394 aa, Arabidopsis thaliana
  peptide (1)..(394): Ceres Seq. ID no. 13619402
  misc_feature (112)..(393): Pfam Name: Tub family Pfam Description: Tub family
  misc_feature (1)..(394): Homolog of NCBI NO: 30680328 NR Description: F-box containing tubby family protein
  misc_feature (1)..(394): Homolog of NCBI NO: 30793997 NR Description: putative F-box containing tubby family protein
  misc_feature (1)..(394): Homolog of NCBI NO: 25411852 NR Description: probable Tub family protein [imported] - thaliana >gi|4309738|gb|AAD15508.1| putative Tub family protein
  misc_feature (1)..(393): Homolog of NCBI NO: 7635492 NR Description: tubby-like protein [Cicer arietinum]
  misc_feature (1)..(393): Homolog of NCBI NO: 25409071 NR Description: probable Tub family protein [imported] - thaliana >gi|3738302|gb|AAC63644.1| putative tubby protein thaliana] >gi|20197552|gb|AAM15124.1| putative tubby protein
  misc_feature (1)..(393): Homolog of NCBI NO: 30690823 NR Description: F-box containing tubby family protein thaliana] >gi|18377640|gb|AAL66970.1| putative tubby protein thaliana] >gi|20465543|gb|AAM20254.1| putative tubby protein
  misc_feature (1)..(393): Homolog of NCBI NO: 25405194 NR Description: unknown protein, 3155-1759 [imported] -
  misc_feature (1)..(393): Homolog of NCBI NO: 30694036 NR Description: F-box containing tubby family protein
  misc_feature (1)..(276): Homolog of NCBI NO: 38637048 NR Description: putative chain A, C-terminal domain of mouse
  misc_feature (271)..(337): Homolog of NCBI NO: 38637048 NR Description: putative chain A, C-terminal domain of mouse
MSLKSILRDLKEVRDGLGGISKRSWSKSSHIAPDQTTPPLDNIPQSPWASLPPELLHDIIWRVEESETAWPARAAVVSCASVCKSWRGITMEIVRIPEQCGKLTFPISLKQPGPRDSPIQCFIKRNRATATYILYYGLMPSETENDKLLLAARRIRRATCTDFIISLSAKNFSRSSSTYVGKLRSGFLGTKFTIYDNQTASSTAQAQPNRRLHPKQAAPKLPTNSSTVGNITYELNVLRTRGPRRMHCAMDSIPLSSVIAEPSVVQGIEEEVSSSPSPKGETITTDKEIPDNSPSLRDQPLVLKNKSPRWHEQLQCWCLNFKGRVTVASVKNFQLVAEIDASLDAPPEEHERVILQFGKIGKDIFTMDYRYPLSAFQAFAICISSFDTKPACEG

SEQ ID NO: 106376 - protein, 304 aa, Arabidopsis thaliana
  peptide (1)..(304): Ceres Seq. ID no. 13619403
  misc_feature (22)..(303): Pfam Name: Tub family Pfam Description: Tub family
  misc_feature (1)..(304): Homolog of NCBI NO: 30680328 NR Description: F-box containing tubby family protein
  misc_feature (1)..(304): Homolog of NCBI NO: 30793997 NR Description: putative F-box containing tubby family protein
  misc_feature (1)..(304): Homolog of NCBI NO: 25411852 NR Description: probable Tub family protein [imported] - thaliana >gi|4309738|gb|AAD15508.1| putative Tub family protein
  misc_feature (1)..(303): Homolog of NCBI NO: 7635492 NR Description: tubby-like protein [Cicer arietinum]
  misc_feature (1)..(303): Homolog of NCBI NO: 25409071 NR Description: probable Tub family protein [imported] - thaliana >gi|3738302|gb|AAC63644.1| putative tubby protein thaliana] >gi|20197552|gb|AAM15124.1| putative tubby protein
  misc_feature (1)..(303): Homolog of NCBI NO: 30690823 NR Description: F-box containing tubby family protein thaliana] >gi|18377640|gb|AAL66970.1| putative tubby protein thaliana] >gi|20465543|gb|AAM20254.1| putative tubby protein
  misc_feature (1)..(303): Homolog of NCBI NO: 25405194 NR Description: unknown protein, 3155-1759 [imported] -
  misc_feature (1)..(303): Homolog of NCBI NO: 30694036 NR Description: F-box containing tubby family protein
  misc_feature (1)..(186): Homolog of NCBI NO: 38637048 NR Description: putative chain A, C-terminal domain of mouse
  misc_feature (181)..(247): Homolog of NCBI NO: 38637048 NR Description: putative chain A, C-terminal domain of mouse
MEIVRIPEQCGKLTFPISLKQPGPRDSPIQCFIKRNRATATYILYYGLMPSETENDKLLLAARRIRRATCTDFIISLSAKNFSRSSSTYVGKLRSGFLGTKFTIYDNQTASSTAQAQPNRRLHPKQAAPKLPTNSSTVGNITYELNVLRTRGPRRMHCAMDSIPLSSVIAEPSVVQGIEEEVSSSPSPKGETITTDKEIPDNSPSLRDQPLVLKNKSPRWHEQLQCWCLNFKGRVTVASVKNFQLVAEIDASLDAPPEEHERVILQFGKIGKDIFTMDYRYPLSAFQAFAICISSFDTKPACEG

SEQ ID NO: 106377 - protein, 256 aa, Arabidopsis thaliana
  peptide (1)..(256): Ceres Seq. ID no. 13619404
  misc_feature (1)..(255): Pfam Name: Tub family Pfam Description: Tub family
  misc_feature (1)..(256): Homolog of NCBI NO: 30680328 NR Description: F-box containing tubby family protein
  misc_feature (1)..(256): Homolog of NCBI NO: 30793997 NR Description: putative F-box containing tubby family protein
  misc_feature (1)..(256): Homolog of NCBI NO: 25411852 NR Description: probable Tub family protein [imported] - thaliana >gi|4309738|gb|AAD15508.1| putative Tub family protein
  misc_feature (1)..(255): Homolog of NCBI NO: 7635492 NR Description: tubby-like protein [Cicer arietinum]
  misc_feature (1)..(255): Homolog of NCBI NO: 25409071 NR Description: probable Tub family protein [imported] - thaliana >gi|3738302|gb|AAC63644.1| putative tubby protein thaliana] >gi|20197552|gb|AAM15124.1| putative tubby protein
  misc_feature (1)..(255): Homolog of NCBI NO: 30690823 NR Description: F-box containing tubby family protein thaliana] >gi|18377640|gb|AAL66970.1| putative tubby protein thaliana] >gi|20465543|gb|AAM20254.1| putative tubby protein
  misc_feature (1)..(255): Homolog of NCBI NO: 25405194 NR Description: unknown protein, 3155-1759 [imported] -
  misc_feature (1)..(255): Homolog of NCBI NO: 30694036 NR Description: F-box containing tubby family protein
  misc_feature (1)..(138): Homolog of NCBI NO: 38637048 NR Description: putative chain A, C-terminal domain of mouse
  misc_feature (133)..(199): Homolog of NCBI NO: 38637048 NR Description: putative chain A, C-terminal domain of mouse
MPSETENDKLLLAARRIRRATCTDFIISLSAKNFSRSSSTYVGKLRSGFLGTKFTIYDNQTASSTAQAQPNRRLHPKQAAPKLPTNSSTVGNITYELNVLRTRGPRRMHCAMDSIPLSSVIAEPSVVQGIEEEVSSSPSPKGETITTDKEIPDNSPSLRDQPLVLKNKSPRWHEQLQCWCLNFKGRVTVASVKNFQLVAEIDASLDAPPEEHERVILQFGKIGKDIFTMDYRYPLSAFQAFAICISSFDTKPACEG

SEQ ID NO: 106378 - DNA, 2020 bp, Arabidopsis thaliana
  misc_feature (1)..(2020): Ceres Seq. ID no. 13619405
  misc_feature: MA Experiment ID: 20000180 Result: Up-regulated in Transcription
  misc_feature: MA Experiment 20000180 PARAMETER Experiment Name: At_Germinating_Seeds_P Parameter: Age (hr) Value: 24 vs. 0
  misc_feature: MA Experiment 20000180 PARAMETER Experiment Name: At_Germinating_Seeds_P Parameter: Tissue Value: Germinating Seeds
  misc_feature: MA Experiment ID: 20000185 Result: Up-regulated in Transcription
  misc_feature: MA Experiment 20000185 PARAMETER Experiment Name: At_Roots__P Parameter: Age (day) Value: 7 vs. 21
  misc_feature: MA Experiment 20000185 PARAMETER Experiment Name: At_Roots__P Parameter: Organism Value: A. thaliana
  misc_feature: MA Experiment 20000185 PARAMETER Experiment Name: At_Roots__P Parameter: Tissue Value: Roots vs. Whole Plant
  misc_feature: MA Experiment ID: 20000227 Result: Up-regulated in Transcription
  misc_feature: MA Experiment 20000227 PARAMETER Experiment Name: At_Root-Tips-vs-Tops_P Parameter: Tissue Value: Root Tips vs. Root Tops
  misc_feature: MA Experiment ID: 20000439 Result: Up-regulated in Transcription
  misc_feature: MA Experiment 20000439 PARAMETER Experiment Name: At_Roots__P Parameter: Age (day) Value: 14 vs. 21
  misc_feature: MA Experiment 20000439 PARAMETER Experiment Name: At_Roots__P Parameter: Organism Value: A. thaliana
  misc_feature: MA Experiment 20000439 PARAMETER Experiment Name: At_Roots__P Parameter: Tissue Value: Roots vs. Whole Plant
  misc_feature: MA Experiment ID: 20000794 Result: Up-regulated in Transcription
  misc_feature: MA Experiment 20000794 PARAMETER Experiment Name: At_Petals_P Parameter: Age (day) Value: 23-25 days
  misc_feature: MA Experiment 20000794 PARAMETER Experiment Name: At_Petals_P Parameter: Plant Line Value: WS
  misc_feature: MA Experiment 20000794 PARAMETER Experiment Name: At_Petals_P Parameter: Tissue Value: Petals vs. Whole plant
gagatgtggcggtgccttcgagttgcgtcgtcgtcgaggagatcggaatctaatggcgctttcatcacttctcaactctccagattcttctcagctcctccttcggcaggggataaatcatcgtatacgatcgtagatcatacatatgatgcggttgttgtaggagctggtggtgctgggctaagagcagcaataggattatcagagcatggttttaacacggcttgtatcactaagctttttccaactcgttcccatactgttgcagctcagggaggtataaatgctgcgttgggtaatatgagtgtagatgactggagatggcatatgtatgatactgtcaaaggaagtgattggttaggtgatcaagatgcaattcagtatatgtgcagggaagcaccaaaagctgtgatagagcttgagaattacggattgccattttctagaacagaagatggaaaaatatatcaacgagctttcggtggccagagtctcgagtttggaataggtggtcaagcatatcgttgcgcatgtgctgctgaccgcactgggcatgctctgttacatactctgtatggccaagcaatgaaacacaacactcaattctttgttgaatactttgccttggatttgataatgaacagtgatggaacctgtcaaggagtcattgcactgaacatggaagatggaactttacatcgtttccatgcgggttccacgatattggctaccgggggctatggaagagcttatttctctgcaacttcagcacatacatgcacaggagatggaaatgctatggttgcacgagccgggctaccgcttcaagatttggagtttgttcagtttcatcctactggtatatatggagctggatgtctcatcactgaaggagctagaggtgaaggaggaattctcagaaacagtgaaggtgagaaattcatggatcgatatgctcccacggctagagatctggcttcaagagatgttgtttcaagatcaatgactatggaaatccgacaaggacgtggtgcaggaccaatgaaggattatctatacctttacttaaaccatctaccaccagaagtgcttaaagagaggctacccggtatatctgagaccgcagctatattcgctggtgtcgatgttacaagagagccaattcctgtattgcctactgtgcattataatatgggtggtattcccacaaactaccatggagaggtgattactcttagaggtgatgatccagatgctgtagttcctggactaatggctgcaggagaagcagcttgcgcatcggttcatggcgctaatagacttggtgcaaattcacttcttgacattgttgtttttggaagagcttgtgcaaacagagttgcagagattcaaaaacctggtgagaaactgaaacctctagagaaggatgcgggtgagaagagtatcgaatggttggaccgaataagaaactcaaacgggtcacttccaacttctaaaatccgcttaaacatgcaaagagtaatgcaaaacaatgctgctgttttccgtacacaagaaacactagaggaaggttgtgatttgattgataagacgtgggacagttttggtgatgtcaaagtgactgatcggagtatgatatggaactcggatttgatagaaactatggagctagagaatcttttggttaatgcatgcataacaatgcattctgctgaggctaggaaggagagtcgaggagcacatgctcgtgaggatttcacgaaacgggacgatgcaaattggatgaagcacacattggggtattgggaagaagggaatgtgaaattggagtatagaccagtccacatgaagaccttggatgatgaggttgacacttttcctcctaaacctcgtgtttattgacatttcttcaactttttagttcaagaaggccacaatgttacccagcccaataaacatctgtatcccacaaagcccaagaagcaacctgcaaaacaattacgcaggaaaattatgtggc

SEQ ID NO: 106379 - protein, 633 aa, Arabidopsis thaliana
  peptide (1)..(633): Ceres Seq. ID no. 13619406
  misc_feature (149)..(481): Pfam Name: FAD binding domain Pfam Description: FAD binding domain
  misc_feature (2)..(633): Homolog of NCBI NO: 15240075 NR Description: succinate dehydrogenase [ubiquinone], putative thaliana] >gi|20454872|sp|O82663|DHSA_ARATH Succinate [ubiquinone] flavoprotein subunit, mitochondrial (FP)
  misc_feature (2)..(633): Homolog of NCBI NO: 34394418 NR Description: putative succinate dehydrogenase flavoprotein
  misc_feature (40)..(633): Homolog of NCBI NO: 32417808 NR Description: hypothetical protein [Neurospora crassa]
  misc_feature (2)..(633): Homolog of NCBI NO: 19115231 NR Description: probable succinate dehydrogenase flavoprotein precursor(ec 1.3.5.1) [Schizosaccharomyces pombe] Probable succinate dehydrogenase [ubiquinone] flavoprotein
  misc_feature (42)..(591): Homolog of NCBI NO: 31205139 NR Description: ENSANGP00000010243 [Anopheles gambiae]
  misc_feature (591)..(633): Homolog of NCBI NO: 31205139 NR Description: ENSANGP00000010243 [Anopheles gambiae]
  misc_feature (35)..(633): Homolog of NCBI NO: 23011974 NR Description: hypothetical protein [Magnetospirillum
  misc_feature (26)..(633): Homolog of NCBI NO: 6644394 NR Description: SdhA [Dictyostelium discoideum]
  misc_feature (34)..(633): Homolog of NCBI NO: 22962215 NR Description: hypothetical protein [Rhodopseudomonas palustris]
  misc_feature (40)..(633): Homolog of NCBI NO: 6322416 NR Description: Similar to SDH1; Yjl045wp [Saccharomyces >gi|1352266|sp|P47052|DHSX_YEAST Probable succinate dehydrogenase flavoprotein subunit 2, mitochondrial precursor (FP) probable
EMWRCLRVASSSRRSESNGAFITSQLSRFFSAPPSAGDKSSYTIVDHTYDAVVVGAGGAGLRAAIGLSEHGFNTACITKLFPTRSHTVAAQGGINAALGNMSVDDWRWHMYDTVKGSDWLGDQDAIQYMCREAPKAVIELENYGLPFSRTEDGKIYQRAFGGQSLEFGIGGQAYRCACAADRTGHALLHTLYGQAMKHNTQFFVEYFALDLIMNSDGTCQGVIALNMEDGTLHRFHAGSTILATGGYGRAYFSATSAHTCTGDGNAMVARAGLPLQDLEFVQFHPTGIYGAGCLITEGARGEGGILRNSEGEKFMDRYAPTARDLASRDVVSRSMTMEIRQGRGAGPMKDYLYLYLNHLPPEVLKERLPGISETAAIFAGVDVTREPIPVLPTVHYNMGGIPTNYHGEVITLRGDDPDAVVPGLMAAGEAACASVHGANRLGANSLLDIVVFGRACANRVAEIQKPGEKLKPLEKDAGEKSIEWLDRIRNSNGSLPTSKIRLNMQRVMQNNAAVFRTQETLEEGCDLIDKTWDSFGDVKVTDRSMIWNSDLIETMELENLLVNACITMHSAEARKESRGAHAREDFTKRDDANWMKHTLGYWEEGNVKLEYRPVHMKTLDDEVDTFPPKPRVY

SEQ ID NO: 106380 - protein, 632 aa, Arabidopsis thaliana
  peptide (1)..(632): Ceres Seq. ID no. 13619407
  misc_feature (148)..(480): Pfam Name: FAD binding domain Pfam Description: FAD binding domain
  misc_feature (1)..(632): Homolog of NCBI NO: 15240075 NR Description: succinate dehydrogenase [ubiquinone], putative thaliana] >gi|20454872|sp|O82663|DHSA_ARATH Succinate [ubiquinone] flavoprotein subunit, mitochondrial (FP)
  misc_feature (1)..(632): Homolog of NCBI NO: 34394418 NR Description: putative succinate dehydrogenase flavoprotein
  misc_feature (39)..(632): Homolog of NCBI NO: 32417808 NR Description: hypothetical protein [Neurospora crassa]
  misc_feature (1)..(632): Homolog of NCBI NO: 19115231 NR Description: probable succinate dehydrogenase flavoprotein precursor(ec 1.3.5.1) [Schizosaccharomyces pombe] Probable succinate dehydrogenase [ubiquinone] flavoprotein
  misc_feature (41)..(590): Homolog of NCBI NO: 31205139 NR Description: ENSANGP00000010243 [Anopheles gambiae]
  misc_feature (590)..(632): Homolog of NCBI NO: 31205139 NR Description: ENSANGP00000010243 [Anopheles gambiae]
  misc_feature (34)..(632): Homolog of NCBI NO: 23011974 NR Description: hypothetical protein [Magnetospirillum
  misc_feature (25)..(632): Homolog of NCBI NO: 6644394 NR Description: SdhA [Dictyostelium discoideum]
  misc_feature (33)..(632): Homolog of NCBI NO: 22962215 NR Description: hypothetical protein [Rhodopseudomonas palustris]
  misc_feature (39)..(632): Homolog of NCBI NO: 6322416 NR Description: Similar to SDH1; Yjl045wp [Saccharomyces >gi|1352266|sp|P47052|DHSX_YEAST Probable succinate dehydrogenase flavoprotein subunit 2, mitochondrial precursor (FP) probable
MWRCLRVASSSRRSESNGAFITSQLSRFFSAPPSAGDKSSYTIVDHTYDAVVVGAGGAGLRAAIGLSEHGFNTACITKLFPTRSHTVAAQGGINAALGNMSVDDWRWHMYDTVKGSDWLGDQDAIQYMCREAPKAVIELENYGLPFSRTEDGKIYQRAFGGQSLEFGIGGQAYRCACAADRTGHALLHTLYGQAMKHNTQFFVEYFALDLIMNSDGTCQGVIALNMEDGTLHRFHAGSTILATGGYGRAYFSATSAHTCTGDGNAMVARAGLPLQDLEFVQFHPTGIYGAGCLITEGARGEGGILRNSEGEKFMDRYAPTARDLASRDVVSRSMTMEIRQGRGAGPMKDYLYLYLNHLPPEVLKERLPGISETAAIFAGVDVTREPIPVLPTVHYNMGGIPTNYHGEVITLRGDDPDAVVPGLMAAGEAACASVHGANRLGANSLLDIVVFGRACANRVAEIQKPGEKLKPLEKDAGEKSIEWLDRIRNSNGSLPTSKIRLNMQRVMQNNAAVFRTQETLEEGCDLIDKTWDSFGDVKVTDRSMIWNSDLIETMELENLLVNACITMHSAEARKESRGAHAREDFTKRDDANWMKHTLGYWEEGNVKLEYRPVHMKTLDDEVDTFPPKPRVY

SEQ ID NO: 106381 - protein, 533 aa, Arabidopsis thaliana
  peptide (1)..(533): Ceres Seq. ID no. 13619408
  misc_feature (49)..(381): Pfam Name: FAD binding domain Pfam Description: FAD binding domain
  misc_feature (1)..(533): Homolog of NCBI NO: 15240075 NR Description: succinate dehydrogenase [ubiquinone], putative thaliana] >gi|20454872|sp|O82663|DHSA_ARATH Succinate [ubiquinone] flavoprotein subunit, mitochondrial (FP)
  misc_feature (1)..(533): Homolog of NCBI NO: 34394418 NR Description: putative succinate dehydrogenase flavoprotein
  misc_feature (1)..(533): Homolog of NCBI NO: 32417808 NR Description: hypothetical protein [Neurospora crassa]
  misc_feature (1)..(533): Homolog of NCBI NO: 19115231 NR Description: probable succinate dehydrogenase flavoprotein precursor(ec 1.3.5.1) [Schizosaccharomyces pombe] Probable succinate dehydrogenase [ubiquinone] flavoprotein
  misc_feature (1)..(491): Homolog of NCBI NO: 31205139 NR Description: ENSANGP00000010243 [Anopheles gambiae]
  misc_feature (491)..(533): Homolog of NCBI NO: 31205139 NR Description: ENSANGP00000010243 [Anopheles gambiae]
  misc_feature (1)..(533): Homolog of NCBI NO: 23011974 NR Description: hypothetical protein [Magnetospirillum
  misc_feature (1)..(533): Homolog of NCBI NO: 6644394 NR Description: SdhA [Dictyostelium discoideum]
  misc_feature (1)..(533): Homolog of NCBI NO: 22962215 NR Description: hypothetical protein [Rhodopseudomonas palustris]
  misc_feature (1)..(533): Homolog of NCBI NO: 6322416 NR Description: Similar to SDH1; Yjl045wp [Saccharomyces >gi|1352266|sp|P47052|DHSX_YEAST Probable succinate dehydrogenase flavoprotein subunit 2, mitochondrial precursor (FP) probable
MSVDDWRWHMYDTVKGSDWLGDQDAIQYMCREAPKAVIELENYGLPFSRTEDGKIYQRAFGGQSLEFGIGGQAYRCACAADRTGHALLHTLYGQAMKHNTQFFVEYFALDLIMNSDGTCQGVIALNMEDGTLHRFHAGSTILATGGYGRAYFSATSAHTCTGDGNAMVARAGLPLQDLEFVQFHPTGIYGAGCLITEGARGEGGILRNSEGEKFMDRYAPTARDLASRDVVSRSMTMEIRQGRGAGPMKDYLYLYLNHLPPEVLKERLPGISETAAIFAGVDVTREPIPVLPTVHYNMGGIPTNYHGEVITLRGDDPDAVVPGLMAAGEAACASVHGANRLGANSLLDIVVFGRACANRVAEIQKPGEKLKPLEKDAGEKSIEWLDRIRNSNGSLPTSKIRLNMQRVMQNNAAVFRTQETLEEGCDLIDKTWDSFGDVKVTDRSMIWNSDLIETMELENLLVNACITMHSAEARKESRGAHAREDFTKRDDANWMKHTLGYWEEGNVKLEYRPVHMKTLDDEVDTFPPKPRVY

SEQ ID NO: 106382 - DNA, 1769 bp, Arabidopsis thaliana
  misc_feature (1)..(1769): Ceres Seq. ID no. 13619413
  misc_feature: MA Experiment ID: 20000180 Result: Down-regulated in Transcription
  misc_feature: MA Experiment 20000180 PARAMETER Experiment Name: At_Germinating_Seeds_P Parameter: Age (hr) Value: 24 vs. 0
  misc_feature: MA Experiment 20000180 PARAMETER Experiment Name: At_Germinating_Seeds_P Parameter: Tissue Value: Germinating Seeds
  misc_feature: MA Experiment ID: 20000184 Result: Up-regulated in Transcription
  misc_feature: MA Experiment 20000184 PARAMETER Experiment Name: At_Shoots__P Parameter: Age (day) Value: 7
  misc_feature: MA Experiment 20000184 PARAMETER Experiment Name: At_Shoots__P Parameter: Tissue Value: Shoots vs. Whole Plant
  misc_feature: MA Experiment ID: 20000439 Result: Down-regulated in Transcription
  misc_feature: MA Experiment 20000439 PARAMETER Experiment Name: At_Roots__P Parameter: Age (day) Value: 14 vs. 21
  misc_feature: MA Experiment 20000439 PARAMETER Experiment Name: At_Roots__P Parameter: Organism Value: A. thaliana
  misc_feature: MA Experiment 20000439 PARAMETER Experiment Name: At_Roots__P Parameter: Tissue Value: Roots vs. Whole Plant
  misc_feature: MA Experiment ID: 20000452 Result: Up-regulated in Transcription
  misc_feature: MA Experiment 20000452 PARAMETER Experiment Name: At_CS6879_Shoots-Roots_P Parameter: Age (day) Value: 14
  misc_feature: MA Experiment 20000452 PARAMETER Experiment Name: At_CS6879_Shoots-Roots_P Parameter: Organism Value: A. thaliana
  misc_feature: MA Experiment 20000452 PARAMETER Experiment Name: At_CS6879_Shoots-Roots_P Parameter: Plant Line Value: CS6879 vs. WS
  misc_feature: MA Experiment 20000452 PARAMETER Experiment Name: At_CS6879_Shoots-Roots_P Parameter: Tissue Value: Shoots
  misc_feature: MA Experiment ID: 20001248 Result: Down-regulated in Transcription
  misc_feature: MA Experiment 20001248 PARAMETER Experiment Name: At_Far-red-induction_P Parameter: Age (day) Value: 7
  misc_feature: MA Experiment 20001248 PARAMETER Experiment Name: At_Far-red-induction_P Parameter: Light Value: Far-red vs. White
  misc_feature: MA Experiment 20001248 PARAMETER Experiment Name: At_Far-red-induction_P Parameter: Organism Value: A. thaliana
  misc_feature: MA Experiment 20001248 PARAMETER Experiment Name: At_Far-red-induction_P Parameter: Plant Line Value: Columbia
  misc_feature: MA Experiment 20001248 PARAMETER Experiment Name: At_Far-red-induction_P Parameter: Timepoint (hr) Value: 4
  misc_feature: MA Experiment 20001248 PARAMETER Experiment Name: At_Far-red-induction_P Parameter: Tissue Value: Whole Plant
  misc_feature: MA Experiment ID: 20001904 Result: Down-regulated in Transcription
  misc_feature: MA Experiment 20001904 PARAMETER Experiment Name: At_Drought_Reproduction_P Parameter: Age (day) Value: 37
  misc_feature: MA Experiment 20001904 PARAMETER Experiment Name: At_Drought_Reproduction_P Parameter: Organism Value: A. thaliana
  misc_feature: MA Experiment 20001904 PARAMETER Experiment Name: At_Drought_Reproduction_P Parameter: Plant Line Value: WS
  misc_feature: MA Experiment 20001904 PARAMETER Experiment Name: At_Drought_Reproduction_P Parameter: Timepoint (day) Value: 7
  misc_feature: MA Experiment 20001904 PARAMETER Experiment Name: At_Drought_Reproduction_P Parameter: Tissue Value: Rosettes
  misc_feature: MA Experiment 20001904 PARAMETER Experiment Name: At_Drought_Reproduction_P Parameter: Treatment Value: Drought vs. No Drought
  misc_feature: MA Experiment ID: 20001911 Result: Up-regulated in Transcription
  misc_feature: MA Experiment 20001911 PARAMETER Experiment Name: At_Drought_Reproduction_P Parameter: Age (day) Value: 40
  misc_feature: MA Experiment 20001911 PARAMETER Experiment Name: At_Drought_Reproduction_P Parameter: Organism Value: A. thaliana
  misc_feature: MA Experiment 20001911 PARAMETER Experiment Name: At_Drought_Reproduction_P Parameter: Plant Line Value: WS
  misc_feature: MA Experiment 20001911 PARAMETER Experiment Name: At_Drought_Reproduction_P Parameter: Timepoint (day) Value: 10
  misc_feature: MA Experiment 20001911 PARAMETER Experiment Name: At_Drought_Reproduction_P Parameter: Tissue Value: Flowers
  misc_feature: MA Experiment 20001911 PARAMETER Experiment Name: At_Drought_Reproduction_P Parameter: Treatment Value: Drought vs. No Drought
gctacaccacacgtctagaaatgtacgaatagagagtgaagtgaacgacacataataaaaccaaagaatggagatatggttactcatattggcctctctctccggatctctccttctccatctcctcctccgccgccgtaactcctcctcccctccgttacctcctgaccctaacttcttacctttcctcggaaccctccagtggctccgggaaggcttaggtggcctcgaatcctatctccgctctgtccaccaccgtctaggccccatcgtcaccctccgcatcacttcccgccccgccatattcgttgccgatcgttccctaactcacgaggctctcgtcctgaacggcgccgtctatgcggaccgtccaccacctgctgtaattagcaagatagttgacgaacacaacatcagctccgggtcatacggagccacgtggcggcttctccgtcgaaacatcacctctgagattcttcacccctcgcgcgtgagatcttactcccacgctcgtcactgggttcttgagatcctctttgaacggttccgtaaccatggaggcgaagaaccgatcgtcctcatccaccatctccactatgcaatgtttgcgcttcttgtccttatgtgttttggagataagcttgatgagaagcaaatcaaagaagtggagttcattcaaagactacagctccttagcttgaccaaatttaacatcttcaacatctggcctaagttcaccaaactgattctgcgtaagagatggcaagaatttctccagatacggagacagcagcgggatgttttgcttcccctgattcgtgcccggaggaagatcgttgaagagagaaagagatcggagcaagaagacaagaaagactatgtgcaatcatatgttgatactctactcgatctagagcttccagaggaaaataggaagttgaacgaggaagatattatgaacttgtgctcggagtttctcacggccgggactgacacgacggccacggcgctgcaatggatcatggccaacctagtgaaatatccagaaatccaggagagattacacgaggagatcaagagcgtggttggggaagaagcaaaggaggtggaggaagaagatgtggagaagatgccgtatctaaaggcagtggtgttagagggactccggagacaccctccaggacactttttactcccacacagtgtcacggaggacactgtgttaggaggatacaaagtaccgaagaacgggacgatcaacttcatggtggcggagatagggagggatccagtggagtgggaagaaccaatggcgtttaagccagagaggtttatgggagaagaagaagcggtggacctcaccggaagtagagggataaagatgatgccgttcggagcaggaagaaggatatgtccgggcataggtctagcaatgttgcatctggagtactacgtcgccaacatggtcagagagttccaatggaaagaggtccaaggtcatgaagtggacttgacggagaagctcgaattcactgtcgtcatgaagcatccgcttaaggctcttgctgttcctaggagatgtcactagtctgcttcttcctcttttcttgggtttaatattcaaaatgagtgaacttagtttggtggaattctcaataaactatgggataagtcataaaaaagagttattatgctgaccgtttgtactttatattcaagtgtatgttggacaccttaaaataaaacagatatttatatagttcagattt

SEQ ID NO: 106383 - protein, 506 aa, Arabidopsis thaliana
  peptide (1)..(506): Ceres Seq. ID no. 13619414
  misc_feature (32)..(502): Pfam Name: Cytochrome P450 Pfam Description: Cytochrome P450
  misc_feature (1)..(506): Homolog of NCBI NO: 15217771 NR Description: cytochrome P450, putative [Arabidopsis thaliana]
  misc_feature (1)..(506): Homolog of NCBI NO: 1432145 NR Description: cytochrome P450 [Arabidopsis thaliana]
  misc_feature (1)..(506): Homolog of NCBI NO: 15224379 NR Description: cytochrome P450, putative [Arabidopsis thaliana]
  misc_feature (1)..(506): Homolog of NCBI NO: 15217801 NR Description: cytochrome P450, putative [Arabidopsis thaliana]
  misc_feature (1)..(506): Homolog of NCBI NO: 15450601 NR Description: At1g64950/F13O11_25 [Arabidopsis thaliana]
  misc_feature (1)..(506): Homolog of NCBI NO: 15217800 NR Description: cytochrome P450, putative [Arabidopsis thaliana]
  misc_feature (1)..(506): Homolog of NCBI NO: 15217798 NR Description: cytochrome P450, putative [Arabidopsis thaliana]
  misc_feature (1)..(296): Homolog of NCBI NO: 9757853 NR Description: cytochrome P450-like protein [Arabidopsis
  misc_feature (327)..(504): Homolog of NCBI NO: 9757853 NR Description: cytochrome P450-like protein [Arabidopsis
  misc_feature (3)..(504): Homolog of NCBI NO: 15228566 NR Description: cytochrome P450, putative [Arabidopsis thaliana]
MEIWLLILASLSGSLLLHLLLRRRNSSSPPLPPDPNFLPFLGTLQWLREGLGGLESYLRSVHHRLGPIVTLRITSRPAIFVADRSLTHEALVLNGAVYADRPPPAVISKIVDEHNISSGSYGATWRLLRRNITSEILHPSRVRSYSHARHWVLEILFERFRNHGGEEPIVLIHHLHYAMFALLVLMCFGDKLDEKQIKEVEFIQRLQLLSLTKFNIFNIWPKFTKLILRKRWQEFLQIRRQQRDVLLPLIRARRKIVEERKRSEQEDKKDYVQSYVDTLLDLELPEENRKLNEEDIMNLCSEFLTAGTDTTATALQWIMANLVKYPEIQERLHEEIKSVVGEEAKEVEEEDVEKMPYLKAVVLEGLRRHPPGHFLLPHSVTEDTVLGGYKVPKNGTINFMVAEIGRDPVEWEEPMAFKPERFMGEEEAVDLTGSRGIKMMPFGAGRRICPGIGLAMLHLEYYVANMVREFQWKEVQGHEVDLTEKLEFTVVMKHPLKALAVPRRCH

SEQ ID NO: 106384 - protein, 328 aa, Arabidopsis thaliana
  peptide (1)..(328): Ceres Seq. ID no. 13619415
  misc_feature (1)..(324): Pfam Name: Cytochrome P450 Pfam Description: Cytochrome P450
  misc_feature (1)..(328): Homolog of NCBI NO: 15217771 NR Description: cytochrome P450, putative [Arabidopsis thaliana]
  misc_feature (1)..(328): Homolog of NCBI NO: 1432145 NR Description: cytochrome P450 [Arabidopsis thaliana]
  misc_feature (1)..(328): Homolog of NCBI NO: 15224379 NR Description: cytochrome P450, putative [Arabidopsis thaliana]
  misc_feature (1)..(328): Homolog of NCBI NO: 15217801 NR Description: cytochrome P450, putative [Arabidopsis thaliana]
  misc_feature (1)..(328): Homolog of NCBI NO: 15450601 NR Description: At1g64950/F13O11_25 [Arabidopsis thaliana]
  misc_feature (1)..(328): Homolog of NCBI NO: 15217800 NR Description: cytochrome P450, putative [Arabidopsis thaliana]
  misc_feature (1)..(328): Homolog of NCBI NO: 15217798 NR Description: cytochrome P450, putative [Arabidopsis thaliana]
  misc_feature (1)..(118): Homolog of NCBI NO: 9757853 NR Description: cytochrome P450-like protein [Arabidopsis
  misc_feature (149)..(326): Homolog of NCBI NO: 9757853 NR Description: cytochrome P450-like protein [Arabidopsis
  misc_feature (1)..(326): Homolog of NCBI NO: 15228566 NR Description: cytochrome P450, putative [Arabidopsis thaliana]
MFALLVLMCFGDKLDEKQIKEVEFIQRLQLLSLTKFNIFNIWPKFTKLILRKRWQEFLQIRRQQRDVLLPLIRARRKIVEERKRSEQEDKKDYVQSYVDTLLDLELPEENRKLNEEDIMNLCSEFLTAGTDTTATALQWIMANLVKYPEIQERLHEEIKSVVGEEAKEVEEEDVEKMPYLKAVVLEGLRRHPPGHFLLPHSVTEDTVLGGYKVPKNGTINFMVAEIGRDPVEWEEPMAFKPERFMGEEEAVDLTGSRGIKMMPFGAGRRICPGIGLAMLHLEYYVANMVREFQWKEVQGHEVDLTEKLEFTVVMKHPLKALAVPRRCH

SEQ ID NO: 106385 - protein, 321 aa, Arabidopsis thaliana
  peptide (1)..(321): Ceres Seq. ID no. 13619416
  misc_feature (1)..(317): Pfam Name: Cytochrome P450 Pfam Description: Cytochrome P450
  misc_feature (1)..(321): Homolog of NCBI NO: 15217771 NR Description: cytochrome P450, putative [Arabidopsis thaliana]
  misc_feature (1)..(321): Homolog of NCBI NO: 1432145 NR Description: cytochrome P450 [Arabidopsis thaliana]
  misc_feature (1)..(321): Homolog of NCBI NO: 15224379 NR Description: cytochrome P450, putative [Arabidopsis thaliana]
  misc_feature (1)..(321): Homolog of NCBI NO: 15217801 NR Description: cytochrome P450, putative [Arabidopsis thaliana]
  misc_feature (1)..(321): Homolog of NCBI NO: 15450601 NR Description: At1g64950/F13O11_25 [Arabidopsis thaliana]
  misc_feature (1)..(321): Homolog of NCBI NO: 15217800 NR Description: cytochrome P450, putative [Arabidopsis thaliana]
  misc_feature (1)..(321): Homolog of NCBI NO: 15217798 NR Description: cytochrome P450, putative [Arabidopsis thaliana]
  misc_feature (1)..(111): Homolog of NCBI NO: 9757853 NR Description: cytochrome P450-like protein [Arabidopsis
  misc_feature (142)..(319): Homolog of NCBI NO: 9757853 NR Description: cytochrome P450-like protein [Arabidopsis
  misc_feature (1)..(319): Homolog of NCBI NO: 15228566 NR Description: cytochrome P450, putative [Arabidopsis thaliana]
MCFGDKLDEKQIKEVEFIQRLQLLSLTKFNIFNIWPKFTKLILRKRWQEFLQIRRQQRDVLLPLIRARRKIVEERKRSEQEDKKDYVQSYVDTLLDLELPEENRKLNEEDIMNLCSEFLTAGTDTTATALQWIMANLVKYPEIQERLHEEIKSVVGEEAKEVEEEDVEKMPYLKAVVLEGLRRHPPGHFLLPHSVTEDTVLGGYKVPKNGTINFMVAEIGRDPVEWEEPMAFKPERFMGEEEAVDLTGSRGIKMMPFGAGRRICPGIGLAMLHLEYYVANMVREFQWKEVQGHEVDLTEKLEFTVVMKHPLKALAVPRRCH

SEQ ID NO: 106386 - DNA, 1896 bp, Arabidopsis thaliana
  misc_feature (1)..(1896): Ceres Seq. ID no. 13619417
  misc_feature: MA Experiment ID: 20000227 Result: Up-regulated in Transcription
  misc_feature: MA Experiment 20000227 PARAMETER Experiment Name: At_Root-Tips-vs-Tops_P Parameter: Tissue Value: Root Tips vs. Root Tops
  misc_feature: MA Experiment ID: 20000709 Result: Up-regulated in Transcription
  misc_feature: MA Experiment 20000709 PARAMETER Experiment Name: At_15mM_NH4NO3_L-to-H_P Parameter: Age (hr) Value: 14
  misc_feature: MA Experiment 20000709 PARAMETER Experiment Name: At_15mM_NH4NO3_L-to-H_P Parameter: Organism Value: A. thaliana
  misc_feature: MA Experiment 20000709 PARAMETER Experiment Name: At_15mM_NH4NO3_L-to-H_P Parameter: Plant Line Value: WS
  misc_feature: MA Experiment 20000709 PARAMETER Experiment Name: At_15mM_NH4NO3_L-to-H_P Parameter: Timepoint (hr) Value: 4
  misc_feature: MA Experiment 20000709 PARAMETER Experiment Name: At_15mM_NH4NO3_L-to-H_P Parameter: Tissue Value: Aerial
  misc_feature: MA Experiment 20000709 PARAMETER Experiment Name: At_15mM_NH4NO3_L-to-H_P Parameter: Treatment Value: 15mM NH4NO3 vs. 30mM Mannitol
  misc_feature: MA Experiment ID: 20000794 Result: Down-regulated in Transcription
  misc_feature: MA Experiment 20000794 PARAMETER Experiment Name: At_Petals_P Parameter: Age (day) Value: 23-25 days
  misc_feature: MA Experiment 20000794 PARAMETER Experiment Name: At_Petals_P Parameter: Plant Line Value: WS
  misc_feature: MA Experiment 20000794 PARAMETER Experiment Name: At_Petals_P Parameter: Tissue Value: Petals vs. Whole plant
  misc_feature: MA Experiment ID: 20001248 Result: Down-regulated in Transcription
  misc_feature: MA Experiment 20001248 PARAMETER Experiment Name: At_Far-red-induction_P Parameter: Age (day) Value: 7
  misc_feature: MA Experiment 20001248 PARAMETER Experiment Name: At_Far-red-induction_P Parameter: Light Value: Far-red vs. White
  misc_feature: MA Experiment 20001248 PARAMETER Experiment Name: At_Far-red-induction_P Parameter: Organism Value: A. thaliana
  misc_feature: MA Experiment 20001248 PARAMETER Experiment Name: At_Far-red-induction_P Parameter: Plant Line Value: Columbia
  misc_feature: MA Experiment 20001248 PARAMETER Experiment Name: At_Far-red-induction_P Parameter: Timepoint (hr) Value: 4
  misc_feature: MA Experiment 20001248 PARAMETER Experiment Name: At_Far-red-induction_P Parameter: Tissue Value: Whole Plant
  misc_feature: MA Experiment ID: 20001911 Result: Up-regulated in Transcription
  misc_feature: MA Experiment 20001911 PARAMETER Experiment Name: At_Drought_Reproduction_P Parameter: Age (day) Value: 40
  misc_feature: MA Experiment 20001911 PARAMETER Experiment Name: At_Drought_Reproduction_P Parameter: Organism Value: A. thaliana
  misc_feature: MA Experiment 20001911 PARAMETER Experiment Name: At_Drought_Reproduction_P Parameter: Plant Line Value: WS
  misc_feature: MA Experiment 20001911 PARAMETER Experiment Name: At_Drought_Reproduction_P Parameter: Timepoint (day) Value: 10
  misc_feature: MA Experiment 20001911 PARAMETER Experiment Name: At_Drought_Reproduction_P Parameter: Tissue Value: Flowers
  misc_feature: MA Experiment 20001911 PARAMETER Experiment Name: At_Drought_Reproduction_P Parameter: Treatment Value: Drought vs. No Drought
gcaaagaacaaaccagtgaaggaaaaatggagatatggttacttatcttgggctctctcttcctctctctccttctcaatctcctcttctttcgcctccgtgactcctcctctcttccgttaccacctgaccctaactatttccctttcattggaaccatccaatggctccggcaaggcttaggtggactcaacaactatctccgctccgtccaccaccgtctcggtcccatcatcacccttcgcatcacttcccgcccctctatattcgtcgccgatcgttctcttgctcaccaggctctcgttttgaacggtgccgttttcgccgatcgtccaccggcagctccgatcagtaagattatttcgagtaaccaacataacatcagctcttgtttatatggagccacgtggcgtcttcttcgccggaatctcacttctgagattcttcacccctcgcgcgtgagatcttactctcacgcgcggcgttgggttcttgagattctttttgatcgatttggtaaaaacagaggagaagaaccgattgttgttgttgatcatcttcactatgcgatgtttgcgcttcttgttctcatgtgttttggagataagcttgatgagaagcaaatcaaacaagtggaatatgttcagagacgacagcttcttggcttctcgagattcaatattctcaatctctggcctaagtttactaaattgattttgcgaaagagatgggaagagtttttccagatgcggagagagcagcatgacgttttgcttccgttgattcgtgctcggagaaagattgttgaagagagaaagaatagatcatcagaggaagaagaagacaacaaagagtatgtacaatcatacgttgatactctgcttgagctggagcttccagatgagaagaggaagctgaacgaggatgagattgtgagtttgtgttcggagtttctcaacggtgggactgatacaacggccaccgcgttgcaatggatcatggcgaacttggtgaaaaacccggatattcagaagaggttatacgaggagatcaaaagcgtagttggggaagaagcaaatgaagtggaggaagaagacgcgcaaaagatgccgtatctagaggcagtggtgatggagggtctccggagacatcctccgggacattttgtgctcccccacagtgtcactgaggacactgtgttaggaggatacaaagtgccgaagaatgggacaattaatttcatggtggcagagatagggagggatccaaaagtgtgggaggaaccaatggcgtttaagccagagaggtttatggaagaagcggtggacataaccggaagcagagggataaagatgatgccgttcggagcgggtagaaggatttgtccagggattgggctagcgatgctgcatctggagtactatgtggcgaatatggtgagggagtttgactggaaggaggtccaaggtcatgaagtggacttgacggagaagctcgagtttaccgtagtcatgaagcatccgcttaaggcccttgctgttcctaggagaagtcactagttgtctacttcttaaacttcagtttagtattcaccaaagactaggtgatgtatgaagaattgaagttatgggcattttgttagctgaagtcaactatggaactatcttttttattaaagtacattttgtaccttggaataaatgatagaaacaacaatccttttattttgtattaaaaggaatcttttatgacgagtgtttttacaagaaaggtacataggtctagaaaagtgtgggatttctagtgtttagtgactagatgatttagaaaagtgtgggattttgatggttgttgatacttttgttgggagaaatcgaaagagtaaaagcatttgtg

SEQ ID NO: 106387 - protein, 518 aa, Arabidopsis thaliana
  peptide (1)..(518): Ceres Seq. ID no. 13619418
  misc_feature (41)..(514): Pfam Name: Cytochrome P450 Pfam Description: Cytochrome P450
  misc_feature (9)..(518): Homolog of NCBI NO: 15217801 NR Description: cytochrome P450, putative [Arabidopsis thaliana]
  misc_feature (9)..(518): Homolog of NCBI NO: 15450601 NR Description: At1g64950/F13O11_25 [Arabidopsis thaliana]
  misc_feature (9)..(518): Homolog of NCBI NO: 15224379 NR Description: cytochrome P450, putative [Arabidopsis thaliana]
  misc_feature (9)..(518): Homolog of NCBI NO: 15217800 NR Description: cytochrome P450, putative [Arabidopsis thaliana]
  misc_feature (9)..(518): Homolog of NCBI NO: 15217798 NR Description: cytochrome P450, putative [Arabidopsis thaliana]
  misc_feature (9)..(518): Homolog of NCBI NO: 15217771 NR Description: cytochrome P450, putative [Arabidopsis thaliana]
  misc_feature (9)..(518): Homolog of NCBI NO: 1432145 NR Description: cytochrome P450 [Arabidopsis thaliana]
  misc_feature (9)..(310): Homolog of NCBI NO: 9757853 NR Description: cytochrome P450-like protein [Arabidopsis
  misc_feature (341)..(516): Homolog of NCBI NO: 9757853 NR Description: cytochrome P450-like protein [Arabidopsis
  misc_feature (11)..(516): Homolog of NCBI NO: 15228566 NR Description: cytochrome P450, putative [Arabidopsis thaliana]
KEQTSEGKMEIWLLILGSLFLSLLLNLLFFRLRDSSSLPLPPDPNYFPFIGTIQWLRQGLGGLNNYLRSVHHRLGPIITLRITSRPSIFVADRSLAHQALVLNGAVFADRPPAAPISKIISSNQHNISSCLYGATWRLLRRNLTSEILHPSRVRSYSHARRWVLEILFDRFGKNRGEEPIVVVDHLHYAMFALLVLMCFGDKLDEKQIKQVEYVQRRQLLGFSRFNILNLWPKFTKLILRKRWEEFFQMRREQHDVLLPLIRARRKIVEERKNRSSEEEEDNKEYVQSYVDTLLELELPDEKRKLNEDEIVSLCSEFLNGGTDTTATALQWIMANLVKNPDIQKRLYEEIKSVVGEEANEVEEEDAQKMPYLEAVVMEGLRRHPPGHFVLPHSVTEDTVLGGYKVPKNGTINFMVAEIGRDPKVWEEPMAFKPERFMEEAVDITGSRGIKMMPFGAGRRICPGIGLAMLHLEYYVANMVREFDWKEVQGHEVDLTEKLEFTVVMKHPLKALAVPRRSH

SEQ ID NO: 106388 - protein, 510 aa, Arabidopsis thaliana
  peptide (1)..(510): Ceres Seq. ID no. 13619419
  misc_feature (33)..(506): Pfam Name: Cytochrome P450 Pfam Description: Cytochrome P450
  misc_feature (1)..(510): Homolog of NCBI NO: 15217801 NR Description: cytochrome P450, putative [Arabidopsis thaliana]
  misc_feature (1)..(510): Homolog of NCBI NO: 15450601 NR Description: At1g64950/F13O11_25 [Arabidopsis thaliana]
  misc_feature (1)..(510): Homolog of NCBI NO: 15224379 NR Description: cytochrome P450, putative [Arabidopsis thaliana]
  misc_feature (1)..(510): Homolog of NCBI NO: 15217800 NR Description: cytochrome P450, putative [Arabidopsis thaliana]
  misc_feature (1)..(510): Homolog of NCBI NO: 15217798 NR Description: cytochrome P450, putative [Arabidopsis thaliana]
  misc_feature (1)..(510): Homolog of NCBI NO: 15217771 NR Description: cytochrome P450, putative [Arabidopsis thaliana]
  misc_feature (1)..(510): Homolog of NCBI NO: 1432145 NR Description: cytochrome P450 [Arabidopsis thaliana]
  misc_feature (1)..(302): Homolog of NCBI NO: 9757853 NR Description: cytochrome P450-like protein [Arabidopsis
  misc_feature (333)..(508): Homolog of NCBI NO: 9757853 NR Description: cytochrome P450-like protein [Arabidopsis
  misc_feature (3)..(508): Homolog of NCBI NO: 15228566 NR Description: cytochrome P450, putative [Arabidopsis thaliana]
MEIWLLILGSLFLSLLLNLLFFRLRDSSSLPLPPDPNYFPFIGTIQWLRQGLGGLNNYLRSVHHRLGPIITLRITSRPSIFVADRSLAHQALVLNGAVFADRPPAAPISKIISSNQHNISSCLYGATWRLLRRNLTSEILHPSRVRSYSHARRWVLEILFDRFGKNRGEEPIVVVDHLHYAMFALLVLMCFGDKLDEKQIKQVEYVQRRQLLGFSRFNILNLWPKFTKLILRKRWEEFFQMRREQHDVLLPLIRARRKIVEERKNRSSEEEEDNKEYVQSYVDTLLELELPDEKRKLNEDEIVSLCSEFLNGGTDTTATALQWIMANLVKNPDIQKRLYEEIKSVVGEEANEVEEEDAQKMPYLEAVVMEGLRRHPPGHFVLPHSVTEDTVLGGYKVPKNGTINFMVAEIGRDPKVWEEPMAFKPERFMEEAVDITGSRGIKMMPFGAGRRICPGIGLAMLHLEYYVANMVREFDWKEVQGHEVDLTEKLEFTVVMKHPLKALAVPRRSH

SEQ ID NO: 106389 - protein, 329 aa, Arabidopsis thaliana
  peptide (1)..(329): Ceres Seq. ID no. 13619420
  misc_feature (1)..(325): Pfam Name: Cytochrome P450 Pfam Description: Cytochrome P450
  misc_feature (1)..(329): Homolog of NCBI NO: 15217801 NR Description: cytochrome P450, putative [Arabidopsis thaliana]
  misc_feature (1)..(329): Homolog of NCBI NO: 15450601 NR Description: At1g64950/F13O11_25 [Arabidopsis thaliana]
  misc_feature (1)..(329): Homolog of NCBI NO: 15224379 NR Description: cytochrome P450, putative [Arabidopsis thaliana]
  misc_feature (1)..(329): Homolog of NCBI NO: 15217800 NR Description: cytochrome P450, putative [Arabidopsis thaliana]
  misc_feature (1)..(329): Homolog of NCBI NO: 15217798 NR Description: cytochrome P450, putative [Arabidopsis thaliana]
  misc_feature (1)..(329): Homolog of NCBI NO: 15217771 NR Description: cytochrome P450, putative [Arabidopsis thaliana]
  misc_feature (1)..(329): Homolog of NCBI NO: 1432145 NR Description: cytochrome P450 [Arabidopsis thaliana]
  misc_feature (1)..(121): Homolog of NCBI NO: 9757853 NR Description: cytochrome P450-like protein [Arabidopsis
  misc_feature (152)..(327): Homolog of NCBI NO: 9757853 NR Description: cytochrome P450-like protein [Arabidopsis
  misc_feature (1)..(327): Homolog of NCBI NO: 15228566 NR Description: cytochrome P450, putative [Arabidopsis thaliana]
MFALLVLMCFGDKLDEKQIKQVEYVQRRQLLGFSRFNILNLWPKFTKLILRKRWEEFFQMRREQHDVLLPLIRARRKIVEERKNRSSEEEEDNKEYVQSYVDTLLELELPDEKRKLNEDEIVSLCSEFLNGGTDTTATALQWIMANLVKNPDIQKRLYEEIKSVVGEEANEVEEEDAQKMPYLEAVVMEGLRRHPPGHFVLPHSVTEDTVLGGYKVPKNGTINFMVAEIGRDPKVWEEPMAFKPERFMEEAVDITGSRGIKMMPFGAGRRICPGIGLAMLHLEYYVANMVREFDWKEVQGHEVDLTEKLEFTVVMKHPLKALAVPRRSH

SEQ ID NO: 106390 - DNA, 3404 bp, Arabidopsis thaliana
  misc_feature (1)..(3404): Ceres Seq. ID no. 13619460
  misc_feature: MA Experiment ID: 20000179 Result: Up-regulated in Transcription
  misc_feature: MA Experiment 20000179 PARAMETER Experiment Name: At_Germinating_Seeds_P Parameter: Age (hr) Value: 6 vs. 0
  misc_feature: MA Experiment 20000179 PARAMETER Experiment Name: At_Germinating_Seeds_P Parameter: Tissue Value: Germinating Seeds
  misc_feature: MA Experiment ID: 20000264 Result: Up-regulated in Transcription
  misc_feature: MA Experiment 20000264 PARAMETER Experiment Name: At_Open_Flower_P Parameter: Age (day) Value: 21
  misc_feature: MA Experiment 20000264 PARAMETER Experiment Name: At_Open_Flower_P Parameter: Plant Line Value: WS
  misc_feature: MA Experiment 20000264 PARAMETER Experiment Name: At_Open_Flower_P Parameter: Tissue Value: Open Flower vs. Whole Plant
  misc_feature: MA Experiment ID: 20000286 Result: Up-regulated in Transcription
  misc_feature: MA Experiment 20000286 PARAMETER Experiment Name: At_Open_Flower_P Parameter: Age (day) Value: 21
  misc_feature: MA Experiment 20000286 PARAMETER Experiment Name: At_Open_Flower_P Parameter: Plant Line Value: WS
  misc_feature: MA Experiment 20000286 PARAMETER Experiment Name: At_Open_Flower_P Parameter: Tissue Value: Half Open vs. Whole Plant
  misc_feature: MA Experiment ID: 20000438 Result: Up-regulated in Transcription
  misc_feature: MA Experiment 20000438 PARAMETER Experiment Name: At_Shoots__P Parameter: Age (day) Value: 14
  misc_feature: MA Experiment 20000438 PARAMETER Experiment Name: At_Shoots__P Parameter: Tissue Value: Shoots vs. Whole Plant
  misc_feature: MA Experiment ID: 20000439 Result: Up-regulated in Transcription
  misc_feature: MA Experiment 20000439 PARAMETER Experiment Name: At_Roots__P Parameter: Age (day) Value: 14 vs. 21
  misc_feature: MA Experiment 20000439 PARAMETER Experiment Name: At_Roots__P Parameter: Organism Value: A. thaliana
  misc_feature: MA Experiment 20000439 PARAMETER Experiment Name: At_Roots__P Parameter: Tissue Value: Roots vs. Whole Plant
  misc_feature: MA Experiment ID: 20000495 Result: Down-regulated in Transcription
  misc_feature: MA Experiment 20000495 PARAMETER Experiment Name: At_Guard_Cells_P Parameter: Harvest Date Value: 8/2/2002
  misc_feature: MA Experiment 20000495 PARAMETER Experiment Name: At_Guard_Cells_P Parameter: Organism Value: A. thaliana
  misc_feature: MA Experiment 20000495 PARAMETER Experiment Name: At_Guard_Cells_P Parameter: Tissue Value: Guard Cells vs. Leaves
  misc_feature: MA Experiment ID: 20000794 Result: Up-regulated in Transcription
  misc_feature: MA Experiment 20000794 PARAMETER Experiment Name: At_Petals_P Parameter: Age (day) Value: 23-25 days
  misc_feature: MA Experiment 20000794 PARAMETER Experiment Name: At_Petals_P Parameter: Plant Line Value: WS
  misc_feature: MA Experiment 20000794 PARAMETER Experiment Name: At_Petals_P Parameter: Tissue Value: Petals vs. Whole plant
  misc_feature: MA Experiment ID: 20001451 Result: Down-regulated in Transcription
  misc_feature: MA Experiment 20001451 PARAMETER Experiment Name: At_Far-red-induction_P Parameter: Age (day) Value: 7
  misc_feature: MA Experiment 20001451 PARAMETER Experiment Name: At_Far-red-induction_P Parameter: Light Value: Far-red vs. White
  misc_feature: MA Experiment 20001451 PARAMETER Experiment Name: At_Far-red-induction_P Parameter: Organism Value: A. thaliana
  misc_feature: MA Experiment 20001451 PARAMETER Experiment Name: At_Far-red-induction_P Parameter: Plant Line Value: Columbia
  misc_feature: MA Experiment 20001451 PARAMETER Experiment Name: At_Far-red-induction_P Parameter: Timepoint (hr) Value: 24
  misc_feature: MA Experiment 20001451 PARAMETER Experiment Name: At_Far-red-induction_P Parameter: Tissue Value: Whole Plant
  misc_feature: MA Experiment ID: 20001560 Result: Down-regulated in Transcription
  misc_feature: MA Experiment 20001560 PARAMETER Experiment Name: At_Drought_Soil_Dry_P Parameter: Age (day) Value: 28
  misc_feature: MA Experiment 20001560 PARAMETER Experiment Name: At_Drought_Soil_Dry_P Parameter: Organism Value: A. thaliana
  misc_feature: MA Experiment 20001560 PARAMETER Experiment Name: At_Drought_Soil_Dry_P Parameter: Plant Line Value: WS
  misc_feature: MA Experiment 20001560 PARAMETER Experiment Name: At_Drought_Soil_Dry_P Parameter: Post Timepoint (hr) Value: None
  misc_feature: MA Experiment 20001560 PARAMETER Experiment Name: At_Drought_Soil_Dry_P Parameter: Post-Treatment Value: None
  misc_feature: MA Experiment 20001560 PARAMETER Experiment Name: At_Drought_Soil_Dry_P Parameter: Timepoint (day) Value: 14
  misc_feature: MA Experiment 20001560 PARAMETER Experiment Name: At_Drought_Soil_Dry_P Parameter: Treatment Value: Drought vs. No Drought
atggttactaatagctacatggatacgcgatcaaatttgacaagtgtgaatcgaggatccaatgtggatctcgaagatcgattccagagggagctcgaatctttgctccaacaacatcgtaatcagcaatcatttggccgagaacgagaacgagacattgatgttcacagaagcggaagcgcgcctcctaccgtggaaggattgttgagagctatggataatcagtacttgaacaataacaactctgatcatagagatgttgggaatattagcagtataaccactagcaatggcgttgagcttttatctgatgatgagttacgttggcaccctgagtatctctcttattactattcgaatgagcattcgaatccgaggttgcctcctccgttgttgtctagagaggattggagggttgctcagaggtttcacaacagtgagtctgtgtttgatcctgttggggaatggaggaagaaaacggttgaagtcgacaactcctcatcgctcttctcggttcagccaggggttccagttgagcaggcagagaatgatttgatggaactgaggaatgctgtagctcagggccgctctcagaaggtgcagcggctagatcaaggcagagaagacttgattggattatctggatattctgggcttggaccgagaaggaagagttttgctgatatacttcaggaaggacttgaacgggatgcagccttaggcagccaactctctcggcctgcaagctgcaacacttttcgggatatgaaagatgctgctgttttatcaaatttcagtgccggtggatttgacagcccattagcattccatgattcattacattctactgccaaaaacagtccaaatactatgcttggatccaccatgagttctccggtgccaagaaatagaactcctgactcacatctagtaggacgatctacggcctctggccttccccctattggtaccagggttggtcctgtcgagaagaagaatacttttggcacagccatccaaaactgtgaatcttacactgctgccgatgttgccgacacattgtccaggttgaacatgtcagagatgagtcaagtaaaagaaaaccatatgcagtcacagcttcaagtggaactggagaatcaatctgatgtcatgcgttacatacccaatggtcataagaaggctttgcggcaacaaaatacggcagaaactaaagatcacttgttttctgcaaattatggtggaatgagtgggtatggagcaagtcttggtgcttctacagtgggttcccatggacaggtcaacatccctaaacgaacctcctcttcagcgagtctctactcaacttcagaccattctagattaggaagcgtgggcttatctgatgtcaatattaggaatggaaatattaatggaacagacttctccacagctggtggttatatggcaaagaacaagttgaattcattagctgagcactattccgctgaaggctcacatttgactggggatggggatagacaaagcttgaacagattgataaatcaagttgcttctgagcttcactctccagttatggacccacattacagccagtatctgcatacggcatcttctactgctgccccaatcgatcattctcttattagaaacaatttcgggacttcaaacggagatacggctaacgaatacctcgcgatgttacttgctcaaaacaggcaacagctgggtaacctcaatgctgcaaattctagattttttgagagtccttcatatgatcttggcaacatgtatctaggaaaccatttgccttctccttccaagaattcaagaaatttccagaacatgcgtatgtcacaatctgcctcaatgatgaaagttcctttcggaggcttacagggatcatcccatgtagatattggcagtacggcagaagcatccttactagaggggtttaagaacaacaagacaaggtctttggagctttcagaaatagttggtcatgtgattgagttcagcatggatcagtacggaagtcgtttcattcaacagaaacttgagactgcaacggatgaggaaaagaatgcaatattccctgagatacttccttacggccgtactttaatgacagatgtctttggaaattatgtcattcaaaagttttttgaacatggtacaaccaagcagagaaaagaactcgctgaacaagtaacaggccacgttttggctctttctctacaaatgtacggctgcagggttatccaaaaggcgttagaggtggttgaattggagcagcaagctcgaatggtgaaagagcttgatgggtctgtcatgaaatgcgttcatgaccagaacggtaatcatgtgatccagaagtgtatagagcgtcttcctcaggattggatacagttcatcatttcctcattctacggaaaagttttagctctttcaacacacccttatggatgccgtgtaatccagagggtactggagcatattgatgatatagaaacccaacggatcattatggaggaaatcatggattcagtctgtactctagcacaagatcaatacggaaattatgttatccagcatatcatacaacatggtaaacctcatgaacggtcagaaattatcaataagcttgctggacagattgtgaagatgagtcagcaaaagtttgcttctaatgttgttgaaaagtgcctaacatttggcggtccagaggaacgtcaggttctagtgaatgagatgcttggttatactgatgaaaacgagcctcttcaggcgatgatgaaggacccatttgggaactatgtagtgcagaaggttcttgaaacatgtgatgatcaaagtcttgcactcattctttctcgcatcaaagtacacttgaatgccttgaagagatacacatatgggaaacacatcgttgcccgggttgagaagcttatcactactggagagagaagaatcggactctcgtcatctcttgccgcgaacaccactccataaccatctctgagtaagtaaaacctcaagcttcttaacttataacacaacctgagaagaggtacaagttgatgaccgagagctatttgtacagcctaactaagcaaagcatctcaagatggttcctgttatatatattttgcaaataatttgtaaataaaatagagggttttagatttaagtcagtaaataaatgtattttggatcccaactggcttaaatcaaaaatctcctcttggttgtgtaaaaggtgaagccttgctgttttatttatgtaaagcaatggcttacttttaggtcttattcttcacattacgatgtaaatatcttgcggctttgctccccaagaattgctatattttttattttaaaagctctaaagttttacactgaac

SEQ ID NO: 106391 - protein, 1003 aa, Arabidopsis thaliana
  peptide (1)..(1003): Ceres Seq. ID no. 13619461
  misc_feature (772)..(806): Pfam Name: Pumilio-family RNA binding repeat Pfam Description: Pumilio-family RNA binding repeat
  misc_feature (19)..(499): Homolog of NCBI NO: 34908236 NR Description: putative pumilio/Mpt5 family RNA-binding protein
  misc_feature (506)..(995): Homolog of NCBI NO: 34908236 NR Description: putative pumilio/Mpt5 family RNA-binding protein
  misc_feature (210)..(995): Homolog of NCBI NO: 15227052 NR Description: pumilio-family RNA-binding protein, putative
  misc_feature (16)..(180): Homolog of NCBI NO: 15227052 NR Description: pumilio-family RNA-binding protein, putative
  misc_feature (209)..(995): Homolog of NCBI NO: 15227038 NR Description: pumilio-family RNA-binding protein, putative
  misc_feature (16)..(175): Homolog of NCBI NO: 15227038 NR Description: pumilio-family RNA-binding protein, putative
  misc_feature (457)..(999): Homolog of NCBI NO: 34906006 NR Description: P0518C01.14 [Oryza sativa (japonica
  misc_feature (285)..(457): Homolog of NCBI NO: 34906006 NR Description: P0518C01.14 [Oryza sativa (japonica
  misc_feature (88)..(158): Homolog of NCBI NO: 34906006 NR Description: P0518C01.14 [Oryza sativa (japonica
  misc_feature (37)..(72): Homolog of NCBI NO: 34906006 NR Description: P0518C01.14 [Oryza sativa (japonica
MVTNSYMDTRSNLTSVNRGSNVDLEDRFQRELESLLQQHRNQQSFGRERERDIDVHRSGSAPPTVEGLLRAMDNQYLNNNNSDHRDVGNISSITTSNGVELLSDDELRWHPEYLSYYYSNEHSNPRLPPPLLSREDWRVAQRFHNSESVFDPVGEWRKKTVEVDNSSSLFSVQPGVPVEQAENDLMELRNAVAQGRSQKVQRLDQGREDLIGLSGYSGLGPRRKSFADILQEGLERDAALGSQLSRPASCNTFRDMKDAAVLSNFSAGGFDSPLAFHDSLHSTAKNSPNTMLGSTMSSPVPRNRTPDSHLVGRSTASGLPPIGTRVGPVEKKNTFGTAIQNCESYTAADVADTLSRLNMSEMSQVKENHMQSQLQVELENQSDVMRYIPNGHKKALRQQNTAETKDHLFSANYGGMSGYGASLGASTVGSHGQVNIPKRTSSSASLYSTSDHSRLGSVGLSDVNIRNGNINGTDFSTAGGYMAKNKLNSLAEHYSAEGSHLTGDGDRQSLNRLINQVASELHSPVMDPHYSQYLHTASSTAAPIDHSLIRNNFGTSNGDTANEYLAMLLAQNRQQLGNLNAANSRFFESPSYDLGNMYLGNHLPSPSKNSRNFQNMRMSQSASMMKVPFGGLQGSSHVDIGSTAEASLLEGFKNNKTRSLELSEIVGHVIEFSMDQYGSRFIQQKLETATDEEKNAIFPEILPYGRTLMTDVFGNYVIQKFFEHGTTKQRKELAEQVTGHVLALSLQMYGCRVIQKALEVVELEQQARMVKELDGSVMKCVHDQNGNHVIQKCIERLPQDWIQFIISSFYGKVLALSTHPYGCRVIQRVLEHIDDIETQRIIMEEIMDSVCTLAQDQYGNYVIQHIIQHGKPHERSEIINKLAGQIVKMSQQKFASNVVEKCLTFGGPEERQVLVNEMLGYTDENEPLQAMMKDPFGNYVVQKVLETCDDQSLALILSRIKVHLNALKRYTYGKHIVARVEKLITTGERRIGLSSSLAANTTP

SEQ ID NO: 106392 - protein, 997 aa, Arabidopsis thaliana
  peptide (1)..(997): Ceres Seq. ID no. 13619462
  misc_feature (766)..(800): Pfam Name: Pumilio-family RNA binding repeat Pfam Description: Pumilio-family RNA binding repeat
  misc_feature (13)..(493): Homolog of NCBI NO: 34908236 NR Description: putative pumilio/Mpt5 family RNA-binding protein
  misc_feature (500)..(989): Homolog of NCBI NO: 34908236 NR Description: putative pumilio/Mpt5 family RNA-binding protein
  misc_feature (204)..(989): Homolog of NCBI NO: 15227052 NR Description: pumilio-family RNA-binding protein, putative
  misc_feature (10)..(174): Homolog of NCBI NO: 15227052 NR Description: pumilio-family RNA-binding protein, putative
  misc_feature (203)..(989): Homolog of NCBI NO: 15227038 NR Description: pumilio-family RNA-binding protein, putative
  misc_feature (10)..(169): Homolog of NCBI NO: 15227038 NR Description: pumilio-family RNA-binding protein, putative
  misc_feature (451)..(993): Homolog of NCBI NO: 34906006 NR Description: P0518C01.14 [Oryza sativa (japonica
  misc_feature (279)..(451): Homolog of NCBI NO: 34906006 NR Description: P0518C01.14 [Oryza sativa (japonica
  misc_feature (82)..(152): Homolog of NCBI NO: 34906006 NR Description: P0518C01.14 [Oryza sativa (japonica
  misc_feature (31)..(66): Homolog of NCBI NO: 34906006 NR Description: P0518C01.14 [Oryza sativa (japonica
MDTRSNLTSVNRGSNVDLEDRFQRELESLLQQHRNQQSFGRERERDIDVHRSGSAPPTVEGLLRAMDNQYLNNNNSDHRDVGNISSITTSNGVELLSDDELRWHPEYLSYYYSNEHSNPRLPPPLLSREDWRVAQRFHNSESVFDPVGEWRKKTVEVDNSSSLFSVQPGVPVEQAENDLMELRNAVAQGRSQKVQRLDQGREDLIGLSGYSGLGPRRKSFADILQEGLERDAALGSQLSRPASCNTFRDMKDAAVLSNFSAGGFDSPLAFHDSLHSTAKNSPNTMLGSTMSSPVPRNRTPDSHLVGRSTASGLPPIGTRVGPVEKKNTFGTAIQNCESYTAADVADTLSRLNMSEMSQVKENHMQSQLQVELENQSDVMRYIPNGHKKALRQQNTAETKDHLFSANYGGMSGYGASLGASTVGSHGQVNIPKRTSSSASLYSTSDHSRLGSVGLSDVNIRNGNINGTDFSTAGGYMAKNKLNSLAEHYSAEGSHLTGDGDRQSLNRLINQVASELHSPVMDPHYSQYLHTASSTAAPIDHSLIRNNFGTSNGDTANEYLAMLLAQNRQQLGNLNAANSRFFESPSYDLGNMYLGNHLPSPSKNSRNFQNMRMSQSASMMKVPFGGLQGSSHVDIGSTAEASLLEGFKNNKTRSLELSEIVGHVIEFSMDQYGSRFIQQKLETATDEEKNAIFPEILPYGRTLMTDVFGNYVIQKFFEHGTTKQRKELAEQVTGHVLALSLQMYGCRVIQKALEVVELEQQARMVKELDGSVMKCVHDQNGNHVIQKCIERLPQDWIQFIISSFYGKVLALSTHPYGCRVIQRVLEHIDDIETQRIIMEEIMDSVCTLAQDQYGNYVIQHIIQHGKPHERSEIINKLAGQIVKMSQQKFASNVVEKCLTFGGPEERQVLVNEMLGYTDENEPLQAMMKDPFGNYVVQKVLETCDDQSLALILSRIKVHLNALKRYTYGKHIVARVEKLITTGERRIGLSSSLAANTTP

SEQ ID NO: 106393 - protein, 932 aa, Arabidopsis thaliana
  peptide (1)..(932): Ceres Seq. ID no. 13619463
  misc_feature (701)..(735): Pfam Name: Pumilio-family RNA binding repeat Pfam Description: Pumilio-family RNA binding repeat
  misc_feature (1)..(428): Homolog of NCBI NO: 34908236 NR Description: putative pumilio/Mpt5 family RNA-binding protein
  misc_feature (435)..(924): Homolog of NCBI NO: 34908236 NR Description: putative pumilio/Mpt5 family RNA-binding protein
  misc_feature (139)..(924): Homolog of NCBI NO: 15227052 NR Description: pumilio-family RNA-binding protein, putative
  misc_feature (1)..(109): Homolog of NCBI NO: 15227052 NR Description: pumilio-family RNA-binding protein, putative
  misc_feature (138)..(924): Homolog of NCBI NO: 15227038 NR Description: pumilio-family RNA-binding protein, putative
  misc_feature (1)..(104): Homolog of NCBI NO: 15227038 NR Description: pumilio-family RNA-binding protein, putative
  misc_feature (386)..(928): Homolog of NCBI NO: 34906006 NR Description: P0518C01.14 [Oryza sativa (japonica
  misc_feature (214)..(386): Homolog of NCBI NO: 34906006 NR Description: P0518C01.14 [Oryza sativa (japonica
  misc_feature (17)..(87): Homolog of NCBI NO: 34906006 NR Description: P0518C01.14 [Oryza sativa (japonica
  misc_feature (603)..(932): Homolog of NCBI NO: 26450884 NR Description: putative RNA binding protein [Arabidopsis
MDNQYLNNNNSDHRDVGNISSITTSNGVELLSDDELRWHPEYLSYYYSNEHSNPRLPPPLLSREDWRVAQRFHNSESVFDPVGEWRKKTVEVDNSSSLFSVQPGVPVEQAENDLMELRNAVAQGRSQKVQRLDQGREDLIGLSGYSGLGPRRKSFADILQEGLERDAALGSQLSRPASCNTFRDMKDAAVLSNFSAGGFDSPLAFHDSLHSTAKNSPNTMLGSTMSSPVPRNRTPDSHLVGRSTASGLPPIGTRVGPVEKKNTFGTAIQNCESYTAADVADTLSRLNMSEMSQVKENHMQSQLQVELENQSDVMRYIPNGHKKALRQQNTAETKDHLFSANYGGMSGYGASLGASTVGSHGQVNIPKRTSSSASLYSTSDHSRLGSVGLSDVNIRNGNINGTDFSTAGGYMAKNKLNSLAEHYSAEGSHLTGDGDRQSLNRLINQVASELHSPVMDPHYSQYLHTASSTAAPIDHSLIRNNFGTSNGDTANEYLAMLLAQNRQQLGNLNAANSRFFESPSYDLGNMYLGNHLPSPSKNSRNFQNMRMSQSASMMKVPFGGLQGSSHVDIGSTAEASLLEGFKNNKTRSLELSEIVGHVIEFSMDQYGSRFIQQKLETATDEEKNAIFPEILPYGRTLMTDVFGNYVIQKFFEHGTTKQRKELAEQVTGHVLALSLQMYGCRVIQKALEVVELEQQARMVKELDGSVMKCVHDQNGNHVIQKCIERLPQDWIQFIISSFYGKVLALSTHPYGCRVIQRVLEHIDDIETQRIIMEEIMDSVCTLAQDQYGNYVIQHIIQHGKPHERSEIINKLAGQIVKMSQQKFASNVVEKCLTFGGPEERQVLVNEMLGYTDENEPLQAMMKDPFGNYVVQKVLETCDDQSLALILSRIKVHLNALKRYTYGKHIVARVEKLITTGERRIGLSSSLAANTTP

SEQ ID NO: 106394 - DNA, 1434 bp, Arabidopsis thaliana
  misc_feature (1)..(1434): Ceres Seq. ID no. 13619472
  misc_feature: MA Experiment ID: 20000171 Result: Up-regulated in Transcription
  misc_feature: MA Experiment 20000171 PARAMETER Experiment Name: At_42deg_Heat_P Parameter: Age (day) Value: 14
  misc_feature: MA Experiment 20000171 PARAMETER Experiment Name: At_42deg_Heat_P Parameter: Organism Value: A. thaliana
  misc_feature: MA Experiment 20000171 PARAMETER Experiment Name: At_42deg_Heat_P Parameter: Plant Line Value: WS
  misc_feature: MA Experiment 20000171 PARAMETER Experiment Name: At_42deg_Heat_P Parameter: Temperature (deg C) Value: 42 vs. 22
  misc_feature: MA Experiment 20000171 PARAMETER Experiment Name: At_42deg_Heat_P Parameter: Timepoint (hr) Value: 1
  misc_feature: MA Experiment 20000171 PARAMETER Experiment Name: At_42deg_Heat_P Parameter: Tissue Value: Aerial
  misc_feature: MA Experiment ID: 20000173 Result: Up-regulated in Transcription
  misc_feature: MA Experiment 20000173 PARAMETER Experiment Name: At_42deg_Heat_P Parameter: Age (day) Value: 14
  misc_feature: MA Experiment 20000173 PARAMETER Experiment Name: At_42deg_Heat_P Parameter: Organism Value: A. thaliana
  misc_feature: MA Experiment 20000173 PARAMETER Experiment Name: At_42deg_Heat_P Parameter: Plant Line Value: WS
  misc_feature: MA Experiment 20000173 PARAMETER Experiment Name: At_42deg_Heat_P Parameter: Temperature (deg C) Value: 42 vs. 22
  misc_feature: MA Experiment 20000173 PARAMETER Experiment Name: At_42deg_Heat_P Parameter: Timepoint (hr) Value: 6
  misc_feature: MA Experiment 20000173 PARAMETER Experiment Name: At_42deg_Heat_P Parameter: Tissue Value: Aerial
  misc_feature: MA Experiment ID: 20000180 Result: Down-regulated in Transcription
  misc_feature: MA Experiment 20000180 PARAMETER Experiment Name: At_Germinating_Seeds_P Parameter: Age (hr) Value: 24 vs. 0
  misc_feature: MA Experiment 20000180 PARAMETER Experiment Name: At_Germinating_Seeds_P Parameter: Tissue Value: Germinating Seeds
  misc_feature: MA Experiment ID: 20000185 Result: Down-regulated in Transcription
  misc_feature: MA Experiment 20000185 PARAMETER Experiment Name: At_Roots__P Parameter: Age (day) Value: 7 vs. 21
  misc_feature: MA Experiment 20000185 PARAMETER Experiment Name: At_Roots__P Parameter: Organism Value: A. thaliana
  misc_feature: MA Experiment 20000185 PARAMETER Experiment Name: At_Roots__P Parameter: Tissue Value: Roots vs. Whole Plant
  misc_feature: MA Experiment ID: 20000438 Result: Down-regulated in Transcription
  misc_feature: MA Experiment 20000438 PARAMETER Experiment Name: At_Shoots__P Parameter: Age (day) Value: 14
  misc_feature: MA Experiment 20000438 PARAMETER Experiment Name: At_Shoots__P Parameter: Tissue Value: Shoots vs. Whole Plant
  misc_feature: MA Experiment ID: 20000439 Result: Down-regulated in Transcription
  misc_feature: MA Experiment 20000439 PARAMETER Experiment Name: At_Roots__P Parameter: Age (day) Value: 14 vs. 21
  misc_feature: MA Experiment 20000439 PARAMETER Experiment Name: At_Roots__P Parameter: Organism Value: A. thaliana
  misc_feature: MA Experiment 20000439 PARAMETER Experiment Name: At_Roots__P Parameter: Tissue Value: Roots vs. Whole Plant
  misc_feature: MA Experiment ID: 20000495 Result: Down-regulated in Transcription
  misc_feature: MA Experiment 20000495 PARAMETER Experiment Name: At_Guard_Cells_P Parameter: Harvest Date Value: 8/2/2002
  misc_feature: MA Experiment 20000495 PARAMETER Experiment Name: At_Guard_Cells_P Parameter: Organism Value: A. thaliana
  misc_feature: MA Experiment 20000495 PARAMETER Experiment Name: At_Guard_Cells_P Parameter: Tissue Value: Guard Cells vs. Leaves
  misc_feature: MA Experiment ID: 20001247 Result: Down-regulated in Transcription
  misc_feature: MA Experiment 20001247 PARAMETER Experiment Name: At_Far-red-induction_P Parameter: Age (day) Value: 7
  misc_feature: MA Experiment 20001247 PARAMETER Experiment Name: At_Far-red-induction_P Parameter: Light Value: Far-red vs. White
  misc_feature: MA Experiment 20001247 PARAMETER Experiment Name: At_Far-red-induction_P Parameter: Organism Value: A. thaliana
  misc_feature: MA Experiment 20001247 PARAMETER Experiment Name: At_Far-red-induction_P Parameter: Plant Line Value: Columbia
  misc_feature: MA Experiment 20001247 PARAMETER Experiment Name: At_Far-red-induction_P Parameter: Timepoint (hr) Value: 1
  misc_feature: MA Experiment 20001247 PARAMETER Experiment Name: At_Far-red-induction_P Parameter: Tissue Value: Whole Plant
  misc_feature: MA Experiment ID: 20001248 Result: Up-regulated in Transcription
  misc_feature: MA Experiment 20001248 PARAMETER Experiment Name: At_Far-red-induction_P Parameter: Age (day) Value: 7
  misc_feature: MA Experiment 20001248 PARAMETER Experiment Name: At_Far-red-induction_P Parameter: Light Value: Far-red vs. White
  misc_feature: MA Experiment 20001248 PARAMETER Experiment Name: At_Far-red-induction_P Parameter: Organism Value: A. thaliana
  misc_feature: MA Experiment 20001248 PARAMETER Experiment Name: At_Far-red-induction_P Parameter: Plant Line Value: Columbia
  misc_feature: MA Experiment 20001248 PARAMETER Experiment Name: At_Far-red-induction_P Parameter: Timepoint (hr) Value: 4
  misc_feature: MA Experiment 20001248 PARAMETER Experiment Name: At_Far-red-induction_P Parameter: Tissue Value: Whole Plant
  misc_feature: MA Experiment ID: 20001554 Result: Up-regulated in Transcription
  misc_feature: MA Experiment 20001554 PARAMETER Experiment Name: At_Drought_Soil_Dry_P Parameter: Age (day) Value: 21
  misc_feature: MA Experiment 20001554 PARAMETER Experiment Name: At_Drought_Soil_Dry_P Parameter: Organism Value: A. thaliana
  misc_feature: MA Experiment 20001554 PARAMETER Experiment Name: At_Drought_Soil_Dry_P Parameter: Plant Line Value: WS
  misc_feature: MA Experiment 20001554 PARAMETER Experiment Name: At_Drought_Soil_Dry_P Parameter: Post Timepoint (hr) Value: None
  misc_feature: MA Experiment 20001554 PARAMETER Experiment Name: At_Drought_Soil_Dry_P Parameter: Post-Treatment Value: None
  misc_feature: MA Experiment 20001554 PARAMETER Experiment Name: At_Drought_Soil_Dry_P Parameter: Timepoint (day) Value: 7
  misc_feature: MA Experiment 20001554 PARAMETER Experiment Name: At_Drought_Soil_Dry_P Parameter: Treatment Value: Drought vs. No Drought
  misc_feature: MA Experiment ID: 20001555 Result: Up-regulated in Transcription
  misc_feature: MA Experiment 20001555 PARAMETER Experiment Name: At_Drought_Soil_Dry_P Parameter: Age (day) Value: 24
  misc_feature: MA Experiment 20001555 PARAMETER Experiment Name: At_Drought_Soil_Dry_P Parameter: Organism Value: A. thaliana
  misc_feature: MA Experiment 20001555 PARAMETER Experiment Name: At_Drought_Soil_Dry_P Parameter: Plant Line Value: WS
  misc_feature: MA Experiment 20001555 PARAMETER Experiment Name: At_Drought_Soil_Dry_P Parameter: Post Timepoint (hr) Value: None
  misc_feature: MA Experiment 20001555 PARAMETER Experiment Name: At_Drought_Soil_Dry_P Parameter: Post-Treatment Value: None
  misc_feature: MA Experiment 20001555 PARAMETER Experiment Name: At_Drought_Soil_Dry_P Parameter: Timepoint (day) Value: 10
  misc_feature: MA Experiment 20001555 PARAMETER Experiment Name: At_Drought_Soil_Dry_P Parameter: Treatment Value: Drought vs. No Drought
  misc_feature: MA Experiment ID: 20001905 Result: Up-regulated in Transcription
  misc_feature: MA Experiment 20001905 PARAMETER Experiment Name: At_Drought_Reproduction_P Parameter: Age (day) Value: 40
  misc_feature: MA Experiment 20001905 PARAMETER Experiment Name: At_Drought_Reproduction_P Parameter: Organism Value: A. thaliana
  misc_feature: MA Experiment 20001905 PARAMETER Experiment Name: At_Drought_Reproduction_P Parameter: Plant Line Value: WS
  misc_feature: MA Experiment 20001905 PARAMETER Experiment Name: At_Drought_Reproduction_P Parameter: Timepoint (day) Value: 10
  misc_feature: MA Experiment 20001905 PARAMETER Experiment Name: At_Drought_Reproduction_P Parameter: Tissue Value: Rosettes
  misc_feature: MA Experiment 20001905 PARAMETER Experiment Name: At_Drought_Reproduction_P Parameter: Treatment Value: Drought vs. No Drought
  misc_feature: MA Experiment ID: 20001911 Result: Up-regulated in Transcription
  misc_feature: MA Experiment 20001911 PARAMETER Experiment Name: At_Drought_Reproduction_P Parameter: Age (day) Value: 40
  misc_feature: MA Experiment 20001911 PARAMETER Experiment Name: At_Drought_Reproduction_P Parameter: Organism Value: A. thaliana
  misc_feature: MA Experiment 20001911 PARAMETER Experiment Name: At_Drought_Reproduction_P Parameter: Plant Line Value: WS
  misc_feature: MA Experiment 20001911 PARAMETER Experiment Name: At_Drought_Reproduction_P Parameter: Timepoint (day) Value: 10
  misc_feature: MA Experiment 20001911 PARAMETER Experiment Name: At_Drought_Reproduction_P Parameter: Tissue Value: Flowers
  misc_feature: MA Experiment 20001911 PARAMETER Experiment Name: At_Drought_Reproduction_P Parameter: Treatment Value: Drought vs. No Drought
gatttctgtaaaaagtttgttgtctttacaaaaagaaaagaaaaaagagacgctagaaagaacgcgaaagcttgcgaagaagatttgcttttgatcgacttaacacgaacaacaaacaacatctgcgtgataaagaagagatttttgcctaaataaagaagagattcgactctaatcctggagttatcattcacgatagattcttagattgcgactataaagaagaagatggctgtatatgaacaaaccggaaccgagcagccgaagaaaaggaaatctagggctcgagcaggtggtttaacggtggctgataggctaaagaagtggaaagagtacaacgagattgttgaagcttcggctgttaaagaaggagagaaaccgaaacgcaaagttcctgcgaaagggtcgaagaaaggttgtatgaagggtaaaggaggaccagataattctcactgtagttttagaggagttagacaaaggatttggggtaaatgggttgcagagattcgagaaccgaaaataggaactagactttggcttggtacttttcctaccgcggaaaaagctgcttccgcttatgatgaagcggctaccgctatgtacggttcattggctcgtcttaacttccctcagtctgttgggtctgagtttactagtacgtctagtcaatctgaggtgtgtacggttgaaaataaggcggttgtttgtggtgatgtttgtgtgaagcatgaagatactgattgtgaatctaatccatttagtcagattttagatgttagagaagagtcttgtggaaccaggccggacagttgcacggttggacatcaagatatgaattcttcgctgaattacgatttgctgttagagtttgagcagcagtattggggccaagttttgcaggagaaagagaaaccgaagcaggaagaagaggagatacagcaacagcaacaggaacagcaacagcaacagctgcaaccggatttgcttactgttgcagattacggttggccttggtctaatgatattgtaaatgatcagacttcttgggatcctaatgagtgctttgatattaatgaactccttggagatttgaatgaacctggtccccatcagagccaagaccaaaaccacgtaaattctggtagttatgatttgcatccgcttcatctcgagccacacgatggtcacgagttcaatggtttgagttctctggatatttgagagttctgaggcaatggtcctacaagactacaacataatctttggattgatcataggagaaacaagaaataggtgttaatgatctgattcacaatgaaaaaatatttaataactctatagtttttgttctttccttggatcatgaactgttgcttctcatctattgagttaatatagcgaatagcagagtttctctctttcttctctttgtag

SEQ ID NO: 106395 - protein, 330 aa, Arabidopsis thaliana
  peptide (1)..(330): Ceres Seq. ID no. 13619473
  misc_feature (75)..(139): Pfam Name: AP2 domain Pfam Description: AP2 domain
  misc_feature (1)..(330): Homolog of NCBI NO: 15228427 NR Description: DRE binding protein (DREB2B) [Arabidopsis
  misc_feature (1)..(330): Homolog of NCBI NO: 15239107 NR Description: DRE binding protein (DREB2A) [Arabidopsis >gi|11358883|pir||T51833 transcription factor DREB2A, drought
  misc_feature (1)..(306): Homolog of NCBI NO: 8346773 NR Description: AP2-domain DNA-binding protein [Catharanthus
  misc_feature (13)..(216): Homolog of NCBI NO: 25992100 NR Description: dehydration responsive element binding protein
  misc_feature (11)..(187): Homolog of NCBI NO: 27960760 NR Description: dehydration-responsive AP2 domain transcriptional [Hordeum vulgare] >gi|30313900|gb|AAO38211.1| AP2 transcriptional
  misc_feature (13)..(187): Homolog of NCBI NO: 30313898 NR Description: AP2 transcriptional activator DRF1.1 [Hordeum
  misc_feature (13)..(188): Homolog of NCBI NO: 18405354 NR Description: AP2 domain transcription factor, putative (DRE2B) thaliana] >gi|20198013|gb|AAD25669.2| AP2 domain transcription
  misc_feature (7)..(187): Homolog of NCBI NO: 27960757 NR Description: AP2 domain protein [Hordeum vulgare]
  misc_feature (13)..(236): Homolog of NCBI NO: 38099059 NR Description: dehydration-responsive element binding protein 2
  misc_feature (13)..(188): Homolog of NCBI NO: 21536924 NR Description: AP2 domain transcription factor [Arabidopsis
MAVYEQTGTEQPKKRKSRARAGGLTVADRLKKWKEYNEIVEASAVKEGEKPKRKVPAKGSKKGCMKGKGGPDNSHCSFRGVRQRIWGKWVAEIREPKIGTRLWLGTFPTAEKAASAYDEAATAMYGSLARLNFPQSVGSEFTSTSSQSEVCTVENKAVVCGDVCVKHEDTDCESNPFSQILDVREESCGTRPDSCTVGHQDMNSSLNYDLLLEFEQQYWGQVLQEKEKPKQEEEEIQQQQQEQQQQQLQPDLLTVADYGWPWSNDIVNDQTSWDPNECFDINELLGDLNEPGPHQSQDQNHVNSGSYDLHPLHLEPHDGHEFNGLSSLDI

SEQ ID NO: 106396 - protein, 266 aa, Arabidopsis thaliana
  peptide (1)..(266): Ceres Seq. ID no. 13619474
  misc_feature (11)..(75): Pfam Name: AP2 domain Pfam Description: AP2 domain
  misc_feature (1)..(266): Homolog of NCBI NO: 15228427 NR Description: DRE binding protein (DREB2B) [Arabidopsis
  misc_feature (1)..(266): Homolog of NCBI NO: 15239107 NR Description: DRE binding protein (DREB2A) [Arabidopsis >gi|11358883|pir||T51833 transcription factor DREB2A, drought
  misc_feature (1)..(242): Homolog of NCBI NO: 8346773 NR Description: AP2-domain DNA-binding protein [Catharanthus
  misc_feature (1)..(152): Homolog of NCBI NO: 25992100 NR Description: dehydration responsive element binding protein
  misc_feature (1)..(123): Homolog of NCBI NO: 27960760 NR Description: dehydration-responsive AP2 domain transcriptional [Hordeum vulgare] >gi|30313900|gb|AAO38211.1| AP2 transcriptional
  misc_feature (1)..(123): Homolog of NCBI NO: 30313898 NR Description: AP2 transcriptional activator DRF1.1 [Hordeum
  misc_feature (1)..(124): Homolog of NCBI NO: 18405354 NR Description: AP2 domain transcription factor, putative (DRE2B) thaliana] >gi|20198013|gb|AAD25669.2| AP2 domain transcription
  misc_feature (1)..(123): Homolog of NCBI NO: 27960757 NR Description: AP2 domain protein [Hordeum vulgare]
  misc_feature (1)..(172): Homolog of NCBI NO: 38099059 NR Description: dehydration-responsive element binding protein 2
  misc_feature (1)..(124): Homolog of NCBI NO: 21536924 NR Description: AP2 domain transcription factor [Arabidopsis
MKGKGGPDNSHCSFRGVRQRIWGKWVAEIREPKIGTRLWLGTFPTAEKAASAYDEAATAMYGSLARLNFPQSVGSEFTSTSSQSEVCTVENKAVVCGDVCVKHEDTDCESNPFSQILDVREESCGTRPDSCTVGHQDMNSSLNYDLLLEFEQQYWGQVLQEKEKPKQEEEEIQQQQQEQQQQQLQPDLLTVADYGWPWSNDIVNDQTSWDPNECFDINELLGDLNEPGPHQSQDQNHVNSGSYDLHPLHLEPHDGHEFNGLSSLDI

SEQ ID NO: 106397 - protein, 207 aa, Arabidopsis thaliana
  peptide (1)..(207): Ceres Seq. ID no. 13619475
  misc_feature (1)..(207): Homolog of NCBI NO: 15228427 NR Description: DRE binding protein (DREB2B) [Arabidopsis
  misc_feature (1)..(207): Homolog of NCBI NO: 15239107 NR Description: DRE binding protein (DREB2A) [Arabidopsis >gi|11358883|pir||T51833 transcription factor DREB2A, drought
  misc_feature (1)..(183): Homolog of NCBI NO: 8346773 NR Description: AP2-domain DNA-binding protein [Catharanthus
  misc_feature (1)..(93): Homolog of NCBI NO: 25992100 NR Description: dehydration responsive element binding protein
  misc_feature (1)..(64): Homolog of NCBI NO: 27960760 NR Description: dehydration-responsive AP2 domain transcriptional [Hordeum vulgare] >gi|30313900|gb|AAO38211.1| AP2 transcriptional
  misc_feature (1)..(64): Homolog of NCBI NO: 30313898 NR Description: AP2 transcriptional activator DRF1.1 [Hordeum
  misc_feature (1)..(65): Homolog of NCBI NO: 18405354 NR Description: AP2 domain transcription factor, putative (DRE2B) thaliana] >gi|20198013|gb|AAD25669.2| AP2 domain transcription
  misc_feature (1)..(64): Homolog of NCBI NO: 27960757 NR Description: AP2 domain protein [Hordeum vulgare]
  misc_feature (1)..(113): Homolog of NCBI NO: 38099059 NR Description: dehydration-responsive element binding protein 2
  misc_feature (1)..(65): Homolog of NCBI NO: 21536924 NR Description: AP2 domain transcription factor [Arabidopsis
MYGSLARLNFPQSVGSEFTSTSSQSEVCTVENKAVVCGDVCVKHEDTDCESNPFSQILDVREESCGTRPDSCTVGHQDMNSSLNYDLLLEFEQQYWGQVLQEKEKPKQEEEEIQQQQQEQQQQQLQPDLLTVADYGWPWSNDIVNDQTSWDPNECFDINELLGDLNEPGPHQSQDQNHVNSGSYDLHPLHLEPHDGHEFNGLSSLDI

SEQ ID NO: 106398 - DNA, 1509 bp, Arabidopsis thaliana
  misc_feature (1)..(1509): Ceres Seq. ID no. 13619476
  misc_feature: MA Experiment ID: 20000184 Result: Down-regulated in Transcription
  misc_feature: MA Experiment 20000184 PARAMETER Experiment Name: At_Shoots__P Parameter: Age (day) Value: 7
  misc_feature: MA Experiment 20000184 PARAMETER Experiment Name: At_Shoots__P Parameter: Tissue Value: Shoots vs. Whole Plant
actacaccataaaaagagaaaggcgtaaaaaggaaaaagaaaaaaaaaggtaaacgttataataaaagaaaaaaaaaaatatgacaacggcgttgttttcaccgtctaaccgtagaaaacgccgtctcacacacttcttcttcaccgtactcgctttcatcttactcgccgccttcatctacggccacgatttcatctctttctctcgtcgatctcttcactctccgacgatcgtccaccaatccgcaatcgtcgttgtagttgacgaacctcctccgcctccaccaacatctcctcctccgccttctcctccaccaccgtctcctccaccaccatctcctccaccgccatctcctccgccacctgcttttgcagtaggtaaaacgccggaaggatgcgatgtcttcaaagggaattgggtcaaagactggtcaacgcgtccactttacagagaatccgagtgtccgtacattcagccgcagctcacttgccgcacgcatggccgtcccgatagtgattatcagtcatggagatggcgacctgattcctgctcacttccttcgtttaatgcgacggtgatgttggagagcttaagagggaagaagatgatgttcgttggagattcgttgaacagaggaatgtatgtttctctcatctgtcttcttcattcacaaatcccagagaactccaaatccatggatactttcggatcactcaccgtcttctctctcaaggattacaatgcaacgattgagttctattgggcaccgtttcttctagaatcgaattcagataacgcaacagttcatagagtatcagatcgaattgtgaggaaaggatcgatcaacaaacacggtaggcattggcgaggggctgatatagttgtgttcaacacatacttgtggtggaggactggcttcaaaatgaagatcttggaaggttctttcaaggatgagaagaagagaatcgttgagatggagagtgaagatgcttatagaatggcgttgaagactatggttaaatgggtgaagaagaatatggatccattgaagacgagggttttctttgctaccatgtctcctactcattacaagggcgaggattggggaggcgaacaaggaaaaaattgttacaatcaaacgacaccgatccaagacatgaaccattggccatcagactgcagcaaaaccttaatgaaagtgataggagaggaattagaccaaagagcagagtttccggtgacggtacttaacattacacaactctctggctatcggaaagacgcgcacacgtcaatctacaagaagcaatggagcccattgacgaaggagcagctagcaaatccggctagctactcagactgtatacattggtgcttgcctggtcttcaagatacttggaacgagcttttctttgccaagttattttatccatgattcttttctctaaattcaagatttttttagaactgtaattgtaaattatggttataatttttgttaattacgt

SEQ ID NO: 106399 - protein, 451 aa, Arabidopsis thaliana
  peptide (1)..(451): Ceres Seq. ID no. 13619477
  misc_feature (1)..(451): Homolog of NCBI NO: 15228429 NR Description: expressed protein [Arabidopsis thaliana] unknown protein [Arabidopsis thaliana] unknown protein [Arabidopsis thaliana]
  misc_feature (84)..(450): Homolog of NCBI NO: 28393743 NR Description: unknown protein [Arabidopsis thaliana]
  misc_feature (1)..(39): Homolog of NCBI NO: 28393743 NR Description: unknown protein [Arabidopsis thaliana]
  misc_feature (84)..(450): Homolog of NCBI NO: 15226647 NR Description: expressed protein [Arabidopsis thaliana]
  misc_feature (1)..(39): Homolog of NCBI NO: 15226647 NR Description: expressed protein [Arabidopsis thaliana]
  misc_feature (16)..(451): Homolog of NCBI NO: 28876013 NR Description: unknown protein [Oryza sativa (japonica
  misc_feature (95)..(450): Homolog of NCBI NO: 4588008 NR Description: hypothetical protein [Arabidopsis thaliana]
  misc_feature (1)..(39): Homolog of NCBI NO: 4588008 NR Description: hypothetical protein [Arabidopsis thaliana]
  misc_feature (91)..(451): Homolog of NCBI NO: 28876024 NR Description: unknown protein [Oryza sativa (japonica
  misc_feature (103)..(448): Homolog of NCBI NO: 15228789 NR Description: expressed protein [Arabidopsis thaliana]
MTTALFSPSNRRKRRLTHFFFTVLAFILLAAFIYGHDFISFSRRSLHSPTIVHQSAIVVVVDEPPPPPPTSPPPPSPPPPSPPPPSPPPPSPPPPAFAVGKTPEGCDVFKGNWVKDWSTRPLYRESECPYIQPQLTCRTHGRPDSDYQSWRWRPDSCSLPSFNATVMLESLRGKKMMFVGDSLNRGMYVSLICLLHSQIPENSKSMDTFGSLTVFSLKDYNATIEFYWAPFLLESNSDNATVHRVSDRIVRKGSINKHGRHWRGADIVVFNTYLWWRTGFKMKILEGSFKDEKKRIVEMESEDAYRMALKTMVKWVKKNMDPLKTRVFFATMSPTHYKGEDWGGEQGKNCYNQTTPIQDMNHWPSDCSKTLMKVIGEELDQRAEFPVTVLNITQLSGYRKDAHTSIYKKQWSPLTKEQLANPASYSDCIHWCLPGLQDTWNELFFAKLFYP

SEQ ID NO: 106400 - protein, 285 aa, Arabidopsis thaliana
  peptide (1)..(285): Ceres Seq. ID no. 13619478
  misc_feature (1)..(285): Homolog of NCBI NO: 15228429 NR Description: expressed protein [Arabidopsis thaliana] unknown protein [Arabidopsis thaliana] unknown protein [Arabidopsis thaliana]
  misc_feature (1)..(284): Homolog of NCBI NO: 28393743 NR Description: unknown protein [Arabidopsis thaliana]
  misc_feature (1)..(284): Homolog of NCBI NO: 15226647 NR Description: expressed protein [Arabidopsis thaliana]
  misc_feature (1)..(285): Homolog of NCBI NO: 28876013 NR Description: unknown protein [Oryza sativa (japonica
  misc_feature (1)..(284): Homolog of NCBI NO: 4588008 NR Description: hypothetical protein [Arabidopsis thaliana]
  misc_feature (1)..(285): Homolog of NCBI NO: 28876024 NR Description: unknown protein [Oryza sativa (japonica
  misc_feature (1)..(282): Homolog of NCBI NO: 15228789 NR Description: expressed protein [Arabidopsis thaliana]
  misc_feature (1)..(282): Homolog of NCBI NO: 26452343 NR Description: unknown protein [Arabidopsis thaliana]
  misc_feature (1)..(279): Homolog of NCBI NO: 18413698 NR Description: expressed protein [Arabidopsis thaliana] expressed protein [Arabidopsis thaliana] unknown protein [Arabidopsis thaliana]
  misc_feature (1)..(282): Homolog of NCBI NO: 18405283 NR Description: expressed protein [Arabidopsis thaliana] Unknown protein [Arabidopsis thaliana]
MLESLRGKKMMFVGDSLNRGMYVSLICLLHSQIPENSKSMDTFGSLTVFSLKDYNATIEFYWAPFLLESNSDNATVHRVSDRIVRKGSINKHGRHWRGADIVVFNTYLWWRTGFKMKILEGSFKDEKKRIVEMESEDAYRMALKTMVKWVKKNMDPLKTRVFFATMSPTHYKGEDWGGEQGKNCYNQTTPIQDMNHWPSDCSKTLMKVIGEELDQRAEFPVTVLNITQLSGYRKDAHTSIYKKQWSPLTKEQLANPASYSDCIHWCLPGLQDTWNELFFAKLFYP

SEQ ID NO: 106401 - protein, 276 aa, Arabidopsis thaliana
  peptide (1)..(276): Ceres Seq. ID no. 13619479
  misc_feature (1)..(276): Homolog of NCBI NO: 15228429 NR Description: expressed protein [Arabidopsis thaliana] unknown protein [Arabidopsis thaliana] unknown protein [Arabidopsis thaliana]
  misc_feature (1)..(275): Homolog of NCBI NO: 28393743 NR Description: unknown protein [Arabidopsis thaliana]
  misc_feature (1)..(275): Homolog of NCBI NO: 15226647 NR Description: expressed protein [Arabidopsis thaliana]
  misc_feature (1)..(276): Homolog of NCBI NO: 28876013 NR Description: unknown protein [Oryza sativa (japonica
  misc_feature (1)..(275): Homolog of NCBI NO: 4588008 NR Description: hypothetical protein [Arabidopsis thaliana]
  misc_feature (1)..(276): Homolog of NCBI NO: 28876024 NR Description: unknown protein [Oryza sativa (japonica
  misc_feature (1)..(273): Homolog of NCBI NO: 15228789 NR Description: expressed protein [Arabidopsis thaliana]
  misc_feature (1)..(273): Homolog of NCBI NO: 26452343 NR Description: unknown protein [Arabidopsis thaliana]
  misc_feature (1)..(270): Homolog of NCBI NO: 18413698 NR Description: expressed protein [Arabidopsis thaliana] expressed protein [Arabidopsis thaliana] unknown protein [Arabidopsis thaliana]
  misc_feature (1)..(273): Homolog of NCBI NO: 18405283 NR Description: expressed protein [Arabidopsis thaliana] Unknown protein [Arabidopsis thaliana]
MMFVGDSLNRGMYVSLICLLHSQIPENSKSMDTFGSLTVFSLKDYNATIEFYWAPFLLESNSDNATVHRVSDRIVRKGSINKHGRHWRGADIVVFNTYLWWRTGFKMKILEGSFKDEKKRIVEMESEDAYRMALKTMVKWVKKNMDPLKTRVFFATMSPTHYKGEDWGGEQGKNCYNQTTPIQDMNHWPSDCSKTLMKVIGEELDQRAEFPVTVLNITQLSGYRKDAHTSIYKKQWSPLTKEQLANPASYSDCIHWCLPGLQDTWNELFFAKLFYP

SEQ ID NO: 106402 - DNA, 1715 bp, Arabidopsis thaliana
  misc_feature (1)..(1715): Ceres Seq. ID no. 13619484
  misc_feature: MA Experiment ID: 20000185 Result: Up-regulated in Transcription
  misc_feature: MA Experiment 20000185 PARAMETER Experiment Name: At_Roots__P Parameter: Age (day) Value: 7 vs. 21
  misc_feature: MA Experiment 20000185 PARAMETER Experiment Name: At_Roots__P Parameter: Organism Value: A. thaliana
  misc_feature: MA Experiment 20000185 PARAMETER Experiment Name: At_Roots__P Parameter: Tissue Value: Roots vs. Whole Plant
  misc_feature: MA Experiment ID: 20000227 Result: Down-regulated in Transcription
  misc_feature: MA Experiment 20000227 PARAMETER Experiment Name: At_Root-Tips-vs-Tops_P Parameter: Tissue Value: Root Tips vs. Root Tops
  misc_feature: MA Experiment ID: 20000234 Result: Down-regulated in Transcription
  misc_feature: MA Experiment 20000234 PARAMETER Experiment Name: At_Siliques_P Parameter: Age (day) Value: 21
  misc_feature: MA Experiment 20000234 PARAMETER Experiment Name: At_Siliques_P Parameter: Organism Value: A. thaliana
  misc_feature: MA Experiment 20000234 PARAMETER Experiment Name: At_Siliques_P Parameter: Plant Line Value: WS
  misc_feature: MA Experiment 20000234 PARAMETER Experiment Name: At_Siliques_P Parameter: Tissue Value: Less Than 5mm Siliques vs. Whole Plant
  misc_feature: MA Experiment ID: 20000235 Result: Down-regulated in Transcription
  misc_feature: MA Experiment 20000235 PARAMETER Experiment Name: At_Siliques_P Parameter: Age (day) Value: 21
  misc_feature: MA Experiment 20000235 PARAMETER Experiment Name: At_Siliques_P Parameter: Organism Value: A. thaliana
  misc_feature: MA Experiment 20000235 PARAMETER Experiment Name: At_Siliques_P Parameter: Plant Line Value: WS
  misc_feature: MA Experiment 20000235 PARAMETER Experiment Name: At_Siliques_P Parameter: Tissue Value: 5-10mm Siliques vs. Whole Plant
  misc_feature: MA Experiment ID: 20000264 Result: Up-regulated in Transcription
  misc_feature: MA Experiment 20000264 PARAMETER Experiment Name: At_Open_Flower_P Parameter: Age (day) Value: 21
  misc_feature: MA Experiment 20000264 PARAMETER Experiment Name: At_Open_Flower_P Parameter: Plant Line Value: WS
  misc_feature: MA Experiment 20000264 PARAMETER Experiment Name: At_Open_Flower_P Parameter: Tissue Value: Open Flower vs. Whole Plant
  misc_feature: MA Experiment ID: 20000265 Result: Up-regulated in Transcription
  misc_feature: MA Experiment 20000265 PARAMETER Experiment Name: At_Open_Flower_P Parameter: Age (day) Value: 21
  misc_feature: MA Experiment 20000265 PARAMETER Experiment Name: At_Open_Flower_P Parameter: Plant Line Value: WS
  misc_feature: MA Experiment 20000265 PARAMETER Experiment Name: At_Open_Flower_P Parameter: Tissue Value: Closed Flower vs. Whole Plant
  misc_feature: MA Experiment ID: 20000267 Result: Up-regulated in Transcription
  misc_feature: MA Experiment 20000267 PARAMETER Experiment Name: At_Drought_P Parameter: Age (day) Value: 7
  misc_feature: MA Experiment 20000267 PARAMETER Experiment Name: At_Drought_P Parameter: Organism Value: A. thaliana
  misc_feature: MA Experiment 20000267 PARAMETER Experiment Name: At_Drought_P Parameter: Plant Line Value: WS
  misc_feature: MA Experiment 20000267 PARAMETER Experiment Name: At_Drought_P Parameter: Timepoint (hr) Value: 6
  misc_feature: MA Experiment 20000267 PARAMETER Experiment Name: At_Drought_P Parameter: Tissue Value: Whole Plant
  misc_feature: MA Experiment 20000267 PARAMETER Experiment Name: At_Drought_P Parameter: Treatment Value: Drought vs. No Drought
  misc_feature: MA Experiment ID: 20000286 Result: Up-regulated in Transcription
  misc_feature: MA Experiment 20000286 PARAMETER Experiment Name: At_Open_Flower_P Parameter: Age (day) Value: 21
  misc_feature: MA Experiment 20000286 PARAMETER Experiment Name: At_Open_Flower_P Parameter: Plant Line Value: WS
  misc_feature: MA Experiment 20000286 PARAMETER Experiment Name: At_Open_Flower_P Parameter: Tissue Value: Half Open vs. Whole Plant
  misc_feature: MA Experiment ID: 20000436 Result: Up-regulated in Transcription
  misc_feature: MA Experiment 20000436 PARAMETER Experiment Name: At_Drought_P Parameter: Age (day) Value: 7
  misc_feature: MA Experiment 20000436 PARAMETER Experiment Name: At_Drought_P Parameter: Organism Value: A. thaliana
  misc_feature: MA Experiment 20000436 PARAMETER Experiment Name: At_Drought_P Parameter: Plant Line Value: WS
  misc_feature: MA Experiment 20000436 PARAMETER Experiment Name: At_Drought_P Parameter: Timepoint (hr) Value: 12
  misc_feature: MA Experiment 20000436 PARAMETER Experiment Name: At_Drought_P Parameter: Tissue Value: Whole Plant
  misc_feature: MA Experiment 20000436 PARAMETER Experiment Name: At_Drought_P Parameter: Treatment Value: Drought vs. No Drought
  misc_feature: MA Experiment ID: 20000460 Result: Down-regulated in Transcription
  misc_feature: MA Experiment 20000460 PARAMETER Experiment Name: At_10percent_PEG_P Parameter: Age (day) Value: 12
  misc_feature: MA Experiment 20000460 PARAMETER Experiment Name: At_10percent_PEG_P Parameter: Organism Value: A. thaliana
  misc_feature: MA Experiment 20000460 PARAMETER Experiment Name: At_10percent_PEG_P Parameter: Plant Line Value: WS
  misc_feature: MA Experiment 20000460 PARAMETER Experiment Name: At_10percent_PEG_P Parameter: Timepoint (day) Value: 12
  misc_feature: MA Experiment 20000460 PARAMETER Experiment Name: At_10percent_PEG_P Parameter: Tissue Value: Whole Plant
  misc_feature: MA Experiment 20000460 PARAMETER Experiment Name: At_10percent_PEG_P Parameter: Treatment Value: 10percent PEG vs. No Treatment
  misc_feature: MA Experiment ID: 20000573 Result: Down-regulated in Transcription
  misc_feature: MA Experiment 20000573 PARAMETER Experiment Name: At_100uM_ABA_Mutants__P Parameter: Organism Value: A. thaliana
  misc_feature: MA Experiment 20000573 PARAMETER Experiment Name: At_100uM_ABA_Mutants__P Parameter: Plant Line Value: CS22 vs. Ler wt
  misc_feature: MA Experiment 20000573 PARAMETER Experiment Name: At_100uM_ABA_Mutants__P Parameter: Timepoint (hr) Value: N/A
  misc_feature: MA Experiment 20000573 PARAMETER Experiment Name: At_100uM_ABA_Mutants__P Parameter: Tissue Value: Whole Plant
  misc_feature: MA Experiment 20000573 PARAMETER Experiment Name: At_100uM_ABA_Mutants__P Parameter: Treatment Value: None
  misc_feature: MA Experiment ID: 20000794 Result: Up-regulated in Transcription
  misc_feature: MA Experiment 20000794 PARAMETER Experiment Name: At_Petals_P Parameter: Age (day) Value: 23-25 days
  misc_feature: MA Experiment 20000794 PARAMETER Experiment Name: At_Petals_P Parameter: Plant Line Value: WS
  misc_feature: MA Experiment 20000794 PARAMETER Experiment Name: At_Petals_P Parameter: Tissue Value: Petals vs. Whole plant
  misc_feature: MA Experiment ID: 20001556 Result: Up-regulated in Transcription
  misc_feature: MA Experiment 20001556 PARAMETER Experiment Name: At_Drought_Soil_Dry_P Parameter: Age (day) Value: 26
  misc_feature: MA Experiment 20001556 PARAMETER Experiment Name: At_Drought_Soil_Dry_P Parameter: Organism Value: A. thaliana
  misc_feature: MA Experiment 20001556 PARAMETER Experiment Name: At_Drought_Soil_Dry_P Parameter: Plant Line Value: WS
  misc_feature: MA Experiment 20001556 PARAMETER Experiment Name: At_Drought_Soil_Dry_P Parameter: Post Timepoint (hr) Value: None
  misc_feature: MA Experiment 20001556 PARAMETER Experiment Name: At_Drought_Soil_Dry_P Parameter: Post-Treatment Value: None
  misc_feature: MA Experiment 20001556 PARAMETER Experiment Name: At_Drought_Soil_Dry_P Parameter: Timepoint (day) Value: 12
  misc_feature: MA Experiment 20001556 PARAMETER Experiment Name: At_Drought_Soil_Dry_P Parameter: Treatment Value: Drought vs. No Drought
  misc_feature: MA Experiment ID: 20001558 Result: Up-regulated in Transcription
  misc_feature: MA Experiment 20001558 PARAMETER Experiment Name: At_Drought_Soil_Dry_P Parameter: Age (day) Value: 27
  misc_feature: MA Experiment 20001558 PARAMETER Experiment Name: At_Drought_Soil_Dry_P Parameter: Organism Value: A. thaliana
  misc_feature: MA Experiment 20001558 PARAMETER Experiment Name: At_Drought_Soil_Dry_P Parameter: Plant Line Value: WS
  misc_feature: MA Experiment 20001558 PARAMETER Experiment Name: At_Drought_Soil_Dry_P Parameter: Post Timepoint (hr) Value: 6
  misc_feature: MA Experiment 20001558 PARAMETER Experiment Name: At_Drought_Soil_Dry_P Parameter: Post-Treatment Value: Re-Water vs. No Drought
  misc_feature: MA Experiment 20001558 PARAMETER Experiment Name: At_Drought_Soil_Dry_P Parameter: Timepoint (day) Value: 13
  misc_feature: MA Experiment 20001558 PARAMETER Experiment Name: At_Drought_Soil_Dry_P Parameter: Treatment Value: Drought vs. No Drought
  misc_feature: MA Experiment ID: 20001904 Result: Up-regulated in Transcription
  misc_feature: MA Experiment 20001904 PARAMETER Experiment Name: At_Drought_Reproduction_P Parameter: Age (day) Value: 37
  misc_feature: MA Experiment 20001904 PARAMETER Experiment Name: At_Drought_Reproduction_P Parameter: Organism Value: A. thaliana
  misc_feature: MA Experiment 20001904 PARAMETER Experiment Name: At_Drought_Reproduction_P Parameter: Plant Line Value: WS
  misc_feature: MA Experiment 20001904 PARAMETER Experiment Name: At_Drought_Reproduction_P Parameter: Timepoint (day) Value: 7
  misc_feature: MA Experiment 20001904 PARAMETER Experiment Name: At_Drought_Reproduction_P Parameter: Tissue Value: Rosettes
  misc_feature: MA Experiment 20001904 PARAMETER Experiment Name: At_Drought_Reproduction_P Parameter: Treatment Value: Drought vs. No Drought
  misc_feature: MA Experiment ID: 20001905 Result: Up-regulated in Transcription
  misc_feature: MA Experiment 20001905 PARAMETER Experiment Name: At_Drought_Reproduction_P Parameter: Age (day) Value: 40
  misc_feature: MA Experiment 20001905 PARAMETER Experiment Name: At_Drought_Reproduction_P Parameter: Organism Value: A. thaliana
  misc_feature: MA Experiment 20001905 PARAMETER Experiment Name: At_Drought_Reproduction_P Parameter: Plant Line Value: WS
  misc_feature: MA Experiment 20001905 PARAMETER Experiment Name: At_Drought_Reproduction_P Parameter: Timepoint (day) Value: 10
  misc_feature: MA Experiment 20001905 PARAMETER Experiment Name: At_Drought_Reproduction_P Parameter: Tissue Value: Rosettes
  misc_feature: MA Experiment 20001905 PARAMETER Experiment Name: At_Drought_Reproduction_P Parameter: Treatment Value: Drought vs. No Drought
  misc_feature: MA Experiment ID: 20001911 Result: Up-regulated in Transcription
  misc_feature: MA Experiment 20001911 PARAMETER Experiment Name: At_Drought_Reproduction_P Parameter: Age (day) Value: 40
  misc_feature: MA Experiment 20001911 PARAMETER Experiment Name: At_Drought_Reproduction_P Parameter: Organism Value: A. thaliana
  misc_feature: MA Experiment 20001911 PARAMETER Experiment Name: At_Drought_Reproduction_P Parameter: Plant Line Value: WS
  misc_feature: MA Experiment 20001911 PARAMETER Experiment Name: At_Drought_Reproduction_P Parameter: Timepoint (day) Value: 10
  misc_feature: MA Experiment 20001911 PARAMETER Experiment Name: At_Drought_Reproduction_P Parameter: Tissue Value: Flowers
  misc_feature: MA Experiment 20001911 PARAMETER Experiment Name: At_Drought_Reproduction_P Parameter: Treatment Value: Drought vs. No Drought
aatcgagtcaaaataatattcgagcaaaaaacaaaagaaatggttatggagcaagctggaacgacatcgtattcggtcgtgtcagagtttgaaggaacaatactgaagaacgcagattcattctcttacttcatgctcgtagccttcgaagcagctggtctaattcgtttcgctatcttgttgtttctatggcccgtaatcacactccttgacgttttcagctacaaaaacgcagctctcaagctcaagatttttgtagccactgttggtctacgtgaaccggagatcgaatcagtggctagagccgttctgccaaaattctacatggacgacgtaagcatggacacgtggagggttttcagctcgtgtaagaagagggtcgtggtcacgagaatgcctcgagttatggtggagaggtttgctaaggagcatcttagagcagatgaggtcatcggtacggaactgattgtaaaccggttcggttttgtcaccggtttgattcgcgaaacggatgttgatcagtctgctttgaaccgtgtcgctaatttgtttgttggtcggaggcctcaactaggtcttggaaaaccggctttgaccgcctctacaaatttcttatcgttatgtgaggagcatattcatgcaccaatcccggagaactacaaccacggtgaccaacaacttcagctacgtccacttccggtgatatttcacgacggaagactagtgaagcggccaacgccggccaccgctctcatcatcctcctttggatcccatttggaatcattctcgccgtgatccggatctttcttggagccgtcctcccattgtgggccacaccttacgtctctcagatattcggtggccatatcatcgtcaaaggaaagcctcctcagccaccggcggctggaaaatccggcgtgctctttgtgtgtactcacagaaccctaatggaccctgtggtattatcttatgtcctcggacgtagcatcccagccgttacttactcaatctcgcgcttatcagagatcttatctcccattccaaccgtccgattgacaagaatccgagatgtggatgcggctaagatcaaacaacaactgtcaaaaggagatctagtggtttgtcctgagggaaccacttgtcgtgaaccgtttttgttaagattcagcgcgcttttcgctgagttaacggataggattgttccggttgcgatgaactacagagtcggattcttccacgcgactacagcgagaggctggaagggtttggacccaattttcttcttcatgaacccaagaccggtttacgagattacgttcttgaaccagcttcctatggaggcaacatgttcgtccgggaagagcccgcatgacgtggcgaactatgttcagagaatcttggcggctacgttagggtttgagtgcaccaacttcacaagaaaagataagtatagggttctcgctggaaacgatggaacggtgtcgtacttgtcgttgctagaccaattgaagaaggtggttagcactttcgagccttgtctccattgaaaatactagaagtatagatcatccgatgattttctctctgttttaatatattagatcagtagtttcaaattaaacctgtttgcagtttctttctttcgattttagttttgtttgtgataaaagtttgagatgatttttttatatggtcaagtgttgaattcttgttt

SEQ ID NO: 106403 - protein, 515 aa, Arabidopsis thaliana
  peptide (1)..(515): Ceres Seq. ID no. 13619485
  misc_feature (289)..(406): Pfam Name: Acyltransferase Pfam Description: Acyltransferase
  misc_feature (14)..(515): Homolog of NCBI NO: 15229747 NR Description: expressed protein [Arabidopsis thaliana]
  misc_feature (16)..(515): Homolog of NCBI NO: 15239924 NR Description: phospholipid/glycerol acyltransferase family thaliana] >gi|8978345|dbj|BAA98198.1|
  misc_feature (346)..(515): Homolog of NCBI NO: 22330983 NR Description: hypothetical protein [Arabidopsis thaliana]
  misc_feature (34)..(138): Homolog of NCBI NO: 22330983 NR Description: hypothetical protein [Arabidopsis thaliana]
  misc_feature (225)..(310): Homolog of NCBI NO: 22330983 NR Description: hypothetical protein [Arabidopsis thaliana]
  misc_feature (25)..(504): Homolog of NCBI NO: 38000002 NR Description: unknown protein [Oryza sativa (japonica
  misc_feature (17)..(494): Homolog of NCBI NO: 37534314 NR Description: hypothetical protein [Oryza sativa (japonica group)] >gi|31432061|gb|AAP53746.1| hypothetical protein [Oryza
  misc_feature (47)..(504): Homolog of NCBI NO: 29788867 NR Description: hypothetical protein [Oryza sativa (japonica
  misc_feature (7)..(494): Homolog of NCBI NO: 15224445 NR Description: phospholipid/glycerol acyltransferase family
  misc_feature (25)..(498): Homolog of NCBI NO: 15223437 NR Description: expressed protein [Arabidopsis thaliana]
NRVKIIFEQKTKEMVMEQAGTTSYSVVSEFEGTILKNADSFSYFMLVAFEAAGLIRFAILLFLWPVITLLDVFSYKNAALKLKIFVATVGLREPEIESVARAVLPKFYMDDVSMDTWRVFSSCKKRVVVTRMPRVMVERFAKEHLRADEVIGTELIVNRFGFVTGLIRETDVDQSALNRVANLFVGRRPQLGLGKPALTASTNFLSLCEEHIHAPIPENYNHGDQQLQLRPLPVIFHDGRLVKRPTPATALIILLWIPFGIILAVIRIFLGAVLPLWATPYVSQIFGGHIIVKGKPPQPPAAGKSGVLFVCTHRTLMDPVVLSYVLGRSIPAVTYSISRLSEILSPIPTVRLTRIRDVDAAKIKQQLSKGDLVVCPEGTTCREPFLLRFSALFAELTDRIVPVAMNYRVGFFHATTARGWKGLDPIFFFMNPRPVYEITFLNQLPMEATCSSGKSPHDVANYVQRILAATLGFECTNFTRKDKYRVLAGNDGTVSYLSLLDQLKKVVSTFEPCLH

SEQ ID NO: 106404 - protein, 502 aa, Arabidopsis thaliana
  peptide (1)..(502): Ceres Seq. ID no. 13619486
  misc_feature (276)..(393): Pfam Name: Acyltransferase Pfam Description: Acyltransferase
  misc_feature (1)..(502): Homolog of NCBI NO: 15229747 NR Description: expressed protein [Arabidopsis thaliana]
  misc_feature (3)..(502): Homolog of NCBI NO: 15239924 NR Description: phospholipid/glycerol acyltransferase family thaliana] >gi|8978345|dbj|BAA98198.1|
  misc_feature (333)..(502): Homolog of NCBI NO: 22330983 NR Description: hypothetical protein [Arabidopsis thaliana]
  misc_feature (21)..(125): Homolog of NCBI NO: 22330983 NR Description: hypothetical protein [Arabidopsis thaliana]
  misc_feature (212)..(297): Homolog of NCBI NO: 22330983 NR Description: hypothetical protein [Arabidopsis thaliana]
  misc_feature (12)..(491): Homolog of NCBI NO: 38000002 NR Description: unknown protein [Oryza sativa (japonica
  misc_feature (4)..(481): Homolog of NCBI NO: 37534314 NR Description: hypothetical protein [Oryza sativa (japonica group)] >gi|31432061|gb|AAP53746.1| hypothetical protein [Oryza
  misc_feature (34)..(491): Homolog of NCBI NO: 29788867 NR Description: hypothetical protein [Oryza sativa (japonica
  misc_feature (1)..(481): Homolog of NCBI NO: 15224445 NR Description: phospholipid/glycerol acyltransferase family
  misc_feature (12)..(485): Homolog of NCBI NO: 15223437 NR Description: expressed protein [Arabidopsis thaliana]
MVMEQAGTTSYSVVSEFEGTILKNADSFSYFMLVAFEAAGLIRFAILLFLWPVITLLDVFSYKNAALKLKIFVATVGLREPEIESVARAVLPKFYMDDVSMDTWRVFSSCKKRVVVTRMPRVMVERFAKEHLRADEVIGTELIVNRFGFVTGLIRETDVDQSALNRVANLFVGRRPQLGLGKPALTASTNFLSLCEEHIHAPIPENYNHGDQQLQLRPLPVIFHDGRLVKRPTPATALIILLWIPFGIILAVIRIFLGAVLPLWATPYVSQIFGGHIIVKGKPPQPPAAGKSGVLFVCTHRTLMDPVVLSYVLGRSIPAVTYSISRLSEILSPIPTVRLTRIRDVDAAKIKQQLSKGDLVVCPEGTTCREPFLLRFSALFAELTDRIVPVAMNYRVGFFHATTARGWKGLDPIFFFMNPRPVYEITFLNQLPMEATCSSGKSPHDVANYVQRILAATLGFECTNFTRKDKYRVLAGNDGTVSYLSLLDQLKKVVSTFEPCLH

SEQ ID NO: 106405 - protein, 500 aa, Arabidopsis thaliana
  peptide (1)..(500): Ceres Seq. ID no. 13619487
  misc_feature (274)..(391): Pfam Name: Acyltransferase Pfam Description: Acyltransferase
  misc_feature (1)..(500): Homolog of NCBI NO: 15229747 NR Description: expressed protein [Arabidopsis thaliana]
  misc_feature (1)..(500): Homolog of NCBI NO: 15239924 NR Description: phospholipid/glycerol acyltransferase family thaliana] >gi|8978345|dbj|BAA98198.1|
  misc_feature (331)..(500): Homolog of NCBI NO: 22330983 NR Description: hypothetical protein [Arabidopsis thaliana]
  misc_feature (19)..(123): Homolog of NCBI NO: 22330983 NR Description: hypothetical protein [Arabidopsis thaliana]
  misc_feature (210)..(295): Homolog of NCBI NO: 22330983 NR Description: hypothetical protein [Arabidopsis thaliana]
  misc_feature (10)..(489): Homolog of NCBI NO: 38000002 NR Description: unknown protein [Oryza sativa (japonica
  misc_feature (2)..(479): Homolog of NCBI NO: 37534314 NR Description: hypothetical protein [Oryza sativa (japonica group)] >gi|31432061|gb|AAP53746.1| hypothetical protein [Oryza
  misc_feature (32)..(489): Homolog of NCBI NO: 29788867 NR Description: hypothetical protein [Oryza sativa (japonica
  misc_feature (1)..(479): Homolog of NCBI NO: 15224445 NR Description: phospholipid/glycerol acyltransferase family
  misc_feature (10)..(483): Homolog of NCBI NO: 15223437 NR Description: expressed protein [Arabidopsis thaliana]
MEQAGTTSYSVVSEFEGTILKNADSFSYFMLVAFEAAGLIRFAILLFLWPVITLLDVFSYKNAALKLKIFVATVGLREPEIESVARAVLPKFYMDDVSMDTWRVFSSCKKRVVVTRMPRVMVERFAKEHLRADEVIGTELIVNRFGFVTGLIRETDVDQSALNRVANLFVGRRPQLGLGKPALTASTNFLSLCEEHIHAPIPENYNHGDQQLQLRPLPVIFHDGRLVKRPTPATALIILLWIPFGIILAVIRIFLGAVLPLWATPYVSQIFGGHIIVKGKPPQPPAAGKSGVLFVCTHRTLMDPVVLSYVLGRSIPAVTYSISRLSEILSPIPTVRLTRIRDVDAAKIKQQLSKGDLVVCPEGTTCREPFLLRFSALFAELTDRIVPVAMNYRVGFFHATTARGWKGLDPIFFFMNPRPVYEITFLNQLPMEATCSSGKSPHDVANYVQRILAATLGFECTNFTRKDKYRVLAGNDGTVSYLSLLDQLKKVVSTFEPCLH

SEQ ID NO: 106406 - DNA, 1517 bp, Arabidopsis thaliana
  misc_feature (1)..(1517): Ceres Seq. ID no. 13619514
  misc_feature: MA Experiment ID: 20000030 Result: Down-regulated in Transcription
  misc_feature: MA Experiment 20000030 PARAMETER Experiment Name: At_CS6630_Roots_cDNA_P Parameter: Plant Line Value: CS6630 vs. WS
  misc_feature: MA Experiment 20000030 PARAMETER Experiment Name: At_CS6630_Roots_cDNA_P Parameter: Tissue Value: Roots
  misc_feature: MA Experiment ID: 20000111 Result: Down-regulated in Transcription
  misc_feature: MA Experiment 20000111 PARAMETER Experiment Name: At_42deg_Heat_cDNA_P Parameter: Temperature (deg C) Value: 42 vs. 22
  misc_feature: MA Experiment 20000111 PARAMETER Experiment Name: At_42deg_Heat_cDNA_P Parameter: Timepoint (hr) Value: 6
  misc_feature: MA Experiment 20000111 PARAMETER Experiment Name: At_42deg_Heat_cDNA_P Parameter: Tissue Value: Aerial
  misc_feature: MA Experiment ID: 20000113 Result: Down-regulated in Transcription
  misc_feature: MA Experiment 20000113 PARAMETER Experiment Name: At_42deg_Heat_cDNA_P Parameter: Temperature (deg C) Value: 42 vs. 22
  misc_feature: MA Experiment 20000113 PARAMETER Experiment Name: At_42deg_Heat_cDNA_P Parameter: Timepoint (hr) Value: 8
  misc_feature: MA Experiment 20000113 PARAMETER Experiment Name: At_42deg_Heat_cDNA_P Parameter: Tissue Value: Aerial
  misc_feature: MA Experiment ID: 20000171 Result: Down-regulated in Transcription
  misc_feature: MA Experiment 20000171 PARAMETER Experiment Name: At_42deg_Heat_P Parameter: Age (day) Value: 14
  misc_feature: MA Experiment 20000171 PARAMETER Experiment Name: At_42deg_Heat_P Parameter: Organism Value: A. thaliana
  misc_feature: MA Experiment 20000171 PARAMETER Experiment Name: At_42deg_Heat_P Parameter: Plant Line Value: WS
  misc_feature: MA Experiment 20000171 PARAMETER Experiment Name: At_42deg_Heat_P Parameter: Temperature (deg C) Value: 42 vs. 22
  misc_feature: MA Experiment 20000171 PARAMETER Experiment Name: At_42deg_Heat_P Parameter: Timepoint (hr) Value: 1
  misc_feature: MA Experiment 20000171 PARAMETER Experiment Name: At_42deg_Heat_P Parameter: Tissue Value: Aerial
  misc_feature: MA Experiment ID: 20000173 Result: Down-regulated in Transcription
  misc_feature: MA Experiment 20000173 PARAMETER Experiment Name: At_42deg_Heat_P Parameter: Age (day) Value: 14
  misc_feature: MA Experiment 20000173 PARAMETER Experiment Name: At_42deg_Heat_P Parameter: Organism Value: A. thaliana
  misc_feature: MA Experiment 20000173 PARAMETER Experiment Name: At_42deg_Heat_P Parameter: Plant Line Value: WS
  misc_feature: MA Experiment 20000173 PARAMETER Experiment Name: At_42deg_Heat_P Parameter: Temperature (deg C) Value: 42 vs. 22
  misc_feature: MA Experiment 20000173 PARAMETER Experiment Name: At_42deg_Heat_P Parameter: Timepoint (hr) Value: 6
  misc_feature: MA Experiment 20000173 PARAMETER Experiment Name: At_42deg_Heat_P Parameter: Tissue Value: Aerial
  misc_feature: MA Experiment ID: 20000224 Result: Down-regulated in Transcription
atcagaaaccttcttaagtttggtctgaaaatcagatcgagatgcgttcgttaaagttactcctttgttggatctcgtttcttacgttatcaatctcaatctctgcatcgtcagatgatcaattcaccctcgacggaacagttttagaactcaccgattcgaatttcgactcggcgatttcaactttcgattgcatctttgttgatttctatgctccttggtgtggtcactgcaagcgtctcaatcccgagttagacgcagctgctccaattcttgctaaattgaagcagcctattgtgattgcaaagctgaatgctgataagtattctcgtctcgctcggaagattgagattgatgcatttccgactctcatgctttataaccatggagttccaatggagtactatggaccaaggaaagcagatttgcttgtgcgttacttgaagaagtttgttgctccagatgttgcggttcttgagtcagactcaactgtcaaggagtttgttgaagatgctgggacattcttccctgtgtttatcgggtttggtttgaacgaatcgataatatcaggattaggtcggaagtataagaagaaggcatggtttgctgtttcaaaggaagtttcagaggatactatggtttcttatgattttgataaggctcctgcattagttgccaatcatccaacttacaatgagcatagcgtgttttacgggccattcgaagatggattcttggaggaatttgtgaaacagagttttcttcctttgattctacctattaaccatgacacattgaagttgttgaaggacgatgagagaaagattgtcttgacgatcgtggaagatgaaacacacgaaagcttggagaaactatacaaagcattgagagcagctgctcatgcgaaccgcgacctcgtttttggctacgtcggtgtgaagcagtttgaagagtttgttgactcgtttcatgtagacaagaagacaaatctgcctaagattgttgtgtgggatggagatgaagagtatgatcaggtgacgggtatagagaccataacccaagaggaagatcatttgacccaagtgtctcggtttctagagggctatagagaaggaagaacagagaagaagaaaatcaacggaccatcgttcatgggatttatcaactcaatgattgggattaggtcagtgtacatccttgtgttcttggttgcggtcattatgatgctacggagcctcggtcaagttgaggagcctactggagtccggaccgccacagcagtccgtgaaagagttgatcaggccactactgtccctgaagatgaaagcagtgagcataagcctagtgacaaaaaagaggactagttttgttacacttgaatgtggtatgttttttttcttcttttatacttgaagctaacttatatagttcatgcttatttatcttctttatggttagtctttttgggttttaaacggatggttgttccattttatttatgaatcattttggctctc

SEQ ID NO: 106407 - protein, 440 aa, Arabidopsis thaliana; identical to SEQ ID NO: 29024
  peptide (1)..(440): Ceres Seq. ID no. 13619515
  misc_feature (1)..(440): Homolog of NCBI NO: 18399786 NR Description: protein disulfide isomerase family [Arabidopsis >gi|14423498|gb|AAK62431.1|AF386986_1 Unknown protein
  misc_feature (1)..(429): Homolog of NCBI NO: 8778373 NR Description: F15O4.20 [Arabidopsis thaliana]
  misc_feature (4)..(405): Homolog of NCBI NO: 38344940 NR Description: OSJNBa0084A10.16 [Oryza sativa (japonica
  misc_feature (12)..(368): Homolog of NCBI NO: 30687521 NR Description: protein disulfide isomerase, putative
  misc_feature (12)..(368): Homolog of NCBI NO: 15219086 NR Description: protein disulfide isomerase, putative thaliana] >gi|11134225|sp|Q9XI01|PDI1_ARATH Probable protein isomerase 1 precursor (PDI) >gi|25292645|pir||B86351 protein
  misc_feature (4)..(304): Homolog of NCBI NO: 27819775 NR Description: RH09122p [Drosophila melanogaster]
  misc_feature (11)..(368): Homolog of NCBI NO: 11133775 NR Description: Protein disulfide isomerase precursor (PDI)
  misc_feature (1)..(354): Homolog of NCBI NO: 31239469 NR Description: ENSANGP00000011666 [Anopheles gambiae]
  misc_feature (4)..(304): Homolog of NCBI NO: 17647799 NR Description: Protein disulfide isomerase CG6988-PA [Drosophila >gi|1709616|sp|P54399|PDI_DROME Protein disulfide isomerase
  misc_feature (21)..(359): Homolog of NCBI NO: 12056117 NR Description: protein disulfide isomerase [Triticum turgidum durum] >gi|12056121|emb|CAC21231.1| protein disulfide isomerase

SEQ ID NO: 106408 - protein, 330 aa, Arabidopsis thaliana; identical to SEQ ID NO: 29025
  peptide (1)..(330): Ceres Seq. ID no. 13619516
  misc_feature (1)..(330): Homolog of NCBI NO: 18399786 NR Description: protein disulfide isomerase family [Arabidopsis >gi|14423498|gb|AAK62431.1|AF386986_1 Unknown protein
  misc_feature (1)..(319): Homolog of NCBI NO: 8778373 NR Description: F15O4.20 [Arabidopsis thaliana]
  misc_feature (1)..(295): Homolog of NCBI NO: 38344940 NR Description: OSJNBa0084A10.16 [Oryza sativa (japonica
  misc_feature (1)..(258): Homolog of NCBI NO: 30687521 NR Description: protein disulfide isomerase, putative
  misc_feature (1)..(258): Homolog of NCBI NO: 15219086 NR Description: protein disulfide isomerase, putative thaliana] >gi|11134225|sp|Q9XI01|PDI1_ARATH Probable protein isomerase 1 precursor (PDI) >gi|25292645|pir||B86351 protein
  misc_feature (1)..(194): Homolog of NCBI NO: 27819775 NR Description: RH09122p [Drosophila melanogaster]
  misc_feature (1)..(258): Homolog of NCBI NO: 11133775 NR Description: Protein disulfide isomerase precursor (PDI)
  misc_feature (1)..(244): Homolog of NCBI NO: 31239469 NR Description: ENSANGP00000011666 [Anopheles gambiae]
  misc_feature (1)..(194): Homolog of NCBI NO: 17647799 NR Description: Protein disulfide isomerase CG6988-PA [Drosophila >gi|1709616|sp|P54399|PDI_DROME Protein disulfide isomerase
  misc_feature (1)..(249): Homolog of NCBI NO: 12056117 NR Description: protein disulfide isomerase [Triticum turgidum durum] >gi|12056121|emb|CAC21231.1| protein disulfide isomerase

SEQ ID NO: 106409 - protein, 322 aa, Arabidopsis thaliana
  peptide (1)..(322): Ceres Seq. ID no. 13619517
  misc_feature (1)..(322): Homolog of NCBI NO: 18399786 NR Description: protein disulfide isomerase family [Arabidopsis >gi|14423498|gb|AAK62431.1|AF386986_1 Unknown protein
  misc_feature (1)..(311): Homolog of NCBI NO: 8778373 NR Description: F15O4.20 [Arabidopsis thaliana]
  misc_feature (1)..(287): Homolog of NCBI NO: 38344940 NR Description: OSJNBa0084A10.16 [Oryza sativa (japonica
  misc_feature (1)..(250): Homolog of NCBI NO: 30687521 NR Description: protein disulfide isomerase, putative
  misc_feature (1)..(250): Homolog of NCBI NO: 15219086 NR Description: protein disulfide isomerase, putative thaliana] >gi|11134225|sp|Q9XI01|PDI1_ARATH Probable protein isomerase 1 precursor (PDI) >gi|25292645|pir||B86351 protein
  misc_feature (1)..(186): Homolog of NCBI NO: 27819775 NR Description: RH09122p [Drosophila melanogaster]
  misc_feature (1)..(250): Homolog of NCBI NO: 11133775 NR Description: Protein disulfide isomerase precursor (PDI)
  misc_feature (1)..(236): Homolog of NCBI NO: 31239469 NR Description: ENSANGP00000011666 [Anopheles gambiae]
  misc_feature (1)..(186): Homolog of NCBI NO: 17647799 NR Description: Protein disulfide isomerase CG6988-PA [Drosophila >gi|1709616|sp|P54399|PDI_DROME Protein disulfide isomerase
  misc_feature (1)..(241): Homolog of NCBI NO: 12056117 NR Description: protein disulfide isomerase [Triticum turgidum durum] >gi|12056121|emb|CAC21231.1| protein disulfide isomerase
MEYYGPRKADLLVRYLKKFVAPDVAVLESDSTVKEFVEDAGTFFPVFIGFGLNESIISGLGRKYKKKAWFAVSKEVSEDTMVSYDFDKAPALVANHPTYNEHSVFYGPFEDGFLEEFVKQSFLPLILPINHDTLKLLKDDERKIVLTIVEDETHESLEKLYKALRAAAHANRDLVFGYVGVKQFEEFVDSFHVDKKTNLPKIVVWDGDEEYDQVTGIETITQEEDHLTQVSRFLEGYREGRTEKKKINGPSFMGFINSMIGIRSVYILVFLVAVIMMLRSLGQVEEPTGVRTATAVRERVDQATTVPEDESSEHKPSDKKED

SEQ ID NO: 106410 - DNA, 851 bp, Arabidopsis thaliana
  misc_feature (1)..(851): Ceres Seq. ID no. 13619518
  misc_feature: MA Experiment ID: 108434 Result: Up-regulated in Transcription
  misc_feature: MA Experiment 108434 PARAMETER Experiment Name: At_Root_Tips_cDNA_P Parameter: Tissue Value: Root Tips
  misc_feature: MA Experiment ID: 108461 Result: Up-regulated in Transcription
  misc_feature: MA Experiment 108461 PARAMETER Experiment Name: At_Germinating_Seeds_cDNA_P Parameter: Age (day) Value: 1 vs. 0
  misc_feature: MA Experiment 108461 PARAMETER Experiment Name: At_Germinating_Seeds_cDNA_P Parameter: Tissue Value: Germinating Seeds
  misc_feature: MA Experiment ID: 108488 Result: Up-regulated in Transcription
  misc_feature: MA Experiment ID: 108595 Result: Down-regulated in Transcription
  misc_feature: MA Experiment 108595 PARAMETER Experiment Name: At_Ler-pi_Ovule_cDNA_P Parameter: Plant Line Value: null
  misc_feature: MA Experiment ID: 20000069 Result: Down-regulated in Transcription
  misc_feature: MA Experiment 20000069 PARAMETER Experiment Name: At_100uM_ABA_Mutants_cDNA_P Parameter: Plant Line Value: CS23
  misc_feature: MA Experiment 20000069 PARAMETER Experiment Name: At_100uM_ABA_Mutants_cDNA_P Parameter: Timepoint (hr) Value: 6
  misc_feature: MA Experiment 20000069 PARAMETER Experiment Name: At_100uM_ABA_Mutants_cDNA_P Parameter: Tissue Value: Aerial
  misc_feature: MA Experiment 20000069 PARAMETER Experiment Name: At_100uM_ABA_Mutants_cDNA_P Parameter: Treatment Value: 100uM ABA vs. No Treatment
  misc_feature: MA Experiment ID: 20000070 Result: Down-regulated in Transcription
  misc_feature: MA Experiment 20000070 PARAMETER Experiment Name: At_100uM_ABA_Mutants_cDNA_P Parameter: Plant Line Value: CS24
  misc_feature: MA Experiment 20000070 PARAMETER Experiment Name: At_100uM_ABA_Mutants_cDNA_P Parameter: Timepoint (hr) Value: 6
  misc_feature: MA Experiment 20000070 PARAMETER Experiment Name: At_100uM_ABA_Mutants_cDNA_P Parameter: Tissue Value: Aerial
  misc_feature: MA Experiment 20000070 PARAMETER Experiment Name: At_100uM_ABA_Mutants_cDNA_P Parameter: Treatment Value: 100uM ABA vs. No Treatment
  misc_feature: MA Experiment ID: 20000071 Result: Down-regulated in Transcription
  misc_feature: MA Experiment 20000071 PARAMETER Experiment Name: At_100uM_ABA_Mutants_cDNA_P Parameter: Plant Line Value: CS8104
  misc_feature: MA Experiment 20000071 PARAMETER Experiment Name: At_100uM_ABA_Mutants_cDNA_P Parameter: Timepoint (hr) Value: 6
  misc_feature: MA Experiment 20000071 PARAMETER Experiment Name: At_100uM_ABA_Mutants_cDNA_P Parameter: Tissue Value: Aerial
  misc_feature: MA Experiment 20000071 PARAMETER Experiment Name: At_100uM_ABA_Mutants_cDNA_P Parameter: Treatment Value: 100uM ABA vs. No Treatment
  misc_feature: MA Experiment ID: 20000072 Result: Down-regulated in Transcription
  misc_feature: MA Experiment 20000072 PARAMETER Experiment Name: At_100uM_ABA_Mutants_cDNA_P Parameter: Plant Line Value: CS8105
  misc_feature: MA Experiment 20000072 PARAMETER Experiment Name: At_100uM_ABA_Mutants_cDNA_P Parameter: Timepoint (hr) Value: 6
  misc_feature: MA Experiment 20000072 PARAMETER Experiment Name: At_100uM_ABA_Mutants_cDNA_P Parameter: Tissue Value: Aerial
  misc_feature: MA Experiment 20000072 PARAMETER Experiment Name: At_100uM_ABA_Mutants_cDNA_P Parameter: Treatment Value: 100uM ABA vs. No Treatment
  misc_feature: MA Experiment ID: 20000086 Result: Down-regulated in Transcription
  misc_feature: MA Experiment 20000086 PARAMETER Experiment Name: At_100uM_ABA_Mutants_cDNA_P Parameter: Plant Line Value: CS22
  misc_feature: MA Experiment 20000086 PARAMETER Experiment Name: At_100uM_ABA_Mutants_cDNA_P Parameter: Timepoint (hr) Value: 6
  misc_feature: MA Experiment 20000086 PARAMETER Experiment Name: At_100uM_ABA_Mutants_cDNA_P Parameter: Tissue Value: Aerial
  misc_feature: MA Experiment 20000086 PARAMETER Experiment Name: At_100uM_ABA_Mutants_cDNA_P Parameter: Treatment Value: 100uM ABA vs. No Treatment
  misc_feature: MA Experiment ID: 20000087 Result: Down-regulated in Transcription
  misc_feature: MA Experiment 20000087 PARAMETER Experiment Name: At_100uM_ABA_Mutants_cDNA_P Parameter: Plant Line Value: WS
  misc_feature: MA Experiment 20000087 PARAMETER Experiment Name: At_100uM_ABA_Mutants_cDNA_P Parameter: Timepoint (hr) Value: 6
  misc_feature: MA Experiment 20000087 PARAMETER Experiment Name: At_100uM_ABA_Mutants_cDNA_P Parameter: Tissue Value: Aerial
  misc_feature: MA Experiment 20000087 PARAMETER Experiment Name: At_100uM_ABA_Mutants_cDNA_P Parameter: Treatment Value: 100uM ABA vs. No Treatment
  misc_feature: MA Experiment ID: 20000117 Result: Down-regulated in Transcription
  misc_feature: MA Experiment 20000117 PARAMETER Experiment Name: At_100uM_ABA_Mutants_cDNA_P Parameter: Plant Line Value: Columbia
  misc_feature: MA Experiment 20000117 PARAMETER Experiment Name: At_100uM_ABA_Mutants_cDNA_P Parameter: Timepoint (hr) Value: 6
  misc_feature: MA Experiment 20000117 PARAMETER Experiment Name: At_100uM_ABA_Mutants_cDNA_P Parameter: Tissue Value: Aerial
  misc_feature: MA Experiment 20000117 PARAMETER Experiment Name: At_100uM_ABA_Mutants_cDNA_P Parameter: Treatment Value: 100uM ABA vs. No Treatment
  misc_feature: MA Experiment ID: 20000185 Result: Down-regulated in Transcription
  misc_feature: MA Experiment 20000185 PARAMETER Experiment Name: At_Roots__P Parameter: Age (day) Value: 7 vs. 21
  misc_feature: MA Experiment 20000185 PARAMETER Experiment Name: At_Roots__P Parameter: Organism Value: A. thaliana
  misc_feature: MA Experiment 20000185 PARAMETER Experiment Name: At_Roots__P Parameter: Tissue Value: Roots vs. Whole Plant
  misc_feature: MA Experiment ID: 20000437 Result: Down-regulated in Transcription
  misc_feature: MA Experiment 20000437 PARAMETER Experiment Name: At_Drought_P Parameter: Age (day) Value: 8
  misc_feature: MA Experiment 20000437 PARAMETER Experiment Name: At_Drought_P Parameter: Organism Value: A. thaliana
  misc_feature: MA Experiment 20000437 PARAMETER Experiment Name: At_Drought_P Parameter: Plant Line Value: WS
  misc_feature: MA Experiment 20000437 PARAMETER Experiment Name: At_Drought_P Parameter: Timepoint (hr) Value: 24
  misc_feature: MA Experiment 20000437 PARAMETER Experiment Name: At_Drought_P Parameter: Tissue Value: Whole Plant
  misc_feature: MA Experiment 20000437 PARAMETER Experiment Name: At_Drought_P Parameter: Treatment Value: Drought vs. No Drought
  misc_feature: MA Experiment ID: 20000439 Result: Down-regulated in Transcription
  misc_feature: MA Experiment 20000439 PARAMETER Experiment Name: At_Roots__P Parameter: Age (day) Value: 14 vs. 21
  misc_feature: MA Experiment 20000439 PARAMETER Experiment Name: At_Roots__P Parameter: Organism Value: A. thaliana
  misc_feature: MA Experiment 20000439 PARAMETER Experiment Name: At_Roots__P Parameter: Tissue Value: Roots vs. Whole Plant
  misc_feature: MA Experiment ID: 20000794 Result: Down-regulated in Transcription
  misc_feature: MA Experiment 20000794 PARAMETER Experiment Name: At_Petals_P Parameter: Age (day) Value: 23-25 days
  misc_feature: MA Experiment 20000794 PARAMETER Experiment Name: At_Petals_P Parameter: Plant Line Value: WS
  misc_feature: MA Experiment 20000794 PARAMETER Experiment Name: At_Petals_P Parameter: Tissue Value: Petals vs. Whole plant
  misc_feature: MA Experiment ID: 20001450 Result: Down-regulated in Transcription
  misc_feature: MA Experiment 20001450 PARAMETER Experiment Name: At_Far-red-induction_P Parameter: Age (day) Value: 7
  misc_feature: MA Experiment 20001450 PARAMETER Experiment Name: At_Far-red-induction_P Parameter: Light Value: Far-red vs. White
  misc_feature: MA Experiment 20001450 PARAMETER Experiment Name: At_Far-red-induction_P Parameter: Organism Value: A. thaliana
  misc_feature: MA Experiment 20001450 PARAMETER Experiment Name: At_Far-red-induction_P Parameter: Plant Line Value: Columbia
  misc_feature: MA Experiment 20001450 PARAMETER Experiment Name: At_Far-red-induction_P Parameter: Timepoint (hr) Value: 8
  misc_feature: MA Experiment 20001450 PARAMETER Experiment Name: At_Far-red-induction_P Parameter: Tissue Value: Whole Plant
  misc_feature: MA Experiment ID: 20001757 Result: Up-regulated in Transcription
  misc_feature: MA Experiment 20001757 PARAMETER Experiment Name: At_50mM_NH4NO3_L-to-H_P Parameter: Timepoint (hr) Value: 6
  misc_feature: MA Experiment 20001757 PARAMETER Experiment Name: At_50mM_NH4NO3_L-to-H_P Parameter: Tissue Value: Leaf
  misc_feature: MA Experiment 20001757 PARAMETER Experiment Name: At_50mM_NH4NO3_L-to-H_P Parameter: Treatment Value: 50mM NH4NO3 vs 100mM Mannitol
  misc_feature: MA Experiment ID: 20001905 Result: Down-regulated in Transcription
  misc_feature: MA Experiment 20001905 PARAMETER Experiment Name: At_Drought_Reproduction_P Parameter: Age (day) Value: 40
  misc_feature: MA Experiment 20001905 PARAMETER Experiment Name: At_Drought_Reproduction_P Parameter: Organism Value: A. thaliana
  misc_feature: MA Experiment 20001905 PARAMETER Experiment Name: At_Drought_Reproduction_P Parameter: Plant Line Value: WS
  misc_feature: MA Experiment 20001905 PARAMETER Experiment Name: At_Drought_Reproduction_P Parameter: Timepoint (day) Value: 10
  misc_feature: MA Experiment 20001905 PARAMETER Experiment Name: At_Drought_Reproduction_P Parameter: Tissue Value: Rosettes
  misc_feature: MA Experiment 20001905 PARAMETER Experiment Name: At_Drought_Reproduction_P Parameter: Treatment Value: Drought vs. No Drought
  misc_feature: MA Experiment ID: 20001911 Result: Down-regulated in Transcription
  misc_feature: MA Experiment 20001911 PARAMETER Experiment Name: At_Drought_Reproduction_P Parameter: Age (day) Value: 40
  misc_feature: MA Experiment 20001911 PARAMETER Experiment Name: At_Drought_Reproduction_P Parameter: Organism Value: A. thaliana
  misc_feature: MA Experiment 20001911 PARAMETER Experiment Name: At_Drought_Reproduction_P Parameter: Plant Line Value: WS
  misc_feature: MA Experiment 20001911 PARAMETER Experiment Name: At_Drought_Reproduction_P Parameter: Timepoint (day) Value: 10
  misc_feature: MA Experiment 20001911 PARAMETER Experiment Name: At_Drought_Reproduction_P Parameter: Tissue Value: Flowers
  misc_feature: MA Experiment 20001911 PARAMETER Experiment Name: At_Drought_Reproduction_P Parameter: Treatment Value: Drought vs. No Drought
tccaaagtctcgagcttagagctctctctcagtcgaaaacaatggcgtcttcttcagcgacgctctctctctgctctactttctctgctcattgcaatgtcaattctcgccgttctagcactatcctctgttctctctctaaaccttcgcttaatttggctaaacctctgactggatttctttctccttccactgcgtcgacgtctcgaaccgcattcaccgtcgctccgaaattcgcggaatcagtcgtcgaagctgaaccggagactaccgatatcgaagctgtggtggtttccgatgtttcggaggttactgaggaaaaagctaaacgagaagagattttcgctgttattatggttggtggacgccaatacatagtgtttccagggagatatctctacactcagaggctaaaagatgcaaatgttgatgaccagattgttctcaacaaagtgttgcttgttggaacaaagacacacacttacattggcaagccggttgtgaccaatgccactgtacatgctgttgtggaaagtcaaggtttgaatgataaagtggtagtcttcaagtacaagcctaagaagaagtaccgtagaaatatcggtcacagacagccgaatacgaggattaggattaccggaatcacagggtatgaagagtatccagcctcgcccaatgttgcagttggagaagtaaatctttgacacaaaatgtttcttgaatgttaaaatttttctgatcttctctatgtaattttgtaaggaccctggtcatttcatttctgctgagattccttttattaatatgtaccttttgccattctttgatcacaaattctaagttagtgtatg

SEQ ID NO: 106411 - protein, 233 aa, Arabidopsis thaliana; identical to SEQ ID NO: 26778
  peptide (1)..(233): Ceres Seq. ID no. 13619519
  misc_feature (113)..(209): Pfam Name: Ribosomal prokaryotic L21 protein Pfam Description: Ribosomal prokaryotic L21 protein
  misc_feature (14)..(233): Homolog of NCBI NO: 15219695 NR Description: 50S ribosomal protein L21 chloroplast precursor [Arabidopsis thaliana] >gi|1710424|sp|P51412|RK21_ARATH 50S protein L21, chloroplast precursor (CL21) >gi|2129718|pir||S71282
  misc_feature (110)..(223): Homolog of NCBI NO: 132776 NR Description: 50S RIBOSOMAL PROTEIN L21, CHLOROPLAST PRECURSOR
  misc_feature (79)..(219): Homolog of NCBI NO: 18417696 NR Description: WRKY family transcription factor [Arabidopsis >gi|29839556|sp|Q8L9A0|RM21_ARATH 50S ribosomal protein L21, precursor >gi|12641613|emb|CAC27453.1| putative ribosomal protein
  misc_feature (79)..(219): Homolog of NCBI NO: 25407696 NR Description: hypothetical protein AT4g30930 [imported] - thaliana >gi|2980773|emb|CAA18200.1| putative protein thaliana] >gi|7269995|emb|CAB79811.1| putative protein
  misc_feature (113)..(214): Homolog of NCBI NO: 28211680 NR Description: LSU ribosomal protein L21P [Clostridium tetani >gi|28204122|gb|AAO36561.1| LSU ribosomal protein L21P
  misc_feature (113)..(214): Homolog of NCBI NO: 15894539 NR Description: Ribosomal protein L21 [Clostridium acetobutylicum]
  misc_feature (113)..(214): Homolog of NCBI NO: 28868025 NR Description: ribosomal protein L21 [Pseudomonas syringae pv. str. DC3000] >gi|28851261|gb|AAO54339.1| ribosomal protein L21
  misc_feature (98)..(214): Homolog of NCBI NO: 5712722 NR Description: unknown [Pseudomonas sp. BG33R]
  misc_feature (114)..(214): Homolog of NCBI NO: 15674860 NR Description: 50S ribosomal protein L21 [Streptococcus >gi|19745900|ref|NP_607036.1| 50S ribosomal protein L21 pyogenes MGAS8232] >gi|21910088|ref|NP_664356.1| 50S ribosomal
  misc_feature (114)..(214): Homolog of NCBI NO: 22537517 NR Description: ribosomal protein L21 [Streptococcus agalactiae >gi|25011482|ref|NP_735877.1| 50S ribosomal protein L21 agalactiae NEM316] >gi|22534397|gb|AAN00241.1|AE014254_21

SEQ ID NO: 106412 - protein, 220 aa, Arabidopsis thaliana; identical to SEQ ID NO: 26779
  peptide (1)..(220): Ceres Seq. ID no. 13619520
  misc_feature (100)..(196): Pfam Name: Ribosomal prokaryotic L21 protein Pfam Description: Ribosomal prokaryotic L21 protein
  misc_feature (1)..(220): Homolog of NCBI NO: 15219695 NR Description: 50S ribosomal protein L21 chloroplast precursor [Arabidopsis thaliana] >gi|1710424|sp|P51412|RK21_ARATH 50S protein L21, chloroplast precursor (CL21) >gi|2129718|pir||S71282
  misc_feature (97)..(210): Homolog of NCBI NO: 132776 NR Description: 50S RIBOSOMAL PROTEIN L21, CHLOROPLAST PRECURSOR
  misc_feature (66)..(206): Homolog of NCBI NO: 18417696 NR Description: WRKY family transcription factor [Arabidopsis >gi|29839556|sp|Q8L9A0|RM21_ARATH 50S ribosomal protein L21, precursor >gi|12641613|emb|CAC27453.1| putative ribosomal protein
  misc_feature (66)..(206): Homolog of NCBI NO: 25407696 NR Description: hypothetical protein AT4g30930 [imported] - thaliana >gi|2980773|emb|CAA18200.1| putative protein thaliana] >gi|7269995|emb|CAB79811.1| putative protein
  misc_feature (100)..(201): Homolog of NCBI NO: 28211680 NR Description: LSU ribosomal protein L21P [Clostridium tetani >gi|28204122|gb|AAO36561.1| LSU ribosomal protein L21P
  misc_feature (100)..(201): Homolog of NCBI NO: 15894539 NR Description: Ribosomal protein L21 [Clostridium acetobutylicum]
  misc_feature (100)..(201): Homolog of NCBI NO: 28868025 NR Description: ribosomal protein L21 [Pseudomonas syringae pv. str. DC3000] >gi|28851261|gb|AAO54339.1| ribosomal protein L21
  misc_feature (85)..(201): Homolog of NCBI NO: 5712722 NR Description: unknown [Pseudomonas sp. BG33R]
  misc_feature (101)..(201): Homolog of NCBI NO: 15674860 NR Description: 50S ribosomal protein L21 [Streptococcus >gi|19745900|ref|NP_607036.1| 50S ribosomal protein L21 pyogenes MGAS8232] >gi|21910088|ref|NP_664356.1| 50S ribosomal
  misc_feature (101)..(201): Homolog of NCBI NO: 22537517 NR Description: ribosomal protein L21 [Streptococcus agalactiae >gi|25011482|ref|NP_735877.1| 50S ribosomal protein L21 agalactiae NEM316] >gi|22534397|gb|AAN00241.1|AE014254_21

SEQ ID NO: 106413 - protein, 116 aa, Arabidopsis thaliana; identical to SEQ ID NO: 26780
  peptide (1)..(116): Ceres Seq. ID no. 13619521
  misc_feature (1)..(92): Pfam Name: Ribosomal prokaryotic L21 protein Pfam Description: Ribosomal prokaryotic L21 protein
  misc_feature (1)..(116): Homolog of NCBI NO: 15219695 NR Description: 50S ribosomal protein L21 chloroplast precursor [Arabidopsis thaliana] >gi|1710424|sp|P51412|RK21_ARATH 50S protein L21, chloroplast precursor (CL21) >gi|2129718|pir||S71282
  misc_feature (1)..(106): Homolog of NCBI NO: 132776 NR Description: 50S RIBOSOMAL PROTEIN L21, CHLOROPLAST PRECURSOR
  misc_feature (1)..(102): Homolog of NCBI NO: 18417696 NR Description: WRKY family transcription factor [Arabidopsis >gi|29839556|sp|Q8L9A0|RM21_ARATH 50S ribosomal protein L21, precursor >gi|12641613|emb|CAC27453.1| putative ribosomal protein
  misc_feature (1)..(102): Homolog of NCBI NO: 25407696 NR Description: hypothetical protein AT4g30930 [imported] - thaliana >gi|2980773|emb|CAA18200.1| putative protein thaliana] >gi|7269995|emb|CAB79811.1| putative protein
  misc_feature (1)..(97): Homolog of NCBI NO: 28211680 NR Description: LSU ribosomal protein L21P [Clostridium tetani >gi|28204122|gb|AAO36561.1| LSU ribosomal protein L21P
  misc_feature (1)..(97): Homolog of NCBI NO: 15894539 NR Description: Ribosomal protein L21 [Clostridium acetobutylicum]
  misc_feature (1)..(97): Homolog of NCBI NO: 28868025 NR Description: ribosomal protein L21 [Pseudomonas syringae pv. str. DC3000] >gi|28851261|gb|AAO54339.1| ribosomal protein L21
  misc_feature (1)..(97): Homolog of NCBI NO: 5712722 NR Description: unknown [Pseudomonas sp. BG33R]
  misc_feature (1)..(97): Homolog of NCBI NO: 15674860 NR Description: 50S ribosomal protein L21 [Streptococcus >gi|19745900|ref|NP_607036.1| 50S ribosomal protein L21 pyogenes MGAS8232] >gi|21910088|ref|NP_664356.1| 50S ribosomal
  misc_feature (1)..(97): Homolog of NCBI NO: 22537517 NR Description: ribosomal protein L21 [Streptococcus agalactiae >gi|25011482|ref|NP_735877.1| 50S ribosomal protein L21 agalactiae NEM316] >gi|22534397|gb|AAN00241.1|AE014254_21

SEQ ID NO: 106414 - DNA, 1396 bp, Arabidopsis thaliana
  misc_feature (1)..(1396): Ceres Seq. ID no. 13619522
  misc_feature: MA Experiment ID: 108434 Result: Down-regulated in Transcription
  misc_feature: MA Experiment 108434 PARAMETER Experiment Name: At_Root_Tips_cDNA_P Parameter: Tissue Value: Root Tips
  misc_feature: MA Experiment ID: 108488 Result: Down-regulated in Transcription
  misc_feature: MA Experiment ID: 108489 Result: Up-regulated in Transcription
  misc_feature: MA Experiment ID: 108668 Result: Up-regulated in Transcription
  misc_feature: MA Experiment 108668 PARAMETER Experiment Name: At_2mM_SA_cDNA_P Parameter: Plant Line Value: WS
  misc_feature: MA Experiment 108668 PARAMETER Experiment Name: At_2mM_SA_cDNA_P Parameter: Timepoint (hr) Value: 6
  misc_feature: MA Experiment 108668 PARAMETER Experiment Name: At_2mM_SA_cDNA_P Parameter: Treatment Value: 2mM SA vs. No Treatment
  misc_feature: MA Experiment ID: 20000086 Result: Up-regulated in Transcription
  misc_feature: MA Experiment 20000086 PARAMETER Experiment Name: At_100uM_ABA_Mutants_cDNA_P Parameter: Plant Line Value: CS22
  misc_feature: MA Experiment 20000086 PARAMETER Experiment Name: At_100uM_ABA_Mutants_cDNA_P Parameter: Timepoint (hr) Value: 6
  misc_feature: MA Experiment 20000086 PARAMETER Experiment Name: At_100uM_ABA_Mutants_cDNA_P Parameter: Tissue Value: Aerial
  misc_feature: MA Experiment 20000086 PARAMETER Experiment Name: At_100uM_ABA_Mutants_cDNA_P Parameter: Treatment Value: 100uM ABA vs. No Treatment
  misc_feature: MA Experiment ID: 20000182 Result: Up-regulated in Transcription
  misc_feature: MA Experiment 20000182 PARAMETER Experiment Name: At_2mM_SA_P Parameter: Age (day) Value: 14
  misc_feature: MA Experiment 20000182 PARAMETER Experiment Name: At_2mM_SA_P Parameter: Organism Value: A. thaliana
  misc_feature: MA Experiment 20000182 PARAMETER Experiment Name: At_2mM_SA_P Parameter: Plant Line Value: WS
  misc_feature: MA Experiment 20000182 PARAMETER Experiment Name: At_2mM_SA_P Parameter: Timepoint (hr) Value: 6
  misc_feature: MA Experiment 20000182 PARAMETER Experiment Name: At_2mM_SA_P Parameter: Tissue Value: Aerial
  misc_feature: MA Experiment 20000182 PARAMETER Experiment Name: At_2mM_SA_P Parameter: Treatment Value: 2mM SA vs. No Treatment
  misc_feature: MA Experiment ID: 20000264 Result: Up-regulated in Transcription
  misc_feature: MA Experiment 20000264 PARAMETER Experiment Name: At_Open_Flower_P Parameter: Age (day) Value: 21
  misc_feature: MA Experiment 20000264 PARAMETER Experiment Name: At_Open_Flower_P Parameter: Plant Line Value: WS
  misc_feature: MA Experiment 20000264 PARAMETER Experiment Name: At_Open_Flower_P Parameter: Tissue Value: Open Flower vs. Whole Plant
  misc_feature: MA Experiment ID: 20000265 Result: Up-regulated in Transcription
  misc_feature: MA Experiment 20000265 PARAMETER Experiment Name: At_Open_Flower_P Parameter: Age (day) Value: 21
  misc_feature: MA Experiment 20000265 PARAMETER Experiment Name: At_Open_Flower_P Parameter: Plant Line Value: WS
  misc_feature: MA Experiment 20000265 PARAMETER Experiment Name: At_Open_Flower_P Parameter: Tissue Value: Closed Flower vs. Whole Plant
  misc_feature: MA Experiment ID: 20000438 Result: Down-regulated in Transcription
  misc_feature: MA Experiment 20000438 PARAMETER Experiment Name: At_Shoots__P Parameter: Age (day) Value: 14
  misc_feature: MA Experiment 20000438 PARAMETER Experiment Name: At_Shoots__P Parameter: Tissue Value: Shoots vs. Whole Plant
  misc_feature: MA Experiment ID: 20000495 Result: Up-regulated in Transcription
  misc_feature: MA Experiment 20000495 PARAMETER Experiment Name: At_Guard_Cells_P Parameter: Harvest Date Value: 8/2/2002
  misc_feature: MA Experiment 20000495 PARAMETER Experiment Name: At_Guard_Cells_P Parameter: Organism Value: A. thaliana
  misc_feature: MA Experiment 20000495 PARAMETER Experiment Name: At_Guard_Cells_P Parameter: Tissue Value: Guard Cells vs. Leaves
  misc_feature: MA Experiment ID: 20000527 Result: Down-regulated in Transcription
  misc_feature: MA Experiment 20000527 PARAMETER Experiment Name: At_10percent_PEG_P Parameter: Age (day) Value: 20
  misc_feature: MA Experiment 20000527 PARAMETER Experiment Name: At_10percent_PEG_P Parameter: Organism Value: A. thaliana
  misc_feature: MA Experiment 20000527 PARAMETER Experiment Name: At_10percent_PEG_P Parameter: Plant Line Value: WS
  misc_feature: MA Experiment 20000527 PARAMETER Experiment Name: At_10percent_PEG_P Parameter: Timepoint (day) Value: 20
  misc_feature: MA Experiment 20000527 PARAMETER Experiment Name: At_10percent_PEG_P Parameter: Tissue Value: Whole Plant
  misc_feature: MA Experiment 20000527 PARAMETER Experiment Name: At_10percent_PEG_P Parameter: Treatment Value: 10percent PEG vs. No Treatment
  misc_feature: MA Experiment ID: 20000794 Result: Up-regulated in Transcription
  misc_feature: MA Experiment 20000794 PARAMETER Experiment Name: At_Petals_P Parameter: Age (day) Value: 23-25 days
  misc_feature: MA Experiment 20000794 PARAMETER Experiment Name: At_Petals_P Parameter: Plant Line Value: WS
  misc_feature: MA Experiment 20000794 PARAMETER Experiment Name: At_Petals_P Parameter: Tissue Value: Petals vs. Whole plant
  misc_feature: MA Experiment ID: 20001904 Result: Up-regulated in Transcription
  misc_feature: MA Experiment 20001904 PARAMETER Experiment Name: At_Drought_Reproduction_P Parameter: Age (day) Value: 37
  misc_feature: MA Experiment 20001904 PARAMETER Experiment Name: At_Drought_Reproduction_P Parameter: Organism Value: A. thaliana
  misc_feature: MA Experiment 20001904 PARAMETER Experiment Name: At_Drought_Reproduction_P Parameter: Plant Line Value: WS
  misc_feature: MA Experiment 20001904 PARAMETER Experiment Name: At_Drought_Reproduction_P Parameter: Timepoint (day) Value: 7
  misc_feature: MA Experiment 20001904 PARAMETER Experiment Name: At_Drought_Reproduction_P Parameter: Tissue Value: Rosettes
  misc_feature: MA Experiment 20001904 PARAMETER Experiment Name: At_Drought_Reproduction_P Parameter: Treatment Value: Drought vs. No Drought
  misc_feature: MA Experiment ID: 20001911 Result: Down-regulated in Transcription
  misc_feature: MA Experiment 20001911 PARAMETER Experiment Name: At_Drought_Reproduction_P Parameter: Age (day) Value: 40
  misc_feature: MA Experiment 20001911 PARAMETER Experiment Name: At_Drought_Reproduction_P Parameter: Organism Value: A. thaliana
  misc_feature: MA Experiment 20001911 PARAMETER Experiment Name: At_Drought_Reproduction_P Parameter: Plant Line Value: WS
  misc_feature: MA Experiment 20001911 PARAMETER Experiment Name: At_Drought_Reproduction_P Parameter: Timepoint (day) Value: 10
  misc_feature: MA Experiment 20001911 PARAMETER Experiment Name: At_Drought_Reproduction_P Parameter: Tissue Value: Flowers
  misc_feature: MA Experiment 20001911 PARAMETER Experiment Name: At_Drought_Reproduction_P Parameter: Treatment Value: Drought vs. No Drought
atgtattaagacttgacaacttgtctttctcacaccaaacccctctcctctgtttcataacatctgctctttcttttttttcctaagcccctaatgacaaaccataatgccttaatctctgatgctaaaggcagcatcggagttgcggttagagttccaaaccaatctctgttttctcccggaggtggccgatacatcagcattccccggaagaaactcgtgcagaagctagaggccgacccgagtcaaacccgtatccacacttggatcgaagccatgagggcttcttccccaacccgtacccgaccggggaacatatctcccctcccggagtccgatgaggaggatgaatactcttcttggatggctcaacacccgtcagctttaaccatgtttgaagagatagctgaagcttcaaaagggaaacaaatcgtgatgtttctcgactatgacggtacattatcccccattgttgaaaaccctgatcgagcttacatgtctgaagagatgagagaggcagtgaaaggcgtggctagatatttcccgaccgcgattgtcactggaagatgccgtgataaggttcgtagatttgtgaaacttcccggactttactatgcaggtagccatggaatggacatcaaaggaccttccaaaagaaacaaacataacaagaacaataaaggagttcttttccaagcggcgaatgagtttttgcctatgattgacaaggtctctaagtgtctagtagagaaaatgagagacatagaaggagcaaacgtcgagaacaacaagttttgtgtctccgtacattaccgttgtgttgatcaaaaggactggggattggtagcggaacacgtgacatcgatattgagtgagtatccgaaactgaggttgacacaaggaagaaaagtcttagagattcgaccaaccatcaaatgggataaaggcaaagctctcgagttcttgctcgaatccttaggattcgctaactctaacgatgttttgcccatctatataggagatgatcgtacggacgaggatgctttcaaggttttgagaaacaaaggacaaggctttggtatacttgtgtccaaaattccaaaggaaacgagtgctacatattctctacaagaaccttccgaggtaggagagtttttgcagcgactcgtggaatggaaacaaatgtcactaagaggaagatagccaatttcctgacataaatttattttcaattaataaatgaattagttttcactatgcaacaaaaattgttgtatatatgatcaatgtttttttaattattttactcttcatgaacaaatgtaagtttataggaactttcttaaccaagaaaaaagtaagtttgctagtataatattttcatcattctcttttt

SEQ ID NO: 106415 - protein, 369 aa, Arabidopsis thaliana
  peptide (1)..(369): Ceres Seq. ID no. 13619523
  misc_feature (116)..(349): Pfam Name: Trehalose-phosphatase Pfam Description: Trehalose-phosphatase
  misc_feature (1)..(369): Homolog of NCBI NO: 18399940 NR Description: trehalose-6-phosphate phosphatase, putative
  misc_feature (1)..(369): Homolog of NCBI NO: 21554408 NR Description: trehalose-phosphatase, putative [Arabidopsis
  misc_feature (1)..(369): Homolog of NCBI NO: 25354597 NR Description: probable trehalose-phosphatase [imported] -
  misc_feature (1)..(366): Homolog of NCBI NO: 25354595 NR Description: trehalose-phosphatase (EC 3.1.3.12) B [imported] -
  misc_feature (1)..(366): Homolog of NCBI NO: 15218205 NR Description: trehalose-6-phosphate phosphatase (TPPB) thaliana] >gi|25354598|pir||H96809 protein hypothetical protein
  misc_feature (1)..(359): Homolog of NCBI NO: 15238360 NR Description: trehalose-6-phosphate phosphatase, putative
  misc_feature (35)..(367): Homolog of NCBI NO: 30683008 NR Description: trehalose-6-phosphate phosphatase, putative
  misc_feature (35)..(364): Homolog of NCBI NO: 30692524 NR Description: trehalose-6-phosphate phosphatase, putative thaliana] >gi|26452744|dbj|BAC43453.1| putative protein thaliana] >gi|28973301|gb|AAO63975.1| unknown protein
  misc_feature (35)..(355): Homolog of NCBI NO: 11282598 NR Description: trehalose-6-phosphate phosphatase-like protein -
  misc_feature (54)..(366): Homolog of NCBI NO: 15219843 NR Description: trehalose-6-phosphate phosphatase, putative
MTNHNALISDAKGSIGVAVRVPNQSLFSPGGGRYISIPRKKLVQKLEADPSQTRIHTWIEAMRASSPTRTRPGNISPLPESDEEDEYSSWMAQHPSALTMFEEIAEASKGKQIVMFLDYDGTLSPIVENPDRAYMSEEMREAVKGVARYFPTAIVTGRCRDKVRRFVKLPGLYYAGSHGMDIKGPSKRNKHNKNNKGVLFQAANEFLPMIDKVSKCLVEKMRDIEGANVENNKFCVSVHYRCVDQKDWGLVAEHVTSILSEYPKLRLTQGRKVLEIRPTIKWDKGKALEFLLESLGFANSNDVLPIYIGDDRTDEDAFKVLRNKGQGFGILVSKIPKETSATYSLQEPSEVGEFLQRLVEWKQMSLRGR

SEQ ID NO: 106416 - protein, 308 aa, Arabidopsis thaliana
  peptide (1)..(308): Ceres Seq. ID no. 13619524
  misc_feature (55)..(288): Pfam Name: Trehalose-phosphatase Pfam Description: Trehalose-phosphatase
  misc_feature (1)..(308): Homolog of NCBI NO: 18399940 NR Description: trehalose-6-phosphate phosphatase, putative
  misc_feature (1)..(308): Homolog of NCBI NO: 21554408 NR Description: trehalose-phosphatase, putative [Arabidopsis
  misc_feature (1)..(308): Homolog of NCBI NO: 25354597 NR Description: probable trehalose-phosphatase [imported] -
  misc_feature (1)..(305): Homolog of NCBI NO: 25354595 NR Description: trehalose-phosphatase (EC 3.1.3.12) B [imported] -
  misc_feature (1)..(305): Homolog of NCBI NO: 15218205 NR Description: trehalose-6-phosphate phosphatase (TPPB) thaliana] >gi|25354598|pir||H96809 protein hypothetical protein
  misc_feature (1)..(298): Homolog of NCBI NO: 15238360 NR Description: trehalose-6-phosphate phosphatase, putative
  misc_feature (1)..(306): Homolog of NCBI NO: 30683008 NR Description: trehalose-6-phosphate phosphatase, putative
  misc_feature (1)..(303): Homolog of NCBI NO: 30692524 NR Description: trehalose-6-phosphate phosphatase, putative thaliana] >gi|26452744|dbj|BAC43453.1| putative protein thaliana] >gi|28973301|gb|AAO63975.1| unknown protein
  misc_feature (1)..(294): Homolog of NCBI NO: 11282598 NR Description: trehalose-6-phosphate phosphatase-like protein -
  misc_feature (1)..(305): Homolog of NCBI NO: 15219843 NR Description: trehalose-6-phosphate phosphatase, putative
MRASSPTRTRPGNISPLPESDEEDEYSSWMAQHPSALTMFEEIAEASKGKQIVMFLDYDGTLSPIVENPDRAYMSEEMREAVKGVARYFPTAIVTGRCRDKVRRFVKLPGLYYAGSHGMDIKGPSKRNKHNKNNKGVLFQAANEFLPMIDKVSKCLVEKMRDIEGANVENNKFCVSVHYRCVDQKDWGLVAEHVTSILSEYPKLRLTQGRKVLEIRPTIKWDKGKALEFLLESLGFANSNDVLPIYIGDDRTDEDAFKVLRNKGQGFGILVSKIPKETSATYSLQEPSEVGEFLQRLVEWKQMSLRGR

SEQ ID NO: 106417 - protein, 279 aa, Arabidopsis thaliana
  peptide (1)..(279): Ceres Seq. ID no. 13619525
  misc_feature (26)..(259): Pfam Name: Trehalose-phosphatase Pfam Description: Trehalose-phosphatase
  misc_feature (1)..(279): Homolog of NCBI NO: 18399940 NR Description: trehalose-6-phosphate phosphatase, putative
  misc_feature (1)..(279): Homolog of NCBI NO: 21554408 NR Description: trehalose-phosphatase, putative [Arabidopsis
  misc_feature (1)..(279): Homolog of NCBI NO: 25354597 NR Description: probable trehalose-phosphatase [imported] -
  misc_feature (1)..(276): Homolog of NCBI NO: 25354595 NR Description: trehalose-phosphatase (EC 3.1.3.12) B [imported] -
  misc_feature (1)..(276): Homolog of NCBI NO: 15218205 NR Description: trehalose-6-phosphate phosphatase (TPPB) thaliana] >gi|25354598|pir||H96809 protein hypothetical protein
  misc_feature (1)..(269): Homolog of NCBI NO: 15238360 NR Description: trehalose-6-phosphate phosphatase, putative
  misc_feature (1)..(277): Homolog of NCBI NO: 30683008 NR Description: trehalose-6-phosphate phosphatase, putative
  misc_feature (1)..(274): Homolog of NCBI NO: 30692524 NR Description: trehalose-6-phosphate phosphatase, putative thaliana] >gi|26452744|dbj|BAC43453.1| putative protein thaliana] >gi|28973301|gb|AAO63975.1| unknown protein
  misc_feature (1)..(265): Homolog of NCBI NO: 11282598 NR Description: trehalose-6-phosphate phosphatase-like protein -
  misc_feature (1)..(276): Homolog of NCBI NO: 15219843 NR Description: trehalose-6-phosphate phosphatase, putative
MAQHPSALTMFEEIAEASKGKQIVMFLDYDGTLSPIVENPDRAYMSEEMREAVKGVARYFPTAIVTGRCRDKVRRFVKLPGLYYAGSHGMDIKGPSKRNKHNKNNKGVLFQAANEFLPMIDKVSKCLVEKMRDIEGANVENNKFCVSVHYRCVDQKDWGLVAEHVTSILSEYPKLRLTQGRKVLEIRPTIKWDKGKALEFLLESLGFANSNDVLPIYIGDDRTDEDAFKVLRNKGQGFGILVSKIPKETSATYSLQEPSEVGEFLQRLVEWKQMSLRGR

SEQ ID NO: 106418 - DNA, 1602 bp, Arabidopsis thaliana
  misc_feature (1)..(1602): Ceres Seq. ID no. 13619526
  misc_feature: MA Experiment ID: 20000184 Result: Down-regulated in Transcription
  misc_feature: MA Experiment 20000184 PARAMETER Experiment Name: At_Shoots__P Parameter: Age (day) Value: 7
  misc_feature: MA Experiment 20000184 PARAMETER Experiment Name: At_Shoots__P Parameter: Tissue Value: Shoots vs. Whole Plant
  misc_feature: MA Experiment ID: 20000227 Result: Down-regulated in Transcription
  misc_feature: MA Experiment 20000227 PARAMETER Experiment Name: At_Root-Tips-vs-Tops_P Parameter: Tissue Value: Root Tips vs. Root Tops
  misc_feature: MA Experiment ID: 20000495 Result: Up-regulated in Transcription
  misc_feature: MA Experiment 20000495 PARAMETER Experiment Name: At_Guard_Cells_P Parameter: Harvest Date Value: 8/2/2002
  misc_feature: MA Experiment 20000495 PARAMETER Experiment Name: At_Guard_Cells_P Parameter: Organism Value: A. thaliana
  misc_feature: MA Experiment 20000495 PARAMETER Experiment Name: At_Guard_Cells_P Parameter: Tissue Value: Guard Cells vs. Leaves
  misc_feature: MA Experiment ID: 20001248 Result: Up-regulated in Transcription
  misc_feature: MA Experiment 20001248 PARAMETER Experiment Name: At_Far-red-induction_P Parameter: Age (day) Value: 7
  misc_feature: MA Experiment 20001248 PARAMETER Experiment Name: At_Far-red-induction_P Parameter: Light Value: Far-red vs. White
  misc_feature: MA Experiment 20001248 PARAMETER Experiment Name: At_Far-red-induction_P Parameter: Organism Value: A. thaliana
  misc_feature: MA Experiment 20001248 PARAMETER Experiment Name: At_Far-red-induction_P Parameter: Plant Line Value: Columbia
  misc_feature: MA Experiment 20001248 PARAMETER Experiment Name: At_Far-red-induction_P Parameter: Timepoint (hr) Value: 4
  misc_feature: MA Experiment 20001248 PARAMETER Experiment Name: At_Far-red-induction_P Parameter: Tissue Value: Whole Plant
  misc_feature: MA Experiment ID: 20001450 Result: Up-regulated in Transcription
  misc_feature: MA Experiment 20001450 PARAMETER Experiment Name: At_Far-red-induction_P Parameter: Age (day) Value: 7
  misc_feature: MA Experiment 20001450 PARAMETER Experiment Name: At_Far-red-induction_P Parameter: Light Value: Far-red vs. White
  misc_feature: MA Experiment 20001450 PARAMETER Experiment Name: At_Far-red-induction_P Parameter: Organism Value: A. thaliana
  misc_feature: MA Experiment 20001450 PARAMETER Experiment Name: At_Far-red-induction_P Parameter: Plant Line Value: Columbia
  misc_feature: MA Experiment 20001450 PARAMETER Experiment Name: At_Far-red-induction_P Parameter: Timepoint (hr) Value: 8
  misc_feature: MA Experiment 20001450 PARAMETER Experiment Name: At_Far-red-induction_P Parameter: Tissue Value: Whole Plant
gacaacgatcatccaggtcccactctgcttcttaaccattctttaccaaaaatcaattgttctctccctctcagcttccgaagtcttcatctttctcgacaatatctaaaccttgtctgagaatcatttgaagaagatctttcatcatcaccgatccactttctgatttaggtcaatggaacagacaaaggatgattctgattttgaggatgattgtgaaacgaagaagatggagactgatacatcagctcaagaggcaaggaatggtaaagacatacaagggattcagtgggaagggtttaagtataatagagacgagtttcgtgagactaggttgaaacaatatgataactttgttaatatcttaaggcctagctctcgagaaaagcttgataaggaacatgggcaagtagttgagaaaggaaagaacttttatgacttccaattcaatacaaggcttgtcacttccactattgtgcattttcagcttcggaatttggtatgggcgacatctaagcatgatgtatatctaatgcaaaattattcactcatgcactggtcatctctactccagagagggaaagaagtacttaatgtcgccagatcagttacccccactcagaaactacctggattgttttctgagccactctctagggtgcaagttagcagcatggcagtcaaagaaaatctgatccttttaggagggttcgacggggagcttctctgcaagtgtgtaaatcagcctggggttgctttttgcacaagattatcaacggaagataatgccatcacaaacacagttgatatataccgagacccaagtggctcccttaggcttataaccgcaaataacgactgtaaaattcgtgtattcgatgctcagagctttacacgtgtcagtgaatttgctttagattggtctgtcaataatacctcagttagcccggatgggaagctactcgctgtagtcggggacagtacagaatgcttgatctctgattcccattctggaaaagttatttcaagcctcagaggccacaaagactactcatttgcatctgcttggcacccgaatggtctaatcttagcaacgggaaaccaagacacggcatgccgtctctgggacattcgtaacccgtcagaatcattcgctgtcctgaaaggaaacatgggagccatcagaggactgaagttcacaccagaagggcggtttcttgcaatggctgagcctgcagactttgttcacatcttcgacacgcagtccgggtttctacagtcccaagagattgatctgtttggagaaatagccgggatctcgttcagccccgatacagaggcactatatgtaggggtcgcagaccgcacttatggaagtttgctggagtataagaggagaaaggataatcactatatggactccttttactgagaaaaggtaaatgaaaagtaaaaagcatctaatatgttgtcacaagatgggtttaaccctattagtgtgtatatgtagacagaattggtagtttctttggtaatatctgttatgtacccataatatatcttaccaaactttaagtatgttttgttaattgtgattgtttt

SEQ ID NO: 106419 - protein, 418 aa, Arabidopsis thaliana
  peptide (1)..(418): Ceres Seq. ID no. 13619527
  misc_feature (1)..(418): Homolog of NCBI NO: 18400003 NR Description: WD-40 repeat protein family [Arabidopsis thaliana]
  misc_feature (1)..(418): Homolog of NCBI NO: 12324715 NR Description: unknown protein; 4584-7806 [Arabidopsis thaliana]
  misc_feature (19)..(418): Homolog of NCBI NO: 21553502 NR Description: unknown [Arabidopsis thaliana]
  misc_feature (7)..(418): Homolog of NCBI NO: 13937195 NR Description: At1g78070/F28K19_28 [Arabidopsis thaliana]
  misc_feature (251)..(418): Homolog of NCBI NO: 6598592 NR Description: F5J5.6 [Arabidopsis thaliana]
  misc_feature (1)..(110): Homolog of NCBI NO: 6598592 NR Description: F5J5.6 [Arabidopsis thaliana]
  misc_feature (201)..(418): Homolog of NCBI NO: 25405023 NR Description: protein F28K19.28 [imported] - Arabidopsis >gi|6573770|gb|AAF17690.1|AC009243_17 F28K19.28 [Arabidopsis
  misc_feature (104)..(216): Homolog of NCBI NO: 25405023 NR Description: protein F28K19.28 [imported] - Arabidopsis >gi|6573770|gb|AAF17690.1|AC009243_17 F28K19.28 [Arabidopsis
  misc_feature (7)..(104): Homolog of NCBI NO: 25405023 NR Description: protein F28K19.28 [imported] - Arabidopsis >gi|6573770|gb|AAF17690.1|AC009243_17 F28K19.28 [Arabidopsis
  misc_feature (7)..(416): Homolog of NCBI NO: 18423837 NR Description: WD-40 repeat protein family [Arabidopsis thaliana]
MEQTKDDSDFEDDCETKKMETDTSAQEARNGKDIQGIQWEGFKYNRDEFRETRLKQYDNFVNILRPSSREKLDKEHGQVVEKGKNFYDFQFNTRLVTSTIVHFQLRNLVWATSKHDVYLMQNYSLMHWSSLLQRGKEVLNVARSVTPTQKLPGLFSEPLSRVQVSSMAVKENLILLGGFDGELLCKCVNQPGVAFCTRLSTEDNAITNTVDIYRDPSGSLRLITANNDCKIRVFDAQSFTRVSEFALDWSVNNTSVSPDGKLLAVVGDSTECLISDSHSGKVISSLRGHKDYSFASAWHPNGLILATGNQDTACRLWDIRNPSESFAVLKGNMGAIRGLKFTPEGRFLAMAEPADFVHIFDTQSGFLQSQEIDLFGEIAGISFSPDTEALYVGVADRTYGSLLEYKRRKDNHYMDSFY

SEQ ID NO: 106420 - protein, 400 aa, Arabidopsis thaliana
  peptide (1)..(400): Ceres Seq. ID no. 13619528
  misc_feature (1)..(400): Homolog of NCBI NO: 18400003 NR Description: WD-40 repeat protein family [Arabidopsis thaliana]
  misc_feature (1)..(400): Homolog of NCBI NO: 12324715 NR Description: unknown protein; 4584-7806 [Arabidopsis thaliana]
  misc_feature (1)..(400): Homolog of NCBI NO: 21553502 NR Description: unknown [Arabidopsis thaliana]
  misc_feature (1)..(400): Homolog of NCBI NO: 13937195 NR Description: At1g78070/F28K19_28 [Arabidopsis thaliana]
  misc_feature (233)..(400): Homolog of NCBI NO: 6598592 NR Description: F5J5.6 [Arabidopsis thaliana]
  misc_feature (1)..(92): Homolog of NCBI NO: 6598592 NR Description: F5J5.6 [Arabidopsis thaliana]
  misc_feature (183)..(400): Homolog of NCBI NO: 25405023 NR Description: protein F28K19.28 [imported] - Arabidopsis >gi|6573770|gb|AAF17690.1|AC009243_17 F28K19.28 [Arabidopsis
  misc_feature (86)..(198): Homolog of NCBI NO: 25405023 NR Description: protein F28K19.28 [imported] - Arabidopsis >gi|6573770|gb|AAF17690.1|AC009243_17 F28K19.28 [Arabidopsis
  misc_feature (1)..(86): Homolog of NCBI NO: 25405023 NR Description: protein F28K19.28 [imported] - Arabidopsis >gi|6573770|gb|AAF17690.1|AC009243_17 F28K19.28 [Arabidopsis
  misc_feature (1)..(398): Homolog of NCBI NO: 18423837 NR Description: WD-40 repeat protein family [Arabidopsis thaliana]
METDTSAQEARNGKDIQGIQWEGFKYNRDEFRETRLKQYDNFVNILRPSSREKLDKEHGQVVEKGKNFYDFQFNTRLVTSTIVHFQLRNLVWATSKHDVYLMQNYSLMHWSSLLQRGKEVLNVARSVTPTQKLPGLFSEPLSRVQVSSMAVKENLILLGGFDGELLCKCVNQPGVAFCTRLSTEDNAITNTVDIYRDPSGSLRLITANNDCKIRVFDAQSFTRVSEFALDWSVNNTSVSPDGKLLAVVGDSTECLISDSHSGKVISSLRGHKDYSFASAWHPNGLILATGNQDTACRLWDIRNPSESFAVLKGNMGAIRGLKFTPEGRFLAMAEPADFVHIFDTQSGFLQSQEIDLFGEIAGISFSPDTEALYVGVADRTYGSLLEYKRRKDNHYMDSFY

SEQ ID NO: 106421 - protein, 299 aa, Arabidopsis thaliana; identical to SEQ ID NO: 74702
  peptide (1)..(299): Ceres Seq. ID no. 13619529
  misc_feature (1)..(299): Homolog of NCBI NO: 18400003 NR Description: WD-40 repeat protein family [Arabidopsis thaliana]
  misc_feature (1)..(299): Homolog of NCBI NO: 12324715 NR Description: unknown protein; 4584-7806 [Arabidopsis thaliana]
  misc_feature (1)..(299): Homolog of NCBI NO: 21553502 NR Description: unknown [Arabidopsis thaliana]
  misc_feature (1)..(299): Homolog of NCBI NO: 13937195 NR Description: At1g78070/F28K19_28 [Arabidopsis thaliana]
  misc_feature (132)..(299): Homolog of NCBI NO: 6598592 NR Description: F5J5.6 [Arabidopsis thaliana]
  misc_feature (82)..(299): Homolog of NCBI NO: 25405023 NR Description: protein F28K19.28 [imported] - Arabidopsis >gi|6573770|gb|AAF17690.1|AC009243_17 F28K19.28 [Arabidopsis
  misc_feature (1)..(97): Homolog of NCBI NO: 25405023 NR Description: protein F28K19.28 [imported] - Arabidopsis >gi|6573770|gb|AAF17690.1|AC009243_17 F28K19.28 [Arabidopsis
  misc_feature (1)..(297): Homolog of NCBI NO: 18423837 NR Description: WD-40 repeat protein family [Arabidopsis thaliana]
  misc_feature (1)..(297): Homolog of NCBI NO: 30696707 NR Description: WD-40 repeat protein family [Arabidopsis thaliana]
  misc_feature (1)..(297): Homolog of NCBI NO: 21536732 NR Description: WD-repeat protein-like [Arabidopsis thaliana]

SEQ ID NO: 106422 - DNA, 2002 bp, Arabidopsis thaliana
  misc_feature (1)..(2002): Ceres Seq. ID no. 13619537
  misc_feature: MA Experiment ID: 108434 Result: Down-regulated in Transcription
  misc_feature: MA Experiment 108434 PARAMETER Experiment Name: At_Root_Tips_cDNA_P Parameter: Tissue Value: Root Tips
  misc_feature: MA Experiment ID: 108488 Result: Down-regulated in Transcription
  misc_feature: MA Experiment ID: 108489 Result: Down-regulated in Transcription
  misc_feature: MA Experiment ID: 108501 Result: Up-regulated in Transcription
  misc_feature: MA Experiment 108501 PARAMETER Experiment Name: At_ap2_floral_buds_cDNA_P Parameter: Plant Line Value: ap2 (Ler.)
  misc_feature: MA Experiment 108501 PARAMETER Experiment Name: At_ap2_floral_buds_cDNA_P Parameter: Tissue Value: Closed Flower
  misc_feature: MA Experiment ID: 108585 Result: Up-regulated in Transcription
  misc_feature: MA Experiment 108585 PARAMETER Experiment Name: At_5mM_NaNP_cDNA_P Parameter: Timepoint (hr) Value: 6
  misc_feature: MA Experiment 108585 PARAMETER Experiment Name: At_5mM_NaNP_cDNA_P Parameter: Tissue Value: Aerial
  misc_feature: MA Experiment 108585 PARAMETER Experiment Name: At_5mM_NaNP_cDNA_P Parameter: Treatment Value: null
  misc_feature: MA Experiment ID: 108668 Result: Down-regulated in Transcription
  misc_feature: MA Experiment 108668 PARAMETER Experiment Name: At_2mM_SA_cDNA_P Parameter: Plant Line Value: WS
  misc_feature: MA Experiment 108668 PARAMETER Experiment Name: At_2mM_SA_cDNA_P Parameter: Timepoint (hr) Value: 6
  misc_feature: MA Experiment 108668 PARAMETER Experiment Name: At_2mM_SA_cDNA_P Parameter: Treatment Value: 2mM SA vs. No Treatment
  misc_feature: MA Experiment ID: 20000113 Result: Down-regulated in Transcription
  misc_feature: MA Experiment 20000113 PARAMETER Experiment Name: At_42deg_Heat_cDNA_P Parameter: Temperature (deg C) Value: 42 vs. 22
  misc_feature: MA Experiment 20000113 PARAMETER Experiment Name: At_42deg_Heat_cDNA_P Parameter: Timepoint (hr) Value: 8
  misc_feature: MA Experiment 20000113 PARAMETER Experiment Name: At_42deg_Heat_cDNA_P Parameter: Tissue Value: Aerial
  misc_feature: MA Experiment ID: 20000182 Result: Down-regulated in Transcription
  misc_feature: MA Experiment 20000182 PARAMETER Experiment Name: At_2mM_SA_P Parameter: Age (day) Value: 14
  misc_feature: MA Experiment 20000182 PARAMETER Experiment Name: At_2mM_SA_P Parameter: Organism Value: A. thaliana
  misc_feature: MA Experiment 20000182 PARAMETER Experiment Name: At_2mM_SA_P Parameter: Plant Line Value: WS
  misc_feature: MA Experiment 20000182 PARAMETER Experiment Name: At_2mM_SA_P Parameter: Timepoint (hr) Value: 6
  misc_feature: MA Experiment 20000182 PARAMETER Experiment Name: At_2mM_SA_P Parameter: Tissue Value: Aerial
  misc_feature: MA Experiment 20000182 PARAMETER Experiment Name: At_2mM_SA_P Parameter: Treatment Value: 2mM SA vs. No Treatment
  misc_feature: MA Experiment ID: 20000224 Result: Up-regulated in Transcription
  misc_feature: MA Experiment ID: 20000227 Result: Down-regulated in Transcription
  misc_feature: MA Experiment 20000227 PARAMETER Experiment Name: At_Root-Tips-vs-Tops_P Parameter: Tissue Value: Root Tips vs. Root Tops
  misc_feature: MA Experiment ID: 20000495 Result: Down-regulated in Transcription
  misc_feature: MA Experiment 20000495 PARAMETER Experiment Name: At_Guard_Cells_P Parameter: Harvest Date Value: 8/2/2002
  misc_feature: MA Experiment 20000495 PARAMETER Experiment Name: At_Guard_Cells_P Parameter: Organism Value: A. thaliana
  misc_feature: MA Experiment 20000495 PARAMETER Experiment Name: At_Guard_Cells_P Parameter: Tissue Value: Guard Cells vs. Leaves
  misc_feature: MA Experiment ID: 20000527 Result: Down-regulated in Transcription
  misc_feature: MA Experiment 20000527 PARAMETER Experiment Name: At_10percent_PEG_P Parameter: Age (day) Value: 20
  misc_feature: MA Experiment 20000527 PARAMETER Experiment Name: At_10percent_PEG_P Parameter: Organism Value: A. thaliana
  misc_feature: MA Experiment 20000527 PARAMETER Experiment Name: At_10percent_PEG_P Parameter: Plant Line Value: WS
  misc_feature: MA Experiment 20000527 PARAMETER Experiment Name: At_10percent_PEG_P Parameter: Timepoint (day) Value: 20
  misc_feature: MA Experiment 20000527 PARAMETER Experiment Name: At_10percent_PEG_P Parameter: Tissue Value: Whole Plant
  misc_feature: MA Experiment 20000527 PARAMETER Experiment Name: At_10percent_PEG_P Parameter: Treatment Value: 10percent PEG vs. No Treatment
  misc_feature: MA Experiment ID: 20001459 Result: Up-regulated in Transcription
  misc_feature: MA Experiment 20001459 PARAMETER Experiment Name: At_50mM_NH4NO3_L-to-H_P Parameter: Age (day) Value: Undefined
  misc_feature: MA Experiment 20001459 PARAMETER Experiment Name: At_50mM_NH4NO3_L-to-H_P Parameter: Organism Value: Undefined
  misc_feature: MA Experiment 20001459 PARAMETER Experiment Name: At_50mM_NH4NO3_L-to-H_P Parameter: Plant Line Value: Undefined
  misc_feature: MA Experiment 20001459 PARAMETER Experiment Name: At_50mM_NH4NO3_L-to-H_P Parameter: Timepoint (hr) Value: 4
  misc_feature: MA Experiment 20001459 PARAMETER Experiment Name: At_50mM_NH4NO3_L-to-H_P Parameter: Tissue Value: Siliques
  misc_feature: MA Experiment 20001459 PARAMETER Experiment Name: At_50mM_NH4NO3_L-to-H_P Parameter: Treatment Value: 50mM NH4NO3 vs. 100mM Manitol
  misc_feature: MA Experiment ID: 20001558 Result: Down-regulated in Transcription
  misc_feature: MA Experiment 20001558 PARAMETER Experiment Name: At_Drought_Soil_Dry_P Parameter: Age (day) Value: 27
  misc_feature: MA Experiment 20001558 PARAMETER Experiment Name: At_Drought_Soil_Dry_P Parameter: Organism Value: A. thaliana
  misc_feature: MA Experiment 20001558 PARAMETER Experiment Name: At_Drought_Soil_Dry_P Parameter: Plant Line Value: WS
  misc_feature: MA Experiment 20001558 PARAMETER Experiment Name: At_Drought_Soil_Dry_P Parameter: Post Timepoint (hr) Value: 6
  misc_feature: MA Experiment 20001558 PARAMETER Experiment Name: At_Drought_Soil_Dry_P Parameter: Post-Treatment Value: Re-Water vs. No Drought
  misc_feature: MA Experiment 20001558 PARAMETER Experiment Name: At_Drought_Soil_Dry_P Parameter: Timepoint (day) Value: 13
  misc_feature: MA Experiment 20001558 PARAMETER Experiment Name: At_Drought_Soil_Dry_P Parameter: Treatment Value: Drought vs. No Drought
aacgtttatggatttgagtcgttctcaaacaaattttcaattagggtttggttgttcacacgcatcaatgactccaacaccaacaccaagagctccaatcgcagacgattcgattaatctacaagtcgatcaaagtttccgatcattaccaacaactttctctccgattccgttacaattactcgaacaaaaagccgagaagaccaccaccgttgatgagccaaagaaagatggaggaggaggaggagatcaaaaggaagacgagcatttcagaatcttaggtcaccatatgtgtctcaaaaggcaaagagattgtccacttttgttaacgcaatcaaagcatccgaagagaagttccatcggtgattcagatctggaatcgcgacgtgctgctgtacgagcttggggtgatcaaccgattcatttggcggatcctgatattcatgagcttatggagaaagagaagcaacgacaagtaagaggaattgaattgattgcttctgagaatttcgtgtgtagagctgtaatggaagctttaggtagtcatttaacgaataaatactctgaaggtatgcctggagctagatactatactgggaatcaatatattgatcagattgagaatctctgtattgagcgtgctcttactgcgtttggtcttgaatctgataaatggggtgttaatgttcagccttattcttgtacttctgctaacttcgcggtgtataccggacttttattgcccggtgaacggattatggggcttgattcgccttctggtggtcatatgagtcatggttattgtactcctggtgggaagaagatttcggctgcttccatcttctttgagagttttccttataaagtgaatcctcaaactgggtatattgattatgataagcttgaagataaggcgcttgattaccgtcctaagattcttatttgtggtgggagttcttatcctagggattgggattttgcaagggttagacagattgcagataagtgtggagctgttttgatgtgtgatatggctcatattagcggtcttgttgcaactaaggaatgttcaaatccatttgatcactgtgacatagtaacctccactactcacaaaggtctacgtggtcctagaggaggtatcatcttctacaggagaggcccaaagataagaaagcagggccatcactctagccattgtgacacttccacgcattacgatctagaggaaaagatcaactttgctgtttttccatctctacaaggaggtccacacaacaaccatatcgctgctcttgccattgcattgaaacaagtggccactccagagtacaaagcttacatacaacagatgaagaaaaacgcccaagctttagcagcagctcttcttagaagaaaatgcagactggttactggtggtacagacaaccatttgttgctgtgggatctcactcctatgggcttaacagggaaagtctacgagaaagtgtgtgagatgtgccatatcactttaaacaagacggctatattcggggacaatggtacaatatctcctggaggtgtaagaatagggacacccgcaatgacaacccgaggctgtatagagtctgatttcgagacaatggcggattttctgataaaggcggctcagataacaagtgcgttgcagagagagcatggaaagtcacacaaggagtttgtgaaaagtttatgcaccaacaaagacatagctgagcttagaaaccgagtcgaagcatttgctttgcagtatgagatgcctgcttctcttattcgaattgaatgaaagaaaactccacacaacagctttatttacagttgaattttatcttatctctgggtcaatttttttttttttttttggagttctatcttgtaaattagagtaaatatatatttatattgggattgatttgcattatttttttccattgtaattctgtacacattttgataaatgggaatgattactacaaatttactt

SEQ ID NO: 106423 - protein, 600 aa, Arabidopsis thaliana; identical to SEQ ID NO: 41619
  peptide (1)..(600): Ceres Seq. ID no. 13619538
  misc_feature (140)..(545): Pfam Name: Serine hydroxymethyltransferase Pfam Description: Serine hydroxymethyltransferase
  misc_feature (8)..(594): Homolog of NCBI NO: 15219182 NR Description: glycine hydroxymethyltransferase -related thaliana] >gi|9280677|gb|AAF86546.1|AC069252_5 F2E2.7 thaliana] >gi|21928157|gb|AAM78106.1| At1g22020/F2E2_3
  misc_feature (110)..(593): Homolog of NCBI NO: 34907298 NR Description: putative hydroxymethyltransferase [Oryza sativa
  misc_feature (132)..(597): Homolog of NCBI NO: 15236375 NR Description: hydroxymethyltransferase [Arabidopsis thaliana]
  misc_feature (132)..(597): Homolog of NCBI NO: 21592544 NR Description: hydroxymethyltransferase [Arabidopsis thaliana]
  misc_feature (132)..(597): Homolog of NCBI NO: 11762130 NR Description: AT4g13930 [Arabidopsis thaliana]
  misc_feature (132)..(597): Homolog of NCBI NO: 15236371 NR Description: glycine hydroxymethyltransferase - like protein thaliana] >gi|7433549|pir||T05258 glycine
  misc_feature (144)..(590): Homolog of NCBI NO: 17066746 NR Description: serine hydroxymethyltransferase [Chlamydomonas
  misc_feature (144)..(593): Homolog of NCBI NO: 18418028 NR Description: glycine hydroxymethyltransferase (EC 2.1.2.1) -
  misc_feature (144)..(593): Homolog of NCBI NO: 14030719 NR Description: AT4g32520/F8B4_220 [Arabidopsis thaliana]
  misc_feature (129)..(590): Homolog of NCBI NO: 31126793 NR Description: putative glycine hydroxymethyltransferase [Oryza

SEQ ID NO: 106424 - protein, 598 aa, Arabidopsis thaliana; identical to SEQ ID NO: 41620
  peptide (1)..(598): Ceres Seq. ID no. 13619539
  misc_feature (138)..(543): Pfam Name: Serine hydroxymethyltransferase Pfam Description: Serine hydroxymethyltransferase
  misc_feature (6)..(592): Homolog of NCBI NO: 15219182 NR Description: glycine hydroxymethyltransferase -related thaliana] >gi|9280677|gb|AAF86546.1|AC069252_5 F2E2.7 thaliana] >gi|21928157|gb|AAM78106.1| At1g22020/F2E2_3
  misc_feature (108)..(591): Homolog of NCBI NO: 34907298 NR Description: putative hydroxymethyltransferase [Oryza sativa
  misc_feature (130)..(595): Homolog of NCBI NO: 15236375 NR Description: hydroxymethyltransferase [Arabidopsis thaliana]
  misc_feature (130)..(595): Homolog of NCBI NO: 21592544 NR Description: hydroxymethyltransferase [Arabidopsis thaliana]
  misc_feature (130)..(595): Homolog of NCBI NO: 11762130 NR Description: AT4g13930 [Arabidopsis thaliana]
  misc_feature (130)..(595): Homolog of NCBI NO: 15236371 NR Description: glycine hydroxymethyltransferase - like protein thaliana] >gi|7433549|pir||T05258 glycine
  misc_feature (142)..(588): Homolog of NCBI NO: 17066746 NR Description: serine hydroxymethyltransferase [Chlamydomonas
  misc_feature (142)..(591): Homolog of NCBI NO: 18418028 NR Description: glycine hydroxymethyltransferase (EC 2.1.2.1) -
  misc_feature (142)..(591): Homolog of NCBI NO: 14030719 NR Description: AT4g32520/F8B4_220 [Arabidopsis thaliana]
  misc_feature (127)..(588): Homolog of NCBI NO: 31126793 NR Description: putative glycine hydroxymethyltransferase [Oryza

SEQ ID NO: 106425 - protein, 578 aa, Arabidopsis thaliana; identical to SEQ ID NO: 41621
  peptide (1)..(578): Ceres Seq. ID no. 13619540
  misc_feature (118)..(523): Pfam Name: Serine hydroxymethyltransferase Pfam Description: Serine hydroxymethyltransferase
  misc_feature (1)..(572): Homolog of NCBI NO: 15219182 NR Description: glycine hydroxymethyltransferase -related thaliana] >gi|9280677|gb|AAF86546.1|AC069252_5 F2E2.7 thaliana] >gi|21928157|gb|AAM78106.1| At1g22020/F2E2_3
  misc_feature (88)..(571): Homolog of NCBI NO: 34907298 NR Description: putative hydroxymethyltransferase [Oryza sativa
  misc_feature (110)..(575): Homolog of NCBI NO: 15236375 NR Description: hydroxymethyltransferase [Arabidopsis thaliana]
  misc_feature (110)..(575): Homolog of NCBI NO: 21592544 NR Description: hydroxymethyltransferase [Arabidopsis thaliana]
  misc_feature (110)..(575): Homolog of NCBI NO: 11762130 NR Description: AT4g13930 [Arabidopsis thaliana]
  misc_feature (110)..(575): Homolog of NCBI NO: 15236371 NR Description: glycine hydroxymethyltransferase - like protein thaliana] >gi|7433549|pir||T05258 glycine
  misc_feature (122)..(568): Homolog of NCBI NO: 17066746 NR Description: serine hydroxymethyltransferase [Chlamydomonas
  misc_feature (122)..(571): Homolog of NCBI NO: 18418028 NR Description: glycine hydroxymethyltransferase (EC 2.1.2.1) -
  misc_feature (122)..(571): Homolog of NCBI NO: 14030719 NR Description: AT4g32520/F8B4_220 [Arabidopsis thaliana]
  misc_feature (107)..(568): Homolog of NCBI NO: 31126793 NR Description: putative glycine hydroxymethyltransferase [Oryza

SEQ ID NO: 106426 - DNA, 1027 bp, Arabidopsis thaliana
  misc_feature (1)..(1027): Ceres Seq. ID no. 13619541
  misc_feature: MA Experiment ID: 108434 Result: Up-regulated in Transcription
  misc_feature: MA Experiment 108434 PARAMETER Experiment Name: At_Root_Tips_cDNA_P Parameter: Tissue Value: Root Tips
  misc_feature: MA Experiment ID: 108463 Result: Down-regulated in Transcription
  misc_feature: MA Experiment 108463 PARAMETER Experiment Name: At_Germinating_Seeds_cDNA_P Parameter: Age (day) Value: 3 vs. 0
  misc_feature: MA Experiment 108463 PARAMETER Experiment Name: At_Germinating_Seeds_cDNA_P Parameter: Tissue Value: Germinating Seeds
  misc_feature: MA Experiment ID: 108573 Result: Down-regulated in Transcription
  misc_feature: MA Experiment 108573 PARAMETER Experiment Name: At_Drought_cDNA_P Parameter: Timepoint (hr) Value: 6
  misc_feature: MA Experiment 108573 PARAMETER Experiment Name: At_Drought_cDNA_P Parameter: Tissue Value: Aerial
  misc_feature: MA Experiment 108573 PARAMETER Experiment Name: At_Drought_cDNA_P Parameter: Treatment Value: Drought vs. No Drought
  misc_feature: MA Experiment ID: 108579 Result: Up-regulated in Transcription
  misc_feature: MA Experiment 108579 PARAMETER Experiment Name: At_4deg_Cold_cDNA_P Parameter: Temperature (deg C) Value: 4 vs. 22
  misc_feature: MA Experiment 108579 PARAMETER Experiment Name: At_4deg_Cold_cDNA_P Parameter: Timepoint (hr) Value: 6
  misc_feature: MA Experiment 108579 PARAMETER Experiment Name: At_4deg_Cold_cDNA_P Parameter: Tissue Value: Aerial
  misc_feature: MA Experiment ID: 108585 Result: Down-regulated in Transcription
  misc_feature: MA Experiment 108585 PARAMETER Experiment Name: At_5mM_NaNP_cDNA_P Parameter: Timepoint (hr) Value: 6
  misc_feature: MA Experiment 108585 PARAMETER Experiment Name: At_5mM_NaNP_cDNA_P Parameter: Tissue Value: Aerial
  misc_feature: MA Experiment 108585 PARAMETER Experiment Name: At_5mM_NaNP_cDNA_P Parameter: Treatment Value: null
  misc_feature: MA Experiment ID: 108595 Result: Down-regulated in Transcription
  misc_feature: MA Experiment 108595 PARAMETER Experiment Name: At_Ler-pi_Ovule_cDNA_P Parameter: Plant Line Value: null
  misc_feature: MA Experiment ID: 20000185 Result: Down-regulated in Transcription
  misc_feature: MA Experiment 20000185 PARAMETER Experiment Name: At_Roots__P Parameter: Age (day) Value: 7 vs. 21
  misc_feature: MA Experiment 20000185 PARAMETER Experiment Name: At_Roots__P Parameter: Organism Value: A. thaliana
  misc_feature: MA Experiment 20000185 PARAMETER Experiment Name: At_Roots__P Parameter: Tissue Value: Roots vs. Whole Plant
  misc_feature: MA Experiment ID: 20000224 Result: Up-regulated in Transcription
  misc_feature: MA Experiment ID: 20000436 Result: Down-regulated in Transcription
  misc_feature: MA Experiment 20000436 PARAMETER Experiment Name: At_Drought_P Parameter: Age (day) Value: 7
  misc_feature: MA Experiment 20000436 PARAMETER Experiment Name: At_Drought_P Parameter: Organism Value: A. thaliana
  misc_feature: MA Experiment 20000436 PARAMETER Experiment Name: At_Drought_P Parameter: Plant Line Value: WS
  misc_feature: MA Experiment 20000436 PARAMETER Experiment Name: At_Drought_P Parameter: Timepoint (hr) Value: 12
  misc_feature: MA Experiment 20000436 PARAMETER Experiment Name: At_Drought_P Parameter: Tissue Value: Whole Plant
  misc_feature: MA Experiment 20000436 PARAMETER Experiment Name: At_Drought_P Parameter: Treatment Value: Drought vs. No Drought
  misc_feature: MA Experiment ID: 20000437 Result: Down-regulated in Transcription
  misc_feature: MA Experiment 20000437 PARAMETER Experiment Name: At_Drought_P Parameter: Age (day) Value: 8
  misc_feature: MA Experiment 20000437 PARAMETER Experiment Name: At_Drought_P Parameter: Organism Value: A. thaliana
  misc_feature: MA Experiment 20000437 PARAMETER Experiment Name: At_Drought_P Parameter: Plant Line Value: WS
  misc_feature: MA Experiment 20000437 PARAMETER Experiment Name: At_Drought_P Parameter: Timepoint (hr) Value: 24
  misc_feature: MA Experiment 20000437 PARAMETER Experiment Name: At_Drought_P Parameter: Tissue Value: Whole Plant
  misc_feature: MA Experiment 20000437 PARAMETER Experiment Name: At_Drought_P Parameter: Treatment Value: Drought vs. No Drought
  misc_feature: MA Experiment ID: 20000439 Result: Down-regulated in Transcription
  misc_feature: MA Experiment 20000439 PARAMETER Experiment Name: At_Roots__P Parameter: Age (day) Value: 14 vs. 21
  misc_feature: MA Experiment 20000439 PARAMETER Experiment Name: At_Roots__P Parameter: Organism Value: A. thaliana
  misc_feature: MA Experiment 20000439 PARAMETER Experiment Name: At_Roots__P Parameter: Tissue Value: Roots vs. Whole Plant
  misc_feature: MA Experiment ID: 20001247 Result: Down-regulated in Transcription
  misc_feature: MA Experiment 20001247 PARAMETER Experiment Name: At_Far-red-induction_P Parameter: Age (day) Value: 7
  misc_feature: MA Experiment 20001247 PARAMETER Experiment Name: At_Far-red-induction_P Parameter: Light Value: Far-red vs. White
  misc_feature: MA Experiment 20001247 PARAMETER Experiment Name: At_Far-red-induction_P Parameter: Organism Value: A. thaliana
  misc_feature: MA Experiment 20001247 PARAMETER Experiment Name: At_Far-red-induction_P Parameter: Plant Line Value: Columbia
  misc_feature: MA Experiment 20001247 PARAMETER Experiment Name: At_Far-red-induction_P Parameter: Timepoint (hr) Value: 1
  misc_feature: MA Experiment 20001247 PARAMETER Experiment Name: At_Far-red-induction_P Parameter: Tissue Value: Whole Plant
  misc_feature: MA Experiment ID: 20001248 Result: Down-regulated in Transcription
  misc_feature: MA Experiment 20001248 PARAMETER Experiment Name: At_Far-red-induction_P Parameter: Age (day) Value: 7
  misc_feature: MA Experiment 20001248 PARAMETER Experiment Name: At_Far-red-induction_P Parameter: Light Value: Far-red vs. White
  misc_feature: MA Experiment 20001248 PARAMETER Experiment Name: At_Far-red-induction_P Parameter: Organism Value: A. thaliana
  misc_feature: MA Experiment 20001248 PARAMETER Experiment Name: At_Far-red-induction_P Parameter: Plant Line Value: Columbia
  misc_feature: MA Experiment 20001248 PARAMETER Experiment Name: At_Far-red-induction_P Parameter: Timepoint (hr) Value: 4
  misc_feature: MA Experiment 20001248 PARAMETER Experiment Name: At_Far-red-induction_P Parameter: Tissue Value: Whole Plant
  misc_feature: MA Experiment ID: 20001450 Result: Down-regulated in Transcription
  misc_feature: MA Experiment 20001450 PARAMETER Experiment Name: At_Far-red-induction_P Parameter: Age (day) Value: 7
  misc_feature: MA Experiment 20001450 PARAMETER Experiment Name: At_Far-red-induction_P Parameter: Light Value: Far-red vs. White
  misc_feature: MA Experiment 20001450 PARAMETER Experiment Name: At_Far-red-induction_P Parameter: Organism Value: A. thaliana
  misc_feature: MA Experiment 20001450 PARAMETER Experiment Name: At_Far-red-induction_P Parameter: Plant Line Value: Columbia
  misc_feature: MA Experiment 20001450 PARAMETER Experiment Name: At_Far-red-induction_P Parameter: Timepoint (hr) Value: 8
  misc_feature: MA Experiment 20001450 PARAMETER Experiment Name: At_Far-red-induction_P Parameter: Tissue Value: Whole Plant
  misc_feature: MA Experiment ID: 20001558 Result: Up-regulated in Transcription
  misc_feature: MA Experiment 20001558 PARAMETER Experiment Name: At_Drought_Soil_Dry_P Parameter: Age (day) Value: 27
  misc_feature: MA Experiment 20001558 PARAMETER Experiment Name: At_Drought_Soil_Dry_P Parameter: Organism Value: A. thaliana
  misc_feature: MA Experiment 20001558 PARAMETER Experiment Name: At_Drought_Soil_Dry_P Parameter: Plant Line Value: WS
  misc_feature: MA Experiment 20001558 PARAMETER Experiment Name: At_Drought_Soil_Dry_P Parameter: Post Timepoint (hr) Value: 6
  misc_feature: MA Experiment 20001558 PARAMETER Experiment Name: At_Drought_Soil_Dry_P Parameter: Post-Treatment Value: Re-Water vs. No Drought
  misc_feature: MA Experiment 20001558 PARAMETER Experiment Name: At_Drought_Soil_Dry_P Parameter: Timepoint (day) Value: 13
  misc_feature: MA Experiment 20001558 PARAMETER Experiment Name: At_Drought_Soil_Dry_P Parameter: Treatment Value: Drought vs. No Drought
  misc_feature: MA Experiment ID: 20001560 Result: Up-regulated in Transcription
  misc_feature: MA Experiment 20001560 PARAMETER Experiment Name: At_Drought_Soil_Dry_P Parameter: Age (day) Value: 28
  misc_feature: MA Experiment 20001560 PARAMETER Experiment Name: At_Drought_Soil_Dry_P Parameter: Organism Value: A. thaliana
  misc_feature: MA Experiment 20001560 PARAMETER Experiment Name: At_Drought_Soil_Dry_P Parameter: Plant Line Value: WS
  misc_feature: MA Experiment 20001560 PARAMETER Experiment Name: At_Drought_Soil_Dry_P Parameter: Post Timepoint (hr) Value: None
  misc_feature: MA Experiment 20001560 PARAMETER Experiment Name: At_Drought_Soil_Dry_P Parameter: Post-Treatment Value: None
  misc_feature: MA Experiment 20001560 PARAMETER Experiment Name: At_Drought_Soil_Dry_P Parameter: Timepoint (day) Value: 14
  misc_feature: MA Experiment 20001560 PARAMETER Experiment Name: At_Drought_Soil_Dry_P Parameter: Treatment Value: Drought vs. No Drought
  misc_feature: MA Experiment ID: 20001911 Result: Down-regulated in Transcription
  misc_feature: MA Experiment 20001911 PARAMETER Experiment Name: At_Drought_Reproduction_P Parameter: Age (day) Value: 40
  misc_feature: MA Experiment 20001911 PARAMETER Experiment Name: At_Drought_Reproduction_P Parameter: Organism Value: A. thaliana
  misc_feature: MA Experiment 20001911 PARAMETER Experiment Name: At_Drought_Reproduction_P Parameter: Plant Line Value: WS
  misc_feature: MA Experiment 20001911 PARAMETER Experiment Name: At_Drought_Reproduction_P Parameter: Timepoint (day) Value: 10
  misc_feature: MA Experiment 20001911 PARAMETER Experiment Name: At_Drought_Reproduction_P Parameter: Tissue Value: Flowers
  misc_feature: MA Experiment 20001911 PARAMETER Experiment Name: At_Drought_Reproduction_P Parameter: Treatment Value: Drought vs. No Drought
attttttcctttgggactcactgagattactactaccaaatccaacaatggcgatttctttcgcaatcgatccttccatatctccttgcttctccttctcctctccatcttcttcatcaaaaaccttacctttacgaaacaacctccatttccatggcagaccttcaccaatatctccactcatttcaaaacccagtcgaaaattcccaatcttctctgctcaccaaactaataacagtgaagaagcgaattcaaagcagcaagcagatgtaaaaaccctaattaggtcatataaacaagctcttctcaacggagacgaaacctcagttacagaaatcgaaacgatgttttgcaaaatcgagaaggagaagaataaaatggatcaaaaggttttatctttatcaatgaagatagcttcagagaaagagatgaaaattcgattacaagctgattttgataatacaaggaagaagcttgataaagataggcttagtacagagtctaatgcaaaagttcagattcttaagtctcttttacctattattgatagttttgagaaagctaagttacaggttagagttgatactgataaggagaagaagattgatacgagttatcaagggatttataggcaatttgttgaggttttgagatatcttcgtgtttcggttattgcaactgttggcaagccttttgatcctttgttgcacgaggctatttcacgggaagaatctgaggcggttaaagcagggataataaccgaggagctgaacaagggatttgttctaggagatcgtgttctgagaccagcaaaggttaaagtttctttaggacccgtcaacaagaagactccttcagctgctgaggaaataacaccttctgcttgagttcgatgtcgggtaaaagtttcaatgtcttgtgctaatgtccattttttattcacctatcaaagggataccaaaattgcaacaatgtctaatgagaaagttctttggcttcagagtttatgattcatgttttacgattt

SEQ ID NO: 106427 - protein, 294 aa, Arabidopsis thaliana
  peptide (1)..(294): Ceres Seq. ID no. 13619542
  misc_feature (121)..(276): Pfam Name: GrpE Pfam Description: GrpE
  misc_feature (16)..(294): Homolog of NCBI NO: 18400095 NR Description: heat shock protein -related [Arabidopsis thaliana]
  misc_feature (16)..(294): Homolog of NCBI NO: 21593629 NR Description: putative heat shock protein [Arabidopsis thaliana]
  misc_feature (11)..(291): Homolog of NCBI NO: 18418410 NR Description: chloroplast GrpE protein [Arabidopsis thaliana] putative chloroplast GrpE protein [Arabidopsis thaliana]
  misc_feature (81)..(291): Homolog of NCBI NO: 30686476 NR Description: chloroplast GrpE protein [Arabidopsis thaliana] GrpE protein [Arabidopsis thaliana] >gi|9759048|dbj|BAB09570.1|
  misc_feature (83)..(289): Homolog of NCBI NO: 32488078 NR Description: OSJNBa0084A10.6 [Oryza sativa (japonica
  misc_feature (59)..(289): Homolog of NCBI NO: 15384279 NR Description: co-chaperone CGE1 precursor isoform b
  misc_feature (59)..(289): Homolog of NCBI NO: 15384277 NR Description: co-chaperone CGE1 precursor isoform a
  misc_feature (132)..(278): Homolog of NCBI NO: 22298857 NR Description: heat shock protein [Thermosynechococcus elongatus >gi|22295038|dbj|BAC08866.1| heat shock protein
  misc_feature (96)..(276): Homolog of NCBI NO: 37523763 NR Description: heat shock protein [Gloeobacter violaceus]
  misc_feature (100)..(288): Homolog of NCBI NO: 33862294 NR Description: Heat shock protein GrpE [Prochlorococcus marinus MIT 9313] >gi|33640407|emb|CAE20196.1| Heat shock protein GrpE
FFLWDSLRLLLPNPTMAISFAIDPSISPCFSFSSPSSSSKTLPLRNNLHFHGRPSPISPLISKPSRKFPIFSAHQTNNSEEANSKQQADVKTLIRSYKQALLNGDETSVTEIETMFCKIEKEKNKMDQKVLSLSMKIASEKEMKIRLQADFDNTRKKLDKDRLSTESNAKVQILKSLLPIIDSFEKAKLQVRVDTDKEKKIDTSYQGIYRQFVEVLRYLRVSVIATVGKPFDPLLHEAISREESEAVKAGIITEELNKGFVLGDRVLRPAKVKVSLGPVNKKTPSAAEEITPSA

SEQ ID NO: 106428 - protein, 279 aa, Arabidopsis thaliana; identical to SEQ ID NO: 25466
  peptide (1)..(279): Ceres Seq. ID no. 13619543
  misc_feature (106)..(261): Pfam Name: GrpE Pfam Description: GrpE
  misc_feature (1)..(279): Homolog of NCBI NO: 18400095 NR Description: heat shock protein -related [Arabidopsis thaliana]
  misc_feature (1)..(279): Homolog of NCBI NO: 21593629 NR Description: putative heat shock protein [Arabidopsis thaliana]
  misc_feature (1)..(276): Homolog of NCBI NO: 18418410 NR Description: chloroplast GrpE protein [Arabidopsis thaliana] putative chloroplast GrpE protein [Arabidopsis thaliana]
  misc_feature (66)..(276): Homolog of NCBI NO: 30686476 NR Description: chloroplast GrpE protein [Arabidopsis thaliana] GrpE protein [Arabidopsis thaliana] >gi|9759048|dbj|BAB09570.1|
  misc_feature (68)..(274): Homolog of NCBI NO: 32488078 NR Description: OSJNBa0084A10.6 [Oryza sativa (japonica
  misc_feature (44)..(274): Homolog of NCBI NO: 15384279 NR Description: co-chaperone CGE1 precursor isoform b
  misc_feature (44)..(274): Homolog of NCBI NO: 15384277 NR Description: co-chaperone CGE1 precursor isoform a
  misc_feature (117)..(263): Homolog of NCBI NO: 22298857 NR Description: heat shock protein [Thermosynechococcus elongatus >gi|22295038|dbj|BAC08866.1| heat shock protein
  misc_feature (81)..(261): Homolog of NCBI NO: 37523763 NR Description: heat shock protein [Gloeobacter violaceus]
  misc_feature (85)..(273): Homolog of NCBI NO: 33862294 NR Description: Heat shock protein GrpE [Prochlorococcus marinus MIT 9313] >gi|33640407|emb|CAE20196.1| Heat shock protein GrpE

SEQ ID NO: 106429 - protein, 180 aa, Arabidopsis thaliana; identical to SEQ ID NO: 25467
  peptide (1)..(180): Ceres Seq. ID no. 13619544
  misc_feature (7)..(162): Pfam Name: GrpE Pfam Description: GrpE
  misc_feature (1)..(180): Homolog of NCBI NO: 18400095 NR Description: heat shock protein -related [Arabidopsis thaliana]
  misc_feature (1)..(180): Homolog of NCBI NO: 21593629 NR Description: putative heat shock protein [Arabidopsis thaliana]
  misc_feature (1)..(177): Homolog of NCBI NO: 18418410 NR Description: chloroplast GrpE protein [Arabidopsis thaliana] putative chloroplast GrpE protein [Arabidopsis thaliana]
  misc_feature (1)..(177): Homolog of NCBI NO: 30686476 NR Description: chloroplast GrpE protein [Arabidopsis thaliana] GrpE protein [Arabidopsis thaliana] >gi|9759048|dbj|BAB09570.1|
  misc_feature (1)..(175): Homolog of NCBI NO: 32488078 NR Description: OSJNBa0084A10.6 [Oryza sativa (japonica
  misc_feature (1)..(175): Homolog of NCBI NO: 15384279 NR Description: co-chaperone CGE1 precursor isoform b
  misc_feature (1)..(175): Homolog of NCBI NO: 15384277 NR Description: co-chaperone CGE1 precursor isoform a
  misc_feature (18)..(164): Homolog of NCBI NO: 22298857 NR Description: heat shock protein [Thermosynechococcus elongatus >gi|22295038|dbj|BAC08866.1| heat shock protein
  misc_feature (1)..(162): Homolog of NCBI NO: 37523763 NR Description: heat shock protein [Gloeobacter violaceus]
  misc_feature (1)..(174): Homolog of NCBI NO: 33862294 NR Description: Heat shock protein GrpE [Prochlorococcus marinus MIT 9313] >gi|33640407|emb|CAE20196.1| Heat shock protein GrpE

SEQ ID NO: 106430 - DNA, 3590 bp, Arabidopsis thaliana
  misc_feature (1)..(3590): Ceres Seq. ID no. 13619549
  misc_feature: MA Experiment ID: 20000182 Result: Up-regulated in Transcription
  misc_feature: MA Experiment 20000182 PARAMETER Experiment Name: At_2mM_SA_P Parameter: Age (day) Value: 14
  misc_feature: MA Experiment 20000182 PARAMETER Experiment Name: At_2mM_SA_P Parameter: Organism Value: A. thaliana
  misc_feature: MA Experiment 20000182 PARAMETER Experiment Name: At_2mM_SA_P Parameter: Plant Line Value: WS
  misc_feature: MA Experiment 20000182 PARAMETER Experiment Name: At_2mM_SA_P Parameter: Timepoint (hr) Value: 6
  misc_feature: MA Experiment 20000182 PARAMETER Experiment Name: At_2mM_SA_P Parameter: Tissue Value: Aerial
  misc_feature: MA Experiment 20000182 PARAMETER Experiment Name: At_2mM_SA_P Parameter: Treatment Value: 2mM SA vs. No Treatment
  misc_feature: MA Experiment ID: 20000184 Result: Down-regulated in Transcription
  misc_feature: MA Experiment 20000184 PARAMETER Experiment Name: At_Shoots__P Parameter: Age (day) Value: 7
  misc_feature: MA Experiment 20000184 PARAMETER Experiment Name: At_Shoots__P Parameter: Tissue Value: Shoots vs. Whole Plant
  misc_feature: MA Experiment ID: 20000234 Result: Down-regulated in Transcription
  misc_feature: MA Experiment 20000234 PARAMETER Experiment Name: At_Siliques_P Parameter: Age (day) Value: 21
  misc_feature: MA Experiment 20000234 PARAMETER Experiment Name: At_Siliques_P Parameter: Organism Value: A. thaliana
  misc_feature: MA Experiment 20000234 PARAMETER Experiment Name: At_Siliques_P Parameter: Plant Line Value: WS
  misc_feature: MA Experiment 20000234 PARAMETER Experiment Name: At_Siliques_P Parameter: Tissue Value: Less Than 5mm Siliques vs. Whole Plant
  misc_feature: MA Experiment ID: 20000235 Result: Down-regulated in Transcription
  misc_feature: MA Experiment 20000235 PARAMETER Experiment Name: At_Siliques_P Parameter: Age (day) Value: 21
  misc_feature: MA Experiment 20000235 PARAMETER Experiment Name: At_Siliques_P Parameter: Organism Value: A. thaliana
  misc_feature: MA Experiment 20000235 PARAMETER Experiment Name: At_Siliques_P Parameter: Plant Line Value: WS
  misc_feature: MA Experiment 20000235 PARAMETER Experiment Name: At_Siliques_P Parameter: Tissue Value: 5-10mm Siliques vs. Whole Plant
  misc_feature: MA Experiment ID: 20000264 Result: Down-regulated in Transcription
  misc_feature: MA Experiment 20000264 PARAMETER Experiment Name: At_Open_Flower_P Parameter: Age (day) Value: 21
  misc_feature: MA Experiment 20000264 PARAMETER Experiment Name: At_Open_Flower_P Parameter: Plant Line Value: WS
  misc_feature: MA Experiment 20000264 PARAMETER Experiment Name: At_Open_Flower_P Parameter: Tissue Value: Open Flower vs. Whole Plant
  misc_feature: MA Experiment ID: 20000265 Result: Down-regulated in Transcription
  misc_feature: MA Experiment 20000265 PARAMETER Experiment Name: At_Open_Flower_P Parameter: Age (day) Value: 21
  misc_feature: MA Experiment 20000265 PARAMETER Experiment Name: At_Open_Flower_P Parameter: Plant Line Value: WS
  misc_feature: MA Experiment 20000265 PARAMETER Experiment Name: At_Open_Flower_P Parameter: Tissue Value: Closed Flower vs. Whole Plant
  misc_feature: MA Experiment ID: 20000286 Result: Down-regulated in Transcription
  misc_feature: MA Experiment 20000286 PARAMETER Experiment Name: At_Open_Flower_P Parameter: Age (day) Value: 21
  misc_feature: MA Experiment 20000286 PARAMETER Experiment Name: At_Open_Flower_P Parameter: Plant Line Value: WS
  misc_feature: MA Experiment 20000286 PARAMETER Experiment Name: At_Open_Flower_P Parameter: Tissue Value: Half Open vs. Whole Plant
  misc_feature: MA Experiment ID: 20000438 Result: Down-regulated in Transcription
  misc_feature: MA Experiment 20000438 PARAMETER Experiment Name: At_Shoots__P Parameter: Age (day) Value: 14
  misc_feature: MA Experiment 20000438 PARAMETER Experiment Name: At_Shoots__P Parameter: Tissue Value: Shoots vs. Whole Plant
  misc_feature: MA Experiment ID: 20000456 Result: Up-regulated in Transcription
  misc_feature: MA Experiment 20000456 PARAMETER Experiment Name: At_100uM_BA_P Parameter: Age (day) Value: 14
  misc_feature: MA Experiment 20000456 PARAMETER Experiment Name: At_100uM_BA_P Parameter: Organism Value: A. thaliana
  misc_feature: MA Experiment 20000456 PARAMETER Experiment Name: At_100uM_BA_P Parameter: Plant Line Value: WS
  misc_feature: MA Experiment 20000456 PARAMETER Experiment Name: At_100uM_BA_P Parameter: Timepoint (hr) Value: 6
  misc_feature: MA Experiment 20000456 PARAMETER Experiment Name: At_100uM_BA_P Parameter: Tissue Value: Aerial
  misc_feature: MA Experiment 20000456 PARAMETER Experiment Name: At_100uM_BA_P Parameter: Treatment Value: 100uM BA vs. No Treatment
  misc_feature: MA Experiment ID: 20000527 Result: Down-regulated in Transcription
  misc_feature: MA Experiment 20000527 PARAMETER Experiment Name: At_10percent_PEG_P Parameter: Age (day) Value: 20
  misc_feature: MA Experiment 20000527 PARAMETER Experiment Name: At_10percent_PEG_P Parameter: Organism Value: A. thaliana
  misc_feature: MA Experiment 20000527 PARAMETER Experiment Name: At_10percent_PEG_P Parameter: Plant Line Value: WS
  misc_feature: MA Experiment 20000527 PARAMETER Experiment Name: At_10percent_PEG_P Parameter: Timepoint (day) Value: 20
  misc_feature: MA Experiment 20000527 PARAMETER Experiment Name: At_10percent_PEG_P Parameter: Tissue Value: Whole Plant
  misc_feature: MA Experiment 20000527 PARAMETER Experiment Name: At_10percent_PEG_P Parameter: Treatment Value: 10percent PEG vs. No Treatment
  misc_feature: MA Experiment ID: 20000709 Result: Up-regulated in Transcription
  misc_feature: MA Experiment 20000709 PARAMETER Experiment Name: At_15mM_NH4NO3_L-to-H_P Parameter: Age (hr) Value: 14
  misc_feature: MA Experiment 20000709 PARAMETER Experiment Name: At_15mM_NH4NO3_L-to-H_P Parameter: Organism Value: A. thaliana
  misc_feature: MA Experiment 20000709 PARAMETER Experiment Name: At_15mM_NH4NO3_L-to-H_P Parameter: Plant Line Value: WS
  misc_feature: MA Experiment 20000709 PARAMETER Experiment Name: At_15mM_NH4NO3_L-to-H_P Parameter: Timepoint (hr) Value: 4
  misc_feature: MA Experiment 20000709 PARAMETER Experiment Name: At_15mM_NH4NO3_L-to-H_P Parameter: Tissue Value: Aerial
  misc_feature: MA Experiment 20000709 PARAMETER Experiment Name: At_15mM_NH4NO3_L-to-H_P Parameter: Treatment Value: 15mM NH4NO3 vs. 30mM Mannitol
  misc_feature: MA Experiment ID: 20000794 Result: Down-regulated in Transcription
  misc_feature: MA Experiment 20000794 PARAMETER Experiment Name: At_Petals_P Parameter: Age (day) Value: 23-25 days
  misc_feature: MA Experiment 20000794 PARAMETER Experiment Name: At_Petals_P Parameter: Plant Line Value: WS
  misc_feature: MA Experiment 20000794 PARAMETER Experiment Name: At_Petals_P Parameter: Tissue Value: Petals vs. Whole plant
  misc_feature: MA Experiment ID: 20001905 Result: Up-regulated in Transcription
  misc_feature: MA Experiment 20001905 PARAMETER Experiment Name: At_Drought_Reproduction_P Parameter: Age (day) Value: 40
  misc_feature: MA Experiment 20001905 PARAMETER Experiment Name: At_Drought_Reproduction_P Parameter: Organism Value: A. thaliana
  misc_feature: MA Experiment 20001905 PARAMETER Experiment Name: At_Drought_Reproduction_P Parameter: Plant Line Value: WS
  misc_feature: MA Experiment 20001905 PARAMETER Experiment Name: At_Drought_Reproduction_P Parameter: Timepoint (day) Value: 10
  misc_feature: MA Experiment 20001905 PARAMETER Experiment Name: At_Drought_Reproduction_P Parameter: Tissue Value: Rosettes
  misc_feature: MA Experiment 20001905 PARAMETER Experiment Name: At_Drought_Reproduction_P Parameter: Treatment Value: Drought vs. No Drought
gaattcgtcgaggaacatcgcagaggacagtaaagaagcaaaccaagaagaccaagtggaggaggacgatgactatggtgacgcgtgtgatcatgacggatgatgattctcagtcactttgctttctttgtttcttactcttctttttcatcactgctatagcagtggctggagattctctggacagtgatagagaagtcttgttaagcctaaaatcgtaccttgaatcacggaacccacagaaccgaggactatacacggaatggaaaatggagaaccaagatgttgtgtgtcaatggcctggaatcatatgtacacctcagagaagtagagttacagggatcaatctaactgattccaccatttcaggtcctctattcaagaacttctccgctttaacggagctcacatatctcgatttatcaaggaatacgatcgaaggggagattccagatgacttgagccgttgtcacaacttaaagcatctgaatctttctcataatatccttgaaggagagctaagtttacccgggttgtcaaatcttgaggttcttgatctttcgttgaataggattacgggtgatattcagtctagcttcccattgttctgcaacagtttggttgttgcaaatctgtcgaccaacaactttactggaagaatcgatgacatcttcaacgggtgtaggaatctcaagtatgttgacttcagttccaatagattcagtggagaagtgtggactggttttgggaggctggtcgagttttcagttgctgataatcatctctccgggaatatctctgcttcaatgttcagggggaactgtactttgcaaatgttggatttgtctgggaacgcttttggtggggaatttccaggccaagtttcgaattgccagaatctaaatgtactgaatctttggggaaacaagttcacagggaacattccagctgagattggttccatatcctctctcaaaggtttgtacttggggaataatacattttctcgagacataccggaaactctcctgaacttgaccaacttggtgtttctggatttgagcagaaacaaatttggaggagacattcaagaaatctttgggagattcacgcaagtaaagtatctagtcttgcatgcaaactcatacgtaggaggcatcaattcttccaacatcctcaagttacccaatctttcaaggctagatttgggctacaacaatttctcgggacagttacctactgaaatttctcagatacagagtttgaagttcttgattcttgcttataataacttcagtggcgatataccacaggagtatgggaacatgccggggcttcaagcacttgatctctcctttaacaagctgaccggttcgataccagcttcatttgggaaattgacctctcttttgtggctaatgcttgcaaacaactctctatcaggagaaatccctcgagagattggcaactgcacaagccttttgtggtttaacgtggcaaacaaccagctctctggtagattccatcctgaattgactagaatggggagtaatccttctccaacatttgaagtgaataggcaaaacaaagacaagataattgctggttctggtgaatgcttggcgatgaagagatggattccagcggagttccctccgttcaactttgtatacgcaattctaaccaaaaagagttgcagaagcctatgggaccatgttctcaaagggtacggtctctttcctgtctgttctgctggttccacggtacgcacgcttaaaatttcagcctatcttcagctcagtggaaataagttttcaggtgagattcctgcaagcatctctcagatggacaggctgagcacactacatttgggtttcaatgagtttgaggggaaactgcctccagagataggacaattgcctcttgcattcctcaaccttactcgaaacaatttctcgggcgagattcctcaagaaatcggaaatctgaagtgcctgcagaatcttgatctgtctttcaacaatttctctggaaactttccaacgagtttgaatgacttgaatgagctgagtaagttcaacatctcatataaccctttcatttctggcgcgataccaacaacaggacaagtagcaacctttgacaaagactcctttcttggaaatccgctgctgcggtttcctagtttcttcaaccaatcagggaacaacacgaggaagatttccaaccaagtcctaggaaacaggccaagaactcttcttttgatttggatttccttggctcttgcattggcgtttattgcatgtttagtggtatcaggtattgtacttatggttgttaaggcttcaagggaagcagaaatcgatctcttagatgggtcgaaaaccagacatgacatgacttccagttcaggtggatcatcgccatggctatcaggaaaaatcaaggtcattcgcttagacaaatcaactttcacatacgctgacattctgaaagcaaccagtaacttctctgaggagagagtggtaggtaggggaggctatggaactgtttacagaggcgtattgcctgatggaagagaagttgcagtcaagaagcttcagagggaaggcacagaagcagagaaagagttcagagctgaaatggaagttctaagtgccaacgcatttggagattgggcacatccgaacctcgtgaggctatatggatggtgcctagatgggtcagagaaaatcttggtgcacgaatacatgggaggcgggagcttagaggagctcatcacagacaaaacaaaacttcaatggaagaaacgtattgatatagccacagatgtagcaaggggattagtgtttttacaccacgaatgctacccttccatcgttcacagagacgtcaaagccagtaacgttcttttggataaacacgggaatgcgagagtgacggattttggactagcaagactcttaaatgtaggagatagccatgtgagcacagtgattgcaggcacaatcgggtatgtagctcccgagtatggacaaacttggcaagccaccacaagaggagatgtttacagctacggagtattgaccatggaactcgcgacgggtagaagagctgttgatggaggagaagagtgtttggtcgaatgggcaagacgtgtaatgacaggtaacatgacagccaaaggttcaccaataaccctgtcagggaccaaaccagggaacggagctgagcaaatgactgagctactaaagattggtgtgaagtgtacagctgatcatcctcaggcaagaccaaacatgaaagaagttctagctatgttggttaagatatccggtaaagcagagctcttcaatggcttatcttcacaaggttacatagaaatgtaaaaatctttctttcttttcttctttcagatttattatacagaacaacagagttttcttcttcaccatttttcgtttcattgtttctgattcttcttgtacacagaacctcattgttatcagacagatagggatagagaaaggtagttttgttcgcaatgtacagagacacaatctgaaaataaagatcttctcttcttcttg

SEQ ID NO: 106431 - protein, 1128 aa, Arabidopsis thaliana
  peptide (1)..(1128): Ceres Seq. ID no. 13619550
  misc_feature (39)..(771): Homolog of NCBI NO: 27817943 NR Description: P0453E05.23 [Oryza sativa (japonica
  misc_feature (814)..(1112): Homolog of NCBI NO: 27817943 NR Description: P0453E05.23 [Oryza sativa (japonica
  misc_feature (62)..(772): Homolog of NCBI NO: 38637094 NR Description: putative receptor protein kinase [Oryza sativa
  misc_feature (45)..(728): Homolog of NCBI NO: 34896310 NR Description: putative disease resistance protein [Oryza >gi|14018074|gb|AAK52137.1| putative disease resistance protein
  misc_feature (114)..(681): Homolog of NCBI NO: 13620226 NR Description: hypothetical protein [Lycopersicon esculentum]
  misc_feature (604)..(1126): Homolog of NCBI NO: 13620226 NR Description: hypothetical protein [Lycopersicon esculentum]
  misc_feature (109)..(680): Homolog of NCBI NO: 15222751 NR Description: receptor kinase -related [Arabidopsis thaliana]
  misc_feature (604)..(1115): Homolog of NCBI NO: 15222751 NR Description: receptor kinase -related [Arabidopsis thaliana]
  misc_feature (109)..(680): Homolog of NCBI NO: 13620169 NR Description: hypothetical protein [Capsella rubella]
  misc_feature (604)..(1115): Homolog of NCBI NO: 13620169 NR Description: hypothetical protein [Capsella rubella]
IRRGTSQRTVKKQTKKTKWRRTMTMVTRVIMTDDDSQSLCFLCFLLFFFITAIAVAGDSLDSDREVLLSLKSYLESRNPQNRGLYTEWKMENQDVVCQWPGIICTPQRSRVTGINLTDSTISGPLFKNFSALTELTYLDLSRNTIEGEIPDDLSRCHNLKHLNLSHNILEGELSLPGLSNLEVLDLSLNRITGDIQSSFPLFCNSLVVANLSTNNFTGRIDDIFNGCRNLKYVDFSSNRFSGEVWTGFGRLVEFSVADNHLSGNISASMFRGNCTLQMLDLSGNAFGGEFPGQVSNCQNLNVLNLWGNKFTGNIPAEIGSISSLKGLYLGNNTFSRDIPETLLNLTNLVFLDLSRNKFGGDIQEIFGRFTQVKYLVLHANSYVGGINSSNILKLPNLSRLDLGYNNFSGQLPTEISQIQSLKFLILAYNNFSGDIPQEYGNMPGLQALDLSFNKLTGSIPASFGKLTSLLWLMLANNSLSGEIPREIGNCTSLLWFNVANNQLSGRFHPELTRMGSNPSPTFEVNRQNKDKIIAGSGECLAMKRWIPAEFPPFNFVYAILTKKSCRSLWDHVLKGYGLFPVCSAGSTVRTLKISAYLQLSGNKFSGEIPASISQMDRLSTLHLGFNEFEGKLPPEIGQLPLAFLNLTRNNFSGEIPQEIGNLKCLQNLDLSFNNFSGNFPTSLNDLNELSKFNISYNPFISGAIPTTGQVATFDKDSFLGNPLLRFPSFFNQSGNNTRKISNQVLGNRPRTLLLIWISLALALAFIACLVVSGIVLMVVKASREAEIDLLDGSKTRHDMTSSSGGSSPWLSGKIKVIRLDKSTFTYADILKATSNFSEERVVGRGGYGTVYRGVLPDGREVAVKKLQREGTEAEKEFRAEMEVLSANAFGDWAHPNLVRLYGWCLDGSEKILVHEYMGGGSLEELITDKTKLQWKKRIDIATDVARGLVFLHHECYPSIVHRDVKASNVLLDKHGNARVTDFGLARLLNVGDSHVSTVIAGTIGYVAPEYGQTWQATTRGDVYSYGVLTMELATGRRAVDGGEECLVEWARRVMTGNMTAKGSPITLSGTKPGNGAEQMTELLKIGVKCTADHPQARPNMKEVLAMLVKISGKAELFNGLSSQGYIEM

SEQ ID NO: 106432 - protein, 1106 aa, Arabidopsis thaliana
  peptide (1)..(1106): Ceres Seq. ID no. 13619551
  misc_feature (17)..(749): Homolog of NCBI NO: 27817943 NR Description: P0453E05.23 [Oryza sativa (japonica
  misc_feature (792)..(1090): Homolog of NCBI NO: 27817943 NR Description: P0453E05.23 [Oryza sativa (japonica
  misc_feature (40)..(750): Homolog of NCBI NO: 38637094 NR Description: putative receptor protein kinase [Oryza sativa
  misc_feature (23)..(706): Homolog of NCBI NO: 34896310 NR Description: putative disease resistance protein [Oryza >gi|14018074|gb|AAK52137.1| putative disease resistance protein
  misc_feature (92)..(659): Homolog of NCBI NO: 13620226 NR Description: hypothetical protein [Lycopersicon esculentum]
  misc_feature (582)..(1104): Homolog of NCBI NO: 13620226 NR Description: hypothetical protein [Lycopersicon esculentum]
  misc_feature (87)..(658): Homolog of NCBI NO: 15222751 NR Description: receptor kinase -related [Arabidopsis thaliana]
  misc_feature (582)..(1093): Homolog of NCBI NO: 15222751 NR Description: receptor kinase -related [Arabidopsis thaliana]
  misc_feature (87)..(658): Homolog of NCBI NO: 13620169 NR Description: hypothetical protein [Capsella rubella]
  misc_feature (582)..(1093): Homolog of NCBI NO: 13620169 NR Description: hypothetical protein [Capsella rubella]
MTMVTRVIMTDDDSQSLCFLCFLLFFFITAIAVAGDSLDSDREVLLSLKSYLESRNPQNRGLYTEWKMENQDVVCQWPGIICTPQRSRVTGINLTDSTISGPLFKNFSALTELTYLDLSRNTIEGEIPDDLSRCHNLKHLNLSHNILEGELSLPGLSNLEVLDLSLNRITGDIQSSFPLFCNSLVVANLSTNNFTGRIDDIFNGCRNLKYVDFSSNRFSGEVWTGFGRLVEFSVADNHLSGNISASMFRGNCTLQMLDLSGNAFGGEFPGQVSNCQNLNVLNLWGNKFTGNIPAEIGSISSLKGLYLGNNTFSRDIPETLLNLTNLVFLDLSRNKFGGDIQEIFGRFTQVKYLVLHANSYVGGINSSNILKLPNLSRLDLGYNNFSGQLPTEISQIQSLKFLILAYNNFSGDIPQEYGNMPGLQALDLSFNKLTGSIPASFGKLTSLLWLMLANNSLSGEIPREIGNCTSLLWFNVANNQLSGRFHPELTRMGSNPSPTFEVNRQNKDKIIAGSGECLAMKRWIPAEFPPFNFVYAILTKKSCRSLWDHVLKGYGLFPVCSAGSTVRTLKISAYLQLSGNKFSGEIPASISQMDRLSTLHLGFNEFEGKLPPEIGQLPLAFLNLTRNNFSGEIPQEIGNLKCLQNLDLSFNNFSGNFPTSLNDLNELSKFNISYNPFISGAIPTTGQVATFDKDSFLGNPLLRFPSFFNQSGNNTRKISNQVLGNRPRTLLLIWISLALALAFIACLVVSGIVLMVVKASREAEIDLLDGSKTRHDMTSSSGGSSPWLSGKIKVIRLDKSTFTYADILKATSNFSEERVVGRGGYGTVYRGVLPDGREVAVKKLQREGTEAEKEFRAEMEVLSANAFGDWAHPNLVRLYGWCLDGSEKILVHEYMGGGSLEELITDKTKLQWKKRIDIATDVARGLVFLHHECYPSIVHRDVKASNVLLDKHGNARVTDFGLARLLNVGDSHVSTVIAGTIGYVAPEYGQTWQATTRGDVYSYGVLTMELATGRRAVDGGEECLVEWARRVMTGNMTAKGSPITLSGTKPGNGAEQMTELLKIGVKCTADHPQARPNMKEVLAMLVKISGKAELFNGLSSQGYIEM

SEQ ID NO: 106433 - protein, 1104 aa, Arabidopsis thaliana
  peptide (1)..(1104): Ceres Seq. ID no. 13619552
  misc_feature (15)..(747): Homolog of NCBI NO: 27817943 NR Description: P0453E05.23 [Oryza sativa (japonica
  misc_feature (790)..(1088): Homolog of NCBI NO: 27817943 NR Description: P0453E05.23 [Oryza sativa (japonica
  misc_feature (38)..(748): Homolog of NCBI NO: 38637094 NR Description: putative receptor protein kinase [Oryza sativa
  misc_feature (21)..(704): Homolog of NCBI NO: 34896310 NR Description: putative disease resistance protein [Oryza >gi|14018074|gb|AAK52137.1| putative disease resistance protein
  misc_feature (90)..(657): Homolog of NCBI NO: 13620226 NR Description: hypothetical protein [Lycopersicon esculentum]
  misc_feature (580)..(1102): Homolog of NCBI NO: 13620226 NR Description: hypothetical protein [Lycopersicon esculentum]
  misc_feature (85)..(656): Homolog of NCBI NO: 15222751 NR Description: receptor kinase -related [Arabidopsis thaliana]
  misc_feature (580)..(1091): Homolog of NCBI NO: 15222751 NR Description: receptor kinase -related [Arabidopsis thaliana]
  misc_feature (85)..(656): Homolog of NCBI NO: 13620169 NR Description: hypothetical protein [Capsella rubella]
  misc_feature (580)..(1091): Homolog of NCBI NO: 13620169 NR Description: hypothetical protein [Capsella rubella]
MVTRVIMTDDDSQSLCFLCFLLFFFITAIAVAGDSLDSDREVLLSLKSYLESRNPQNRGLYTEWKMENQDVVCQWPGIICTPQRSRVTGINLTDSTISGPLFKNFSALTELTYLDLSRNTIEGEIPDDLSRCHNLKHLNLSHNILEGELSLPGLSNLEVLDLSLNRITGDIQSSFPLFCNSLVVANLSTNNFTGRIDDIFNGCRNLKYVDFSSNRFSGEVWTGFGRLVEFSVADNHLSGNISASMFRGNCTLQMLDLSGNAFGGEFPGQVSNCQNLNVLNLWGNKFTGNIPAEIGSISSLKGLYLGNNTFSRDIPETLLNLTNLVFLDLSRNKFGGDIQEIFGRFTQVKYLVLHANSYVGGINSSNILKLPNLSRLDLGYNNFSGQLPTEISQIQSLKFLILAYNNFSGDIPQEYGNMPGLQALDLSFNKLTGSIPASFGKLTSLLWLMLANNSLSGEIPREIGNCTSLLWFNVANNQLSGRFHPELTRMGSNPSPTFEVNRQNKDKIIAGSGECLAMKRWIPAEFPPFNFVYAILTKKSCRSLWDHVLKGYGLFPVCSAGSTVRTLKISAYLQLSGNKFSGEIPASISQMDRLSTLHLGFNEFEGKLPPEIGQLPLAFLNLTRNNFSGEIPQEIGNLKCLQNLDLSFNNFSGNFPTSLNDLNELSKFNISYNPFISGAIPTTGQVATFDKDSFLGNPLLRFPSFFNQSGNNTRKISNQVLGNRPRTLLLIWISLALALAFIACLVVSGIVLMVVKASREAEIDLLDGSKTRHDMTSSSGGSSPWLSGKIKVIRLDKSTFTYADILKATSNFSEERVVGRGGYGTVYRGVLPDGREVAVKKLQREGTEAEKEFRAEMEVLSANAFGDWAHPNLVRLYGWCLDGSEKILVHEYMGGGSLEELITDKTKLQWKKRIDIATDVARGLVFLHHECYPSIVHRDVKASNVLLDKHGNARVTDFGLARLLNVGDSHVSTVIAGTIGYVAPEYGQTWQATTRGDVYSYGVLTMELATGRRAVDGGEECLVEWARRVMTGNMTAKGSPITLSGTKPGNGAEQMTELLKIGVKCTADHPQARPNMKEVLAMLVKISGKAELFNGLSSQGYIEM

SEQ ID NO: 106434 - DNA, 1956 bp, Arabidopsis thaliana
  misc_feature (1)..(1956): Ceres Seq. ID no. 13619557
  misc_feature: MA Experiment ID: 20000307 Result: Up-regulated in Transcription
  misc_feature: MA Experiment 20000307 PARAMETER Experiment Name: At_Germinating_Seeds_Sub_P Parameter: Age (hr) Value: 24 vs. 0
  misc_feature: MA Experiment 20000307 PARAMETER Experiment Name: At_Germinating_Seeds_Sub_P Parameter: Organism Value: A. thaliana
  misc_feature: MA Experiment 20000307 PARAMETER Experiment Name: At_Germinating_Seeds_Sub_P Parameter: Plant Line Value: WS
  misc_feature: MA Experiment 20000307 PARAMETER Experiment Name: At_Germinating_Seeds_Sub_P Parameter: Tissue Value: Germinating Seeds
gtgtcgcttcgtcgtccttgagcaggggaaaaagctctggctttctctttttttccggcgaggaaggtggtggtaattggcggcgatggagatactaagaacgaaatgggtggctatgacagctagtatatggatacaatgcgcaagcggcgcttcctacaccttcggaatctattccgctgtcctaaaatcgactcaatcgtacgatcaatccaccctcgataccgtctcagtcttcaaggacatcggagcaaacgccggagttttctctgggcttttatacacatacgctacgtccaatcgtctccgtggacggggaggaggaattggaggcgctggaggaccttgggtggtgcttgctgttggggcaattcagtgcttcgccggttactttctcatttgggcttctgttaccggacttattagaaagcctccggtgccgctgatgtgcctgtttatgttcttagcagctcagtcgcaaacgttcttcaatacggctaatgttgttagtgccgttgagaatttcgctgactatggtggtacagccgttggcattatgaagggttttcttggtctaagtggagcgatactgattcaactgtacgagacattgtgcgctggagatccggccagcttcattctcttactggcagtaacaccaacagtgctctcactcttggtcatgcctctggtcaggatctatgagacaagcgtagccgatgataaaaagcatttaaatggtctttcagctgtatctctaatcatcgcagcttatcttatgatcattatcatattgaagaacacttttgggttgtcatcgtgggccaacattgtcacacttgtatgtctactcgtcatgcttgccttgcctctacttattgcgagaagagcacaacgagacggcatggaaaaaacagtaccacatgattattcccctctcataagcagtccaaaggcaacaacctccggtaaccaaagttctgaaggtgacagtaaagtggaagctggactgagtgagaacctgaatcttctgcaagctatgaaaaaactaagcttctggttgttatttcttgccatgatttgcggaatgggctctggactttcaacgataaacaacatccgacaaataggtgagtctcttcgatactcatcagttgagataaattcattggtctccttgtggagtatatggaactttctcggtagatttggagctggttatgcctcagatgcattgctacacaaaaagggatggccacgtccattgctaatggctgcaacacttggaacgatgagcataggccacctaatcatagcctctggttttcaaggaaatctctatgttggttctgttatagttggcgtttgttatggttcacagtggtctctgatgcctacaatcacctctgagctgttcgggattcggcacatgggaaccatcttcaataccatatccgtggctagtcccattggttcctatatcttctctgtaagattgatcggttatatctacgataagactgcttccggggaagggaacacatgttatggctctcattgcttcaggctgtcatttattataatggcatctgttgcgttctttgggtttcttgtcgccattgtactattctttcggacaaagacgctatatcgacagatccttgtaaagaggttgcatcatcgatagagttcttgtgaatactatacttttggagaaaaacgaatactgcttctcttgctacatccatggtagcttatgcttccaaaggtacacatcaatttctttacctataagtttgattgtaagttatgtttgtatcaaatgtctgtgtttagagatgggaagaaagaaagctgagatctttgtctctctttctttttgtagtttcttccaaaaatgtgagttttgtgaattgtatagacatctcaaagttcccaataatgttgaaatttttt

SEQ ID NO: 106435 - protein, 533 aa, Arabidopsis thaliana
  peptide (1)..(533): Ceres Seq. ID no. 13619558
  misc_feature (302)..(488): Pfam Name: Sugar (and other) transporter Pfam Description: Sugar (and other) transporter
  misc_feature (1)..(533): Homolog of NCBI NO: 15221382 NR Description: expressed protein [Arabidopsis thaliana]
  misc_feature (1)..(533): Homolog of NCBI NO: 29824365 NR Description: unknown protein [Arabidopsis thaliana]
  misc_feature (1)..(533): Homolog of NCBI NO: 15221898 NR Description: hypothetical protein [Arabidopsis thaliana]
  misc_feature (1)..(529): Homolog of NCBI NO: 7485467 NR Description: nodulin-like protein [imported] - Arabidopsis
  misc_feature (1)..(529): Homolog of NCBI NO: 30686022 NR Description: 68409.m03800 nodulin-related protein [Arabidopsis
  misc_feature (1)..(530): Homolog of NCBI NO: 7485467 NR Description: nodulin-like protein [imported] - Arabidopsis
  misc_feature (1)..(530): Homolog of NCBI NO: 30686019 NR Description: nodulin-related protein [Arabidopsis thaliana]
  misc_feature (220)..(533): Homolog of NCBI NO: 34897160 NR Description: putative nodule-specific protein [Oryza sativa
  misc_feature (1)..(265): Homolog of NCBI NO: 34897160 NR Description: putative nodule-specific protein [Oryza sativa
  misc_feature (224)..(523): Homolog of NCBI NO: 31712079 NR Description: hypothetical protein [Oryza sativa (japonica
MEILRTKWVAMTASIWIQCASGASYTFGIYSAVLKSTQSYDQSTLDTVSVFKDIGANAGVFSGLLYTYATSNRLRGRGGGIGGAGGPWVVLAVGAIQCFAGYFLIWASVTGLIRKPPVPLMCLFMFLAAQSQTFFNTANVVSAVENFADYGGTAVGIMKGFLGLSGAILIQLYETLCAGDPASFILLLAVTPTVLSLLVMPLVRIYETSVADDKKHLNGLSAVSLIIAAYLMIIIILKNTFGLSSWANIVTLVCLLVMLALPLLIARRAQRDGMEKTVPHDYSPLISSPKATTSGNQSSEGDSKVEAGLSENLNLLQAMKKLSFWLLFLAMICGMGSGLSTINNIRQIGESLRYSSVEINSLVSLWSIWNFLGRFGAGYASDALLHKKGWPRPLLMAATLGTMSIGHLIIASGFQGNLYVGSVIVGVCYGSQWSLMPTITSELFGIRHMGTIFNTISVASPIGSYIFSVRLIGYIYDKTASGEGNTCYGSHCFRLSFIIMASVAFFGFLVAIVLFFRTKTLYRQILVKRLHHR

SEQ ID NO: 106436 - protein, 523 aa, Arabidopsis thaliana
  peptide (1)..(523): Ceres Seq. ID no. 13619559
  misc_feature (292)..(478): Pfam Name: Sugar (and other) transporter Pfam Description: Sugar (and other) transporter
  misc_feature (1)..(523): Homolog of NCBI NO: 15221382 NR Description: expressed protein [Arabidopsis thaliana]
  misc_feature (1)..(523): Homolog of NCBI NO: 29824365 NR Description: unknown protein [Arabidopsis thaliana]
  misc_feature (1)..(523): Homolog of NCBI NO: 15221898 NR Description: hypothetical protein [Arabidopsis thaliana]
  misc_feature (1)..(519): Homolog of NCBI NO: 7485467 NR Description: nodulin-like protein [imported] - Arabidopsis
  misc_feature (1)..(519): Homolog of NCBI NO: 30686022 NR Description: 68409.m03800 nodulin-related protein [Arabidopsis
  misc_feature (1)..(520): Homolog of NCBI NO: 7485467 NR Description: nodulin-like protein [imported] - Arabidopsis
  misc_feature (1)..(520): Homolog of NCBI NO: 30686019 NR Description: nodulin-related protein [Arabidopsis thaliana]
  misc_feature (210)..(523): Homolog of NCBI NO: 34897160 NR Description: putative nodule-specific protein [Oryza sativa
  misc_feature (1)..(255): Homolog of NCBI NO: 34897160 NR Description: putative nodule-specific protein [Oryza sativa
  misc_feature (214)..(513): Homolog of NCBI NO: 31712079 NR Description: hypothetical protein [Oryza sativa (japonica
MTASIWIQCASGASYTFGIYSAVLKSTQSYDQSTLDTVSVFKDIGANAGVFSGLLYTYATSNRLRGRGGGIGGAGGPWVVLAVGAIQCFAGYFLIWASVTGLIRKPPVPLMCLFMFLAAQSQTFFNTANVVSAVENFADYGGTAVGIMKGFLGLSGAILIQLYETLCAGDPASFILLLAVTPTVLSLLVMPLVRIYETSVADDKKHLNGLSAVSLIIAAYLMIIIILKNTFGLSSWANIVTLVCLLVMLALPLLIARRAQRDGMEKTVPHDYSPLISSPKATTSGNQSSEGDSKVEAGLSENLNLLQAMKKLSFWLLFLAMICGMGSGLSTINNIRQIGESLRYSSVEINSLVSLWSIWNFLGRFGAGYASDALLHKKGWPRPLLMAATLGTMSIGHLIIASGFQGNLYVGSVIVGVCYGSQWSLMPTITSELFGIRHMGTIFNTISVASPIGSYIFSVRLIGYIYDKTASGEGNTCYGSHCFRLSFIIMASVAFFGFLVAIVLFFRTKTLYRQILVKRLHHR

SEQ ID NO: 106437 - protein, 413 aa, Arabidopsis thaliana
  peptide (1)..(413): Ceres Seq. ID no. 13619560
  misc_feature (182)..(368): Pfam Name: Sugar (and other) transporter Pfam Description: Sugar (and other) transporter
  misc_feature (1)..(413): Homolog of NCBI NO: 15221382 NR Description: expressed protein [Arabidopsis thaliana]
  misc_feature (1)..(413): Homolog of NCBI NO: 29824365 NR Description: unknown protein [Arabidopsis thaliana]
  misc_feature (1)..(413): Homolog of NCBI NO: 15221898 NR Description: hypothetical protein [Arabidopsis thaliana]
  misc_feature (1)..(409): Homolog of NCBI NO: 7485467 NR Description: nodulin-like protein [imported] - Arabidopsis
  misc_feature (1)..(409): Homolog of NCBI NO: 30686022 NR Description: 68409.m03800 nodulin-related protein [Arabidopsis
  misc_feature (1)..(410): Homolog of NCBI NO: 7485467 NR Description: nodulin-like protein [imported] - Arabidopsis
  misc_feature (1)..(410): Homolog of NCBI NO: 30686019 NR Description: nodulin-related protein [Arabidopsis thaliana]
  misc_feature (100)..(413): Homolog of NCBI NO: 34897160 NR Description: putative nodule-specific protein [Oryza sativa
  misc_feature (1)..(145): Homolog of NCBI NO: 34897160 NR Description: putative nodule-specific protein [Oryza sativa
  misc_feature (104)..(403): Homolog of NCBI NO: 31712079 NR Description: hypothetical protein [Oryza sativa (japonica
MCLFMFLAAQSQTFFNTANVVSAVENFADYGGTAVGIMKGFLGLSGAILIQLYETLCAGDPASFILLLAVTPTVLSLLVMPLVRIYETSVADDKKHLNGLSAVSLIIAAYLMIIIILKNTFGLSSWANIVTLVCLLVMLALPLLIARRAQRDGMEKTVPHDYSPLISSPKATTSGNQSSEGDSKVEAGLSENLNLLQAMKKLSFWLLFLAMICGMGSGLSTINNIRQIGESLRYSSVEINSLVSLWSIWNFLGRFGAGYASDALLHKKGWPRPLLMAATLGTMSIGHLIIASGFQGNLYVGSVIVGVCYGSQWSLMPTITSELFGIRHMGTIFNTISVASPIGSYIFSVRLIGYIYDKTASGEGNTCYGSHCFRLSFIIMASVAFFGFLVAIVLFFRTKTLYRQILVKRLHHR

SEQ ID NO: 106438 - DNA, 1139 bp, Arabidopsis thaliana
  misc_feature (1)..(1139): Ceres Seq. ID no. 13619580
  misc_feature: MA Experiment ID: 20000349 Result: Up-regulated in Transcription
  misc_feature: MA Experiment 20000349 PARAMETER Experiment Name: At_100uM_ABA_Sub_P Parameter: Age (day) Value: 14
  misc_feature: MA Experiment 20000349 PARAMETER Experiment Name: At_100uM_ABA_Sub_P Parameter: Organism Value: A. thaliana
  misc_feature: MA Experiment 20000349 PARAMETER Experiment Name: At_100uM_ABA_Sub_P Parameter: Plant Line Value: WS
  misc_feature: MA Experiment 20000349 PARAMETER Experiment Name: At_100uM_ABA_Sub_P Parameter: Timepoint (hr) Value: 6
  misc_feature: MA Experiment 20000349 PARAMETER Experiment Name: At_100uM_ABA_Sub_P Parameter: Tissue Value: Aerial
  misc_feature: MA Experiment 20000349 PARAMETER Experiment Name: At_100uM_ABA_Sub_P Parameter: Treatment Value: 100uM ABA vs. No Treatment
  misc_feature: MA Experiment ID: 20000440 Result: Up-regulated in Transcription
  misc_feature: MA Experiment 20000440 PARAMETER Experiment Name: At_Closed-Flower__Sub_P Parameter: Tissue Value: Closed Flower vs. Whole Plant
acagcattattgaatttagtagtacacacaatcattagtcattaccacgtttgaaacatgacgacggagaaaagcaagattctggtgatcggagggactggttacatgggagaattcatcgttgaagggagcgcgaaagccggtaacccaacattcgctcttgtccgagaagcatctctctctgatcctgtcaagagcaaaaccatccagagcttcaaagatctcggtgtcacaatactacacggagatttgaatgatcatgagagcttagttaaggccattaaacaggttgatgtggtgatatcaaccatcgggcacaagcaaatctttgatcaaaccaagatcatttccgccattaaagaagctggtaacgtcaagagattcttgccggctgagtttgggatagacgttgagaggaccagtgcggttgagccggcaaaatcattatttgcagggaaggtacagatcaggagagccattgaagctgaaggaataccatacacttacgttgttagcaattgctctgccggtttttacttgcgtacgttacttcagttcgagtctggtctcatttctcatactagagacaaggccatcatctttggcgacaaaaatgttcctcctagagacaaagtcaccatattaggcgatggaaatgccaaagttgtgatcaacaaagaggaagatgttgcagcttacatgatcaaggcggtggatgatctaaggactctgaacaaaaccctctacattagtcctcctaacaacattttatcgatgaacgaaatggtcaccttgtgggagaaaaagatcggcaagtctcttgagaagactcacatatcagaagagcaaatccttaaaagcatccaagttcccatcgatgttttcaagtctataaaccacgcggtgtttgtgaagggagatcagaccagtttcacaatagagccttggttcggtgaagaagcctctgtgctttaccctgatgtcaagtacacgagtattgatgagtatctcagtcaattcacttgagaacaattcacaaaaacaaatcacaaaacaataaaaactgattcttgtacgtgtgaaattgattaatcaagcaaaatgtaaagttttgtgaactcaagctaatatattacact

SEQ ID NO: 106439 - protein, 322 aa, Arabidopsis thaliana
  peptide (1)..(322): Ceres Seq. ID no. 13619581
  misc_feature (3)..(322): Pfam Name: Isoflavone reductase Pfam Description: Isoflavone reductase
  misc_feature (1)..(322): Homolog of NCBI NO: 15222191 NR Description: isoflavone reductase, putative [Arabidopsis
  misc_feature (1)..(321): Homolog of NCBI NO: 18410820 NR Description: isoflavone reductase, putative [Arabidopsis
  misc_feature (1)..(321): Homolog of NCBI NO: 25344798 NR Description: probable NADPH oxidoreductase, 14094-12769 - Arabidopsis thaliana >gi|10092264|gb|AAG12677.1|AC025814_1
  misc_feature (1)..(321): Homolog of NCBI NO: 15222190 NR Description: isoflavone reductase, putative [Arabidopsis
  misc_feature (4)..(321): Homolog of NCBI NO: 3114901 NR Description: phenylcoumaran benzylic ether reductase [Populus subsp. trichocarpa] >gi|3114905|emb|CAA06709.1| phenylcoumaran ether reductase [Populus balsamifera subsp. trichocarpa] [Populus
  misc_feature (4)..(321): Homolog of NCBI NO: 3114903 NR Description: phenylcoumaran benzylic ether reductase [Populus
  misc_feature (4)..(321): Homolog of NCBI NO: 3114899 NR Description: phenylcoumaran benzylic ether reductase [Populus
  misc_feature (5)..(321): Homolog of NCBI NO: 10764491 NR Description: allergenic isoflavone reductase-like protein Bet
  misc_feature (5)..(321): Homolog of NCBI NO: 3243234 NR Description: isoflavone reductase related protein [Pyrus
  misc_feature (4)..(321): Homolog of NCBI NO: 7578895 NR Description: phenylcoumaran benzylic ether reductase homolog
MTTEKSKILVIGGTGYMGEFIVEGSAKAGNPTFALVREASLSDPVKSKTIQSFKDLGVTILHGDLNDHESLVKAIKQVDVVISTIGHKQIFDQTKIISAIKEAGNVKRFLPAEFGIDVERTSAVEPAKSLFAGKVQIRRAIEAEGIPYTYVVSNCSAGFYLRTLLQFESGLISHTRDKAIIFGDKNVPPRDKVTILGDGNAKVVINKEEDVAAYMIKAVDDLRTLNKTLYISPPNNILSMNEMVTLWEKKIGKSLEKTHISEEQILKSIQVPIDVFKSINHAVFVKGDQTSFTIEPWFGEEASVLYPDVKYTSIDEYLSQFT

SEQ ID NO: 106440 - protein, 306 aa, Arabidopsis thaliana
  peptide (1)..(306): Ceres Seq. ID no. 13619582
  misc_feature (1)..(306): Pfam Name: Isoflavone reductase Pfam Description: Isoflavone reductase
  misc_feature (1)..(306): Homolog of NCBI NO: 15222191 NR Description: isoflavone reductase, putative [Arabidopsis
  misc_feature (1)..(305): Homolog of NCBI NO: 18410820 NR Description: isoflavone reductase, putative [Arabidopsis
  misc_feature (1)..(305): Homolog of NCBI NO: 25344798 NR Description: probable NADPH oxidoreductase, 14094-12769 - Arabidopsis thaliana >gi|10092264|gb|AAG12677.1|AC025814_1
  misc_feature (1)..(305): Homolog of NCBI NO: 15222190 NR Description: isoflavone reductase, putative [Arabidopsis
  misc_feature (1)..(305): Homolog of NCBI NO: 3114901 NR Description: phenylcoumaran benzylic ether reductase [Populus subsp. trichocarpa] >gi|3114905|emb|CAA06709.1| phenylcoumaran ether reductase [Populus balsamifera subsp. trichocarpa] [Populus
  misc_feature (1)..(305): Homolog of NCBI NO: 3114903 NR Description: phenylcoumaran benzylic ether reductase [Populus
  misc_feature (1)..(305): Homolog of NCBI NO: 3114899 NR Description: phenylcoumaran benzylic ether reductase [Populus
  misc_feature (1)..(305): Homolog of NCBI NO: 10764491 NR Description: allergenic isoflavone reductase-like protein Bet
  misc_feature (1)..(305): Homolog of NCBI NO: 3243234 NR Description: isoflavone reductase related protein [Pyrus
  misc_feature (1)..(305): Homolog of NCBI NO: 7578895 NR Description: phenylcoumaran benzylic ether reductase homolog
MGEFIVEGSAKAGNPTFALVREASLSDPVKSKTIQSFKDLGVTILHGDLNDHESLVKAIKQVDVVISTIGHKQIFDQTKIISAIKEAGNVKRFLPAEFGIDVERTSAVEPAKSLFAGKVQIRRAIEAEGIPYTYVVSNCSAGFYLRTLLQFESGLISHTRDKAIIFGDKNVPPRDKVTILGDGNAKVVINKEEDVAAYMIKAVDDLRTLNKTLYISPPNNILSMNEMVTLWEKKIGKSLEKTHISEEQILKSIQVPIDVFKSINHAVFVKGDQTSFTIEPWFGEEASVLYPDVKYTSIDEYLSQFT

SEQ ID NO: 106441 - DNA, 1358 bp, Arabidopsis thaliana
  misc_feature (1)..(1358): Ceres Seq. ID no. 13619586
  misc_feature: MA Experiment ID: 20000234 Result: Up-regulated in Transcription
  misc_feature: MA Experiment 20000234 PARAMETER Experiment Name: At_Siliques_P Parameter: Age (day) Value: 21
  misc_feature: MA Experiment 20000234 PARAMETER Experiment Name: At_Siliques_P Parameter: Organism Value: A. thaliana
  misc_feature: MA Experiment 20000234 PARAMETER Experiment Name: At_Siliques_P Parameter: Plant Line Value: WS
  misc_feature: MA Experiment 20000234 PARAMETER Experiment Name: At_Siliques_P Parameter: Tissue Value: Less Than 5mm Siliques vs. Whole Plant
  misc_feature: MA Experiment ID: 20000264 Result: Up-regulated in Transcription
  misc_feature: MA Experiment 20000264 PARAMETER Experiment Name: At_Open_Flower_P Parameter: Age (day) Value: 21
  misc_feature: MA Experiment 20000264 PARAMETER Experiment Name: At_Open_Flower_P Parameter: Plant Line Value: WS
  misc_feature: MA Experiment 20000264 PARAMETER Experiment Name: At_Open_Flower_P Parameter: Tissue Value: Open Flower vs. Whole Plant
  misc_feature: MA Experiment ID: 20000265 Result: Up-regulated in Transcription
  misc_feature: MA Experiment 20000265 PARAMETER Experiment Name: At_Open_Flower_P Parameter: Age (day) Value: 21
  misc_feature: MA Experiment 20000265 PARAMETER Experiment Name: At_Open_Flower_P Parameter: Plant Line Value: WS
  misc_feature: MA Experiment 20000265 PARAMETER Experiment Name: At_Open_Flower_P Parameter: Tissue Value: Closed Flower vs. Whole Plant
  misc_feature: MA Experiment ID: 20000286 Result: Up-regulated in Transcription
  misc_feature: MA Experiment 20000286 PARAMETER Experiment Name: At_Open_Flower_P Parameter: Age (day) Value: 21
  misc_feature: MA Experiment 20000286 PARAMETER Experiment Name: At_Open_Flower_P Parameter: Plant Line Value: WS
  misc_feature: MA Experiment 20000286 PARAMETER Experiment Name: At_Open_Flower_P Parameter: Tissue Value: Half Open vs. Whole Plant
  misc_feature: MA Experiment ID: 20000794 Result: Up-regulated in Transcription
  misc_feature: MA Experiment 20000794 PARAMETER Experiment Name: At_Petals_P Parameter: Age (day) Value: 23-25 days
  misc_feature: MA Experiment 20000794 PARAMETER Experiment Name: At_Petals_P Parameter: Plant Line Value: WS
  misc_feature: MA Experiment 20000794 PARAMETER Experiment Name: At_Petals_P Parameter: Tissue Value: Petals vs. Whole plant
  misc_feature: MA Experiment ID: 20001757 Result: Down-regulated in Transcription
  misc_feature: MA Experiment 20001757 PARAMETER Experiment Name: At_50mM_NH4NO3_L-to-H_P Parameter: Timepoint (hr) Value: 6
  misc_feature: MA Experiment 20001757 PARAMETER Experiment Name: At_50mM_NH4NO3_L-to-H_P Parameter: Tissue Value: Leaf
  misc_feature: MA Experiment 20001757 PARAMETER Experiment Name: At_50mM_NH4NO3_L-to-H_P Parameter: Treatment Value: 50mM NH4NO3 vs 100mM Mannitol
  misc_feature: MA Experiment ID: 20001910 Result: Up-regulated in Transcription
  misc_feature: MA Experiment 20001910 PARAMETER Experiment Name: At_Drought_Reproduction_P Parameter: Age (day) Value: 37
  misc_feature: MA Experiment 20001910 PARAMETER Experiment Name: At_Drought_Reproduction_P Parameter: Organism Value: A. thaliana
  misc_feature: MA Experiment 20001910 PARAMETER Experiment Name: At_Drought_Reproduction_P Parameter: Plant Line Value: WS
  misc_feature: MA Experiment 20001910 PARAMETER Experiment Name: At_Drought_Reproduction_P Parameter: Timepoint (day) Value: 7
  misc_feature: MA Experiment 20001910 PARAMETER Experiment Name: At_Drought_Reproduction_P Parameter: Tissue Value: Flowers
  misc_feature: MA Experiment 20001910 PARAMETER Experiment Name: At_Drought_Reproduction_P Parameter: Treatment Value: Drought vs. No Drought
atgaggtgtttctcttgtctcaacacgcaaactaatgacatgagaatcaacattgataccctctccgacctaaccgattatgcctcagttgccacaaaaatcgatccaagaggaacaggctcaaaatctggcattttagttaatgggaaagtgaatagccctaaaccgggtggtggcgcacggagtttcacgttcaaggagttagcagccgccacgaagaatttccgggaggggaatattataggaaaaggaggctttgggagtgtctacaagggacgtttagattcaggacaagtggtggcgatcaagcaattaaatccagatggacatcaaggaaatcaagaattcatagttgaagtctgtatgcttagcgtcttccatcatccaaatctagtaactttaatcggttactgtacttctggtgctcagagacttcttgtttatgaatacatgccaatgggtagcttagaagatcatctttttgatcttgagcctgatcagactccactaagctggtatactcggatgaaaatcgcggttggtgcagctcgtgggatagagtatctccactgtaaaataagcccgtctgtgatttaccgtgatttgaaatccgcaaacattttgttagataaagaatttagcgtcaagctctctgattttggactcgctaaggttggtcctgtggggaaccggacacatgtgtcgactcgagtcatgggtacttacggatactgtgctccagaatacgcaatgagcggaagattgactataaaatcggatatctatagctttggtgtagtgttgcttgagcttatttctggcaggaaggccattgatttgagtaaaccaaacggagagcagtaccttgttgcttgggctagaccgtatctcaaagatcctaagaaatttggacttctagttgacccgttgctacggggaaagttctcgaagaggtgtcttaactacgcgatttctataaccgagatgtgcctaaacgacgaagcgaatcaccggccaaaaataggagatgtggtggtggcatttgagtacatagcctctcagagcaaatcttatgaagatcgaagaacggctcgcaagtctacggactctaaccggttaagacgggaaacaaaacagagttattaattaaattgtatgagtcctaagtgaaacctctgctagaatcagaaggttcctgataaggccgcataattaatgtttgtactttttttccgggtgtttttgtttagtcagatttaagaatgggatttggtcggataaagaggttttttttttttggcttgaggtaaatggtgctttgtaaaaaaacttaaaaataaaaatgaactcttacgttt

SEQ ID NO: 106442 - protein, 381 aa, Arabidopsis thaliana
  peptide (1)..(381): Ceres Seq. ID no. 13619587
  misc_feature (1)..(381): Homolog of NCBI NO: 15223033 NR Description: protein kinase, putative [Arabidopsis thaliana]
  misc_feature (3)..(375): Homolog of NCBI NO: 8778594 NR Description: F5M15.3 [Arabidopsis thaliana]
  misc_feature (35)..(375): Homolog of NCBI NO: 15217992 NR Description: protein kinase -related [Arabidopsis thaliana]
  misc_feature (38)..(375): Homolog of NCBI NO: 34907210 NR Description: putative serine/threonine kinase PBS1 protein
  misc_feature (1)..(375): Homolog of NCBI NO: 15240038 NR Description: protein kinase family [Arabidopsis thaliana]
  misc_feature (3)..(355): Homolog of NCBI NO: 15238886 NR Description: protein kinase family [Arabidopsis thaliana]
  misc_feature (1)..(368): Homolog of NCBI NO: 34395193 NR Description: putative protein serine/threonine kinase [Oryza
  misc_feature (1)..(368): Homolog of NCBI NO: 34899302 NR Description: putative protein serine/threonine kinase [Oryza
  misc_feature (1)..(381): Homolog of NCBI NO: 11994661 NR Description: receptor protein kinase-like protein [Arabidopsis
  misc_feature (43)..(381): Homolog of NCBI NO: 15230190 NR Description: protein kinase family [Arabidopsis thaliana]
MRCFSCLNTQTNDMRINIDTLSDLTDYASVATKIDPRGTGSKSGILVNGKVNSPKPGGGARSFTFKELAAATKNFREGNIIGKGGFGSVYKGRLDSGQVVAIKQLNPDGHQGNQEFIVEVCMLSVFHHPNLVTLIGYCTSGAQRLLVYEYMPMGSLEDHLFDLEPDQTPLSWYTRMKIAVGAARGIEYLHCKISPSVIYRDLKSANILLDKEFSVKLSDFGLAKVGPVGNRTHVSTRVMGTYGYCAPEYAMSGRLTIKSDIYSFGVVLLELISGRKAIDLSKPNGEQYLVAWARPYLKDPKKFGLLVDPLLRGKFSKRCLNYAISITEMCLNDEANHRPKIGDVVVAFEYIASQSKSYEDRRTARKSTDSNRLRRETKQSY

SEQ ID NO: 106443 - protein, 368 aa, Arabidopsis thaliana
  peptide (1)..(368): Ceres Seq. ID no. 13619588
  misc_feature (1)..(368): Homolog of NCBI NO: 15223033 NR Description: protein kinase, putative [Arabidopsis thaliana]
  misc_feature (1)..(362): Homolog of NCBI NO: 8778594 NR Description: F5M15.3 [Arabidopsis thaliana]
  misc_feature (22)..(362): Homolog of NCBI NO: 15217992 NR Description: protein kinase -related [Arabidopsis thaliana]
  misc_feature (25)..(362): Homolog of NCBI NO: 34907210 NR Description: putative serine/threonine kinase PBS1 protein
  misc_feature (1)..(362): Homolog of NCBI NO: 15240038 NR Description: protein kinase family [Arabidopsis thaliana]
  misc_feature (1)..(342): Homolog of NCBI NO: 15238886 NR Description: protein kinase family [Arabidopsis thaliana]
  misc_feature (1)..(355): Homolog of NCBI NO: 34395193 NR Description: putative protein serine/threonine kinase [Oryza
  misc_feature (1)..(355): Homolog of NCBI NO: 34899302 NR Description: putative protein serine/threonine kinase [Oryza
  misc_feature (1)..(368): Homolog of NCBI NO: 11994661 NR Description: receptor protein kinase-like protein [Arabidopsis
  misc_feature (30)..(368): Homolog of NCBI NO: 15230190 NR Description: protein kinase family [Arabidopsis thaliana]
MRINIDTLSDLTDYASVATKIDPRGTGSKSGILVNGKVNSPKPGGGARSFTFKELAAATKNFREGNIIGKGGFGSVYKGRLDSGQVVAIKQLNPDGHQGNQEFIVEVCMLSVFHHPNLVTLIGYCTSGAQRLLVYEYMPMGSLEDHLFDLEPDQTPLSWYTRMKIAVGAARGIEYLHCKISPSVIYRDLKSANILLDKEFSVKLSDFGLAKVGPVGNRTHVSTRVMGTYGYCAPEYAMSGRLTIKSDIYSFGVVLLELISGRKAIDLSKPNGEQYLVAWARPYLKDPKKFGLLVDPLLRGKFSKRCLNYAISITEMCLNDEANHRPKIGDVVVAFEYIASQSKSYEDRRTARKSTDSNRLRRETKQSY

SEQ ID NO: 106444 - protein, 260 aa, Arabidopsis thaliana
  peptide (1)..(260): Ceres Seq. ID no. 13619589
  misc_feature (1)..(260): Homolog of NCBI NO: 15223033 NR Description: protein kinase, putative [Arabidopsis thaliana]
  misc_feature (1)..(254): Homolog of NCBI NO: 8778594 NR Description: F5M15.3 [Arabidopsis thaliana]
  misc_feature (1)..(254): Homolog of NCBI NO: 15217992 NR Description: protein kinase -related [Arabidopsis thaliana]
  misc_feature (1)..(254): Homolog of NCBI NO: 34907210 NR Description: putative serine/threonine kinase PBS1 protein
  misc_feature (1)..(254): Homolog of NCBI NO: 15240038 NR Description: protein kinase family [Arabidopsis thaliana]
  misc_feature (1)..(234): Homolog of NCBI NO: 15238886 NR Description: protein kinase family [Arabidopsis thaliana]
  misc_feature (1)..(247): Homolog of NCBI NO: 34395193 NR Description: putative protein serine/threonine kinase [Oryza
  misc_feature (1)..(247): Homolog of NCBI NO: 34899302 NR Description: putative protein serine/threonine kinase [Oryza
  misc_feature (1)..(260): Homolog of NCBI NO: 11994661 NR Description: receptor protein kinase-like protein [Arabidopsis
  misc_feature (1)..(260): Homolog of NCBI NO: 15230190 NR Description: protein kinase family [Arabidopsis thaliana]
MLSVFHHPNLVTLIGYCTSGAQRLLVYEYMPMGSLEDHLFDLEPDQTPLSWYTRMKIAVGAARGIEYLHCKISPSVIYRDLKSANILLDKEFSVKLSDFGLAKVGPVGNRTHVSTRVMGTYGYCAPEYAMSGRLTIKSDIYSFGVVLLELISGRKAIDLSKPNGEQYLVAWARPYLKDPKKFGLLVDPLLRGKFSKRCLNYAISITEMCLNDEANHRPKIGDVVVAFEYIASQSKSYEDRRTARKSTDSNRLRRETKQSY

SEQ ID NO: 106445 - DNA, 1329 bp, Arabidopsis thaliana
  misc_feature (1)..(1329): Ceres Seq. ID no. 13619590
  misc_feature: MA Experiment ID: 20000173 Result: Down-regulated in Transcription
  misc_feature: MA Experiment 20000173 PARAMETER Experiment Name: At_42deg_Heat_P Parameter: Age (day) Value: 14
  misc_feature: MA Experiment 20000173 PARAMETER Experiment Name: At_42deg_Heat_P Parameter: Organism Value: A. thaliana
  misc_feature: MA Experiment 20000173 PARAMETER Experiment Name: At_42deg_Heat_P Parameter: Plant Line Value: WS
  misc_feature: MA Experiment 20000173 PARAMETER Experiment Name: At_42deg_Heat_P Parameter: Temperature (deg C) Value: 42 vs. 22
  misc_feature: MA Experiment 20000173 PARAMETER Experiment Name: At_42deg_Heat_P Parameter: Timepoint (hr) Value: 6
  misc_feature: MA Experiment 20000173 PARAMETER Experiment Name: At_42deg_Heat_P Parameter: Tissue Value: Aerial
  misc_feature: MA Experiment ID: 20000234 Result: Down-regulated in Transcription
  misc_feature: MA Experiment 20000234 PARAMETER Experiment Name: At_Siliques_P Parameter: Age (day) Value: 21
  misc_feature: MA Experiment 20000234 PARAMETER Experiment Name: At_Siliques_P Parameter: Organism Value: A. thaliana
  misc_feature: MA Experiment 20000234 PARAMETER Experiment Name: At_Siliques_P Parameter: Plant Line Value: WS
  misc_feature: MA Experiment 20000234 PARAMETER Experiment Name: At_Siliques_P Parameter: Tissue Value: Less Than 5mm Siliques vs. Whole Plant
  misc_feature: MA Experiment ID: 20000235 Result: Down-regulated in Transcription
  misc_feature: MA Experiment 20000235 PARAMETER Experiment Name: At_Siliques_P Parameter: Age (day) Value: 21
  misc_feature: MA Experiment 20000235 PARAMETER Experiment Name: At_Siliques_P Parameter: Organism Value: A. thaliana
  misc_feature: MA Experiment 20000235 PARAMETER Experiment Name: At_Siliques_P Parameter: Plant Line Value: WS
  misc_feature: MA Experiment 20000235 PARAMETER Experiment Name: At_Siliques_P Parameter: Tissue Value: 5-10mm Siliques vs. Whole Plant
  misc_feature: MA Experiment ID: 20000264 Result: Down-regulated in Transcription
  misc_feature: MA Experiment 20000264 PARAMETER Experiment Name: At_Open_Flower_P Parameter: Age (day) Value: 21
  misc_feature: MA Experiment 20000264 PARAMETER Experiment Name: At_Open_Flower_P Parameter: Plant Line Value: WS
  misc_feature: MA Experiment 20000264 PARAMETER Experiment Name: At_Open_Flower_P Parameter: Tissue Value: Open Flower vs. Whole Plant
  misc_feature: MA Experiment ID: 20000265 Result: Down-regulated in Transcription
  misc_feature: MA Experiment 20000265 PARAMETER Experiment Name: At_Open_Flower_P Parameter: Age (day) Value: 21
  misc_feature: MA Experiment 20000265 PARAMETER Experiment Name: At_Open_Flower_P Parameter: Plant Line Value: WS
  misc_feature: MA Experiment 20000265 PARAMETER Experiment Name: At_Open_Flower_P Parameter: Tissue Value: Closed Flower vs. Whole Plant
  misc_feature: MA Experiment ID: 20000286 Result: Down-regulated in Transcription
  misc_feature: MA Experiment 20000286 PARAMETER Experiment Name: At_Open_Flower_P Parameter: Age (day) Value: 21
  misc_feature: MA Experiment 20000286 PARAMETER Experiment Name: At_Open_Flower_P Parameter: Plant Line Value: WS
  misc_feature: MA Experiment 20000286 PARAMETER Experiment Name: At_Open_Flower_P Parameter: Tissue Value: Half Open vs. Whole Plant
  misc_feature: MA Experiment ID: 20001248 Result: Down-regulated in Transcription
  misc_feature: MA Experiment 20001248 PARAMETER Experiment Name: At_Far-red-induction_P Parameter: Age (day) Value: 7
  misc_feature: MA Experiment 20001248 PARAMETER Experiment Name: At_Far-red-induction_P Parameter: Light Value: Far-red vs. White
  misc_feature: MA Experiment 20001248 PARAMETER Experiment Name: At_Far-red-induction_P Parameter: Organism Value: A. thaliana
  misc_feature: MA Experiment 20001248 PARAMETER Experiment Name: At_Far-red-induction_P Parameter: Plant Line Value: Columbia
  misc_feature: MA Experiment 20001248 PARAMETER Experiment Name: At_Far-red-induction_P Parameter: Timepoint (hr) Value: 4
  misc_feature: MA Experiment 20001248 PARAMETER Experiment Name: At_Far-red-induction_P Parameter: Tissue Value: Whole Plant
  misc_feature: MA Experiment ID: 20001560 Result: Down-regulated in Transcription
  misc_feature: MA Experiment 20001560 PARAMETER Experiment Name: At_Drought_Soil_Dry_P Parameter: Age (day) Value: 28
  misc_feature: MA Experiment 20001560 PARAMETER Experiment Name: At_Drought_Soil_Dry_P Parameter: Organism Value: A. thaliana
  misc_feature: MA Experiment 20001560 PARAMETER Experiment Name: At_Drought_Soil_Dry_P Parameter: Plant Line Value: WS
  misc_feature: MA Experiment 20001560 PARAMETER Experiment Name: At_Drought_Soil_Dry_P Parameter: Post Timepoint (hr) Value: None
  misc_feature: MA Experiment 20001560 PARAMETER Experiment Name: At_Drought_Soil_Dry_P Parameter: Post-Treatment Value: None
  misc_feature: MA Experiment 20001560 PARAMETER Experiment Name: At_Drought_Soil_Dry_P Parameter: Timepoint (day) Value: 14
  misc_feature: MA Experiment 20001560 PARAMETER Experiment Name: At_Drought_Soil_Dry_P Parameter: Treatment Value: Drought vs. No Drought
  misc_feature: MA Experiment ID: 20001905 Result: Down-regulated in Transcription
  misc_feature: MA Experiment 20001905 PARAMETER Experiment Name: At_Drought_Reproduction_P Parameter: Age (day) Value: 40
  misc_feature: MA Experiment 20001905 PARAMETER Experiment Name: At_Drought_Reproduction_P Parameter: Organism Value: A. thaliana
  misc_feature: MA Experiment 20001905 PARAMETER Experiment Name: At_Drought_Reproduction_P Parameter: Plant Line Value: WS
  misc_feature: MA Experiment 20001905 PARAMETER Experiment Name: At_Drought_Reproduction_P Parameter: Timepoint (day) Value: 10
  misc_feature: MA Experiment 20001905 PARAMETER Experiment Name: At_Drought_Reproduction_P Parameter: Tissue Value: Rosettes
  misc_feature: MA Experiment 20001905 PARAMETER Experiment Name: At_Drought_Reproduction_P Parameter: Treatment Value: Drought vs. No Drought
atgccggcgttacatcccacgtttccactgccggaaacaggacataaactgagacccgccgctaccccgcctcgtgaaaaaccgcaacataggacgacgagatccgtcgagaacccacctcgtgaaaaaccgcaggagaagacaagatccgtcgagaacccgcctcgtgaaaaaccgcaggagaaaacaagatccgttgaaaccccacctcaggagaagacgagacccgtcgataatccgccgtcaaagccggtagaaaaattgggtttaggaaggaaagcagtgccaccgagtgggaagatagtgacacctaatctaaagatgtttacattagtggagcttaagacggctacaaagaactttcgaccagaatctgtgatcggagaaggtggattcggacaggtttttaaaggatgggtggatgagaaaacattagctccgtcgagagctggcgtcggaataccagtcgccgtcaagaaatcaaaccctgatagtgagcaaggcttacatgaatggcagtgtgaagtgagattcttagggaagtttcatcatccaaatttggtgaagctcttgggttattgctgggaagagaaccagttccttttggtctatgagtatttgcctaaaggaagccttgaaaatcacctcttctcaaaaggagcagaggcattaccttgggatacacgtttgaagatagccattgaagcagctcaaggacttacctttttgcataactccgagaagagtgttatctatagagacttcaaagcttccaatattcttctcgattccaacttccacgccaagctttcagacttcggactagctaaaaatgggcccattaatggattctcacacgtgaccacacgtgtcatgggcacacaaggctatgcagctcccgagtacatggctacaggtcatctatatgtgaggagtgatgtttacgggtttggagtggtactcttagagctcttaaccggtttaagagcattagacccaaaccgaccatctgcgcaacaaaatcttgtggaatgggctaaaccggggttgaaccagaagaagaaggttcagaaaatgatggatccacggctcgagcagaagtatccacttttggcggtgaccaaaaccgcggagctcattcttcggtgtctggaggctgacccgaaaaaccgaccgccaatggatgatgtgcttagagaattagaagtcgtaaggactatcagagaccaaccccaagaagagaggcgtaaaaggagcagtggtccagatactaaccgggttcgtggaaatgattcaccatatggccgtagaaccggtcgaaccggatag

SEQ ID NO: 106446 - protein, 442 aa, Arabidopsis thaliana; identical to SEQ ID NO: 106020
  peptide (1)..(442): Ceres Seq. ID no. 13619591
  misc_feature (1)..(442): Homolog of NCBI NO: 25287650 NR Description: hypothetical protein F15M4.14 [imported] -
  misc_feature (108)..(442): Homolog of NCBI NO: 30699159 NR Description: protein kinase, putative [Arabidopsis thaliana]
  misc_feature (88)..(422): Homolog of NCBI NO: 38345396 NR Description: OSJNBa0017B10.2 [Oryza sativa (japonica
  misc_feature (37)..(433): Homolog of NCBI NO: 21537344 NR Description: putative protein kinase [Arabidopsis thaliana]
  misc_feature (97)..(433): Homolog of NCBI NO: 18398350 NR Description: protein kinase -related [Arabidopsis thaliana] putative protein kinase [Arabidopsis thaliana]
  misc_feature (97)..(433): Homolog of NCBI NO: 25287605 NR Description: probable protein kinase [imported] - Arabidopsis
  misc_feature (98)..(436): Homolog of NCBI NO: 20503002 NR Description: Putative protein kinase [Oryza sativa (japonica
  misc_feature (99)..(438): Homolog of NCBI NO: 15227001 NR Description: protein kinase (APK1b) [Arabidopsis thaliana]
  misc_feature (99)..(420): Homolog of NCBI NO: 166809 NR Description: protein kinase
  misc_feature (99)..(420): Homolog of NCBI NO: 15241749 NR Description: protein kinase, putative [Arabidopsis thaliana]

SEQ ID NO: 106447 - protein, 335 aa, Arabidopsis thaliana; identical to SEQ ID NO: 106021
  peptide (1)..(335): Ceres Seq. ID no. 13619592
  misc_feature (1)..(335): Homolog of NCBI NO: 25287650 NR Description: hypothetical protein F15M4.14 [imported] -
  misc_feature (1)..(335): Homolog of NCBI NO: 30699159 NR Description: protein kinase, putative [Arabidopsis thaliana]
  misc_feature (1)..(315): Homolog of NCBI NO: 38345396 NR Description: OSJNBa0017B10.2 [Oryza sativa (japonica
  misc_feature (1)..(326): Homolog of NCBI NO: 21537344 NR Description: putative protein kinase [Arabidopsis thaliana]
  misc_feature (1)..(326): Homolog of NCBI NO: 18398350 NR Description: protein kinase -related [Arabidopsis thaliana] putative protein kinase [Arabidopsis thaliana]
  misc_feature (1)..(326): Homolog of NCBI NO: 25287605 NR Description: probable protein kinase [imported] - Arabidopsis
  misc_feature (1)..(329): Homolog of NCBI NO: 20503002 NR Description: Putative protein kinase [Oryza sativa (japonica
  misc_feature (1)..(331): Homolog of NCBI NO: 15227001 NR Description: protein kinase (APK1b) [Arabidopsis thaliana]
  misc_feature (1)..(313): Homolog of NCBI NO: 166809 NR Description: protein kinase
  misc_feature (1)..(313): Homolog of NCBI NO: 15241749 NR Description: protein kinase, putative [Arabidopsis thaliana]

SEQ ID NO: 106448 - DNA, 1488 bp, Arabidopsis thaliana
  misc_feature (1)..(1488): Ceres Seq. ID no. 13619593
  misc_feature: MA Experiment ID: 20000214 Result: Down-regulated in Transcription
  misc_feature: MA Experiment 20000214 PARAMETER Experiment Name: At_4deg_Cold_P Parameter: Timepoint (hr) Value: 6
  misc_feature: MA Experiment ID: 20001248 Result: Up-regulated in Transcription
  misc_feature: MA Experiment 20001248 PARAMETER Experiment Name: At_Far-red-induction_P Parameter: Age (day) Value: 7
  misc_feature: MA Experiment 20001248 PARAMETER Experiment Name: At_Far-red-induction_P Parameter: Light Value: Far-red vs. White
  misc_feature: MA Experiment 20001248 PARAMETER Experiment Name: At_Far-red-induction_P Parameter: Organism Value: A. thaliana
  misc_feature: MA Experiment 20001248 PARAMETER Experiment Name: At_Far-red-induction_P Parameter: Plant Line Value: Columbia
  misc_feature: MA Experiment 20001248 PARAMETER Experiment Name: At_Far-red-induction_P Parameter: Timepoint (hr) Value: 4
  misc_feature: MA Experiment 20001248 PARAMETER Experiment Name: At_Far-red-induction_P Parameter: Tissue Value: Whole Plant
  misc_feature: MA Experiment ID: 20001450 Result: Up-regulated in Transcription
  misc_feature: MA Experiment 20001450 PARAMETER Experiment Name: At_Far-red-induction_P Parameter: Age (day) Value: 7
  misc_feature: MA Experiment 20001450 PARAMETER Experiment Name: At_Far-red-induction_P Parameter: Light Value: Far-red vs. White
  misc_feature: MA Experiment 20001450 PARAMETER Experiment Name: At_Far-red-induction_P Parameter: Organism Value: A. thaliana
  misc_feature: MA Experiment 20001450 PARAMETER Experiment Name: At_Far-red-induction_P Parameter: Plant Line Value: Columbia
  misc_feature: MA Experiment 20001450 PARAMETER Experiment Name: At_Far-red-induction_P Parameter: Timepoint (hr) Value: 8
  misc_feature: MA Experiment 20001450 PARAMETER Experiment Name: At_Far-red-induction_P Parameter: Tissue Value: Whole Plant
  misc_feature: MA Experiment ID: 20001905 Result: Down-regulated in Transcription
  misc_feature: MA Experiment 20001905 PARAMETER Experiment Name: At_Drought_Reproduction_P Parameter: Age (day) Value: 40
  misc_feature: MA Experiment 20001905 PARAMETER Experiment Name: At_Drought_Reproduction_P Parameter: Organism Value: A. thaliana
  misc_feature: MA Experiment 20001905 PARAMETER Experiment Name: At_Drought_Reproduction_P Parameter: Plant Line Value: WS
  misc_feature: MA Experiment 20001905 PARAMETER Experiment Name: At_Drought_Reproduction_P Parameter: Timepoint (day) Value: 10
  misc_feature: MA Experiment 20001905 PARAMETER Experiment Name: At_Drought_Reproduction_P Parameter: Tissue Value: Rosettes
  misc_feature: MA Experiment 20001905 PARAMETER Experiment Name: At_Drought_Reproduction_P Parameter: Treatment Value: Drought vs. No Drought
atggcgtatcagcctgttccgggttctgggtttcactacttgaactctcctttcggtgatacaactttcacaaaggtgttcgtcggtggtcttgcttgggaaactcaaagtgaaactcttcgccagcatttcgaacagtacggtgaaatccttgaagctgttgtcattgctgataagaacactggtcgatccaaaggatatggctttgtgacattccgagatccagaagctgctaggagagcttgtgctgaccctactccgattatagacggtagacgtgcaaactgtaatcttgcttcccttgggagacctcggcctccattgccctatgcagtgatacctaacatgcctggacgcttaagacctgcttccccgtacattggaaatgtgcagggtcctcgaggttcacttattggaaattatccgtatcagcaaccacttccatataactaccagcaaggagttgtctatccttatggagtaaccgcttatggacccgagtacatgtactcgcaatcacagggtttatatagtccatacatgggtcagcaataccttcaggtctatggagtacctggagcagtgaattcacccgtttatcaatacgggcaactaagtcagactattcctaatggccatggttatacagcagttcaaggctattcggttccaggaagccatattctgcagcttggtggacccactgtcagtacgatgaccacttcatctatgcctgctcttcaagctccttacccttcaggtataccaggccctgctcccgtacagtcgcatatcattgtccactcccctcaatttatgcagagtaccgcttctgaccaaacaacaagttattcttgaagactgaagagaaaaggaagttaagttagtgaaactgctactggaggtgttgcagaagaggcttcctgttttattaagtcttgcacgttatttatcttgcatccttaaggttatgtaaaatagtcttgctcactgggaaggcgcagcgcagaaggaaaaaaaaaaagcaaaggaaattggagtgtcagggtttatgcttccgttttcttacccatccatcaatgtgtataaaacacagccacaaaaaagctgctggctcgagcttgggttgagtttgaaggcaccatagctggtttcccttggaggggaagaccagtagtaataagttggtgtacaatatgcatatatttatacacacatacacaagcatatacatatggtagaatcaaaatctgattcttttcaagtctgaagtcgtaataccactacacttccttcaggtgcaggagtgtagtgagtaacattgataggtatatagcctttgtctttaagtcctgcattgtaagtaaaacatgttcatcatgtccttttctgtgattgtgcatatttagggttctctcttcttccatctgaacacactgggattgtttactgaagcttacttcaaagtatggagtaggctcttttctc

SEQ ID NO: 106449 - protein, 285 aa, Arabidopsis thaliana
  peptide (1)..(285): Ceres Seq. ID no. 13619594
  misc_feature (26)..(81): Pfam Name: RNA recognition motif. (a.k.a. RRM, RBD, or RNP domain) Pfam Description: RNA recognition motif. (a.k.a. RRM, RBD, or RNP
  misc_feature (1)..(285): Homolog of NCBI NO: 22330665 NR Description: RNA recognition motif (RRM)-containing protein
  misc_feature (1)..(282): Homolog of NCBI NO: 25406448 NR Description: probable RNA-binding protein, 24808-23340
  misc_feature (1)..(282): Homolog of NCBI NO: 18394923 NR Description: RNA recognition motif (RRM)-containing protein
  misc_feature (1)..(282): Homolog of NCBI NO: 23505939 NR Description: At1g20880/F9H16_14 [Arabidopsis thaliana]
  misc_feature (1)..(282): Homolog of NCBI NO: 15010636 NR Description: At1g20880/F9H16_14 [Arabidopsis thaliana]
  misc_feature (116)..(285): Homolog of NCBI NO: 14030649 NR Description: F15M4.4/F15M4.4 [Arabidopsis thaliana]
  misc_feature (1)..(265): Homolog of NCBI NO: 25518498 NR Description: hypothetical protein F9H16.14 - Arabidopsis >gi|4836901|gb|AAD30604.1|AC007369_14 Unknown protein
  misc_feature (18)..(223): Homolog of NCBI NO: 34907334 NR Description: P0698A10.29 [Oryza sativa (japonica
  misc_feature (13)..(283): Homolog of NCBI NO: 18411885 NR Description: RNA recognition motif (RRM)-containing protein
  misc_feature (9)..(271): Homolog of NCBI NO: 25518109 NR Description: T16E15.6 protein - Arabidopsis thaliana Contains similarity to seb4D protein from Mus musculus gb|X75316
MAYQPVPGSGFHYLNSPFGDTTFTKVFVGGLAWETQSETLRQHFEQYGEILEAVVIADKNTGRSKGYGFVTFRDPEAARRACADPTPIIDGRRANCNLASLGRPRPPLPYAVIPNMPGRLRPASPYIGNVQGPRGSLIGNYPYQQPLPYNYQQGVVYPYGVTAYGPEYMYSQSQGLYSPYMGQQYLQVYGVPGAVNSPVYQYGQLSQTIPNGHGYTAVQGYSVPGSHILQLGGPTVSTMTTSSMPALQAPYPSGIPGPAPVQSHIIVHSPQFMQSTASDQTTSYS

SEQ ID NO: 106450 - protein, 170 aa, Arabidopsis thaliana
  peptide (1)..(170): Ceres Seq. ID no. 13619595
  misc_feature (1)..(170): Homolog of NCBI NO: 22330665 NR Description: RNA recognition motif (RRM)-containing protein
  misc_feature (1)..(167): Homolog of NCBI NO: 25406448 NR Description: probable RNA-binding protein, 24808-23340
  misc_feature (1)..(167): Homolog of NCBI NO: 18394923 NR Description: RNA recognition motif (RRM)-containing protein
  misc_feature (1)..(167): Homolog of NCBI NO: 23505939 NR Description: At1g20880/F9H16_14 [Arabidopsis thaliana]
  misc_feature (1)..(167): Homolog of NCBI NO: 15010636 NR Description: At1g20880/F9H16_14 [Arabidopsis thaliana]
  misc_feature (1)..(170): Homolog of NCBI NO: 14030649 NR Description: F15M4.4/F15M4.4 [Arabidopsis thaliana]
  misc_feature (1)..(150): Homolog of NCBI NO: 25518498 NR Description: hypothetical protein F9H16.14 - Arabidopsis >gi|4836901|gb|AAD30604.1|AC007369_14 Unknown protein
  misc_feature (1)..(108): Homolog of NCBI NO: 34907334 NR Description: P0698A10.29 [Oryza sativa (japonica
  misc_feature (1)..(168): Homolog of NCBI NO: 18411885 NR Description: RNA recognition motif (RRM)-containing protein
  misc_feature (1)..(156): Homolog of NCBI NO: 25518109 NR Description: T16E15.6 protein - Arabidopsis thaliana Contains similarity to seb4D protein from Mus musculus gb|X75316
MPGRLRPASPYIGNVQGPRGSLIGNYPYQQPLPYNYQQGVVYPYGVTAYGPEYMYSQSQGLYSPYMGQQYLQVYGVPGAVNSPVYQYGQLSQTIPNGHGYTAVQGYSVPGSHILQLGGPTVSTMTTSSMPALQAPYPSGIPGPAPVQSHIIVHSPQFMQSTASDQTTSYS

SEQ ID NO: 106451 - DNA, 3160 bp, Arabidopsis thaliana
  misc_feature (1)..(3160): Ceres Seq. ID no. 13619604
  misc_feature: MA Experiment ID: 20000171 Result: Down-regulated in Transcription
  misc_feature: MA Experiment 20000171 PARAMETER Experiment Name: At_42deg_Heat_P Parameter: Age (day) Value: 14
  misc_feature: MA Experiment 20000171 PARAMETER Experiment Name: At_42deg_Heat_P Parameter: Organism Value: A. thaliana
  misc_feature: MA Experiment 20000171 PARAMETER Experiment Name: At_42deg_Heat_P Parameter: Plant Line Value: WS
  misc_feature: MA Experiment 20000171 PARAMETER Experiment Name: At_42deg_Heat_P Parameter: Temperature (deg C) Value: 42 vs. 22
  misc_feature: MA Experiment 20000171 PARAMETER Experiment Name: At_42deg_Heat_P Parameter: Timepoint (hr) Value: 1
  misc_feature: MA Experiment 20000171 PARAMETER Experiment Name: At_42deg_Heat_P Parameter: Tissue Value: Aerial
  misc_feature: MA Experiment ID: 20000173 Result: Down-regulated in Transcription
  misc_feature: MA Experiment 20000173 PARAMETER Experiment Name: At_42deg_Heat_P Parameter: Age (day) Value: 14
  misc_feature: MA Experiment 20000173 PARAMETER Experiment Name: At_42deg_Heat_P Parameter: Organism Value: A. thaliana
  misc_feature: MA Experiment 20000173 PARAMETER Experiment Name: At_42deg_Heat_P Parameter: Plant Line Value: WS
  misc_feature: MA Experiment 20000173 PARAMETER Experiment Name: At_42deg_Heat_P Parameter: Temperature (deg C) Value: 42 vs. 22
  misc_feature: MA Experiment 20000173 PARAMETER Experiment Name: At_42deg_Heat_P Parameter: Timepoint (hr) Value: 6
  misc_feature: MA Experiment 20000173 PARAMETER Experiment Name: At_42deg_Heat_P Parameter: Tissue Value: Aerial
  misc_feature: MA Experiment ID: 20000227 Result: Up-regulated in Transcription
  misc_feature: MA Experiment 20000227 PARAMETER Experiment Name: At_Root-Tips-vs-Tops_P Parameter: Tissue Value: Root Tips vs. Root Tops
  misc_feature: MA Experiment ID: 20000268 Result: Down-regulated in Transcription
  misc_feature: MA Experiment 20000268 PARAMETER Experiment Name: At_100mM_NaCl__P Parameter: Age (day) Value: 14
  misc_feature: MA Experiment 20000268 PARAMETER Experiment Name: At_100mM_NaCl__P Parameter: Organism Value: A. thaliana
  misc_feature: MA Experiment 20000268 PARAMETER Experiment Name: At_100mM_NaCl__P Parameter: Plant Line Value: WS
  misc_feature: MA Experiment 20000268 PARAMETER Experiment Name: At_100mM_NaCl__P Parameter: Timepoint (hr) Value: 6
  misc_feature: MA Experiment 20000268 PARAMETER Experiment Name: At_100mM_NaCl__P Parameter: Tissue Value: Whole Plant
  misc_feature: MA Experiment 20000268 PARAMETER Experiment Name: At_100mM_NaCl__P Parameter: Treatment Value: 100mM NaCl vs. No Treatment
  misc_feature: MA Experiment ID: 20001247 Result: Up-regulated in Transcription
  misc_feature: MA Experiment 20001247 PARAMETER Experiment Name: At_Far-red-induction_P Parameter: Age (day) Value: 7
  misc_feature: MA Experiment 20001247 PARAMETER Experiment Name: At_Far-red-induction_P Parameter: Light Value: Far-red vs. White
  misc_feature: MA Experiment 20001247 PARAMETER Experiment Name: At_Far-red-induction_P Parameter: Organism Value: A. thaliana
  misc_feature: MA Experiment 20001247 PARAMETER Experiment Name: At_Far-red-induction_P Parameter: Plant Line Value: Columbia
  misc_feature: MA Experiment 20001247 PARAMETER Experiment Name: At_Far-red-induction_P Parameter: Timepoint (hr) Value: 1
  misc_feature: MA Experiment 20001247 PARAMETER Experiment Name: At_Far-red-induction_P Parameter: Tissue Value: Whole Plant
  misc_feature: MA Experiment ID: 20001555 Result: Down-regulated in Transcription
  misc_feature: MA Experiment 20001555 PARAMETER Experiment Name: At_Drought_Soil_Dry_P Parameter: Age (day) Value: 24
  misc_feature: MA Experiment 20001555 PARAMETER Experiment Name: At_Drought_Soil_Dry_P Parameter: Organism Value: A. thaliana
  misc_feature: MA Experiment 20001555 PARAMETER Experiment Name: At_Drought_Soil_Dry_P Parameter: Plant Line Value: WS
  misc_feature: MA Experiment 20001555 PARAMETER Experiment Name: At_Drought_Soil_Dry_P Parameter: Post Timepoint (hr) Value: None
  misc_feature: MA Experiment 20001555 PARAMETER Experiment Name: At_Drought_Soil_Dry_P Parameter: Post-Treatment Value: None
  misc_feature: MA Experiment 20001555 PARAMETER Experiment Name: At_Drought_Soil_Dry_P Parameter: Timepoint (day) Value: 10
  misc_feature: MA Experiment 20001555 PARAMETER Experiment Name: At_Drought_Soil_Dry_P Parameter: Treatment Value: Drought vs. No Drought
  misc_feature: MA Experiment ID: 20001756 Result: Up-regulated in Transcription
  misc_feature: MA Experiment 20001756 PARAMETER Experiment Name: At_50mM_NH4NO3_L-to-H_P Parameter: Timepoint (hr) Value: 4
  misc_feature: MA Experiment 20001756 PARAMETER Experiment Name: At_50mM_NH4NO3_L-to-H_P Parameter: Tissue Value: Leaf
  misc_feature: MA Experiment 20001756 PARAMETER Experiment Name: At_50mM_NH4NO3_L-to-H_P Parameter: Treatment Value: 50mM NH4NO3 vs 100mM Mannitol
  misc_feature: MA Experiment ID: 20001757 Result: Up-regulated in Transcription
  misc_feature: MA Experiment 20001757 PARAMETER Experiment Name: At_50mM_NH4NO3_L-to-H_P Parameter: Timepoint (hr) Value: 6
  misc_feature: MA Experiment 20001757 PARAMETER Experiment Name: At_50mM_NH4NO3_L-to-H_P Parameter: Tissue Value: Leaf
  misc_feature: MA Experiment 20001757 PARAMETER Experiment Name: At_50mM_NH4NO3_L-to-H_P Parameter: Treatment Value: 50mM NH4NO3 vs 100mM Mannitol
ggcccatcttcccatttcctaaaagcttcaaactttcttcacatttctctctttatctctctgtttcttcttcaatcctctgtttcttcaagctatgaagaaaagaagaacctttcttctattttcatttacctttcttcttcttctatctctttctaaagctgattctgatggagatctctcagcgatgttatcactcaagaaaagcttaaacccacccagttctttcggttggtctgaccctgacccatgtaaatggactcacatcgtttgtacaggaacaaaacgtgtgacccggatccaaatcgggcattcgggtcttcaaggtacactttctcctgatctacgtaacttatcagagcttgaaagacttgagcttcaatggaacaacatctctggtcctgttccttctttaagtggtttagcttcattacaagtcttgatgttaagtaacaacaactttgattctatccctagtgatgtctttcaaggtttaacttcgttacaatctgtagaaattgataacaatccttttaagagttgggagattccagagagtttgagaaatgcttctgctcttcagaatttctctgctaattcggctaatgtttccggttctttacccggttttctcggaccggatgagtttcccggtttgtcgattttgcatttggctttcaacaacttagaaggagagttgcctatgagtttagctggctctcaggttcagtcattgtggctcaatggtcagaaactaaccggtgatattactgttcttcagaacatgactggtttaaaagaggtttggcttcactccaacaagttttcgggtcctttaccggacttttcgggtcttaaggagcttgagagcttgagtttgagagataactcctttacaggtccagttcctgcgtctttgttaagtcttgagtcacttaaagttgtgaacttgacgaataatcatctacaaggaccagtgcctgtgtttaagagctctgtttcagttgatttggataaagattctaacagcttttgcttgtctagtcctggtgagtgtgatcctagagtgaagtctttgcttttgatagctagttcattcgattatccgccccggctcgctgagagttggaaaggaaacgatccttgtactaactggattgggatagcttgtagcaatgggaacattactgttatcagtcttgagaaaatggaactaaccgggacgatttctcccgagtttggagcgatcaagtcgcttcaaagaatcattcttggtatcaacaatcttactggtatgattcctcaagagcttacaacgttacctaatctcaaaacactcgatgtttcgagtaacaagcttttcgggaaggtcccgggttttagaagcaatgttgttgtgaatactaatggtaatcctgacattggaaaggataaaagctctttgtcttctcctggttcttcttcgccttcaggtggttcgggttcaggtatcaacggtgataaagaccggagaggaatgaagtcttcgacttttataggaatcattgttggttcagttcttggaggtttgttatcaatcttcttgattggtttgttagttttctgttggtacaaaaagaggcagaagagattctcaggaagtgagagctcaaatgcagtagtggtgcatccgcgacattcggggtctgacaatgagagtgttaagattacagttgcgggttcaagcgtaagcgttggagggataagtgatacttatacgcttcctggtacaagtgaggttggagataatattcaaatggtggaagcaggaaacatgctgatatcaatccaagtgcttcgttctgtgactaacaacttcagttcagataacattcttggatcaggaggtttcggggttgtgtataaaggcgagttgcacgatggaacgaagattgcggttaagagaatggagaatggagttattgctggtaaaggctttgcggagtttaaatcagagattgcggttttaacaaaggttaggcatcgtcatttggttacgcttcttggttattgtttggatgggaatgagaagttacttgtgtatgagtatatgcctcaagggacattgagtaggcatttgtttgagtggtcagaggaaggacttaagcctctgttgtggaaacagagattgactttagctttggatgttgctagaggtgtggagtatctccatggattagctcaccagagctttatacacagggatcttaagccttctaacattcttcttggggatgatatgagggcgaaagttgcagactttggactcgttcgtctcgctcctgaaggaaaaggatcgattgagactagaatcgctggaacatttggttacttggcacccgaatacgcagtaacgggtcgagtgacaacgaaggtcgatgtatacagcttcggggtaatcctaatggaactcataacgggaagaaaatctctagacgaatcgcaaccagaagaaagcattcacttggtctcttggttcaaacggatgtacatcaacaaagaagcatcattcaagaaagcgatcgacacgacaatagacctagacgaagaaaccttagccagcgttcacactgttgctgaactagcaggccattgctgtgcccgtgagccttaccagagaccagacatgggacacgcagtcaacattctgtcatcactcgttgagctatggaaaccgtcggatcagaatccagaagacatatatggtatcgatctcgacatgtctttacctcaagcacttaagaaatggcaagcttatgaaggaagaagtgatctcgaatcttcaacttcatcacttttacctagcttggacaacacgcagatgagtattcccactagaccttacggattcgcagagtcattcacttcagtagatggacgatgaatgagagattccttgaaacccagatttgatttttctccttttgtatatttgtgtttcctctcctcttcttcccctcacaattctttcatgtttcttgtgatgcaagtaacatttagggcttaatttgggtgtcttaatattattttgatgttgagtgttttatttgttggtttgttgatttagaaaagttgacgtgtgtacttcaagtttgtgggaaatggtaaatgacagtgaggt

SEQ ID NO: 106452 - protein, 942 aa, Arabidopsis thaliana
  peptide (1)..(942): Ceres Seq. ID no. 13619605
  misc_feature (28)..(942): Homolog of NCBI NO: 28301932 NR Description: gibberellin-induced receptor-like kinase TMK
  misc_feature (15)..(942): Homolog of NCBI NO: 7434420 NR Description: receptor-like protein kinase (EC 2.7.1.-) - rice
  misc_feature (8)..(942): Homolog of NCBI NO: 15226361 NR Description: receptor-related protein kinase [Arabidopsis
  misc_feature (14)..(466): Homolog of NCBI NO: 9945083 NR Description: F5A9.23 [Arabidopsis thaliana]
  misc_feature (14)..(466): Homolog of NCBI NO: 15221802 NR Description: protein kinase -related [Arabidopsis thaliana]
  misc_feature (486)..(942): Homolog of NCBI NO: 9945083 NR Description: F5A9.23 [Arabidopsis thaliana]
  misc_feature (486)..(942): Homolog of NCBI NO: 15221802 NR Description: protein kinase -related [Arabidopsis thaliana]
MKKRRTFLLFSFTFLLLLSLSKADSDGDLSAMLSLKKSLNPPSSFGWSDPDPCKWTHIVCTGTKRVTRIQIGHSGLQGTLSPDLRNLSELERLELQWNNISGPVPSLSGLASLQVLMLSNNNFDSIPSDVFQGLTSLQSVEIDNNPFKSWEIPESLRNASALQNFSANSANVSGSLPGFLGPDEFPGLSILHLAFNNLEGELPMSLAGSQVQSLWLNGQKLTGDITVLQNMTGLKEVWLHSNKFSGPLPDFSGLKELESLSLRDNSFTGPVPASLLSLESLKVVNLTNNHLQGPVPVFKSSVSVDLDKDSNSFCLSSPGECDPRVKSLLLIASSFDYPPRLAESWKGNDPCTNWIGIACSNGNITVISLEKMELTGTISPEFGAIKSLQRIILGINNLTGMIPQELTTLPNLKTLDVSSNKLFGKVPGFRSNVVVNTNGNPDIGKDKSSLSSPGSSSPSGGSGSGINGDKDRRGMKSSTFIGIIVGSVLGGLLSIFLIGLLVFCWYKKRQKRFSGSESSNAVVVHPRHSGSDNESVKITVAGSSVSVGGISDTYTLPGTSEVGDNIQMVEAGNMLISIQVLRSVTNNFSSDNILGSGGFGVVYKGELHDGTKIAVKRMENGVIAGKGFAEFKSEIAVLTKVRHRHLVTLLGYCLDGNEKLLVYEYMPQGTLSRHLFEWSEEGLKPLLWKQRLTLALDVARGVEYLHGLAHQSFIHRDLKPSNILLGDDMRAKVADFGLVRLAPEGKGSIETRIAGTFGYLAPEYAVTGRVTTKVDVYSFGVILMELITGRKSLDESQPEESIHLVSWFKRMYINKEASFKKAIDTTIDLDEETLASVHTVAELAGHCCAREPYQRPDMGHAVNILSSLVELWKPSDQNPEDIYGIDLDMSLPQALKKWQAYEGRSDLESSTSSLLPSLDNTQMSIPTRPYGFAESFTSVDGR

SEQ ID NO: 106453 - protein, 911 aa, Arabidopsis thaliana
  peptide (1)..(911): Ceres Seq. ID no. 13619606
  misc_feature (1)..(911): Homolog of NCBI NO: 28301932 NR Description: gibberellin-induced receptor-like kinase TMK
  misc_feature (1)..(911): Homolog of NCBI NO: 7434420 NR Description: receptor-like protein kinase (EC 2.7.1.-) - rice
  misc_feature (1)..(911): Homolog of NCBI NO: 15226361 NR Description: receptor-related protein kinase [Arabidopsis
  misc_feature (1)..(435): Homolog of NCBI NO: 9945083 NR Description: F5A9.23 [Arabidopsis thaliana]
  misc_feature (1)..(435): Homolog of NCBI NO: 15221802 NR Description: protein kinase -related [Arabidopsis thaliana]
  misc_feature (455)..(911): Homolog of NCBI NO: 9945083 NR Description: F5A9.23 [Arabidopsis thaliana]
  misc_feature (455)..(911): Homolog of NCBI NO: 15221802 NR Description: protein kinase -related [Arabidopsis thaliana]
MLSLKKSLNPPSSFGWSDPDPCKWTHIVCTGTKRVTRIQIGHSGLQGTLSPDLRNLSELERLELQWNNISGPVPSLSGLASLQVLMLSNNNFDSIPSDVFQGLTSLQSVEIDNNPFKSWEIPESLRNASALQNFSANSANVSGSLPGFLGPDEFPGLSILHLAFNNLEGELPMSLAGSQVQSLWLNGQKLTGDITVLQNMTGLKEVWLHSNKFSGPLPDFSGLKELESLSLRDNSFTGPVPASLLSLESLKVVNLTNNHLQGPVPVFKSSVSVDLDKDSNSFCLSSPGECDPRVKSLLLIASSFDYPPRLAESWKGNDPCTNWIGIACSNGNITVISLEKMELTGTISPEFGAIKSLQRIILGINNLTGMIPQELTTLPNLKTLDVSSNKLFGKVPGFRSNVVVNTNGNPDIGKDKSSLSSPGSSSPSGGSGSGINGDKDRRGMKSSTFIGIIVGSVLGGLLSIFLIGLLVFCWYKKRQKRFSGSESSNAVVVHPRHSGSDNESVKITVAGSSVSVGGISDTYTLPGTSEVGDNIQMVEAGNMLISIQVLRSVTNNFSSDNILGSGGFGVVYKGELHDGTKIAVKRMENGVIAGKGFAEFKSEIAVLTKVRHRHLVTLLGYCLDGNEKLLVYEYMPQGTLSRHLFEWSEEGLKPLLWKQRLTLALDVARGVEYLHGLAHQSFIHRDLKPSNILLGDDMRAKVADFGLVRLAPEGKGSIETRIAGTFGYLAPEYAVTGRVTTKVDVYSFGVILMELITGRKSLDESQPEESIHLVSWFKRMYINKEASFKKAIDTTIDLDEETLASVHTVAELAGHCCAREPYQRPDMGHAVNILSSLVELWKPSDQNPEDIYGIDLDMSLPQALKKWQAYEGRSDLESSTSSLLPSLDNTQMSIPTRPYGFAESFTSVDGR

SEQ ID NO: 106454 - protein, 826 aa, Arabidopsis thaliana
  peptide (1)..(826): Ceres Seq. ID no. 13619607
  misc_feature (1)..(826): Homolog of NCBI NO: 28301932 NR Description: gibberellin-induced receptor-like kinase TMK
  misc_feature (1)..(826): Homolog of NCBI NO: 7434420 NR Description: receptor-like protein kinase (EC 2.7.1.-) - rice
  misc_feature (1)..(826): Homolog of NCBI NO: 15226361 NR Description: receptor-related protein kinase [Arabidopsis
  misc_feature (1)..(350): Homolog of NCBI NO: 9945083 NR Description: F5A9.23 [Arabidopsis thaliana]
  misc_feature (1)..(350): Homolog of NCBI NO: 15221802 NR Description: protein kinase -related [Arabidopsis thaliana]
  misc_feature (370)..(826): Homolog of NCBI NO: 9945083 NR Description: F5A9.23 [Arabidopsis thaliana]
  misc_feature (370)..(826): Homolog of NCBI NO: 15221802 NR Description: protein kinase -related [Arabidopsis thaliana]
MLSNNNFDSIPSDVFQGLTSLQSVEIDNNPFKSWEIPESLRNASALQNFSANSANVSGSLPGFLGPDEFPGLSILHLAFNNLEGELPMSLAGSQVQSLWLNGQKLTGDITVLQNMTGLKEVWLHSNKFSGPLPDFSGLKELESLSLRDNSFTGPVPASLLSLESLKVVNLTNNHLQGPVPVFKSSVSVDLDKDSNSFCLSSPGECDPRVKSLLLIASSFDYPPRLAESWKGNDPCTNWIGIACSNGNITVISLEKMELTGTISPEFGAIKSLQRIILGINNLTGMIPQELTTLPNLKTLDVSSNKLFGKVPGFRSNVVVNTNGNPDIGKDKSSLSSPGSSSPSGGSGSGINGDKDRRGMKSSTFIGIIVGSVLGGLLSIFLIGLLVFCWYKKRQKRFSGSESSNAVVVHPRHSGSDNESVKITVAGSSVSVGGISDTYTLPGTSEVGDNIQMVEAGNMLISIQVLRSVTNNFSSDNILGSGGFGVVYKGELHDGTKIAVKRMENGVIAGKGFAEFKSEIAVLTKVRHRHLVTLLGYCLDGNEKLLVYEYMPQGTLSRHLFEWSEEGLKPLLWKQRLTLALDVARGVEYLHGLAHQSFIHRDLKPSNILLGDDMRAKVADFGLVRLAPEGKGSIETRIAGTFGYLAPEYAVTGRVTTKVDVYSFGVILMELITGRKSLDESQPEESIHLVSWFKRMYINKEASFKKAIDTTIDLDEETLASVHTVAELAGHCCAREPYQRPDMGHAVNILSSLVELWKPSDQNPEDIYGIDLDMSLPQALKKWQAYEGRSDLESSTSSLLPSLDNTQMSIPTRPYGFAESFTSVDGR

SEQ ID NO: 106455 - DNA, 1000 bp, Arabidopsis thaliana
  misc_feature (1)..(1000): Ceres Seq. ID no. 13619612
  misc_feature: MA Experiment ID: 20000180 Result: Up-regulated in Transcription
  misc_feature: MA Experiment 20000180 PARAMETER Experiment Name: At_Germinating_Seeds_P Parameter: Age (hr) Value: 24 vs. 0
  misc_feature: MA Experiment 20000180 PARAMETER Experiment Name: At_Germinating_Seeds_P Parameter: Tissue Value: Germinating Seeds
  misc_feature: MA Experiment ID: 20000436 Result: Up-regulated in Transcription
  misc_feature: MA Experiment 20000436 PARAMETER Experiment Name: At_Drought_P Parameter: Age (day) Value: 7
  misc_feature: MA Experiment 20000436 PARAMETER Experiment Name: At_Drought_P Parameter: Organism Value: A. thaliana
  misc_feature: MA Experiment 20000436 PARAMETER Experiment Name: At_Drought_P Parameter: Plant Line Value: WS
  misc_feature: MA Experiment 20000436 PARAMETER Experiment Name: At_Drought_P Parameter: Timepoint (hr) Value: 12
  misc_feature: MA Experiment 20000436 PARAMETER Experiment Name: At_Drought_P Parameter: Tissue Value: Whole Plant
  misc_feature: MA Experiment 20000436 PARAMETER Experiment Name: At_Drought_P Parameter: Treatment Value: Drought vs. No Drought
  misc_feature: MA Experiment ID: 20000437 Result: Up-regulated in Transcription
  misc_feature: MA Experiment 20000437 PARAMETER Experiment Name: At_Drought_P Parameter: Age (day) Value: 8
  misc_feature: MA Experiment 20000437 PARAMETER Experiment Name: At_Drought_P Parameter: Organism Value: A. thaliana
  misc_feature: MA Experiment 20000437 PARAMETER Experiment Name: At_Drought_P Parameter: Plant Line Value: WS
  misc_feature: MA Experiment 20000437 PARAMETER Experiment Name: At_Drought_P Parameter: Timepoint (hr) Value: 24
  misc_feature: MA Experiment 20000437 PARAMETER Experiment Name: At_Drought_P Parameter: Tissue Value: Whole Plant
  misc_feature: MA Experiment 20000437 PARAMETER Experiment Name: At_Drought_P Parameter: Treatment Value: Drought vs. No Drought
  misc_feature: MA Experiment ID: 20001458 Result: Down-regulated in Transcription
  misc_feature: MA Experiment 20001458 PARAMETER Experiment Name: At_50mM_NH4NO3_L-to-H_P Parameter: Age (day) Value: Undefined
  misc_feature: MA Experiment 20001458 PARAMETER Experiment Name: At_50mM_NH4NO3_L-to-H_P Parameter: Organism Value: Undefined
  misc_feature: MA Experiment 20001458 PARAMETER Experiment Name: At_50mM_NH4NO3_L-to-H_P Parameter: Plant Line Value: Undefined
  misc_feature: MA Experiment 20001458 PARAMETER Experiment Name: At_50mM_NH4NO3_L-to-H_P Parameter: Timepoint (hr) Value: 2
  misc_feature: MA Experiment 20001458 PARAMETER Experiment Name: At_50mM_NH4NO3_L-to-H_P Parameter: Tissue Value: Siliques
  misc_feature: MA Experiment 20001458 PARAMETER Experiment Name: At_50mM_NH4NO3_L-to-H_P Parameter: Treatment Value: 50mM NH4NO3 vs. 100mM Manitol
  misc_feature: MA Experiment ID: 20001757 Result: Down-regulated in Transcription
  misc_feature: MA Experiment 20001757 PARAMETER Experiment Name: At_50mM_NH4NO3_L-to-H_P Parameter: Timepoint (hr) Value: 6
  misc_feature: MA Experiment 20001757 PARAMETER Experiment Name: At_50mM_NH4NO3_L-to-H_P Parameter: Tissue Value: Leaf
  misc_feature: MA Experiment 20001757 PARAMETER Experiment Name: At_50mM_NH4NO3_L-to-H_P Parameter: Treatment Value: 50mM NH4NO3 vs 100mM Mannitol
gtcgacccacgcgtccgtgggaagccacaataaccccctattcctcggccttttttaaaaaagttttagaataatccgataaaatacttttatattaatttttctttggtccatggagggttcgtccaaagggttgaggaaaggtgcatggactgctgaagaagatagtctcttgaggctatgtattgataagtatggagaaggcaaatggcatcaagttcctttgagagctgggctaaatcgatgcagaaagagttgtagactaagatggttgaactatttgaagccaagtatcaagagaggaagacttagcaatgatgaagttgatcttcttcttcgccttcataagcttctaggaaataggtggtccttgattgctggtcgattgcctggtcggaccgctaatgatgtcaaaaattactggaacacccatctgagtaaaaaacatgagtcttcgtgttgtaagtctaaaatgaaaaagaaaaacattatttcccctcctacaacaccggtccaaaaaatcggtgtttttaagcctcgacctcgatccttctctgttaacaatggttgcagccatctcaatggtctgccagaagttgatttaattccttcatgccttggactcaagaaaaataatgtttgtgaaaatagtatcacatgtaacaaagatgatgagaaagatgattttgtgaataatctaatgaatggagataatatgtggttggagaatttactgggggaaaaccaagaagctgatgcgattgttcctgaagcgacgacagctgaacatggggccactttggcgtttgacgttgagcaactttggagtctgtttgatggagagactgttgaacttgattagtgtttctcaccgtttgtttaagattgtgggtggcttttctttcgtattttagtaatgtatttttctgtatgaagtaaagaatttcagcattttaagaaaaatggttatgtttctacgtaataaaaaaaaacgttattt

SEQ ID NO: 106456 - protein, 249 aa, Arabidopsis thaliana
  peptide (1)..(249): Ceres Seq. ID no. 13619613
  misc_feature (10)..(57): Pfam Name: Myb-like DNA-binding domain Pfam Description: Myb-like DNA-binding domain
  misc_feature (1)..(249): Homolog of NCBI NO: 15219651 NR Description: myb family transcription factor [Arabidopsis
  misc_feature (1)..(249): Homolog of NCBI NO: 15223582 NR Description: myb-related protein anthocyanin2, putative thaliana] >gi|25294091|pir||B96608 probable transcription factor
  misc_feature (1)..(249): Homolog of NCBI NO: 15219632 NR Description: myb family transcription factor (MYB113)
  misc_feature (1)..(208): Homolog of NCBI NO: 11358560 NR Description: myb-related transcription factor MYB75 [imported] Arabidopsis thaliana >gi|3941508|gb|AAC83630.1| putative
  misc_feature (1)..(140): Homolog of NCBI NO: 15219650 NR Description: myb family transcription factor (MYB114)
  misc_feature (4)..(229): Homolog of NCBI NO: 7673084 NR Description: An2 protein [Petunia x hybrida]
  misc_feature (4)..(229): Homolog of NCBI NO: 7673086 NR Description: An2 protein [Petunia integrifolia]
  misc_feature (4)..(229): Homolog of NCBI NO: 7673088 NR Description: An2 protein [Petunia integrifolia]
  misc_feature (7)..(200): Homolog of NCBI NO: 40643886 NR Description: MYB10 protein [Gerbera hybrid cv. 'Terra Regina']
  misc_feature (4)..(147): Homolog of NCBI NO: 33867693 NR Description: anthocyanin 1 [Lycopersicon esculentum]
MEGSSKGLRKGAWTAEEDSLLRLCIDKYGEGKWHQVPLRAGLNRCRKSCRLRWLNYLKPSIKRGRLSNDEVDLLLRLHKLLGNRWSLIAGRLPGRTANDVKNYWNTHLSKKHESSCCKSKMKKKNIISPPTTPVQKIGVFKPRPRSFSVNNGCSHLNGLPEVDLIPSCLGLKKNNVCENSITCNKDDEKDDFVNNLMNGDNMWLENLLGENQEADAIVPEATTAEHGATLAFDVEQLWSLFDGETVELD

SEQ ID NO: 106457 - protein, 129 aa, Arabidopsis thaliana
  peptide (1)..(129): Ceres Seq. ID no. 13619614
  misc_feature (1)..(129): Homolog of NCBI NO: 15219651 NR Description: myb family transcription factor [Arabidopsis
  misc_feature (1)..(129): Homolog of NCBI NO: 15223582 NR Description: myb-related protein anthocyanin2, putative thaliana] >gi|25294091|pir||B96608 probable transcription factor
  misc_feature (1)..(129): Homolog of NCBI NO: 15219632 NR Description: myb family transcription factor (MYB113)
  misc_feature (1)..(88): Homolog of NCBI NO: 11358560 NR Description: myb-related transcription factor MYB75 [imported] Arabidopsis thaliana >gi|3941508|gb|AAC83630.1| putative
  misc_feature (1)..(20): Homolog of NCBI NO: 15219650 NR Description: myb family transcription factor (MYB114)
  misc_feature (1)..(109): Homolog of NCBI NO: 7673084 NR Description: An2 protein [Petunia x hybrida]
  misc_feature (1)..(109): Homolog of NCBI NO: 7673086 NR Description: An2 protein [Petunia integrifolia]
  misc_feature (1)..(109): Homolog of NCBI NO: 7673088 NR Description: An2 protein [Petunia integrifolia]
  misc_feature (1)..(80): Homolog of NCBI NO: 40643886 NR Description: MYB10 protein [Gerbera hybrid cv. 'Terra Regina']
  misc_feature (1)..(27): Homolog of NCBI NO: 33867693 NR Description: anthocyanin 1 [Lycopersicon esculentum]
MKKKNIISPPTTPVQKIGVFKPRPRSFSVNNGCSHLNGLPEVDLIPSCLGLKKNNVCENSITCNKDDEKDDFVNNLMNGDNMWLENLLGENQEADAIVPEATTAEHGATLAFDVEQLWSLFDGETVELD

SEQ ID NO: 106458 - DNA, 1322 bp, Arabidopsis thaliana
  misc_feature (1)..(1322): Ceres Seq. ID no. 13619615
  misc_feature: MA Experiment ID: 108434 Result: Up-regulated in Transcription
  misc_feature: MA Experiment 108434 PARAMETER Experiment Name: At_Root_Tips_cDNA_P Parameter: Tissue Value: Root Tips
  misc_feature: MA Experiment ID: 108462 Result: Down-regulated in Transcription
  misc_feature: MA Experiment 108462 PARAMETER Experiment Name: At_Germinating_Seeds_cDNA_P Parameter: Age (day) Value: 2 vs. 0
  misc_feature: MA Experiment 108462 PARAMETER Experiment Name: At_Germinating_Seeds_cDNA_P Parameter: Tissue Value: Germinating Seeds
  misc_feature: MA Experiment ID: 108463 Result: Down-regulated in Transcription
  misc_feature: MA Experiment 108463 PARAMETER Experiment Name: At_Germinating_Seeds_cDNA_P Parameter: Age (day) Value: 3 vs. 0
  misc_feature: MA Experiment 108463 PARAMETER Experiment Name: At_Germinating_Seeds_cDNA_P Parameter: Tissue Value: Germinating Seeds
  misc_feature: MA Experiment ID: 108464 Result: Down-regulated in Transcription
  misc_feature: MA Experiment 108464 PARAMETER Experiment Name: At_Germinating_Seeds_cDNA_P Parameter: Age (day) Value: 4 vs. 0
  misc_feature: MA Experiment 108464 PARAMETER Experiment Name: At_Germinating_Seeds_cDNA_P Parameter: Tissue Value: Germinating Seeds
  misc_feature: MA Experiment ID: 108609 Result: Down-regulated in Transcription
  misc_feature: MA Experiment 108609 PARAMETER Experiment Name: At_100uM_ABA_cDNA_P Parameter: Timepoint (hr) Value: 24
  misc_feature: MA Experiment 108609 PARAMETER Experiment Name: At_100uM_ABA_cDNA_P Parameter: Tissue Value: Aerial
  misc_feature: MA Experiment 108609 PARAMETER Experiment Name: At_100uM_ABA_cDNA_P Parameter: Treatment Value: 100uM ABA vs. No Treatment
  misc_feature: MA Experiment ID: 20000093 Result: Up-regulated in Transcription
  misc_feature: MA Experiment 20000093 PARAMETER Experiment Name: At_42deg_Heat_cDNA_P Parameter: Temperature (deg C) Value: 42 vs. 22
  misc_feature: MA Experiment 20000093 PARAMETER Experiment Name: At_42deg_Heat_cDNA_P Parameter: Timepoint (hr) Value: 0.5
  misc_feature: MA Experiment 20000093 PARAMETER Experiment Name: At_42deg_Heat_cDNA_P Parameter: Tissue Value: Aerial
  misc_feature: MA Experiment ID: 20000112 Result: Up-regulated in Transcription
  misc_feature: MA Experiment 20000112 PARAMETER Experiment Name: At_42deg_Heat_cDNA_P Parameter: Temperature (deg C) Value: 42 vs. 22
  misc_feature: MA Experiment 20000112 PARAMETER Experiment Name: At_42deg_Heat_cDNA_P Parameter: Timepoint (hr) Value: 2
  misc_feature: MA Experiment 20000112 PARAMETER Experiment Name: At_42deg_Heat_cDNA_P Parameter: Tissue Value: Aerial
  misc_feature: MA Experiment ID: 20000436 Result: Down-regulated in Transcription
  misc_feature: MA Experiment 20000436 PARAMETER Experiment Name: At_Drought_P Parameter: Age (day) Value: 7
  misc_feature: MA Experiment 20000436 PARAMETER Experiment Name: At_Drought_P Parameter: Organism Value: A. thaliana
  misc_feature: MA Experiment 20000436 PARAMETER Experiment Name: At_Drought_P Parameter: Plant Line Value: WS
  misc_feature: MA Experiment 20000436 PARAMETER Experiment Name: At_Drought_P Parameter: Timepoint (hr) Value: 12
  misc_feature: MA Experiment 20000436 PARAMETER Experiment Name: At_Drought_P Parameter: Tissue Value: Whole Plant
  misc_feature: MA Experiment 20000436 PARAMETER Experiment Name: At_Drought_P Parameter: Treatment Value: Drought vs. No Drought
  misc_feature: MA Experiment ID: 20000437 Result: Down-regulated in Transcription
  misc_feature: MA Experiment 20000437 PARAMETER Experiment Name: At_Drought_P Parameter: Age (day) Value: 8
  misc_feature: MA Experiment 20000437 PARAMETER Experiment Name: At_Drought_P Parameter: Organism Value: A. thaliana
  misc_feature: MA Experiment 20000437 PARAMETER Experiment Name: At_Drought_P Parameter: Plant Line Value: WS
  misc_feature: MA Experiment 20000437 PARAMETER Experiment Name: At_Drought_P Parameter: Timepoint (hr) Value: 24
  misc_feature: MA Experiment 20000437 PARAMETER Experiment Name: At_Drought_P Parameter: Tissue Value: Whole Plant
  misc_feature: MA Experiment 20000437 PARAMETER Experiment Name: At_Drought_P Parameter: Treatment Value: Drought vs. No Drought
  misc_feature: MA Experiment ID: 20000794 Result: Down-regulated in Transcription
  misc_feature: MA Experiment 20000794 PARAMETER Experiment Name: At_Petals_P Parameter: Age (day) Value: 23-25 days
  misc_feature: MA Experiment 20000794 PARAMETER Experiment Name: At_Petals_P Parameter: Plant Line Value: WS
  misc_feature: MA Experiment 20000794 PARAMETER Experiment Name: At_Petals_P Parameter: Tissue Value: Petals vs. Whole plant
  misc_feature: MA Experiment ID: 20001247 Result: Down-regulated in Transcription
  misc_feature: MA Experiment 20001247 PARAMETER Experiment Name: At_Far-red-induction_P Parameter: Age (day) Value: 7
  misc_feature: MA Experiment 20001247 PARAMETER Experiment Name: At_Far-red-induction_P Parameter: Light Value: Far-red vs. White
  misc_feature: MA Experiment 20001247 PARAMETER Experiment Name: At_Far-red-induction_P Parameter: Organism Value: A. thaliana
  misc_feature: MA Experiment 20001247 PARAMETER Experiment Name: At_Far-red-induction_P Parameter: Plant Line Value: Columbia
  misc_feature: MA Experiment 20001247 PARAMETER Experiment Name: At_Far-red-induction_P Parameter: Timepoint (hr) Value: 1
  misc_feature: MA Experiment 20001247 PARAMETER Experiment Name: At_Far-red-induction_P Parameter: Tissue Value: Whole Plant
  misc_feature: MA Experiment ID: 20001450 Result: Down-regulated in Transcription
  misc_feature: MA Experiment 20001450 PARAMETER Experiment Name: At_Far-red-induction_P Parameter: Age (day) Value: 7
  misc_feature: MA Experiment 20001450 PARAMETER Experiment Name: At_Far-red-induction_P Parameter: Light Value: Far-red vs. White
  misc_feature: MA Experiment 20001450 PARAMETER Experiment Name: At_Far-red-induction_P Parameter: Organism Value: A. thaliana
  misc_feature: MA Experiment 20001450 PARAMETER Experiment Name: At_Far-red-induction_P Parameter: Plant Line Value: Columbia
  misc_feature: MA Experiment 20001450 PARAMETER Experiment Name: At_Far-red-induction_P Parameter: Timepoint (hr) Value: 8
  misc_feature: MA Experiment 20001450 PARAMETER Experiment Name: At_Far-red-induction_P Parameter: Tissue Value: Whole Plant
  misc_feature: MA Experiment ID: 20001451 Result: Down-regulated in Transcription
  misc_feature: MA Experiment 20001451 PARAMETER Experiment Name: At_Far-red-induction_P Parameter: Age (day) Value: 7
  misc_feature: MA Experiment 20001451 PARAMETER Experiment Name: At_Far-red-induction_P Parameter: Light Value: Far-red vs. White
  misc_feature: MA Experiment 20001451 PARAMETER Experiment Name: At_Far-red-induction_P Parameter: Organism Value: A. thaliana
  misc_feature: MA Experiment 20001451 PARAMETER Experiment Name: At_Far-red-induction_P Parameter: Plant Line Value: Columbia
  misc_feature: MA Experiment 20001451 PARAMETER Experiment Name: At_Far-red-induction_P Parameter: Timepoint (hr) Value: 24
  misc_feature: MA Experiment 20001451 PARAMETER Experiment Name: At_Far-red-induction_P Parameter: Tissue Value: Whole Plant
  misc_feature: MA Experiment ID: 20001558 Result: Up-regulated in Transcription
  misc_feature: MA Experiment 20001558 PARAMETER Experiment Name: At_Drought_Soil_Dry_P Parameter: Age (day) Value: 27
  misc_feature: MA Experiment 20001558 PARAMETER Experiment Name: At_Drought_Soil_Dry_P Parameter: Organism Value: A. thaliana
  misc_feature: MA Experiment 20001558 PARAMETER Experiment Name: At_Drought_Soil_Dry_P Parameter: Plant Line Value: WS
  misc_feature: MA Experiment 20001558 PARAMETER Experiment Name: At_Drought_Soil_Dry_P Parameter: Post Timepoint (hr) Value: 6
  misc_feature: MA Experiment 20001558 PARAMETER Experiment Name: At_Drought_Soil_Dry_P Parameter: Post-Treatment Value: Re-Water vs. No Drought
  misc_feature: MA Experiment 20001558 PARAMETER Experiment Name: At_Drought_Soil_Dry_P Parameter: Timepoint (day) Value: 13
  misc_feature: MA Experiment 20001558 PARAMETER Experiment Name: At_Drought_Soil_Dry_P Parameter: Treatment Value: Drought vs. No Drought
gcctctgttccaaaatccaaaggaagcttcgaaaccattgaagcagcagcaatgatactacgtcgtttcatctgctacaacgcttcttcaactgtttcatctatagctccatcaccgaagaagaagcctctcatcttcttaggctctcctcaggtctccgtgagtgtgcttgaagctcttttcaatgcatctaatgctccaaactcttccttcgaggttgcaggtattgttacacagcctccatcaaggagagataggggtaaaaaagtgttgccttcaccagtagcgcaatacgctcttgataaaggcttaccttctgatctcattttctcccctgagaaggcaggagatgaagcatttttatcggctttaagagagttgcaacctgagctttgtattacagcagcttatgggaatattttgcctactaagttccttaagattccggtacatgggacagtgaacatacacccaagtttgctgccgctgtaccgtggtgcagctccagttcaaagagcattacaggatggtgtcccggaaacaggagtatcattagcatttactgtgcgtaagttagatgcagggccagtgattgcctctaagaggttccaagtggatgatctaataaaggcaccagaactactctcgttcctattttctgaaggttctaatcttcttatccgtgaacttccctcgatatttgatgggtccgcaaaatcaaaagcagctccccaagatgattctaaagctaccttagctccaaagatagctccagatgaggcttggctctcttttgaccaggaagcttttgttctacataacaaggttcgtgcatttgcaggatggccgggaacacgagcaaaagttgtagtccttgatgagaaaagcggtcagcaaaatgtgctagagcttaaaattatgtccactcgagtatgcaaagatctggaaattcaggatagtgaacaagattatgtaactttcaagaaaggttcactaatatttccctgcagaggaggtacagctttagaggtactggaagtccagcttcctggtaagaaagccatcaacgcagctgctttttggaatggcttgagaggtcaaaagctgaagaagctatgaagacaaagactgaaacaggattaagctttggtcaggaagttagaatcagcaaattagtcaaatcaggtctagccattttcaaattgtttctgaatgaaaggtgcctaataagttttggtctcatttttttttgttcttcaaaatttgattttgtatgactaaaatatattccacattctttggtataatatgattcttctcta

SEQ ID NO: 106459 - protein, 372 aa, Arabidopsis thaliana
  peptide (1)..(372): Ceres Seq. ID no. 13619616
  misc_feature (42)..(230): Pfam Name: Formyl transferase Pfam Description: Formyl transferase
  misc_feature (18)..(372): Homolog of NCBI NO: 15219681 NR Description: formyltransferase, putative [Arabidopsis thaliana]
  misc_feature (18)..(372): Homolog of NCBI NO: 29824361 NR Description: putative formyl transferase [Arabidopsis thaliana]
  misc_feature (19)..(372): Homolog of NCBI NO: 7657875 NR Description: Fmt protein [Brassica napus var. napus]
  misc_feature (19)..(312): Homolog of NCBI NO: 34911294 NR Description: similar to formyl transferase [Oryza sativa
  misc_feature (309)..(371): Homolog of NCBI NO: 34911294 NR Description: similar to formyl transferase [Oryza sativa
  misc_feature (176)..(372): Homolog of NCBI NO: 6069504 NR Description: S-locus protein 8 [Brassica rapa]
  misc_feature (162)..(355): Homolog of NCBI NO: 15864563 NR Description: fmt putative protein [Brassica napus]
  misc_feature (44)..(372): Homolog of NCBI NO: 27467809 NR Description: methionyl-tRNA formyltransferase [Staphylococcus
  misc_feature (44)..(372): Homolog of NCBI NO: 15924206 NR Description: methionyl-tRNA formyltransferase [Staphylococcus
  misc_feature (44)..(372): Homolog of NCBI NO: 21282828 NR Description: methionyl-tRNA formyltransferase [Staphylococcus
ASVPKSKGSFETIEAAAMILRRFICYNASSTVSSIAPSPKKKPLIFLGSPQVSVSVLEALFNASNAPNSSFEVAGIVTQPPSRRDRGKKVLPSPVAQYALDKGLPSDLIFSPEKAGDEAFLSALRELQPELCITAAYGNILPTKFLKIPVHGTVNIHPSLLPLYRGAAPVQRALQDGVPETGVSLAFTVRKLDAGPVIASKRFQVDDLIKAPELLSFLFSEGSNLLIRELPSIFDGSAKSKAAPQDDSKATLAPKIAPDEAWLSFDQEAFVLHNKVRAFAGWPGTRAKVVVLDEKSGQQNVLELKIMSTRVCKDLEIQDSEQDYVTFKKGSLIFPCRGGTALEVLEVQLPGKKAINAAAFWNGLRGQKLKKL

SEQ ID NO: 106460 - protein, 355 aa, Arabidopsis thaliana
  peptide (1)..(355): Ceres Seq. ID no. 13619617
  misc_feature (25)..(213): Pfam Name: Formyl transferase Pfam Description: Formyl transferase
  misc_feature (1)..(355): Homolog of NCBI NO: 15219681 NR Description: formyltransferase, putative [Arabidopsis thaliana]
  misc_feature (1)..(355): Homolog of NCBI NO: 29824361 NR Description: putative formyl transferase [Arabidopsis thaliana]
  misc_feature (2)..(355): Homolog of NCBI NO: 7657875 NR Description: Fmt protein [Brassica napus var. napus]
  misc_feature (2)..(295): Homolog of NCBI NO: 34911294 NR Description: similar to formyl transferase [Oryza sativa
  misc_feature (292)..(354): Homolog of NCBI NO: 34911294 NR Description: similar to formyl transferase [Oryza sativa
  misc_feature (159)..(355): Homolog of NCBI NO: 6069504 NR Description: S-locus protein 8 [Brassica rapa]
  misc_feature (145)..(338): Homolog of NCBI NO: 15864563 NR Description: fmt putative protein [Brassica napus]
  misc_feature (27)..(355): Homolog of NCBI NO: 27467809 NR Description: methionyl-tRNA formyltransferase [Staphylococcus
  misc_feature (27)..(355): Homolog of NCBI NO: 15924206 NR Description: methionyl-tRNA formyltransferase [Staphylococcus
  misc_feature (27)..(355): Homolog of NCBI NO: 21282828 NR Description: methionyl-tRNA formyltransferase [Staphylococcus
MILRRFICYNASSTVSSIAPSPKKKPLIFLGSPQVSVSVLEALFNASNAPNSSFEVAGIVTQPPSRRDRGKKVLPSPVAQYALDKGLPSDLIFSPEKAGDEAFLSALRELQPELCITAAYGNILPTKFLKIPVHGTVNIHPSLLPLYRGAAPVQRALQDGVPETGVSLAFTVRKLDAGPVIASKRFQVDDLIKAPELLSFLFSEGSNLLIRELPSIFDGSAKSKAAPQDDSKATLAPKIAPDEAWLSFDQEAFVLHNKVRAFAGWPGTRAKVVVLDEKSGQQNVLELKIMSTRVCKDLEIQDSEQDYVTFKKGSLIFPCRGGTALEVLEVQLPGKKAINAAAFWNGLRGQKLKKL

SEQ ID NO: 106461 - DNA, 2070 bp, Arabidopsis thaliana
  misc_feature (1)..(2070): Ceres Seq. ID no. 13619622
  misc_feature: MA Experiment ID: 20000264 Result: Up-regulated in Transcription
  misc_feature: MA Experiment 20000264 PARAMETER Experiment Name: At_Open_Flower_P Parameter: Age (day) Value: 21
  misc_feature: MA Experiment 20000264 PARAMETER Experiment Name: At_Open_Flower_P Parameter: Plant Line Value: WS
  misc_feature: MA Experiment 20000264 PARAMETER Experiment Name: At_Open_Flower_P Parameter: Tissue Value: Open Flower vs. Whole Plant
  misc_feature: MA Experiment ID: 20000286 Result: Up-regulated in Transcription
  misc_feature: MA Experiment 20000286 PARAMETER Experiment Name: At_Open_Flower_P Parameter: Age (day) Value: 21
  misc_feature: MA Experiment 20000286 PARAMETER Experiment Name: At_Open_Flower_P Parameter: Plant Line Value: WS
  misc_feature: MA Experiment 20000286 PARAMETER Experiment Name: At_Open_Flower_P Parameter: Tissue Value: Half Open vs. Whole Plant
  misc_feature: MA Experiment ID: 20001909 Result: Up-regulated in Transcription
  misc_feature: MA Experiment 20001909 PARAMETER Experiment Name: At_Drought_Reproduction_P Parameter: Age (day) Value: 35
  misc_feature: MA Experiment 20001909 PARAMETER Experiment Name: At_Drought_Reproduction_P Parameter: Organism Value: A. thaliana
  misc_feature: MA Experiment 20001909 PARAMETER Experiment Name: At_Drought_Reproduction_P Parameter: Plant Line Value: WS
  misc_feature: MA Experiment 20001909 PARAMETER Experiment Name: At_Drought_Reproduction_P Parameter: Timepoint (day) Value: 5
  misc_feature: MA Experiment 20001909 PARAMETER Experiment Name: At_Drought_Reproduction_P Parameter: Tissue Value: Flowers
  misc_feature: MA Experiment 20001909 PARAMETER Experiment Name: At_Drought_Reproduction_P Parameter: Treatment Value: Drought vs. No Drought
  misc_feature: MA Experiment ID: 20001910 Result: Up-regulated in Transcription
  misc_feature: MA Experiment 20001910 PARAMETER Experiment Name: At_Drought_Reproduction_P Parameter: Age (day) Value: 37
  misc_feature: MA Experiment 20001910 PARAMETER Experiment Name: At_Drought_Reproduction_P Parameter: Organism Value: A. thaliana
  misc_feature: MA Experiment 20001910 PARAMETER Experiment Name: At_Drought_Reproduction_P Parameter: Plant Line Value: WS
  misc_feature: MA Experiment 20001910 PARAMETER Experiment Name: At_Drought_Reproduction_P Parameter: Timepoint (day) Value: 7
  misc_feature: MA Experiment 20001910 PARAMETER Experiment Name: At_Drought_Reproduction_P Parameter: Tissue Value: Flowers
  misc_feature: MA Experiment 20001910 PARAMETER Experiment Name: At_Drought_Reproduction_P Parameter: Treatment Value: Drought vs. No Drought
atctaccagtttaaccgtagacatcattccttattgtcccatccaaatagtaaaaaaaaaaagaaaaaaaaaataaaatgaaaaagtcaacaagactcttatggctattatccatcattgttttggtggcagccgtttctaaggcagtcgcagaggtagacaacgatgatgatgacgataatacttcattggaaggcatgacgacggctaaacgtgaaaccctcgaagttgaggatcatacttcattggaaggcatggttaaacgtgaagccctcgaagtaaaaccaccaaaagctggcaaaggcaaaggcaaaggtaaaggtcgtggcaccgttgccgcaggacctgagatgaattggcctggacaatgggagttattcatgaagaattctggtgtttcagccatgcacgcaattttgatgcctttgatcaataaagttcagttttacgacgcaaccatttggagaatttcacaaatcaaattgcctccaggcgtaccttgccatgtttttgacgccaaaaaaaataaagttgattgttgggctcactctgtcctcgtcgatattaacaccggagacatcaagcctcttgcgcttacaacagacacatggtgttcttctggaggtttaaccgtaaacggtactttggtaagtactggaggattccaaggaggagcaaacacggcaaggtacctatccacatgcgaaaactgtgtatggattgaatatccaaaggcactcgctgcaaggagatggtactcaacacaagccactcttcctgatggaactttcatcgttgttggaggccgtgacgctctcaactacgagtatatccttccggaaggacaaaacaacaagaaactctatgactcacaacttcttagacaaacagatgatccagaagaaaacaatctttacccttttgtttggcttaacactgatggtaacctcttcattttcgccaacaaccgatccattcttcttagcccgaaaacaaacaaagtgctcaaagagttccctcaacttcccggtggtgcccgtaactaccctggttccgcctcctcggctcttctccccatccgcctctacgtccaaaaccccgctatcatccccgctgatgtcctagtttgcggtggtgcaaaacaagacgcttacttccgtgcagagaggttaaagatttacgattgggccttgaaagattgtgcaaggttaaacatcaatagtgctaagcctgtatggaaaacagagaccatgccaacgtcacgtgtgatgagtgatactgtgatccttcctaatggagaaattcttatcattaatggtgcaaaacgtggctcctctggttggcacttagccaaagaaccaaattttgctccactcttgtacaaacctaacaaacctttaggccaacgtttcaaagaactcgctccttccactatccctcgtgtgtaccattccatcgcaatcgctcttcctgatggtaaagttctcgtcggtggaagcaacaccaacaacggataccaattcaacgttgagtacccaaccgaactccgcatcgagaaattctcaccaccttaccttgatccagctctagccaatatgagaccaagaatcgtaaacaccgcaacaccaaaacagattaagtatggacaaatgtttgacgtaaagatcgagcttaaacaacaaaacgtagcaaaggagaatgtaatggtgacaatgttggcaccatcatttactacacatagtgtatcaatgaacatgaggttgcttatgttgggtattaacaatgtgaagaatgttggtggcgataatcatcaaatccaagccgttgctcctcctagtggaaaacttgctcctcctggttattatcttctctttgccgtctacaatggtgtccctagcgttggagaatggattcagattgtctaattttgatatgcatatattatcaatttattttttgaaacgaaacctatataacatgtttgtaaggttaattttttttctttatacttacatgtatatattctttgattcttgtaattattatattttttgaataaatgtttttttg

SEQ ID NO: 106462 - protein, 615 aa, Arabidopsis thaliana
  peptide (1)..(615): Ceres Seq. ID no. 13619623
  misc_feature (59)..(615): Homolog of NCBI NO: 15241135 NR Description: expressed protein [Arabidopsis thaliana]
  misc_feature (59)..(615): Homolog of NCBI NO: 19310437 NR Description: AT5g19580/T20D1_100 [Arabidopsis thaliana]
  misc_feature (96)..(614): Homolog of NCBI NO: 34911116 NR Description: putative glyoxal oxidase [Oryza sativa (japonica group)] >gi|20161084|dbj|BAB90014.1| putative glyoxal oxidase
  misc_feature (86)..(614): Homolog of NCBI NO: 15222300 NR Description: hypothetical protein [Arabidopsis thaliana]
  misc_feature (96)..(614): Homolog of NCBI NO: 25352602 NR Description: F14L17.20 protein - Arabidopsis thaliana Weak similarity to glyoxal oxidase (glx2) from Phanerochaete
  misc_feature (96)..(611): Homolog of NCBI NO: 15223754 NR Description: expressed protein [Arabidopsis thaliana]
  misc_feature (96)..(614): Homolog of NCBI NO: 15223699 NR Description: expressed protein [Arabidopsis thaliana]
  misc_feature (88)..(614): Homolog of NCBI NO: 15230360 NR Description: expressed protein [Arabidopsis thaliana]
  misc_feature (110)..(614): Homolog of NCBI NO: 25352604 NR Description: hypothetical protein F6F9.4 [imported] - thaliana >gi|10086483|gb|AAG12543.1|AC007797_3 Unknown Protein
  misc_feature (169)..(564): Homolog of NCBI NO: 32422431 NR Description: hypothetical protein [Neurospora crassa]
MKKSTRLLWLLSIIVLVAAVSKAVAEVDNDDDDDNTSLEGMTTAKRETLEVEDHTSLEGMVKREALEVKPPKAGKGKGKGKGRGTVAAGPEMNWPGQWELFMKNSGVSAMHAILMPLINKVQFYDATIWRISQIKLPPGVPCHVFDAKKNKVDCWAHSVLVDINTGDIKPLALTTDTWCSSGGLTVNGTLVSTGGFQGGANTARYLSTCENCVWIEYPKALAARRWYSTQATLPDGTFIVVGGRDALNYEYILPEGQNNKKLYDSQLLRQTDDPEENNLYPFVWLNTDGNLFIFANNRSILLSPKTNKVLKEFPQLPGGARNYPGSASSALLPIRLYVQNPAIIPADVLVCGGAKQDAYFRAERLKIYDWALKDCARLNINSAKPVWKTETMPTSRVMSDTVILPNGEILIINGAKRGSSGWHLAKEPNFAPLLYKPNKPLGQRFKELAPSTIPRVYHSIAIALPDGKVLVGGSNTNNGYQFNVEYPTELRIEKFSPPYLDPALANMRPRIVNTATPKQIKYGQMFDVKIELKQQNVAKENVMVTMLAPSFTTHSVSMNMRLLMLGINNVKNVGGDNHQIQAVAPPSGKLAPPGYYLLFAVYNGVPSVGEWIQIV

SEQ ID NO: 106463 - protein, 575 aa, Arabidopsis thaliana
  peptide (1)..(575): Ceres Seq. ID no. 13619624
  misc_feature (19)..(575): Homolog of NCBI NO: 15241135 NR Description: expressed protein [Arabidopsis thaliana]
  misc_feature (19)..(575): Homolog of NCBI NO: 19310437 NR Description: AT5g19580/T20D1_100 [Arabidopsis thaliana]
  misc_feature (56)..(574): Homolog of NCBI NO: 34911116 NR Description: putative glyoxal oxidase [Oryza sativa (japonica group)] >gi|20161084|dbj|BAB90014.1| putative glyoxal oxidase
  misc_feature (46)..(574): Homolog of NCBI NO: 15222300 NR Description: hypothetical protein [Arabidopsis thaliana]
  misc_feature (56)..(574): Homolog of NCBI NO: 25352602 NR Description: F14L17.20 protein - Arabidopsis thaliana Weak similarity to glyoxal oxidase (glx2) from Phanerochaete
  misc_feature (56)..(571): Homolog of NCBI NO: 15223754 NR Description: expressed protein [Arabidopsis thaliana]
  misc_feature (56)..(574): Homolog of NCBI NO: 15223699 NR Description: expressed protein [Arabidopsis thaliana]
  misc_feature (48)..(574): Homolog of NCBI NO: 15230360 NR Description: expressed protein [Arabidopsis thaliana]
  misc_feature (70)..(574): Homolog of NCBI NO: 25352604 NR Description: hypothetical protein F6F9.4 [imported] - thaliana >gi|10086483|gb|AAG12543.1|AC007797_3 Unknown Protein
  misc_feature (129)..(524): Homolog of NCBI NO: 32422431 NR Description: hypothetical protein [Neurospora crassa]
MTTAKRETLEVEDHTSLEGMVKREALEVKPPKAGKGKGKGKGRGTVAAGPEMNWPGQWELFMKNSGVSAMHAILMPLINKVQFYDATIWRISQIKLPPGVPCHVFDAKKNKVDCWAHSVLVDINTGDIKPLALTTDTWCSSGGLTVNGTLVSTGGFQGGANTARYLSTCENCVWIEYPKALAARRWYSTQATLPDGTFIVVGGRDALNYEYILPEGQNNKKLYDSQLLRQTDDPEENNLYPFVWLNTDGNLFIFANNRSILLSPKTNKVLKEFPQLPGGARNYPGSASSALLPIRLYVQNPAIIPADVLVCGGAKQDAYFRAERLKIYDWALKDCARLNINSAKPVWKTETMPTSRVMSDTVILPNGEILIINGAKRGSSGWHLAKEPNFAPLLYKPNKPLGQRFKELAPSTIPRVYHSIAIALPDGKVLVGGSNTNNGYQFNVEYPTELRIEKFSPPYLDPALANMRPRIVNTATPKQIKYGQMFDVKIELKQQNVAKENVMVTMLAPSFTTHSVSMNMRLLMLGINNVKNVGGDNHQIQAVAPPSGKLAPPGYYLLFAVYNGVPSVGEWIQIV

SEQ ID NO: 106464 - protein, 556 aa, Arabidopsis thaliana
  peptide (1)..(556): Ceres Seq. ID no. 13619625
  misc_feature (1)..(556): Homolog of NCBI NO: 15241135 NR Description: expressed protein [Arabidopsis thaliana]
  misc_feature (1)..(556): Homolog of NCBI NO: 19310437 NR Description: AT5g19580/T20D1_100 [Arabidopsis thaliana]
  misc_feature (37)..(555): Homolog of NCBI NO: 34911116 NR Description: putative glyoxal oxidase [Oryza sativa (japonica group)] >gi|20161084|dbj|BAB90014.1| putative glyoxal oxidase
  misc_feature (27)..(555): Homolog of NCBI NO: 15222300 NR Description: hypothetical protein [Arabidopsis thaliana]
  misc_feature (37)..(555): Homolog of NCBI NO: 25352602 NR Description: F14L17.20 protein - Arabidopsis thaliana Weak similarity to glyoxal oxidase (glx2) from Phanerochaete
  misc_feature (37)..(552): Homolog of NCBI NO: 15223754 NR Description: expressed protein [Arabidopsis thaliana]
  misc_feature (37)..(555): Homolog of NCBI NO: 15223699 NR Description: expressed protein [Arabidopsis thaliana]
  misc_feature (29)..(555): Homolog of NCBI NO: 15230360 NR Description: expressed protein [Arabidopsis thaliana]
  misc_feature (51)..(555): Homolog of NCBI NO: 25352604 NR Description: hypothetical protein F6F9.4 [imported] - thaliana >gi|10086483|gb|AAG12543.1|AC007797_3 Unknown Protein
  misc_feature (110)..(505): Homolog of NCBI NO: 32422431 NR Description: hypothetical protein [Neurospora crassa]
MVKREALEVKPPKAGKGKGKGKGRGTVAAGPEMNWPGQWELFMKNSGVSAMHAILMPLINKVQFYDATIWRISQIKLPPGVPCHVFDAKKNKVDCWAHSVLVDINTGDIKPLALTTDTWCSSGGLTVNGTLVSTGGFQGGANTARYLSTCENCVWIEYPKALAARRWYSTQATLPDGTFIVVGGRDALNYEYILPEGQNNKKLYDSQLLRQTDDPEENNLYPFVWLNTDGNLFIFANNRSILLSPKTNKVLKEFPQLPGGARNYPGSASSALLPIRLYVQNPAIIPADVLVCGGAKQDAYFRAERLKIYDWALKDCARLNINSAKPVWKTETMPTSRVMSDTVILPNGEILIINGAKRGSSGWHLAKEPNFAPLLYKPNKPLGQRFKELAPSTIPRVYHSIAIALPDGKVLVGGSNTNNGYQFNVEYPTELRIEKFSPPYLDPALANMRPRIVNTATPKQIKYGQMFDVKIELKQQNVAKENVMVTMLAPSFTTHSVSMNMRLLMLGINNVKNVGGDNHQIQAVAPPSGKLAPPGYYLLFAVYNGVPSVGEWIQIV

SEQ ID NO: 106465 - DNA, 709 bp, Arabidopsis thaliana
  misc_feature (1)..(709): Ceres Seq. ID no. 13619630
  misc_feature: MA Experiment ID: 20000171 Result: Up-regulated in Transcription
  misc_feature: MA Experiment 20000171 PARAMETER Experiment Name: At_42deg_Heat_P Parameter: Age (day) Value: 14
  misc_feature: MA Experiment 20000171 PARAMETER Experiment Name: At_42deg_Heat_P Parameter: Organism Value: A. thaliana
  misc_feature: MA Experiment 20000171 PARAMETER Experiment Name: At_42deg_Heat_P Parameter: Plant Line Value: WS
  misc_feature: MA Experiment 20000171 PARAMETER Experiment Name: At_42deg_Heat_P Parameter: Temperature (deg C) Value: 42 vs. 22
  misc_feature: MA Experiment 20000171 PARAMETER Experiment Name: At_42deg_Heat_P Parameter: Timepoint (hr) Value: 1
  misc_feature: MA Experiment 20000171 PARAMETER Experiment Name: At_42deg_Heat_P Parameter: Tissue Value: Aerial
  misc_feature: MA Experiment ID: 20000173 Result: Up-regulated in Transcription
  misc_feature: MA Experiment 20000173 PARAMETER Experiment Name: At_42deg_Heat_P Parameter: Age (day) Value: 14
  misc_feature: MA Experiment 20000173 PARAMETER Experiment Name: At_42deg_Heat_P Parameter: Organism Value: A. thaliana
  misc_feature: MA Experiment 20000173 PARAMETER Experiment Name: At_42deg_Heat_P Parameter: Plant Line Value: WS
  misc_feature: MA Experiment 20000173 PARAMETER Experiment Name: At_42deg_Heat_P Parameter: Temperature (deg C) Value: 42 vs. 22
  misc_feature: MA Experiment 20000173 PARAMETER Experiment Name: At_42deg_Heat_P Parameter: Timepoint (hr) Value: 6
  misc_feature: MA Experiment 20000173 PARAMETER Experiment Name: At_42deg_Heat_P Parameter: Tissue Value: Aerial
  misc_feature: MA Experiment ID: 20000180 Result: Up-regulated in Transcription
  misc_feature: MA Experiment 20000180 PARAMETER Experiment Name: At_Germinating_Seeds_P Parameter: Age (hr) Value: 24 vs. 0
  misc_feature: MA Experiment 20000180 PARAMETER Experiment Name: At_Germinating_Seeds_P Parameter: Tissue Value: Germinating Seeds
  misc_feature: MA Experiment ID: 20000185 Result: Up-regulated in Transcription
  misc_feature: MA Experiment 20000185 PARAMETER Experiment Name: At_Roots__P Parameter: Age (day) Value: 7 vs. 21
  misc_feature: MA Experiment 20000185 PARAMETER Experiment Name: At_Roots__P Parameter: Organism Value: A. thaliana
  misc_feature: MA Experiment 20000185 PARAMETER Experiment Name: At_Roots__P Parameter: Tissue Value: Roots vs. Whole Plant
  misc_feature: MA Experiment ID: 20000234 Result: Up-regulated in Transcription
  misc_feature: MA Experiment 20000234 PARAMETER Experiment Name: At_Siliques_P Parameter: Age (day) Value: 21
  misc_feature: MA Experiment 20000234 PARAMETER Experiment Name: At_Siliques_P Parameter: Organism Value: A. thaliana
  misc_feature: MA Experiment 20000234 PARAMETER Experiment Name: At_Siliques_P Parameter: Plant Line Value: WS
  misc_feature: MA Experiment 20000234 PARAMETER Experiment Name: At_Siliques_P Parameter: Tissue Value: Less Than 5mm Siliques vs. Whole Plant
  misc_feature: MA Experiment ID: 20000439 Result: Up-regulated in Transcription
  misc_feature: MA Experiment 20000439 PARAMETER Experiment Name: At_Roots__P Parameter: Age (day) Value: 14 vs. 21
  misc_feature: MA Experiment 20000439 PARAMETER Experiment Name: At_Roots__P Parameter: Organism Value: A. thaliana
  misc_feature: MA Experiment 20000439 PARAMETER Experiment Name: At_Roots__P Parameter: Tissue Value: Roots vs. Whole Plant
  misc_feature: MA Experiment ID: 20000456 Result: Up-regulated in Transcription
  misc_feature: MA Experiment 20000456 PARAMETER Experiment Name: At_100uM_BA_P Parameter: Age (day) Value: 14
  misc_feature: MA Experiment 20000456 PARAMETER Experiment Name: At_100uM_BA_P Parameter: Organism Value: A. thaliana
  misc_feature: MA Experiment 20000456 PARAMETER Experiment Name: At_100uM_BA_P Parameter: Plant Line Value: WS
  misc_feature: MA Experiment 20000456 PARAMETER Experiment Name: At_100uM_BA_P Parameter: Timepoint (hr) Value: 6
  misc_feature: MA Experiment 20000456 PARAMETER Experiment Name: At_100uM_BA_P Parameter: Tissue Value: Aerial
  misc_feature: MA Experiment 20000456 PARAMETER Experiment Name: At_100uM_BA_P Parameter: Treatment Value: 100uM BA vs. No Treatment
  misc_feature: MA Experiment ID: 20000495 Result: Up-regulated in Transcription
  misc_feature: MA Experiment 20000495 PARAMETER Experiment Name: At_Guard_Cells_P Parameter: Harvest Date Value: 8/2/2002
  misc_feature: MA Experiment 20000495 PARAMETER Experiment Name: At_Guard_Cells_P Parameter: Organism Value: A. thaliana
  misc_feature: MA Experiment 20000495 PARAMETER Experiment Name: At_Guard_Cells_P Parameter: Tissue Value: Guard Cells vs. Leaves
  misc_feature: MA Experiment ID: 20001247 Result: Down-regulated in Transcription
  misc_feature: MA Experiment 20001247 PARAMETER Experiment Name: At_Far-red-induction_P Parameter: Age (day) Value: 7
  misc_feature: MA Experiment 20001247 PARAMETER Experiment Name: At_Far-red-induction_P Parameter: Light Value: Far-red vs. White
  misc_feature: MA Experiment 20001247 PARAMETER Experiment Name: At_Far-red-induction_P Parameter: Organism Value: A. thaliana
  misc_feature: MA Experiment 20001247 PARAMETER Experiment Name: At_Far-red-induction_P Parameter: Plant Line Value: Columbia
  misc_feature: MA Experiment 20001247 PARAMETER Experiment Name: At_Far-red-induction_P Parameter: Timepoint (hr) Value: 1
  misc_feature: MA Experiment 20001247 PARAMETER Experiment Name: At_Far-red-induction_P Parameter: Tissue Value: Whole Plant
  misc_feature: MA Experiment ID: 20001248 Result: Down-regulated in Transcription
  misc_feature: MA Experiment 20001248 PARAMETER Experiment Name: At_Far-red-induction_P Parameter: Age (day) Value: 7
  misc_feature: MA Experiment 20001248 PARAMETER Experiment Name: At_Far-red-induction_P Parameter: Light Value: Far-red vs. White
  misc_feature: MA Experiment 20001248 PARAMETER Experiment Name: At_Far-red-induction_P Parameter: Organism Value: A. thaliana
  misc_feature: MA Experiment 20001248 PARAMETER Experiment Name: At_Far-red-induction_P Parameter: Plant Line Value: Columbia
  misc_feature: MA Experiment 20001248 PARAMETER Experiment Name: At_Far-red-induction_P Parameter: Timepoint (hr) Value: 4
  misc_feature: MA Experiment 20001248 PARAMETER Experiment Name: At_Far-red-induction_P Parameter: Tissue Value: Whole Plant
  misc_feature: MA Experiment ID: 20001450 Result: Down-regulated in Transcription
  misc_feature: MA Experiment 20001450 PARAMETER Experiment Name: At_Far-red-induction_P Parameter: Age (day) Value: 7
  misc_feature: MA Experiment 20001450 PARAMETER Experiment Name: At_Far-red-induction_P Parameter: Light Value: Far-red vs. White
  misc_feature: MA Experiment 20001450 PARAMETER Experiment Name: At_Far-red-induction_P Parameter: Organism Value: A. thaliana
  misc_feature: MA Experiment 20001450 PARAMETER Experiment Name: At_Far-red-induction_P Parameter: Plant Line Value: Columbia
  misc_feature: MA Experiment 20001450 PARAMETER Experiment Name: At_Far-red-induction_P Parameter: Timepoint (hr) Value: 8
  misc_feature: MA Experiment 20001450 PARAMETER Experiment Name: At_Far-red-induction_P Parameter: Tissue Value: Whole Plant
  misc_feature: MA Experiment ID: 20001451 Result: Down-regulated in Transcription
  misc_feature: MA Experiment 20001451 PARAMETER Experiment Name: At_Far-red-induction_P Parameter: Age (day) Value: 7
  misc_feature: MA Experiment 20001451 PARAMETER Experiment Name: At_Far-red-induction_P Parameter: Light Value: Far-red vs. White
  misc_feature: MA Experiment 20001451 PARAMETER Experiment Name: At_Far-red-induction_P Parameter: Organism Value: A. thaliana
  misc_feature: MA Experiment 20001451 PARAMETER Experiment Name: At_Far-red-induction_P Parameter: Plant Line Value: Columbia
  misc_feature: MA Experiment 20001451 PARAMETER Experiment Name: At_Far-red-induction_P Parameter: Timepoint (hr) Value: 24
  misc_feature: MA Experiment 20001451 PARAMETER Experiment Name: At_Far-red-induction_P Parameter: Tissue Value: Whole Plant
  misc_feature: MA Experiment ID: 20001459 Result: Up-regulated in Transcription
  misc_feature: MA Experiment 20001459 PARAMETER Experiment Name: At_50mM_NH4NO3_L-to-H_P Parameter: Age (day) Value: Undefined
  misc_feature: MA Experiment 20001459 PARAMETER Experiment Name: At_50mM_NH4NO3_L-to-H_P Parameter: Organism Value: Undefined
  misc_feature: MA Experiment 20001459 PARAMETER Experiment Name: At_50mM_NH4NO3_L-to-H_P Parameter: Plant Line Value: Undefined
  misc_feature: MA Experiment 20001459 PARAMETER Experiment Name: At_50mM_NH4NO3_L-to-H_P Parameter: Timepoint (hr) Value: 4
  misc_feature: MA Experiment 20001459 PARAMETER Experiment Name: At_50mM_NH4NO3_L-to-H_P Parameter: Tissue Value: Siliques
  misc_feature: MA Experiment 20001459 PARAMETER Experiment Name: At_50mM_NH4NO3_L-to-H_P Parameter: Treatment Value: 50mM NH4NO3 vs. 100mM Manitol
  misc_feature: MA Experiment ID: 20001557 Result: Up-regulated in Transcription
  misc_feature: MA Experiment 20001557 PARAMETER Experiment Name: At_Drought_Soil_Dry_P Parameter: Age (day) Value: 27
  misc_feature: MA Experiment 20001557 PARAMETER Experiment Name: At_Drought_Soil_Dry_P Parameter: Organism Value: A. thaliana
  misc_feature: MA Experiment 20001557 PARAMETER Experiment Name: At_Drought_Soil_Dry_P Parameter: Plant Line Value: WS
  misc_feature: MA Experiment 20001557 PARAMETER Experiment Name: At_Drought_Soil_Dry_P Parameter: Post Timepoint (hr) Value: 3
  misc_feature: MA Experiment 20001557 PARAMETER Experiment Name: At_Drought_Soil_Dry_P Parameter: Post-Treatment Value: Re-Water vs. No Drought
  misc_feature: MA Experiment 20001557 PARAMETER Experiment Name: At_Drought_Soil_Dry_P Parameter: Timepoint (day) Value: 13
  misc_feature: MA Experiment 20001557 PARAMETER Experiment Name: At_Drought_Soil_Dry_P Parameter: Treatment Value: Drought vs. No Drought
  misc_feature: MA Experiment ID: 20001558 Result: Up-regulated in Transcription
  misc_feature: MA Experiment 20001558 PARAMETER Experiment Name: At_Drought_Soil_Dry_P Parameter: Age (day) Value: 27
  misc_feature: MA Experiment 20001558 PARAMETER Experiment Name: At_Drought_Soil_Dry_P Parameter: Organism Value: A. thaliana
  misc_feature: MA Experiment 20001558 PARAMETER Experiment Name: At_Drought_Soil_Dry_P Parameter: Plant Line Value: WS
  misc_feature: MA Experiment 20001558 PARAMETER Experiment Name: At_Drought_Soil_Dry_P Parameter: Post Timepoint (hr) Value: 6
  misc_feature: MA Experiment 20001558 PARAMETER Experiment Name: At_Drought_Soil_Dry_P Parameter: Post-Treatment Value: Re-Water vs. No Drought
  misc_feature: MA Experiment 20001558 PARAMETER Experiment Name: At_Drought_Soil_Dry_P Parameter: Timepoint (day) Value: 13
  misc_feature: MA Experiment 20001558 PARAMETER Experiment Name: At_Drought_Soil_Dry_P Parameter: Treatment Value: Drought vs. No Drought
  misc_feature: MA Experiment ID: 20001911 Result: Down-regulated in Transcription
  misc_feature: MA Experiment 20001911 PARAMETER Experiment Name: At_Drought_Reproduction_P Parameter: Age (day) Value: 40
  misc_feature: MA Experiment 20001911 PARAMETER Experiment Name: At_Drought_Reproduction_P Parameter: Organism Value: A. thaliana
  misc_feature: MA Experiment 20001911 PARAMETER Experiment Name: At_Drought_Reproduction_P Parameter: Plant Line Value: WS
  misc_feature: MA Experiment 20001911 PARAMETER Experiment Name: At_Drought_Reproduction_P Parameter: Timepoint (day) Value: 10
  misc_feature: MA Experiment 20001911 PARAMETER Experiment Name: At_Drought_Reproduction_P Parameter: Tissue Value: Flowers
  misc_feature: MA Experiment 20001911 PARAMETER Experiment Name: At_Drought_Reproduction_P Parameter: Treatment Value: Drought vs. No Drought
ataaaatgcaaaaattgtacccacaaaacctaagaaagtcatctctctccagtctccactatgggcagttttctctccttctttcttatttcttctcgaacactagccctcgtcctaatttccgtcacaggagaaacccttgaatctaatttcttgcatcacaagaaagagaaactaactcatttcagagtatactggcacgatattgtaaccggccaagattcgtcttcggtgtcaatcatgaatcctccgaaaaaatacacgggggcaacgggctttggtctcatgcgtatgattgataaccctttaacgctcacaccaaaattaagctccaaaatggtgggaagggcacaagggttttatgcaggcacatctaaagaagaaataggattattgatggctatgaattttgcgattcttgatgggaaatacaatggaagcacgatcacagtgttaggaagaaattcagtgtttgataaggtgagggagatgccagtgattggaggaagtggacttttccgatttgctaggggttatgttcaagctagcacacatgagtttaatctcaagacagggaacgccatcgttgagtataattgttatcttttgcactactaatttgtcatttctagtttattattatttattgtaaggtttttcttcttcacatagtggtggtggtggcctggtgggggacagtgtttcagcc

SEQ ID NO: 106466 - protein, 185 aa, Arabidopsis thaliana
  peptide (1)..(185): Ceres Seq. ID no. 13619631
  misc_feature (18)..(184): Pfam Name: Dirigent-like protein Pfam Description: Dirigent-like protein
  misc_feature (1)..(185): Homolog of NCBI NO: 15217886 NR Description: disease resistance response protein-related/
  misc_feature (35)..(185): Homolog of NCBI NO: 15239779 NR Description: disease resistance response protein-related/
  misc_feature (5)..(185): Homolog of NCBI NO: 22135914 NR Description: unknown protein [Arabidopsis thaliana]
  misc_feature (5)..(185): Homolog of NCBI NO: 15222673 NR Description: disease resistance response protein-related/
  misc_feature (25)..(185): Homolog of NCBI NO: 15231302 NR Description: disease resistance response protein-related/
  misc_feature (5)..(184): Homolog of NCBI NO: 15218836 NR Description: disease resistance response protein-related/
  misc_feature (24)..(174): Homolog of NCBI NO: 15231318 NR Description: disease resistance response protein-related/
  misc_feature (70)..(185): Homolog of NCBI NO: 15231315 NR Description: disease resistance response protein-related/
  misc_feature (10)..(184): Homolog of NCBI NO: 30681257 NR Description: disease resistance response protein-related/
  misc_feature (9)..(184): Homolog of NCBI NO: 15238982 NR Description: disease resistance response protein-related thaliana] >gi|9759487|dbj|BAB10492.1| contains similarity to resistance response protein~gene_id:MDH9.21 [Arabidopsis
MGSFLSFFLISSRTLALVLISVTGETLESNFLHHKKEKLTHFRVYWHDIVTGQDSSSVSIMNPPKKYTGATGFGLMRMIDNPLTLTPKLSSKMVGRAQGFYAGTSKEEIGLLMAMNFAILDGKYNGSTITVLGRNSVFDKVREMPVIGGSGLFRFARGYVQASTHEFNLKTGNAIVEYNCYLLHY

SEQ ID NO: 106467 - protein, 125 aa, Arabidopsis thaliana
  peptide (1)..(125): Ceres Seq. ID no. 13619632
  misc_feature (1)..(124): Pfam Name: Dirigent-like protein Pfam Description: Dirigent-like protein
  misc_feature (1)..(125): Homolog of NCBI NO: 15217886 NR Description: disease resistance response protein-related/
  misc_feature (1)..(125): Homolog of NCBI NO: 15239779 NR Description: disease resistance response protein-related/
  misc_feature (1)..(125): Homolog of NCBI NO: 22135914 NR Description: unknown protein [Arabidopsis thaliana]
  misc_feature (1)..(125): Homolog of NCBI NO: 15222673 NR Description: disease resistance response protein-related/
  misc_feature (1)..(125): Homolog of NCBI NO: 15231302 NR Description: disease resistance response protein-related/
  misc_feature (1)..(124): Homolog of NCBI NO: 15218836 NR Description: disease resistance response protein-related/
  misc_feature (1)..(114): Homolog of NCBI NO: 15231318 NR Description: disease resistance response protein-related/
  misc_feature (10)..(125): Homolog of NCBI NO: 15231315 NR Description: disease resistance response protein-related/
  misc_feature (1)..(124): Homolog of NCBI NO: 30681257 NR Description: disease resistance response protein-related/
  misc_feature (1)..(124): Homolog of NCBI NO: 15238982 NR Description: disease resistance response protein-related thaliana] >gi|9759487|dbj|BAB10492.1| contains similarity to resistance response protein~gene_id:MDH9.21 [Arabidopsis
MNPPKKYTGATGFGLMRMIDNPLTLTPKLSSKMVGRAQGFYAGTSKEEIGLLMAMNFAILDGKYNGSTITVLGRNSVFDKVREMPVIGGSGLFRFARGYVQASTHEFNLKTGNAIVEYNCYLLHY

SEQ ID NO: 106468 - protein, 110 aa, Arabidopsis thaliana
  peptide (1)..(110): Ceres Seq. ID no. 13619633
  misc_feature (1)..(109): Pfam Name: Dirigent-like protein Pfam Description: Dirigent-like protein
  misc_feature (1)..(110): Homolog of NCBI NO: 15217886 NR Description: disease resistance response protein-related/
  misc_feature (1)..(110): Homolog of NCBI NO: 15239779 NR Description: disease resistance response protein-related/
  misc_feature (1)..(110): Homolog of NCBI NO: 22135914 NR Description: unknown protein [Arabidopsis thaliana]
  misc_feature (1)..(110): Homolog of NCBI NO: 15222673 NR Description: disease resistance response protein-related/
  misc_feature (1)..(110): Homolog of NCBI NO: 15231302 NR Description: disease resistance response protein-related/
  misc_feature (1)..(109): Homolog of NCBI NO: 15218836 NR Description: disease resistance response protein-related/
  misc_feature (1)..(99): Homolog of NCBI NO: 15231318 NR Description: disease resistance response protein-related/
  misc_feature (1)..(110): Homolog of NCBI NO: 15231315 NR Description: disease resistance response protein-related/
  misc_feature (1)..(109): Homolog of NCBI NO: 30681257 NR Description: disease resistance response protein-related/
  misc_feature (1)..(109): Homolog of NCBI NO: 15238982 NR Description: disease resistance response protein-related thaliana] >gi|9759487|dbj|BAB10492.1| contains similarity to resistance response protein~gene_id:MDH9.21 [Arabidopsis
MRMIDNPLTLTPKLSSKMVGRAQGFYAGTSKEEIGLLMAMNFAILDGKYNGSTITVLGRNSVFDKVREMPVIGGSGLFRFARGYVQASTHEFNLKTGNAIVEYNCYLLHY

SEQ ID NO: 106469 - DNA, 1075 bp, Arabidopsis thaliana
  misc_feature (1)..(1075): Ceres Seq. ID no. 13619634
  misc_feature: MA Experiment ID: 20000185 Result: Up-regulated in Transcription
  misc_feature: MA Experiment 20000185 PARAMETER Experiment Name: At_Roots__P Parameter: Age (day) Value: 7 vs. 21
  misc_feature: MA Experiment 20000185 PARAMETER Experiment Name: At_Roots__P Parameter: Organism Value: A. thaliana
  misc_feature: MA Experiment 20000185 PARAMETER Experiment Name: At_Roots__P Parameter: Tissue Value: Roots vs. Whole Plant
  misc_feature: MA Experiment ID: 20000227 Result: Up-regulated in Transcription
  misc_feature: MA Experiment 20000227 PARAMETER Experiment Name: At_Root-Tips-vs-Tops_P Parameter: Tissue Value: Root Tips vs. Root Tops
  misc_feature: MA Experiment ID: 20000437 Result: Down-regulated in Transcription
  misc_feature: MA Experiment 20000437 PARAMETER Experiment Name: At_Drought_P Parameter: Age (day) Value: 8
  misc_feature: MA Experiment 20000437 PARAMETER Experiment Name: At_Drought_P Parameter: Organism Value: A. thaliana
  misc_feature: MA Experiment 20000437 PARAMETER Experiment Name: At_Drought_P Parameter: Plant Line Value: WS
  misc_feature: MA Experiment 20000437 PARAMETER Experiment Name: At_Drought_P Parameter: Timepoint (hr) Value: 24
  misc_feature: MA Experiment 20000437 PARAMETER Experiment Name: At_Drought_P Parameter: Tissue Value: Whole Plant
  misc_feature: MA Experiment 20000437 PARAMETER Experiment Name: At_Drought_P Parameter: Treatment Value: Drought vs. No Drought
  misc_feature: MA Experiment ID: 20000794 Result: Down-regulated in Transcription
  misc_feature: MA Experiment 20000794 PARAMETER Experiment Name: At_Petals_P Parameter: Age (day) Value: 23-25 days
  misc_feature: MA Experiment 20000794 PARAMETER Experiment Name: At_Petals_P Parameter: Plant Line Value: WS
  misc_feature: MA Experiment 20000794 PARAMETER Experiment Name: At_Petals_P Parameter: Tissue Value: Petals vs. Whole plant
  misc_feature: MA Experiment ID: 20001451 Result: Down-regulated in Transcription
  misc_feature: MA Experiment 20001451 PARAMETER Experiment Name: At_Far-red-induction_P Parameter: Age (day) Value: 7
  misc_feature: MA Experiment 20001451 PARAMETER Experiment Name: At_Far-red-induction_P Parameter: Light Value: Far-red vs. White
  misc_feature: MA Experiment 20001451 PARAMETER Experiment Name: At_Far-red-induction_P Parameter: Organism Value: A. thaliana
  misc_feature: MA Experiment 20001451 PARAMETER Experiment Name: At_Far-red-induction_P Parameter: Plant Line Value: Columbia
  misc_feature: MA Experiment 20001451 PARAMETER Experiment Name: At_Far-red-induction_P Parameter: Timepoint (hr) Value: 24
  misc_feature: MA Experiment 20001451 PARAMETER Experiment Name: At_Far-red-induction_P Parameter: Tissue Value: Whole Plant
  misc_feature: MA Experiment ID: 20001557 Result: Up-regulated in Transcription
  misc_feature: MA Experiment 20001557 PARAMETER Experiment Name: At_Drought_Soil_Dry_P Parameter: Age (day) Value: 27
  misc_feature: MA Experiment 20001557 PARAMETER Experiment Name: At_Drought_Soil_Dry_P Parameter: Organism Value: A. thaliana
  misc_feature: MA Experiment 20001557 PARAMETER Experiment Name: At_Drought_Soil_Dry_P Parameter: Plant Line Value: WS
  misc_feature: MA Experiment 20001557 PARAMETER Experiment Name: At_Drought_Soil_Dry_P Parameter: Post Timepoint (hr) Value: 3
  misc_feature: MA Experiment 20001557 PARAMETER Experiment Name: At_Drought_Soil_Dry_P Parameter: Post-Treatment Value: Re-Water vs. No Drought
  misc_feature: MA Experiment 20001557 PARAMETER Experiment Name: At_Drought_Soil_Dry_P Parameter: Timepoint (day) Value: 13
  misc_feature: MA Experiment 20001557 PARAMETER Experiment Name: At_Drought_Soil_Dry_P Parameter: Treatment Value: Drought vs. No Drought
  misc_feature: MA Experiment ID: 20001558 Result: Up-regulated in Transcription
  misc_feature: MA Experiment 20001558 PARAMETER Experiment Name: At_Drought_Soil_Dry_P Parameter: Age (day) Value: 27
  misc_feature: MA Experiment 20001558 PARAMETER Experiment Name: At_Drought_Soil_Dry_P Parameter: Organism Value: A. thaliana
  misc_feature: MA Experiment 20001558 PARAMETER Experiment Name: At_Drought_Soil_Dry_P Parameter: Plant Line Value: WS
  misc_feature: MA Experiment 20001558 PARAMETER Experiment Name: At_Drought_Soil_Dry_P Parameter: Post Timepoint (hr) Value: 6
  misc_feature: MA Experiment 20001558 PARAMETER Experiment Name: At_Drought_Soil_Dry_P Parameter: Post-Treatment Value: Re-Water vs. No Drought
  misc_feature: MA Experiment 20001558 PARAMETER Experiment Name: At_Drought_Soil_Dry_P Parameter: Timepoint (day) Value: 13
  misc_feature: MA Experiment 20001558 PARAMETER Experiment Name: At_Drought_Soil_Dry_P Parameter: Treatment Value: Drought vs. No Drought
  misc_feature: MA Experiment ID: 20001560 Result: Up-regulated in Transcription
  misc_feature: MA Experiment 20001560 PARAMETER Experiment Name: At_Drought_Soil_Dry_P Parameter: Age (day) Value: 28
  misc_feature: MA Experiment 20001560 PARAMETER Experiment Name: At_Drought_Soil_Dry_P Parameter: Organism Value: A. thaliana
  misc_feature: MA Experiment 20001560 PARAMETER Experiment Name: At_Drought_Soil_Dry_P Parameter: Plant Line Value: WS
  misc_feature: MA Experiment 20001560 PARAMETER Experiment Name: At_Drought_Soil_Dry_P Parameter: Post Timepoint (hr) Value: None
  misc_feature: MA Experiment 20001560 PARAMETER Experiment Name: At_Drought_Soil_Dry_P Parameter: Post-Treatment Value: None
  misc_feature: MA Experiment 20001560 PARAMETER Experiment Name: At_Drought_Soil_Dry_P Parameter: Timepoint (day) Value: 14
  misc_feature: MA Experiment 20001560 PARAMETER Experiment Name: At_Drought_Soil_Dry_P Parameter: Treatment Value: Drought vs. No Drought
  misc_feature: MA Experiment ID: 20001757 Result: Up-regulated in Transcription
  misc_feature: MA Experiment 20001757 PARAMETER Experiment Name: At_50mM_NH4NO3_L-to-H_P Parameter: Timepoint (hr) Value: 6
  misc_feature: MA Experiment 20001757 PARAMETER Experiment Name: At_50mM_NH4NO3_L-to-H_P Parameter: Tissue Value: Leaf
  misc_feature: MA Experiment 20001757 PARAMETER Experiment Name: At_50mM_NH4NO3_L-to-H_P Parameter: Treatment Value: 50mM NH4NO3 vs 100mM Mannitol
gggtttttctctgaggaagaagcgtttcatttctctgaatttcatcgaaaatggcggaaagaggaggagaaggcggcgcagagcgtggcggtgaccgtggtgacttcggacgtggattcggcggtggacgtggaggtggccgtggccgtgatcgtggtccaagaggccgtggaagacgtggaggccgtgcctcggaagaaacgaaatgggttccagtgaccaaactaggtcgtctagtggctgacaataaaataacgaagctagagcagatctatctccattctctcccagtaaaggagtaccaaatcatagatcatcttgttggtcctacgttgaaagacgaggttatgaagatcatgcctgttcagaaacaaaccagagctggtcaaaggactagattcaaggcctttgttgttgttggtgatggtaatggtcatgttggtttgggtgtcaagtgttctaaggaagttgctactgccattagaggagctattattcttgctaagctctctgttgttccggtgaggagaggttactgggggaataagattgggaagccacacactgtgccttgtaaggttactgggaagtgtggctctgttactgtgagaatggttcctgctccgagaggttctggtattgttgctgctagggttcctaagaaggttcttcagttcgctggtattgatgatgtctttacttcttccagaggatctactaaaactcttggaaactttgtcaaggcgacgtttgactgcttacagaagacatatgggttccttacaccagagttctggaaagagactagattctccagatcgccctaccaagagcacactgatttcttgtcgactaaggctgtttctgcaaccaaggttatcacggagggtgaagaccaagcttaagaccttcatgagataagttttggttgttcttaatactaattcctactttgaaaaagagtatttttttttcttgattatctatgagttttgttattggtggtttcgttactgttttggattttgttagatgtttgccttaatgcaaatttcaatgaaatagcttttgcaat

SEQ ID NO: 106470 - protein, 284 aa, Arabidopsis thaliana; identical to SEQ ID NO: 38082
  peptide (1)..(284): Ceres Seq. ID no. 13619635
  misc_feature (177)..(250): Pfam Name: Ribosomal protein S5, C-terminal domain Pfam Description: Ribosomal protein S5, C-terminal domain
  misc_feature (1)..(284): Homolog of NCBI NO: 15217951 NR Description: 40S ribosomal protein S2 (RPS2A) [Arabidopsis
  misc_feature (1)..(284): Homolog of NCBI NO: 21618011 NR Description: ribosomal protein S2, putative [Arabidopsis
  misc_feature (1)..(284): Homolog of NCBI NO: 18406325 NR Description: 40S ribosomal protein, putative [Arabidopsis >gi|18406353|ref|NP_564740.1| 40S ribosomal protein S2 (RPS2B) thaliana] >gi|22330310|ref|NP_683443.1| 40S ribosomal protein,
  misc_feature (1)..(284): Homolog of NCBI NO: 21539457 NR Description: ribosomal protein S2, putative [Arabidopsis
  misc_feature (3)..(284): Homolog of NCBI NO: 25294520 NR Description: hypothetical protein RF12 [imported] - thaliana (fragment) >gi|6566279|dbj|BAA88264.1| similar to
  misc_feature (1)..(284): Homolog of NCBI NO: 15227443 NR Description: 40S ribosomal protein S2 (RPS2C) [Arabidopsis
  misc_feature (1)..(284): Homolog of NCBI NO: 21553851 NR Description: 40S ribosomal protein S2 [Arabidopsis thaliana]
  misc_feature (1)..(279): Homolog of NCBI NO: 15230312 NR Description: 40S ribosomal protein S2 (RPS2D) [Arabidopsis
  misc_feature (1)..(231): Homolog of NCBI NO: 8979936 NR Description: Identical to gene XW6 from Arabidopsis thaliana and contains a Ribosomal protein S5 PF|00333 domain. ESTs
  misc_feature (1)..(267): Homolog of NCBI NO: 34393314 NR Description: putative 40S ribosomal protein S2 [Oryza sativa

SEQ ID NO: 106471 - protein, 185 aa, Arabidopsis thaliana; identical to SEQ ID NO: 38083
  peptide (1)..(185): Ceres Seq. ID no. 13619636
  misc_feature (78)..(151): Pfam Name: Ribosomal protein S5, C-terminal domain Pfam Description: Ribosomal protein S5, C-terminal domain
  misc_feature (1)..(185): Homolog of NCBI NO: 15217951 NR Description: 40S ribosomal protein S2 (RPS2A) [Arabidopsis
  misc_feature (1)..(185): Homolog of NCBI NO: 21618011 NR Description: ribosomal protein S2, putative [Arabidopsis
  misc_feature (1)..(185): Homolog of NCBI NO: 18406325 NR Description: 40S ribosomal protein, putative [Arabidopsis >gi|18406353|ref|NP_564740.1| 40S ribosomal protein S2 (RPS2B) thaliana] >gi|22330310|ref|NP_683443.1| 40S ribosomal protein,
  misc_feature (1)..(185): Homolog of NCBI NO: 21539457 NR Description: ribosomal protein S2, putative [Arabidopsis
  misc_feature (1)..(185): Homolog of NCBI NO: 25294520 NR Description: hypothetical protein RF12 [imported] - thaliana (fragment) >gi|6566279|dbj|BAA88264.1| similar to
  misc_feature (1)..(185): Homolog of NCBI NO: 15227443 NR Description: 40S ribosomal protein S2 (RPS2C) [Arabidopsis
  misc_feature (1)..(185): Homolog of NCBI NO: 21553851 NR Description: 40S ribosomal protein S2 [Arabidopsis thaliana]
  misc_feature (1)..(180): Homolog of NCBI NO: 15230312 NR Description: 40S ribosomal protein S2 (RPS2D) [Arabidopsis
  misc_feature (1)..(132): Homolog of NCBI NO: 8979936 NR Description: Identical to gene XW6 from Arabidopsis thaliana and contains a Ribosomal protein S5 PF|00333 domain. ESTs
  misc_feature (1)..(168): Homolog of NCBI NO: 34393314 NR Description: putative 40S ribosomal protein S2 [Oryza sativa

SEQ ID NO: 106472 - protein, 182 aa, Arabidopsis thaliana; identical to SEQ ID NO: 38084
  peptide (1)..(182): Ceres Seq. ID no. 13619637
  misc_feature (75)..(148): Pfam Name: Ribosomal protein S5, C-terminal domain Pfam Description: Ribosomal protein S5, C-terminal domain
  misc_feature (1)..(182): Homolog of NCBI NO: 15217951 NR Description: 40S ribosomal protein S2 (RPS2A) [Arabidopsis
  misc_feature (1)..(182): Homolog of NCBI NO: 21618011 NR Description: ribosomal protein S2, putative [Arabidopsis
  misc_feature (1)..(182): Homolog of NCBI NO: 18406325 NR Description: 40S ribosomal protein, putative [Arabidopsis >gi|18406353|ref|NP_564740.1| 40S ribosomal protein S2 (RPS2B) thaliana] >gi|22330310|ref|NP_683443.1| 40S ribosomal protein,
  misc_feature (1)..(182): Homolog of NCBI NO: 21539457 NR Description: ribosomal protein S2, putative [Arabidopsis
  misc_feature (1)..(182): Homolog of NCBI NO: 25294520 NR Description: hypothetical protein RF12 [imported] - thaliana (fragment) >gi|6566279|dbj|BAA88264.1| similar to
  misc_feature (1)..(182): Homolog of NCBI NO: 15227443 NR Description: 40S ribosomal protein S2 (RPS2C) [Arabidopsis
  misc_feature (1)..(182): Homolog of NCBI NO: 21553851 NR Description: 40S ribosomal protein S2 [Arabidopsis thaliana]
  misc_feature (1)..(177): Homolog of NCBI NO: 15230312 NR Description: 40S ribosomal protein S2 (RPS2D) [Arabidopsis
  misc_feature (1)..(129): Homolog of NCBI NO: 8979936 NR Description: Identical to gene XW6 from Arabidopsis thaliana and contains a Ribosomal protein S5 PF|00333 domain. ESTs
  misc_feature (1)..(165): Homolog of NCBI NO: 34393314 NR Description: putative 40S ribosomal protein S2 [Oryza sativa

SEQ ID NO: 106473 - DNA, 1996 bp, Arabidopsis thaliana
  misc_feature (1)..(1996): Ceres Seq. ID no. 13619646
  misc_feature: MA Experiment ID: 20000496 Result: Up-regulated in Transcription
  misc_feature: MA Experiment 20000496 PARAMETER Experiment Name: At_Guard_Cells_P Parameter: Harvest Date Value: 7/19/2002
  misc_feature: MA Experiment 20000496 PARAMETER Experiment Name: At_Guard_Cells_P Parameter: Organism Value: Canola
  misc_feature: MA Experiment 20000496 PARAMETER Experiment Name: At_Guard_Cells_P Parameter: Tissue Value: Guard Cells vs. Leaves
ggaggaacgaagattatcgagagcaaaaatcagagtagtacgatgttcgtgaaacggaatccgattagagaaaccaccgccgggaaaatctcttcgccgtcgtcaccgactttgaatgttgcagtcgcgcatataagagctggatcttattacgaaatcgatgcttcgattcttcctcagagatcgccggaaaatcttaaatcgattagagtcgtcatggtgagcaaaatcacggcgagtgacgtgtctctccggtacccaagcatgttttcactccgatcgcatttcgattacagtaggatgaaccggaataaaccgatgaagaagaggagtggtggtggtcttcttcctgttttcgacgagagtcatgtgatggcttcggagctagctggagacttgctttacagaagaatcgcacctcatgaactttctatgaatagaaattcctggggtttctgggtttctagttcttctcgcaggaacaaatttccaagaagggaggtggtttctcaaccggcgtacaatactcgtctctgtcgcgctgcttcaccggagggaaagtgctcgtctgagctgaaatcgggagggatgatcaagtggggaaggagattgcgtgtgcagtatcagagtcggcatattgatactaggaagaataaggaaggtgaggagagttctagagtgaaggatgaagtttacaaagaagaagagatggagaaagaagaggatgatgatgatgggaatgaaataggaggcactaaacaagaggcaaaggagataactaatggaaatcgtaagagaaagctgattgaatcaagtactgagagactcgctcagaaagctaaggtttatgatcagaagaaggaaactcaaattgtggtttataagaggaaatcagagaggaagttcattgatagatggtctgttgagaggtacaaactagctgagaggaacatgttaaaagtgatgaaggagaagaatgcagtgtttggcaactccatactcaggccagagttgaggtcagaagcaaggaagctgattggtgacacaggtctattggatcatctgcttaagcacatggctggtaaggtggctcctggaggtcaagataggtttatgagaaagcacaatgcagatggggcaatggagtattggttggagagttctgatttgattcacataaggaaagaagcaggagttaaagatccttactggactcctccacctggttggaagcttggtgacaacccttctcaagatcctgtctgcgctggagaaatccgtgacatcagagaagaattagctagcctgaaaagagaattgaagaaacttgcgtcaaagaaggaagaggaggagcttgttatcatgactacgcctaattcttgtgttactagtcagaatgataatctgatgactccagcaaaggaaatctacgctgatctgctgaaaaagaaatacaaaattgaggaccagctagtgattattggagaaaccttgcgtaaaatggaggaagacatgggatggcttaagaaaacagtggacgagaactatcctaaaaagccagactcaacagagacacctttgctactagaggattcaccaccaatacagacactagaaggagaagtgaaggtggtgaacaagggtaaccaaatcacagagtcacctcaaaacagagaaaaaggaaggaagcatgatcaacaagaaagatcaccactttcactaataagcaacactggtttcagaatctgcaggcctgtggggatgttcgcatggccccaattgcctgctcttgctgctgctactgatactaatgcttcttcgccaagtcacagacaagcctacccatccccttttccagtcaagccacttgcagctaagcgtcctcttggcttgacgtttcccttcaccatcatacccgaagaagctcccaagaatctcttcaacgtttgaagttgtcactggaaactgatgcatcagatcttactttccctacaag

SEQ ID NO: 106474 - protein, 649 aa, Arabidopsis thaliana
  peptide (1)..(649): Ceres Seq. ID no. 13619647
  misc_feature (72)..(649): Homolog of NCBI NO: 16033414 NR Description: SWITCH1 splice variant S [Arabidopsis thaliana]
  misc_feature (220)..(516): Homolog of NCBI NO: 15237794 NR Description: expressed protein [Arabidopsis thaliana] gb|AAD12714.1~gene_id:MQM1.12~similar to unknown protein
GGTKIIESKNQSSTMFVKRNPIRETTAGKISSPSSPTLNVAVAHIRAGSYYEIDASILPQRSPENLKSIRVVMVSKITASDVSLRYPSMFSLRSHFDYSRMNRNKPMKKRSGGGLLPVFDESHVMASELAGDLLYRRIAPHELSMNRNSWGFWVSSSSRRNKFPRREVVSQPAYNTRLCRAASPEGKCSSELKSGGMIKWGRRLRVQYQSRHIDTRKNKEGEESSRVKDEVYKEEEMEKEEDDDDGNEIGGTKQEAKEITNGNRKRKLIESSTERLAQKAKVYDQKKETQIVVYKRKSERKFIDRWSVERYKLAERNMLKVMKEKNAVFGNSILRPELRSEARKLIGDTGLLDHLLKHMAGKVAPGGQDRFMRKHNADGAMEYWLESSDLIHIRKEAGVKDPYWTPPPGWKLGDNPSQDPVCAGEIRDIREELASLKRELKKLASKKEEEELVIMTTPNSCVTSQNDNLMTPAKEIYADLLKKKYKIEDQLVIIGETLRKMEEDMGWLKKTVDENYPKKPDSTETPLLLEDSPPIQTLEGEVKVVNKGNQITESPQNREKGRKHDQQERSPLSLISNTGFRICRPVGMFAWPQLPALAAATDTNASSPSHRQAYPSPFPVKPLAAKRPLGLTFPFTIIPEEAPKNLFNV

SEQ ID NO: 106475 - protein, 635 aa, Arabidopsis thaliana; identical to SEQ ID NO: 99465
  peptide (1)..(635): Ceres Seq. ID no. 13619648
  misc_feature (58)..(635): Homolog of NCBI NO: 16033414 NR Description: SWITCH1 splice variant S [Arabidopsis thaliana]
  misc_feature (206)..(502): Homolog of NCBI NO: 15237794 NR Description: expressed protein [Arabidopsis thaliana] gb|AAD12714.1~gene_id:MQM1.12~similar to unknown protein

SEQ ID NO: 106476 - protein, 577 aa, Arabidopsis thaliana
  peptide (1)..(577): Ceres Seq. ID no. 13619649
  misc_feature (1)..(577): Homolog of NCBI NO: 16033414 NR Description: SWITCH1 splice variant S [Arabidopsis thaliana]
  misc_feature (148)..(444): Homolog of NCBI NO: 15237794 NR Description: expressed protein [Arabidopsis thaliana] gb|AAD12714.1~gene_id:MQM1.12~similar to unknown protein
MVSKITASDVSLRYPSMFSLRSHFDYSRMNRNKPMKKRSGGGLLPVFDESHVMASELAGDLLYRRIAPHELSMNRNSWGFWVSSSSRRNKFPRREVVSQPAYNTRLCRAASPEGKCSSELKSGGMIKWGRRLRVQYQSRHIDTRKNKEGEESSRVKDEVYKEEEMEKEEDDDDGNEIGGTKQEAKEITNGNRKRKLIESSTERLAQKAKVYDQKKETQIVVYKRKSERKFIDRWSVERYKLAERNMLKVMKEKNAVFGNSILRPELRSEARKLIGDTGLLDHLLKHMAGKVAPGGQDRFMRKHNADGAMEYWLESSDLIHIRKEAGVKDPYWTPPPGWKLGDNPSQDPVCAGEIRDIREELASLKRELKKLASKKEEEELVIMTTPNSCVTSQNDNLMTPAKEIYADLLKKKYKIEDQLVIIGETLRKMEEDMGWLKKTVDENYPKKPDSTETPLLLEDSPPIQTLEGEVKVVNKGNQITESPQNREKGRKHDQQERSPLSLISNTGFRICRPVGMFAWPQLPALAAATDTNASSPSHRQAYPSPFPVKPLAAKRPLGLTFPFTIIPEEAPKNLFNV

SEQ ID NO: 106477 - DNA, 1782 bp, Arabidopsis thaliana
  misc_feature (1)..(1782): Ceres Seq. ID no. 13619660
  misc_feature: MA Experiment ID: 20000264 Result: Down-regulated in Transcription
  misc_feature: MA Experiment 20000264 PARAMETER Experiment Name: At_Open_Flower_P Parameter: Age (day) Value: 21
  misc_feature: MA Experiment 20000264 PARAMETER Experiment Name: At_Open_Flower_P Parameter: Plant Line Value: WS
  misc_feature: MA Experiment 20000264 PARAMETER Experiment Name: At_Open_Flower_P Parameter: Tissue Value: Open Flower vs. Whole Plant
  misc_feature: MA Experiment ID: 20000265 Result: Down-regulated in Transcription
  misc_feature: MA Experiment 20000265 PARAMETER Experiment Name: At_Open_Flower_P Parameter: Age (day) Value: 21
  misc_feature: MA Experiment 20000265 PARAMETER Experiment Name: At_Open_Flower_P Parameter: Plant Line Value: WS
  misc_feature: MA Experiment 20000265 PARAMETER Experiment Name: At_Open_Flower_P Parameter: Tissue Value: Closed Flower vs. Whole Plant
  misc_feature: MA Experiment ID: 20000286 Result: Down-regulated in Transcription
  misc_feature: MA Experiment 20000286 PARAMETER Experiment Name: At_Open_Flower_P Parameter: Age (day) Value: 21
  misc_feature: MA Experiment 20000286 PARAMETER Experiment Name: At_Open_Flower_P Parameter: Plant Line Value: WS
  misc_feature: MA Experiment 20000286 PARAMETER Experiment Name: At_Open_Flower_P Parameter: Tissue Value: Half Open vs. Whole Plant
  misc_feature: MA Experiment ID: 20000439 Result: Down-regulated in Transcription
  misc_feature: MA Experiment 20000439 PARAMETER Experiment Name: At_Roots__P Parameter: Age (day) Value: 14 vs. 21
  misc_feature: MA Experiment 20000439 PARAMETER Experiment Name: At_Roots__P Parameter: Organism Value: A. thaliana
  misc_feature: MA Experiment 20000439 PARAMETER Experiment Name: At_Roots__P Parameter: Tissue Value: Roots vs. Whole Plant
  misc_feature: MA Experiment ID: 20000460 Result: Up-regulated in Transcription
  misc_feature: MA Experiment 20000460 PARAMETER Experiment Name: At_10percent_PEG_P Parameter: Age (day) Value: 12
  misc_feature: MA Experiment 20000460 PARAMETER Experiment Name: At_10percent_PEG_P Parameter: Organism Value: A. thaliana
  misc_feature: MA Experiment 20000460 PARAMETER Experiment Name: At_10percent_PEG_P Parameter: Plant Line Value: WS
  misc_feature: MA Experiment 20000460 PARAMETER Experiment Name: At_10percent_PEG_P Parameter: Timepoint (day) Value: 12
  misc_feature: MA Experiment 20000460 PARAMETER Experiment Name: At_10percent_PEG_P Parameter: Tissue Value: Whole Plant
  misc_feature: MA Experiment 20000460 PARAMETER Experiment Name: At_10percent_PEG_P Parameter: Treatment Value: 10percent PEG vs. No Treatment
  misc_feature: MA Experiment ID: 20000495 Result: Down-regulated in Transcription
  misc_feature: MA Experiment 20000495 PARAMETER Experiment Name: At_Guard_Cells_P Parameter: Harvest Date Value: 8/2/2002
  misc_feature: MA Experiment 20000495 PARAMETER Experiment Name: At_Guard_Cells_P Parameter: Organism Value: A. thaliana
  misc_feature: MA Experiment 20000495 PARAMETER Experiment Name: At_Guard_Cells_P Parameter: Tissue Value: Guard Cells vs. Leaves
  misc_feature: MA Experiment ID: 20000527 Result: Up-regulated in Transcription
  misc_feature: MA Experiment 20000527 PARAMETER Experiment Name: At_10percent_PEG_P Parameter: Age (day) Value: 20
  misc_feature: MA Experiment 20000527 PARAMETER Experiment Name: At_10percent_PEG_P Parameter: Organism Value: A. thaliana
  misc_feature: MA Experiment 20000527 PARAMETER Experiment Name: At_10percent_PEG_P Parameter: Plant Line Value: WS
  misc_feature: MA Experiment 20000527 PARAMETER Experiment Name: At_10percent_PEG_P Parameter: Timepoint (day) Value: 20
  misc_feature: MA Experiment 20000527 PARAMETER Experiment Name: At_10percent_PEG_P Parameter: Tissue Value: Whole Plant
  misc_feature: MA Experiment 20000527 PARAMETER Experiment Name: At_10percent_PEG_P Parameter: Treatment Value: 10percent PEG vs. No Treatment
  misc_feature: MA Experiment ID: 20001911 Result: Up-regulated in Transcription
  misc_feature: MA Experiment 20001911 PARAMETER Experiment Name: At_Drought_Reproduction_P Parameter: Age (day) Value: 40
  misc_feature: MA Experiment 20001911 PARAMETER Experiment Name: At_Drought_Reproduction_P Parameter: Organism Value: A. thaliana
  misc_feature: MA Experiment 20001911 PARAMETER Experiment Name: At_Drought_Reproduction_P Parameter: Plant Line Value: WS
  misc_feature: MA Experiment 20001911 PARAMETER Experiment Name: At_Drought_Reproduction_P Parameter: Timepoint (day) Value: 10
  misc_feature: MA Experiment 20001911 PARAMETER Experiment Name: At_Drought_Reproduction_P Parameter: Tissue Value: Flowers
  misc_feature: MA Experiment 20001911 PARAMETER Experiment Name: At_Drought_Reproduction_P Parameter: Treatment Value: Drought vs. No Drought
accgacaaatcttcttcttctctctctctccctcttcctctgtcacacagatattgacaaaaacaaaaagaatgagtcaatcaaatcgtgtcagagacgaagttacattacctttactccaaaaaacctctcatctgaaaaatcactcctctgttctctctgttttcctaaatgaagcaatctcaatctgcaaaatctcttacccattggtcctcactggtctcttcctctacgttcgctccttcgtctctctgtctttcctcggtggtctcggtgacgccactctcgccggtggctccctcgccgccgcatttgcaaacatcaccggatactctcttttctccggtttaaccatgggcgttgagtctatctgttcacaagcctttggagccagacgctataactacgtctgcgcgagtgtcaagagaggaatcatcctccttctcgtcacttctctccctgttacacttctttggatgaatatggagaagattcttctaatcttgaaacaggacaagaagctcgcgtccgaagcgcacatctttttgctttactctgttccagatcttgtcgctcaatctttcttacacccattaagagtttatcttcggactcagtcaaagactcttcctttatcaatctgtacagtgatcgcgagttttcttcacttgccaatcacgttcttccttgtaagttacctcggtttggggattaaaggaatcgctttgagtggtgttgtgtctaatttcaaccttgtcgctttcctctttctctacatctgtttcttcgaagacaagctaagtgttaatgaggacgagaagataacagaggagacatgtgaagatagtgtgagagaatggaagaaactactctgtcttgcgataccaagttgtatatcggtttgtcttgagtggtggtgctatgagattatgattttgctttgtgggtttctcttagaccctaaagcaagtgttgcttcaatgggaattctcatccaaatcacttctcttgtgtacattttccctcattccttgagtttaggagtctccacccgggtcggaaacgagcttggttctaaccagccaaaaagagcgagaagagcagccattgttggacttggtctcagcatcgccctagggtttacggctttcgcgtttactgtctcggttagaaacacatgggcgatgtttttcactgatgacaaagaaatcatgaagttgactgccatggctctgccaatcgttggtctatgtgagctcgggaactgcccgcaaactacgggatgcggtgttctcagaggctccgcgaggccgaagatcggagctaatattaatggagtggcgttttacgcggttggcattccggttggagcagttttggcgttttggtttgggtttggatttaagggactttggcttgggatgcttgcggcgcagatcacgtgtgtgattggtatgatggcggcgacgtgtaggaccgattgggaacttgaggcggaaagggctaaggtgctcacaacggcggtggattgtggcagtagtgacgacgacgccaaggaggatatggaggctgggatggttgataagtagggaggaatgagtcatgaggaggtctttaacaaaaacaaattgactttgttttgaattagttgataacttttttcttttattgagaagagattcgttggaggattaatgtaaattttgtagtgtaatgataacacaatctagagattcgtcgttgtattcaaggtttttaaattcataaggtcaaattttgccc

SEQ ID NO: 106478 - protein, 528 aa, Arabidopsis thaliana
  peptide (1)..(528): Ceres Seq. ID no. 13619661
  misc_feature (24)..(528): Homolog of NCBI NO: 15242265 NR Description: MATE efflux protein - related [Arabidopsis
  misc_feature (24)..(528): Homolog of NCBI NO: 39104576 NR Description: putative integral membrane protein [Arabidopsis
  misc_feature (52)..(516): Homolog of NCBI NO: 15235905 NR Description: MATE efflux protein - related [Arabidopsis
  misc_feature (58)..(516): Homolog of NCBI NO: 38567909 NR Description: OSJNBa0088I22.5 [Oryza sativa (japonica
  misc_feature (58)..(511): Homolog of NCBI NO: 37536202 NR Description: putative membrane protein [Oryza sativa (japonica group)] >gi|27311284|gb|AAO00710.1| putative membrane protein
  misc_feature (45)..(506): Homolog of NCBI NO: 18406257 NR Description: MATE efflux protein - related [Arabidopsis
  misc_feature (37)..(507): Homolog of NCBI NO: 15233459 NR Description: MATE efflux protein - related [Arabidopsis
  misc_feature (57)..(505): Homolog of NCBI NO: 15241158 NR Description: MATE efflux protein - related [Arabidopsis
  misc_feature (48)..(519): Homolog of NCBI NO: 20532318 NR Description: Putative membrane protein [Oryza sativa (japonica group)] >gi|27356666|gb|AAO06955.1| Putative membrane protein
  misc_feature (58)..(516): Homolog of NCBI NO: 15224891 NR Description: MATE efflux protein - related [Arabidopsis
RQIFFFSLSPSSSVTQILTKTKRMSQSNRVRDEVTLPLLQKTSHLKNHSSVLSVFLNEAISICKISYPLVLTGLFLYVRSFVSLSFLGGLGDATLAGGSLAAAFANITGYSLFSGLTMGVESICSQAFGARRYNYVCASVKRGIILLLVTSLPVTLLWMNMEKILLILKQDKKLASEAHIFLLYSVPDLVAQSFLHPLRVYLRTQSKTLPLSICTVIASFLHLPITFFLVSYLGLGIKGIALSGVVSNFNLVAFLFLYICFFEDKLSVNEDEKITEETCEDSVREWKKLLCLAIPSCISVCLEWWCYEIMILLCGFLLDPKASVASMGILIQITSLVYIFPHSLSLGVSTRVGNELGSNQPKRARRAAIVGLGLSIALGFTAFAFTVSVRNTWAMFFTDDKEIMKLTAMALPIVGLCELGNCPQTTGCGVLRGSARPKIGANINGVAFYAVGIPVGAVLAFWFGFGFKGLWLGMLAAQITCVIGMMAATCRTDWELEAERAKVLTTAVDCGSSDDDAKEDMEAGMVDK

SEQ ID NO: 106479 - protein, 505 aa, Arabidopsis thaliana [sequence omitted]

SEQ ID NO: 106480 - protein, 411 aa, Arabidopsis thaliana
  peptide (1)..(411): Ceres Seq. ID no. 13619663
  misc_feature (1)..(411): Homolog of NCBI NO: 15242265 NR Description: MATE efflux protein - related [Arabidopsis
  misc_feature (1)..(411): Homolog of NCBI NO: 39104576 NR Description: putative integral membrane protein [Arabidopsis
  misc_feature (1)..(399): Homolog of NCBI NO: 15235905 NR Description: MATE efflux protein - related [Arabidopsis
  misc_feature (1)..(399): Homolog of NCBI NO: 38567909 NR Description: OSJNBa0088I22.5 [Oryza sativa (japonica
  misc_feature (1)..(394): Homolog of NCBI NO: 37536202 NR Description: putative membrane protein [Oryza sativa (japonica group)] >gi|27311284|gb|AAO00710.1| putative membrane protein
  misc_feature (1)..(389): Homolog of NCBI NO: 18406257 NR Description: MATE efflux protein - related [Arabidopsis
  misc_feature (1)..(390): Homolog of NCBI NO: 15233459 NR Description: MATE efflux protein - related [Arabidopsis
  misc_feature (1)..(388): Homolog of NCBI NO: 15241158 NR Description: MATE efflux protein - related [Arabidopsis
  misc_feature (1)..(402): Homolog of NCBI NO: 20532318 NR Description: Putative membrane protein [Oryza sativa (japonica group)] >gi|27356666|gb|AAO06955.1| Putative membrane protein
  misc_feature (1)..(399): Homolog of NCBI NO: 15224891 NR Description: MATE efflux protein - related [Arabidopsis
MGVESICSQAFGARRYNYVCASVKRGIILLLVTSLPVTLLWMNMEKILLILKQDKKLASEAHIFLLYSVPDLVAQSFLHPLRVYLRTQSKTLPLSICTVIASFLHLPITFFLVSYLGLGIKGIALSGVVSNFNLVAFLFLYICFFEDKLSVNEDEKITEETCEDSVREWKKLLCLAIPSCISVCLEWWCYEIMILLCGFLLDPKASVASMGILIQITSLVYIFPHSLSLGVSTRVGNELGSNQPKRARRAAIVGLGLSIALGFTAFAFTVSVRNTWAMFFTDDKEIMKLTAMALPIVGLCELGNCPQTTGCGVLRGSARPKIGANINGVAFYAVGIPVGAVLAFWFGFGFKGLWLGMLAAQITCVIGMMAATCRTDWELEAERAKVLTTAVDCGSSDDDAKEDMEAGMVDK

SEQ ID NO: 106481 - DNA, 1303 bp, Arabidopsis thaliana
  misc_feature (1)..(1303): Ceres Seq. ID no. 13619672
  misc_feature: MA Experiment ID: 20000185 Result: Down-regulated in Transcription
  misc_feature: MA Experiment 20000185 PARAMETER Experiment Name: At_Roots__P Parameter: Age (day) Value: 7 vs. 21
  misc_feature: MA Experiment 20000185 PARAMETER Experiment Name: At_Roots__P Parameter: Organism Value: A. thaliana
  misc_feature: MA Experiment 20000185 PARAMETER Experiment Name: At_Roots__P Parameter: Tissue Value: Roots vs. Whole Plant
  misc_feature: MA Experiment ID: 20000265 Result: Down-regulated in Transcription
  misc_feature: MA Experiment 20000265 PARAMETER Experiment Name: At_Open_Flower_P Parameter: Age (day) Value: 21
  misc_feature: MA Experiment 20000265 PARAMETER Experiment Name: At_Open_Flower_P Parameter: Plant Line Value: WS
  misc_feature: MA Experiment 20000265 PARAMETER Experiment Name: At_Open_Flower_P Parameter: Tissue Value: Closed Flower vs. Whole Plant
  misc_feature: MA Experiment ID: 20001557 Result: Down-regulated in Transcription
  misc_feature: MA Experiment 20001557 PARAMETER Experiment Name: At_Drought_Soil_Dry_P Parameter: Age (day) Value: 27
  misc_feature: MA Experiment 20001557 PARAMETER Experiment Name: At_Drought_Soil_Dry_P Parameter: Organism Value: A. thaliana
  misc_feature: MA Experiment 20001557 PARAMETER Experiment Name: At_Drought_Soil_Dry_P Parameter: Plant Line Value: WS
  misc_feature: MA Experiment 20001557 PARAMETER Experiment Name: At_Drought_Soil_Dry_P Parameter: Post Timepoint (hr) Value: 3
  misc_feature: MA Experiment 20001557 PARAMETER Experiment Name: At_Drought_Soil_Dry_P Parameter: Post-Treatment Value: Re-Water vs. No Drought
  misc_feature: MA Experiment 20001557 PARAMETER Experiment Name: At_Drought_Soil_Dry_P Parameter: Timepoint (day) Value: 13
  misc_feature: MA Experiment 20001557 PARAMETER Experiment Name: At_Drought_Soil_Dry_P Parameter: Treatment Value: Drought vs. No Drought
atttgtgctctttatacattttcaaaatgtaaagatccacaacaagaggaatgggtttgttcttagtcctattccccgaccacaacaacaacgactcttcttcttattattctccggcaaaaactaccttccgctccaaattatcctctcgtcttctcctctccaaggctgaatccacaatctcaagctgcatcatcctcctcttcctcactctcttcctcttcactctctctacattcgaagaaccttcctctcgttttcccgccatttcttctcctcactggcgatttctcctcaaccgcaacatcatctctcgtcgtttcgctctacaaggaatgggtactctgtttctaagaggaaccaagagcatgcacgatttaatcattgctcatatcgcttccgttacaacggagaacgatctccgtctctttatacggttgcttcaccgctccggagttacttcaaaatccgacgtcgttttactcttcaattcaccttcatccactacaagattcaccgagttgatcgaacaagagaacaactcgttcttaaagctcgttcatgttcatcggaatgattcgatgacatcatcatcatcatcatctgagcatgttatttgggggaagaagagtcgtcatcgagctaattataactcgaacgagctgactcatggctcgatagttggtttcgacgtaactgagttggatcctgaaaactctttatccgggtttatggatcaagttccgttaagcttgaggagatgggcttgttacccaatgcttcttggtcgagtacgacgcagtttcaaacacgttatgcttgttgacgctaaaacttcatttttcatcggtgacccgtttacccggattcgtaaccggagccccgactcagtcctcttcttcttctcaaaacacaagaacgcctccgaggttaatccggagattttgatcggtggagctaaaggaatcaggagattgtcgagctccatgcatactgagattgtgagagcgacgatgatgaagaagaactcggttacggaagtaacggaatcggttgtgttgagtcaactcgtcgggaatgttcatatgacgaagaactttcaagtggttttaagtgagtcagtggtgccggaagcgaattagttattatgaaacgtatttgttcatgtttatactgttattatggcgataattatgaaacgtatttgttcatgtgaattggattcttctgtctacgataattaatgttggcaatatttttttaaaaaattacaaaaaatatataaaatttttgtattcatttg

SEQ ID NO: 106482 - protein, 363 aa, Arabidopsis thaliana
  peptide (1)..(363): Ceres Seq. ID no. 13619673
  misc_feature (1)..(363): Homolog of NCBI NO: 15237180 NR Description: expressed protein [Arabidopsis thaliana] unknown protein [Arabidopsis thaliana]
  misc_feature (112)..(363): Homolog of NCBI NO: 15230285 NR Description: expressed protein [Arabidopsis thaliana]
  misc_feature (181)..(363): Homolog of NCBI NO: 17064822 NR Description: putative protein [Arabidopsis thaliana]
  misc_feature (1)..(227): Homolog of NCBI NO: 15230285 NR Description: expressed protein [Arabidopsis thaliana]
  misc_feature (1)..(227): Homolog of NCBI NO: 17064822 NR Description: putative protein [Arabidopsis thaliana]
MGLFLVLFPDHNNNDSSSYYSPAKTTFRSKLSSRLLLSKAESTISSCIILLFLTLFLFTLSTFEEPSSRFPAISSPHWRFLLNRNIISRRFALQGMGTLFLRGTKSMHDLIIAHIASVTTENDLRLFIRLLHRSGVTSKSDVVLLFNSPSSTTRFTELIEQENNSFLKLVHVHRNDSMTSSSSSSEHVIWGKKSRHRANYNSNELTHGSIVGFDVTELDPENSLSGFMDQVPLSLRRWACYPMLLGRVRRSFKHVMLVDAKTSFFIGDPFTRIRNRSPDSVLFFFSKHKNASEVNPEILIGGAKGIRRLSSSMHTEIVRATMMKKNSVTEVTESVVLSQLVGNVHMTKNFQVVLSESVVPEAN

SEQ ID NO: 106483 - protein, 268 aa, Arabidopsis thaliana
  peptide (1)..(268): Ceres Seq. ID no. 13619674
  misc_feature (1)..(268): Homolog of NCBI NO: 15237180 NR Description: expressed protein [Arabidopsis thaliana] unknown protein [Arabidopsis thaliana]
  misc_feature (17)..(268): Homolog of NCBI NO: 15230285 NR Description: expressed protein [Arabidopsis thaliana]
  misc_feature (86)..(268): Homolog of NCBI NO: 17064822 NR Description: putative protein [Arabidopsis thaliana]
  misc_feature (1)..(132): Homolog of NCBI NO: 15230285 NR Description: expressed protein [Arabidopsis thaliana]
  misc_feature (1)..(132): Homolog of NCBI NO: 17064822 NR Description: putative protein [Arabidopsis thaliana]
MGTLFLRGTKSMHDLIIAHIASVTTENDLRLFIRLLHRSGVTSKSDVVLLFNSPSSTTRFTELIEQENNSFLKLVHVHRNDSMTSSSSSSEHVIWGKKSRHRANYNSNELTHGSIVGFDVTELDPENSLSGFMDQVPLSLRRWACYPMLLGRVRRSFKHVMLVDAKTSFFIGDPFTRIRNRSPDSVLFFFSKHKNASEVNPEILIGGAKGIRRLSSSMHTEIVRATMMKKNSVTEVTESVVLSQLVGNVHMTKNFQVVLSESVVPEAN

SEQ ID NO: 106484 - protein, 257 aa, Arabidopsis thaliana
  peptide (1)..(257): Ceres Seq. ID no. 13619675
  misc_feature (1)..(257): Homolog of NCBI NO: 15237180 NR Description: expressed protein [Arabidopsis thaliana] unknown protein [Arabidopsis thaliana]
  misc_feature (6)..(257): Homolog of NCBI NO: 15230285 NR Description: expressed protein [Arabidopsis thaliana]
  misc_feature (75)..(257): Homolog of NCBI NO: 17064822 NR Description: putative protein [Arabidopsis thaliana]
  misc_feature (1)..(121): Homolog of NCBI NO: 15230285 NR Description: expressed protein [Arabidopsis thaliana]
  misc_feature (1)..(121): Homolog of NCBI NO: 17064822 NR Description: putative protein [Arabidopsis thaliana]
MHDLIIAHIASVTTENDLRLFIRLLHRSGVTSKSDVVLLFNSPSSTTRFTELIEQENNSFLKLVHVHRNDSMTSSSSSSEHVIWGKKSRHRANYNSNELTHGSIVGFDVTELDPENSLSGFMDQVPLSLRRWACYPMLLGRVRRSFKHVMLVDAKTSFFIGDPFTRIRNRSPDSVLFFFSKHKNASEVNPEILIGGAKGIRRLSSSMHTEIVRATMMKKNSVTEVTESVVLSQLVGNVHMTKNFQVVLSESVVPEAN

SEQ ID NO: 106485 - DNA, 913 bp, Arabidopsis thaliana
  misc_feature (1)..(913): Ceres Seq. ID no. 13619688
  misc_feature: MA Experiment ID: 108462 Result: Up-regulated in Transcription
  misc_feature: MA Experiment 108462 PARAMETER Experiment Name: At_Germinating_Seeds_cDNA_P Parameter: Age (day) Value: 2 vs. 0
  misc_feature: MA Experiment 108462 PARAMETER Experiment Name: At_Germinating_Seeds_cDNA_P Parameter: Tissue Value: Germinating Seeds
  misc_feature: MA Experiment ID: 108464 Result: Up-regulated in Transcription
  misc_feature: MA Experiment 108464 PARAMETER Experiment Name: At_Germinating_Seeds_cDNA_P Parameter: Age (day) Value: 4 vs. 0
  misc_feature: MA Experiment 108464 PARAMETER Experiment Name: At_Germinating_Seeds_cDNA_P Parameter: Tissue Value: Germinating Seeds
  misc_feature: MA Experiment ID: 20000069 Result: Down-regulated in Transcription
  misc_feature: MA Experiment 20000069 PARAMETER Experiment Name: At_100uM_ABA_Mutants_cDNA_P Parameter: Plant Line Value: CS23
  misc_feature: MA Experiment 20000069 PARAMETER Experiment Name: At_100uM_ABA_Mutants_cDNA_P Parameter: Timepoint (hr) Value: 6
  misc_feature: MA Experiment 20000069 PARAMETER Experiment Name: At_100uM_ABA_Mutants_cDNA_P Parameter: Tissue Value: Aerial
  misc_feature: MA Experiment 20000069 PARAMETER Experiment Name: At_100uM_ABA_Mutants_cDNA_P Parameter: Treatment Value: 100uM ABA vs. No Treatment
  misc_feature: MA Experiment ID: 20000070 Result: Down-regulated in Transcription
  misc_feature: MA Experiment 20000070 PARAMETER Experiment Name: At_100uM_ABA_Mutants_cDNA_P Parameter: Plant Line Value: CS24
  misc_feature: MA Experiment 20000070 PARAMETER Experiment Name: At_100uM_ABA_Mutants_cDNA_P Parameter: Timepoint (hr) Value: 6
  misc_feature: MA Experiment 20000070 PARAMETER Experiment Name: At_100uM_ABA_Mutants_cDNA_P Parameter: Tissue Value: Aerial
  misc_feature: MA Experiment 20000070 PARAMETER Experiment Name: At_100uM_ABA_Mutants_cDNA_P Parameter: Treatment Value: 100uM ABA vs. No Treatment
  misc_feature: MA Experiment ID: 20000071 Result: Down-regulated in Transcription
  misc_feature: MA Experiment 20000071 PARAMETER Experiment Name: At_100uM_ABA_Mutants_cDNA_P Parameter: Plant Line Value: CS8104
  misc_feature: MA Experiment 20000071 PARAMETER Experiment Name: At_100uM_ABA_Mutants_cDNA_P Parameter: Timepoint (hr) Value: 6
  misc_feature: MA Experiment 20000071 PARAMETER Experiment Name: At_100uM_ABA_Mutants_cDNA_P Parameter: Tissue Value: Aerial
  misc_feature: MA Experiment 20000071 PARAMETER Experiment Name: At_100uM_ABA_Mutants_cDNA_P Parameter: Treatment Value: 100uM ABA vs. No Treatment
  misc_feature: MA Experiment ID: 20000087 Result: Down-regulated in Transcription
  misc_feature: MA Experiment 20000087 PARAMETER Experiment Name: At_100uM_ABA_Mutants_cDNA_P Parameter: Plant Line Value: WS
  misc_feature: MA Experiment 20000087 PARAMETER Experiment Name: At_100uM_ABA_Mutants_cDNA_P Parameter: Timepoint (hr) Value: 6
  misc_feature: MA Experiment 20000087 PARAMETER Experiment Name: At_100uM_ABA_Mutants_cDNA_P Parameter: Tissue Value: Aerial
  misc_feature: MA Experiment 20000087 PARAMETER Experiment Name: At_100uM_ABA_Mutants_cDNA_P Parameter: Treatment Value: 100uM ABA vs. No Treatment
  misc_feature: MA Experiment ID: 20000089 Result: Down-regulated in Transcription
  misc_feature: MA Experiment ID: 20000117 Result: Down-regulated in Transcription
  misc_feature: MA Experiment 20000117 PARAMETER Experiment Name: At_100uM_ABA_Mutants_cDNA_P Parameter: Plant Line Value: Columbia
  misc_feature: MA Experiment 20000117 PARAMETER Experiment Name: At_100uM_ABA_Mutants_cDNA_P Parameter: Timepoint (hr) Value: 6
  misc_feature: MA Experiment 20000117 PARAMETER Experiment Name: At_100uM_ABA_Mutants_cDNA_P Parameter: Tissue Value: Aerial
  misc_feature: MA Experiment 20000117 PARAMETER Experiment Name: At_100uM_ABA_Mutants_cDNA_P Parameter: Treatment Value: 100uM ABA vs. No Treatment
  misc_feature: MA Experiment ID: 20000234 Result: Up-regulated in Transcription
  misc_feature: MA Experiment 20000234 PARAMETER Experiment Name: At_Siliques_P Parameter: Age (day) Value: 21
  misc_feature: MA Experiment 20000234 PARAMETER Experiment Name: At_Siliques_P Parameter: Organism Value: A. thaliana
  misc_feature: MA Experiment 20000234 PARAMETER Experiment Name: At_Siliques_P Parameter: Plant Line Value: WS
  misc_feature: MA Experiment 20000234 PARAMETER Experiment Name: At_Siliques_P Parameter: Tissue Value: Less Than 5mm Siliques vs. Whole Plant
  misc_feature: MA Experiment ID: 20000235 Result: Up-regulated in Transcription
  misc_feature: MA Experiment 20000235 PARAMETER Experiment Name: At_Siliques_P Parameter: Age (day) Value: 21
  misc_feature: MA Experiment 20000235 PARAMETER Experiment Name: At_Siliques_P Parameter: Organism Value: A. thaliana
  misc_feature: MA Experiment 20000235 PARAMETER Experiment Name: At_Siliques_P Parameter: Plant Line Value: WS
  misc_feature: MA Experiment 20000235 PARAMETER Experiment Name: At_Siliques_P Parameter: Tissue Value: 5-10mm Siliques vs. Whole Plant
  misc_feature: MA Experiment ID: 20000264 Result: Up-regulated in Transcription
  misc_feature: MA Experiment 20000264 PARAMETER Experiment Name: At_Open_Flower_P Parameter: Age (day) Value: 21
  misc_feature: MA Experiment 20000264 PARAMETER Experiment Name: At_Open_Flower_P Parameter: Plant Line Value: WS
  misc_feature: MA Experiment 20000264 PARAMETER Experiment Name: At_Open_Flower_P Parameter: Tissue Value: Open Flower vs. Whole Plant
  misc_feature: MA Experiment ID: 20000265 Result: Up-regulated in Transcription
  misc_feature: MA Experiment 20000265 PARAMETER Experiment Name: At_Open_Flower_P Parameter: Age (day) Value: 21
  misc_feature: MA Experiment 20000265 PARAMETER Experiment Name: At_Open_Flower_P Parameter: Plant Line Value: WS
  misc_feature: MA Experiment 20000265 PARAMETER Experiment Name: At_Open_Flower_P Parameter: Tissue Value: Closed Flower vs. Whole Plant
  misc_feature: MA Experiment ID: 20000286 Result: Up-regulated in Transcription
  misc_feature: MA Experiment 20000286 PARAMETER Experiment Name: At_Open_Flower_P Parameter: Age (day) Value: 21
  misc_feature: MA Experiment 20000286 PARAMETER Experiment Name: At_Open_Flower_P Parameter: Plant Line Value: WS
  misc_feature: MA Experiment 20000286 PARAMETER Experiment Name: At_Open_Flower_P Parameter: Tissue Value: Half Open vs. Whole Plant
  misc_feature: MA Experiment ID: 20000527 Result: Up-regulated in Transcription
  misc_feature: MA Experiment 20000527 PARAMETER Experiment Name: At_10percent_PEG_P Parameter: Age (day) Value: 20
  misc_feature: MA Experiment 20000527 PARAMETER Experiment Name: At_10percent_PEG_P Parameter: Organism Value: A. thaliana
  misc_feature: MA Experiment 20000527 PARAMETER Experiment Name: At_10percent_PEG_P Parameter: Plant Line Value: WS
  misc_feature: MA Experiment 20000527 PARAMETER Experiment Name: At_10percent_PEG_P Parameter: Timepoint (day) Value: 20
  misc_feature: MA Experiment 20000527 PARAMETER Experiment Name: At_10percent_PEG_P Parameter: Tissue Value: Whole Plant
  misc_feature: MA Experiment 20000527 PARAMETER Experiment Name: At_10percent_PEG_P Parameter: Treatment Value: 10percent PEG vs. No Treatment
  misc_feature: MA Experiment ID: 20000794 Result: Up-regulated in Transcription
  misc_feature: MA Experiment 20000794 PARAMETER Experiment Name: At_Petals_P Parameter: Age (day) Value: 23-25 days
  misc_feature: MA Experiment 20000794 PARAMETER Experiment Name: At_Petals_P Parameter: Plant Line Value: WS
  misc_feature: MA Experiment 20000794 PARAMETER Experiment Name: At_Petals_P Parameter: Tissue Value: Petals vs. Whole plant
  misc_feature: MA Experiment ID: 20001557 Result: Down-regulated in Transcription
  misc_feature: MA Experiment 20001557 PARAMETER Experiment Name: At_Drought_Soil_Dry_P Parameter: Age (day) Value: 27
  misc_feature: MA Experiment 20001557 PARAMETER Experiment Name: At_Drought_Soil_Dry_P Parameter: Organism Value: A. thaliana
  misc_feature: MA Experiment 20001557 PARAMETER Experiment Name: At_Drought_Soil_Dry_P Parameter: Plant Line Value: WS
  misc_feature: MA Experiment 20001557 PARAMETER Experiment Name: At_Drought_Soil_Dry_P Parameter: Post Timepoint (hr) Value: 3
  misc_feature: MA Experiment 20001557 PARAMETER Experiment Name: At_Drought_Soil_Dry_P Parameter: Post-Treatment Value: Re-Water vs. No Drought
  misc_feature: MA Experiment 20001557 PARAMETER Experiment Name: At_Drought_Soil_Dry_P Parameter: Timepoint (day) Value: 13
  misc_feature: MA Experiment 20001557 PARAMETER Experiment Name: At_Drought_Soil_Dry_P Parameter: Treatment Value: Drought vs. No Drought
  misc_feature: MA Experiment ID: 20001560 Result: Up-regulated in Transcription
  misc_feature: MA Experiment 20001560 PARAMETER Experiment Name: At_Drought_Soil_Dry_P Parameter: Age (day) Value: 28
  misc_feature: MA Experiment 20001560 PARAMETER Experiment Name: At_Drought_Soil_Dry_P Parameter: Organism Value: A. thaliana
  misc_feature: MA Experiment 20001560 PARAMETER Experiment Name: At_Drought_Soil_Dry_P Parameter: Plant Line Value: WS
  misc_feature: MA Experiment 20001560 PARAMETER Experiment Name: At_Drought_Soil_Dry_P Parameter: Post Timepoint (hr) Value: None
  misc_feature: MA Experiment 20001560 PARAMETER Experiment Name: At_Drought_Soil_Dry_P Parameter: Post-Treatment Value: None
  misc_feature: MA Experiment 20001560 PARAMETER Experiment Name: At_Drought_Soil_Dry_P Parameter: Timepoint (day) Value: 14
  misc_feature: MA Experiment 20001560 PARAMETER Experiment Name: At_Drought_Soil_Dry_P Parameter: Treatment Value: Drought vs. No Drought
gtcacacacacaacacaacaatggatattaacaggtggagtcttcaaggtatgactgctcttgtaaccggtggatcaaagggaattgggtatgcaatagtggaggaacttgtaggctttggtgcaagagttcacatctgtgacatagacgaaactctgctaaacgaatgcttaagtggatggcatgcaaaagggtttgaagtgagtggttcaatctgtgatgtttcctctcgacctcagagagtgcaattgatgcagactgtttcttctctatttggtgccaaactcaacatccttataaacaatgttggcaagtacatattaaagccaactttagaaagtacagctgaagatttctcaagtttaatggctaccaatttggaatctgcttactacatctcccaattggcacatcctttacttaaagcctcgggaaatgggaatatcgtgtttatttcctcggtaacgggggttgtctctggcacatctaccatatatggtgtaacaaaaggagccttgaatcaactggcaagagatttggcgtgtgaatgggccagtgacaacataagggctaactctgtagctccttgggtcactgcaacttctcttgtccaaaaatatcttgaagacgagatatttgcggaagctatgttctcaagaaccccattaggacgtgcatgtgagccacgtgaggttgcgtcgctggtgacatttctctgtctccctgcagcttcttatataacaggacaaaccatttgtattgatggtggtttcactgttaatggattctcctataagccatagggtcaaaccctagaaaacacttctacaattaacaatttctatgatgtatgaacatttggtcaagttttactacattatgtcaaaaataaatgaggtcaagcttatatatg

SEQ ID NO: 106486 - protein, 266 aa, Arabidopsis thaliana
  peptide (1)..(266): Ceres Seq. ID no. 13619689
  misc_feature (7)..(266): Homolog of NCBI NO: 15222400 NR Description: short-chain dehydrogenase/reductase family
  misc_feature (7)..(254): Homolog of NCBI NO: 25406975 NR Description: protein F22G5.20 [imported] - Arabidopsis >gi|8778545|gb|AAF79553.1|AC022464_11 F22G5.20 [Arabidopsis
  misc_feature (7)..(266): Homolog of NCBI NO: 15227073 NR Description: short-chain dehydrogenase/reductase family (tropinone reductase, putative) [Arabidopsis thaliana]
  misc_feature (7)..(266): Homolog of NCBI NO: 15227071 NR Description: short-chain dehydrogenase/reductase family (tropinone reductase, putative) [Arabidopsis thaliana]
  misc_feature (7)..(266): Homolog of NCBI NO: 30684202 NR Description: short-chain dehydrogenase/reductase family [Arabidopsis thaliana] >gi|25283131|pir||B84695 probable
  misc_feature (7)..(266): Homolog of NCBI NO: 15227072 NR Description: short-chain dehydrogenase/reductase family (tropinone reductase, putative) [Arabidopsis thaliana]
  misc_feature (7)..(266): Homolog of NCBI NO: 15529236 NR Description: At2g29320/F16P2.30 [Arabidopsis thaliana]
  misc_feature (7)..(266): Homolog of NCBI NO: 15227070 NR Description: short-chain dehydrogenase/reductase family (tropinone reductase, putative) [Arabidopsis thaliana]
  misc_feature (7)..(266): Homolog of NCBI NO: 21553753 NR Description: putative tropinone reductase [Arabidopsis
  misc_feature (2)..(266): Homolog of NCBI NO: 15227076 NR Description: short-chain dehydrogenase/reductase family (tropinone reductase, putative) [Arabidopsis thaliana]
HTHNTTMDINRWSLQGMTALVTGGSKGIGYAIVEELVGFGARVHICDIDETLLNECLSGWHAKGFEVSGSICDVSSRPQRVQLMQTVSSLFGAKLNILINNVGKYILKPTLESTAEDFSSLMATNLESAYYISQLAHPLLKASGNGNIVFISSVTGVVSGTSTIYGVTKGALNQLARDLACEWASDNIRANSVAPWVTATSLVQKYLEDEIFAEAMFSRTPLGRACEPREVASLVTFLCLPAASYITGQTICIDGGFTVNGFSYKP

SEQ ID NO: 106487 - protein, 260 aa, Arabidopsis thaliana; identical to SEQ ID NO: 21801
  peptide (1)..(260): Ceres Seq. ID no. 13619690
  misc_feature (1)..(260): Homolog of NCBI NO: 15222400 NR Description: short-chain dehydrogenase/reductase family
  misc_feature (1)..(248): Homolog of NCBI NO: 25406975 NR Description: protein F22G5.20 [imported] - Arabidopsis >gi|8778545|gb|AAF79553.1|AC022464_11 F22G5.20 [Arabidopsis
  misc_feature (1)..(260): Homolog of NCBI NO: 15227073 NR Description: short-chain dehydrogenase/reductase family (tropinone reductase, putative) [Arabidopsis thaliana]
  misc_feature (1)..(260): Homolog of NCBI NO: 15227071 NR Description: short-chain dehydrogenase/reductase family (tropinone reductase, putative) [Arabidopsis thaliana]
  misc_feature (1)..(260): Homolog of NCBI NO: 30684202 NR Description: short-chain dehydrogenase/reductase family [Arabidopsis thaliana] >gi|25283131|pir||B84695 probable
  misc_feature (1)..(260): Homolog of NCBI NO: 15227072 NR Description: short-chain dehydrogenase/reductase family (tropinone reductase, putative) [Arabidopsis thaliana]
  misc_feature (1)..(260): Homolog of NCBI NO: 15529236 NR Description: At2g29320/F16P2.30 [Arabidopsis thaliana]
  misc_feature (1)..(260): Homolog of NCBI NO: 15227070 NR Description: short-chain dehydrogenase/reductase family (tropinone reductase, putative) [Arabidopsis thaliana]
  misc_feature (1)..(260): Homolog of NCBI NO: 21553753 NR Description: putative tropinone reductase [Arabidopsis
  misc_feature (1)..(260): Homolog of NCBI NO: 15227076 NR Description: short-chain dehydrogenase/reductase family (tropinone reductase, putative) [Arabidopsis thaliana]

SEQ ID NO: 106488 - protein, 250 aa, Arabidopsis thaliana; identical to SEQ ID NO: 21802
  peptide (1)..(250): Ceres Seq. ID no. 13619691
  misc_feature (1)..(250): Homolog of NCBI NO: 15222400 NR Description: short-chain dehydrogenase/reductase family
  misc_feature (1)..(238): Homolog of NCBI NO: 25406975 NR Description: protein F22G5.20 [imported] - Arabidopsis >gi|8778545|gb|AAF79553.1|AC022464_11 F22G5.20 [Arabidopsis
  misc_feature (1)..(250): Homolog of NCBI NO: 15227073 NR Description: short-chain dehydrogenase/reductase family (tropinone reductase, putative) [Arabidopsis thaliana]
  misc_feature (1)..(250): Homolog of NCBI NO: 15227071 NR Description: short-chain dehydrogenase/reductase family (tropinone reductase, putative) [Arabidopsis thaliana]
  misc_feature (1)..(250): Homolog of NCBI NO: 30684202 NR Description: short-chain dehydrogenase/reductase family [Arabidopsis thaliana] >gi|25283131|pir||B84695 probable
  misc_feature (1)..(250): Homolog of NCBI NO: 15227072 NR Description: short-chain dehydrogenase/reductase family (tropinone reductase, putative) [Arabidopsis thaliana]
  misc_feature (1)..(250): Homolog of NCBI NO: 15529236 NR Description: At2g29320/F16P2.30 [Arabidopsis thaliana]
  misc_feature (1)..(250): Homolog of NCBI NO: 15227070 NR Description: short-chain dehydrogenase/reductase family (tropinone reductase, putative) [Arabidopsis thaliana]
  misc_feature (1)..(250): Homolog of NCBI NO: 21553753 NR Description: putative tropinone reductase [Arabidopsis
  misc_feature (1)..(250): Homolog of NCBI NO: 15227076 NR Description: short-chain dehydrogenase/reductase family (tropinone reductase, putative) [Arabidopsis thaliana]

SEQ ID NO: 106489 - DNA, 1254 bp, Arabidopsis thaliana
  misc_feature (1)..(1254): Ceres Seq. ID no. 13619700
  misc_feature: MA Experiment ID: 108434 Result: Up-regulated in Transcription
  misc_feature: MA Experiment 108434 PARAMETER Experiment Name: At_Root_Tips_cDNA_P Parameter: Tissue Value: Root Tips
  misc_feature: MA Experiment ID: 108462 Result: Down-regulated in Transcription
  misc_feature: MA Experiment 108462 PARAMETER Experiment Name: At_Germinating_Seeds_cDNA_P Parameter: Age (day) Value: 2 vs. 0
  misc_feature: MA Experiment 108462 PARAMETER Experiment Name: At_Germinating_Seeds_cDNA_P Parameter: Tissue Value: Germinating Seeds
  misc_feature: MA Experiment ID: 108463 Result: Down-regulated in Transcription
  misc_feature: MA Experiment 108463 PARAMETER Experiment Name: At_Germinating_Seeds_cDNA_P Parameter: Age (day) Value: 3 vs. 0
  misc_feature: MA Experiment 108463 PARAMETER Experiment Name: At_Germinating_Seeds_cDNA_P Parameter: Tissue Value: Germinating Seeds
  misc_feature: MA Experiment ID: 108464 Result: Down-regulated in Transcription
  misc_feature: MA Experiment 108464 PARAMETER Experiment Name: At_Germinating_Seeds_cDNA_P Parameter: Age (day) Value: 4 vs. 0
  misc_feature: MA Experiment 108464 PARAMETER Experiment Name: At_Germinating_Seeds_cDNA_P Parameter: Tissue Value: Germinating Seeds
  misc_feature: MA Experiment ID: 20000180 Result: Down-regulated in Transcription
  misc_feature: MA Experiment 20000180 PARAMETER Experiment Name: At_Germinating_Seeds_P Parameter: Age (hr) Value: 24 vs. 0
  misc_feature: MA Experiment 20000180 PARAMETER Experiment Name: At_Germinating_Seeds_P Parameter: Tissue Value: Germinating Seeds
  misc_feature: MA Experiment ID: 20000184 Result: Down-regulated in Transcription
  misc_feature: MA Experiment 20000184 PARAMETER Experiment Name: At_Shoots__P Parameter: Age (day) Value: 7
  misc_feature: MA Experiment 20000184 PARAMETER Experiment Name: At_Shoots__P Parameter: Tissue Value: Shoots vs. Whole Plant
  misc_feature: MA Experiment ID: 20001557 Result: Up-regulated in Transcription
  misc_feature: MA Experiment 20001557 PARAMETER Experiment Name: At_Drought_Soil_Dry_P Parameter: Age (day) Value: 27
  misc_feature: MA Experiment 20001557 PARAMETER Experiment Name: At_Drought_Soil_Dry_P Parameter: Organism Value: A. thaliana
  misc_feature: MA Experiment 20001557 PARAMETER Experiment Name: At_Drought_Soil_Dry_P Parameter: Plant Line Value: WS
  misc_feature: MA Experiment 20001557 PARAMETER Experiment Name: At_Drought_Soil_Dry_P Parameter: Post Timepoint (hr) Value: 3
  misc_feature: MA Experiment 20001557 PARAMETER Experiment Name: At_Drought_Soil_Dry_P Parameter: Post-Treatment Value: Re-Water vs. No Drought
  misc_feature: MA Experiment 20001557 PARAMETER Experiment Name: At_Drought_Soil_Dry_P Parameter: Timepoint (day) Value: 13
  misc_feature: MA Experiment 20001557 PARAMETER Experiment Name: At_Drought_Soil_Dry_P Parameter: Treatment Value: Drought vs. No Drought
  misc_feature: MA Experiment ID: 20001558 Result: Up-regulated in Transcription
  misc_feature: MA Experiment 20001558 PARAMETER Experiment Name: At_Drought_Soil_Dry_P Parameter: Age (day) Value: 27
  misc_feature: MA Experiment 20001558 PARAMETER Experiment Name: At_Drought_Soil_Dry_P Parameter: Organism Value: A. thaliana
  misc_feature: MA Experiment 20001558 PARAMETER Experiment Name: At_Drought_Soil_Dry_P Parameter: Plant Line Value: WS
  misc_feature: MA Experiment 20001558 PARAMETER Experiment Name: At_Drought_Soil_Dry_P Parameter: Post Timepoint (hr) Value: 6
  misc_feature: MA Experiment 20001558 PARAMETER Experiment Name: At_Drought_Soil_Dry_P Parameter: Post-Treatment Value: Re-Water vs. No Drought
  misc_feature: MA Experiment 20001558 PARAMETER Experiment Name: At_Drought_Soil_Dry_P Parameter: Timepoint (day) Value: 13
  misc_feature: MA Experiment 20001558 PARAMETER Experiment Name: At_Drought_Soil_Dry_P Parameter: Treatment Value: Drought vs. No Drought
agtagagagaggctttcgattaattttactttgtggccgccgtgacctttttcttagcgtcgctctctgtcaccttcaagttcactatctccgacttatcttctgtcaagtactgaacaagaatcatggaggagatcaccaaaccggtccttgttggaatagttaagaaagaagctccacagctagcatccgtgttgagagaaatgaagaatgttctagatgtggttaggagcaaagtggaagctctgactgcattggtaaaagcaaacagttttccgacagcgggtgggataagttatcttgaggccaagcatctgttacttctaagttattgccaggatcttgtatattatattctaaggaaagcaaaaggactctctattgatggtcatcctcttgtaaggagccttgtagagatacgtatgtttctggaaaagattcgtcccatagacaaaaaacttcagtaccagattcagaagctcaccacagccggtgggcctgtgacagagctagctcattccgagggaaaggggtcgtgtgaagcccaaaaatctgaagatctttcaaattataagcctaaacctgacttacttgctgacaaagaggatgaccaagaggatgatggtgtttatcgacccccgaaatttgcccctatgtctatggaagataagacttcaaaacaagaaagagatgctgccagaaaagagaaacacttttttagacaagccactgaaaatacatacatgaaagatgtgttggacgatctggaggacaggcctgaagagattagagactattatggggttgagagcaatgagcagaagaggtttatggcacagtatgaaaggcaacaaaaggcagaagaagagctctttacccgggcacctcgcactaaagaggataagaagagagagaagcgcttgaaatcaagcagcgggttgcatgaactaaccgagaacttttacgatgatatcaagttcttggataaggatggtgaaaagccaagaagcttcggccgtaataaaaggggagggccattcaagaaaagaaagacaaggcactgatatggatacaccagtggttcctttagctgcttcagtgcaccaattttgttgccatgaaaaagatacaaattttcgatttgcttttatgattaaatgttgaaagtggtgaatgtgagaacttgttatcagttttagtattggttcatggtcatgctcttgcagtaaaattaggaagagaccttttctcttt

SEQ ID NO: 106490 - protein, 312 aa, Arabidopsis thaliana; identical to SEQ ID NO: 26572
  peptide (1)..(312): Ceres Seq. ID no. 13619701
  misc_feature (11)..(104): Pfam Name: Sas10/Utp3 family Pfam Description: Sas10/Utp3 family
  misc_feature (1)..(312): Homolog of NCBI NO: 18390818 NR Description: expressed protein [Arabidopsis thaliana] unknown protein [Arabidopsis thaliana]
  misc_feature (1)..(271): Homolog of NCBI NO: 25372823 NR Description: protein F24B9.6 [imported] - Arabidopsis thaliana
  misc_feature (16)..(122): Homolog of NCBI NO: 34906856 NR Description: P0470A12.5 [Oryza sativa (japonica
  misc_feature (6)..(309): Homolog of NCBI NO: 7512783 NR Description: hypothetical protein DKFZp564O092.1 - human
  misc_feature (6)..(309): Homolog of NCBI NO: 37545892 NR Description: similar to hypothetical protein [Homo sapiens]
  misc_feature (10)..(309): Homolog of NCBI NO: 21410066 NR Description: DKFZP564O092 protein [Homo sapiens]
  misc_feature (5)..(309): Homolog of NCBI NO: 23272205 NR Description: 1500001L15Rik protein [Mus musculus]
  misc_feature (12)..(309): Homolog of NCBI NO: 20876056 NR Description: RIKEN cDNA 1500001L15 [Mus musculus] unnamed protein product [Mus musculus]
  misc_feature (12)..(309): Homolog of NCBI NO: 34874139 NR Description: similar to CG11030-PA [Rattus norvegicus]
  misc_feature (12)..(311): Homolog of NCBI NO: 40675680 NR Description: Unknown (protein for IMAGE:5336691) [Silurana

SEQ ID NO: 106491 - protein, 286 aa, Arabidopsis thaliana; identical to SEQ ID NO: 26573
  peptide (1)..(286): Ceres Seq. ID no. 13619702
  misc_feature (1)..(78): Pfam Name: Sas10/Utp3 family Pfam Description: Sas10/Utp3 family
  misc_feature (1)..(286): Homolog of NCBI NO: 18390818 NR Description: expressed protein [Arabidopsis thaliana] unknown protein [Arabidopsis thaliana]
  misc_feature (1)..(245): Homolog of NCBI NO: 25372823 NR Description: protein F24B9.6 [imported] - Arabidopsis thaliana
  misc_feature (1)..(96): Homolog of NCBI NO: 34906856 NR Description: P0470A12.5 [Oryza sativa (japonica
  misc_feature (1)..(283): Homolog of NCBI NO: 7512783 NR Description: hypothetical protein DKFZp564O092.1 - human
  misc_feature (1)..(283): Homolog of NCBI NO: 37545892 NR Description: similar to hypothetical protein [Homo sapiens]
  misc_feature (1)..(283): Homolog of NCBI NO: 21410066 NR Description: DKFZP564O092 protein [Homo sapiens]
  misc_feature (1)..(283): Homolog of NCBI NO: 23272205 NR Description: 1500001L15Rik protein [Mus musculus]
  misc_feature (1)..(283): Homolog of NCBI NO: 20876056 NR Description: RIKEN cDNA 1500001L15 [Mus musculus] unnamed protein product [Mus musculus]
  misc_feature (1)..(283): Homolog of NCBI NO: 34874139 NR Description: similar to CG11030-PA [Rattus norvegicus]
  misc_feature (1)..(285): Homolog of NCBI NO: 40675680 NR Description: Unknown (protein for IMAGE:5336691) [Silurana

SEQ ID NO: 106492 - protein, 213 aa, Arabidopsis thaliana; identical to SEQ ID NO: 26574
  peptide (1)..(213): Ceres Seq. ID no. 13619703
  misc_feature (1)..(213): Homolog of NCBI NO: 18390818 NR Description: expressed protein [Arabidopsis thaliana] unknown protein [Arabidopsis thaliana]
  misc_feature (1)..(172): Homolog of NCBI NO: 25372823 NR Description: protein F24B9.6 [imported] - Arabidopsis thaliana
  misc_feature (1)..(23): Homolog of NCBI NO: 34906856 NR Description: P0470A12.5 [Oryza sativa (japonica
  misc_feature (1)..(210): Homolog of NCBI NO: 7512783 NR Description: hypothetical protein DKFZp564O092.1 - human
  misc_feature (1)..(210): Homolog of NCBI NO: 37545892 NR Description: similar to hypothetical protein [Homo sapiens]
  misc_feature (1)..(210): Homolog of NCBI NO: 21410066 NR Description: DKFZP564O092 protein [Homo sapiens]
  misc_feature (1)..(210): Homolog of NCBI NO: 23272205 NR Description: 1500001L15Rik protein [Mus musculus]
  misc_feature (1)..(210): Homolog of NCBI NO: 20876056 NR Description: RIKEN cDNA 1500001L15 [Mus musculus] unnamed protein product [Mus musculus]
  misc_feature (1)..(210): Homolog of NCBI NO: 34874139 NR Description: similar to CG11030-PA [Rattus norvegicus]
  misc_feature (1)..(212): Homolog of NCBI NO: 40675680 NR Description: Unknown (protein for IMAGE:5336691) [Silurana

SEQ ID NO: 106493 - DNA, 672 bp, Arabidopsis thaliana
  misc_feature (1)..(672): Ceres Seq. ID no. 13619704
  misc_feature: MA Experiment ID: 108434 Result: Up-regulated in Transcription
  misc_feature: MA Experiment 108434 PARAMETER Experiment Name: At_Root_Tips_cDNA_P Parameter: Tissue Value: Root Tips
  misc_feature: MA Experiment ID: 108462 Result: Down-regulated in Transcription
  misc_feature: MA Experiment 108462 PARAMETER Experiment Name: At_Germinating_Seeds_cDNA_P Parameter: Age (day) Value: 2 vs. 0
  misc_feature: MA Experiment 108462 PARAMETER Experiment Name: At_Germinating_Seeds_cDNA_P Parameter: Tissue Value: Germinating Seeds
  misc_feature: MA Experiment ID: 108463 Result: Down-regulated in Transcription
  misc_feature: MA Experiment 108463 PARAMETER Experiment Name: At_Germinating_Seeds_cDNA_P Parameter: Age (day) Value: 3 vs. 0
  misc_feature: MA Experiment 108463 PARAMETER Experiment Name: At_Germinating_Seeds_cDNA_P Parameter: Tissue Value: Germinating Seeds
  misc_feature: MA Experiment ID: 108464 Result: Down-regulated in Transcription
  misc_feature: MA Experiment 108464 PARAMETER Experiment Name: At_Germinating_Seeds_cDNA_P Parameter: Age (day) Value: 4 vs. 0
  misc_feature: MA Experiment 108464 PARAMETER Experiment Name: At_Germinating_Seeds_cDNA_P Parameter: Tissue Value: Germinating Seeds
  misc_feature: MA Experiment ID: 108488 Result: Up-regulated in Transcription
  misc_feature: MA Experiment ID: 20000794 Result: Down-regulated in Transcription
  misc_feature: MA Experiment 20000794 PARAMETER Experiment Name: At_Petals_P Parameter: Age (day) Value: 23-25 days
  misc_feature: MA Experiment 20000794 PARAMETER Experiment Name: At_Petals_P Parameter: Plant Line Value: WS
  misc_feature: MA Experiment 20000794 PARAMETER Experiment Name: At_Petals_P Parameter: Tissue Value: Petals vs. Whole plant
  misc_feature: MA Experiment ID: 20001558 Result: Up-regulated in Transcription
  misc_feature: MA Experiment 20001558 PARAMETER Experiment Name: At_Drought_Soil_Dry_P Parameter: Age (day) Value: 27
  misc_feature: MA Experiment 20001558 PARAMETER Experiment Name: At_Drought_Soil_Dry_P Parameter: Organism Value: A. thaliana
  misc_feature: MA Experiment 20001558 PARAMETER Experiment Name: At_Drought_Soil_Dry_P Parameter: Plant Line Value: WS
  misc_feature: MA Experiment 20001558 PARAMETER Experiment Name: At_Drought_Soil_Dry_P Parameter: Post Timepoint (hr) Value: 6
  misc_feature: MA Experiment 20001558 PARAMETER Experiment Name: At_Drought_Soil_Dry_P Parameter: Post-Treatment Value: Re-Water vs. No Drought
  misc_feature: MA Experiment 20001558 PARAMETER Experiment Name: At_Drought_Soil_Dry_P Parameter: Timepoint (day) Value: 13
  misc_feature: MA Experiment 20001558 PARAMETER Experiment Name: At_Drought_Soil_Dry_P Parameter: Treatment Value: Drought vs. No Drought
  misc_feature: MA Experiment ID: 20001560 Result: Up-regulated in Transcription
  misc_feature: MA Experiment 20001560 PARAMETER Experiment Name: At_Drought_Soil_Dry_P Parameter: Age (day) Value: 28
  misc_feature: MA Experiment 20001560 PARAMETER Experiment Name: At_Drought_Soil_Dry_P Parameter: Organism Value: A. thaliana
  misc_feature: MA Experiment 20001560 PARAMETER Experiment Name: At_Drought_Soil_Dry_P Parameter: Plant Line Value: WS
  misc_feature: MA Experiment 20001560 PARAMETER Experiment Name: At_Drought_Soil_Dry_P Parameter: Post Timepoint (hr) Value: None
  misc_feature: MA Experiment 20001560 PARAMETER Experiment Name: At_Drought_Soil_Dry_P Parameter: Post-Treatment Value: None
  misc_feature: MA Experiment 20001560 PARAMETER Experiment Name: At_Drought_Soil_Dry_P Parameter: Timepoint (day) Value: 14
  misc_feature: MA Experiment 20001560 PARAMETER Experiment Name: At_Drought_Soil_Dry_P Parameter: Treatment Value: Drought vs. No Drought
  misc_feature: MA Experiment ID: 20001757 Result: Up-regulated in Transcription
  misc_feature: MA Experiment 20001757 PARAMETER Experiment Name: At_50mM_NH4NO3_L-to-H_P Parameter: Timepoint (hr) Value: 6
  misc_feature: MA Experiment 20001757 PARAMETER Experiment Name: At_50mM_NH4NO3_L-to-H_P Parameter: Tissue Value: Leaf
  misc_feature: MA Experiment 20001757 PARAMETER Experiment Name: At_50mM_NH4NO3_L-to-H_P Parameter: Treatment Value: 50mM NH4NO3 vs 100mM Mannitol
  misc_feature: MA Experiment ID: 20001911 Result: Down-regulated in Transcription
  misc_feature: MA Experiment 20001911 PARAMETER Experiment Name: At_Drought_Reproduction_P Parameter: Age (day) Value: 40
  misc_feature: MA Experiment 20001911 PARAMETER Experiment Name: At_Drought_Reproduction_P Parameter: Organism Value: A. thaliana
  misc_feature: MA Experiment 20001911 PARAMETER Experiment Name: At_Drought_Reproduction_P Parameter: Plant Line Value: WS
  misc_feature: MA Experiment 20001911 PARAMETER Experiment Name: At_Drought_Reproduction_P Parameter: Timepoint (day) Value: 10
  misc_feature: MA Experiment 20001911 PARAMETER Experiment Name: At_Drought_Reproduction_P Parameter: Tissue Value: Flowers
  misc_feature: MA Experiment 20001911 PARAMETER Experiment Name: At_Drought_Reproduction_P Parameter: Treatment Value: Drought vs. No Drought
accttctcttcttcctctaattgcttttctccgtcactgagtaccttgcctctcgagctcccaatcttaagtagaggattgagcttaaggcaagatggtaagaatcagtgttcttaacgatgctctcaagagcatgtacaatgctgagaaacgaggcaagaggcaggtcatgatcaggccttcctccaaagtgattatcaagtttctgattgtcatgcagaagcacggttacattggtgagtttgagtatgtcgatgaccacagatctggcaagatcgtcgttgaattgaacggaaggttgaacaagtgtggtgttatcagcccacgttttgatgttggtgtcaaggaaattgaaggttggactgcccgtttgctcccttctagacagtttggttacatcgtgctgactacatctgctggcattatggaccatgaagaagctagaaggaagaatgttggaggcaaggttctcggcttcttctattgaagttttattttatggggaaacagattttcattgagttatttttaacttttgtcctccattttctctgaaactacctttctctttctttcgaattttgtgataactttgatggatagtgttctgaaatcactctttttggtttggagcccttttttagacttcggatgcactcgtaaaattattct

SEQ ID NO: 106494 - protein, 130 aa, Arabidopsis thaliana; identical to SEQ ID NO: 23618
  peptide (1)..(130): Ceres Seq. ID no. 13619705
  misc_feature (5)..(130): Pfam Name: Ribosomal protein S8 Pfam Description: Ribosomal protein S8
  misc_feature (1)..(130): Homolog of NCBI NO: 15223001 NR Description: 40S ribosomal protein S15A (RPS15aA) [Arabidopsis >gi|15238544|ref|NP_200793.1| 40S ribosomal protein S15A [Arabidopsis thaliana] >gi|1173218|sp|P42798|RS1A_ARATH 40S
  misc_feature (1)..(130): Homolog of NCBI NO: 133793 NR Description: 40S RIBOSOMAL PROTEIN S15A (PPCB8)
  misc_feature (1)..(130): Homolog of NCBI NO: 15231316 NR Description: 40S ribosomal protein S15A (RPS15aD) [Arabidopsis
  misc_feature (1)..(130): Homolog of NCBI NO: 6683481 NR Description: wrp15a [Citrullus lanatus]
  misc_feature (1)..(130): Homolog of NCBI NO: 13560779 NR Description: cytoplasmic ribosomal protein S15a [Daucus carota]
  misc_feature (1)..(130): Homolog of NCBI NO: 28411802 NR Description: ribosomal protein S15 [Oryza sativa (japonica
  misc_feature (1)..(130): Homolog of NCBI NO: 2130985 NR Description: r-protein BnS15a [Brassica napus]
  misc_feature (1)..(130): Homolog of NCBI NO: 15225502 NR Description: 40S ribosomal protein S15A (RPS15aC) [Arabidopsis
  misc_feature (1)..(130): Homolog of NCBI NO: 6322271 NR Description: Homology to rat S15a; Rps22ap [Saccharomyces >gi|133884|sp|P04648|RS22_YEAST 40S RIBOSOMAL PROTEIN S22 (S24)
  misc_feature (1)..(130): Homolog of NCBI NO: 6323399 NR Description: Homology to rat S15a; Rps22bp [Saccharomyces

SEQ ID NO: 106495 - protein, 117 aa, Arabidopsis thaliana; identical to SEQ ID NO: 23619
  peptide (1)..(117): Ceres Seq. ID no. 13619706
  misc_feature (1)..(117): Pfam Name: Ribosomal protein S8 Pfam Description: Ribosomal protein S8
  misc_feature (1)..(117): Homolog of NCBI NO: 15223001 NR Description: 40S ribosomal protein S15A (RPS15aA) [Arabidopsis >gi|15238544|ref|NP_200793.1| 40S ribosomal protein S15A [Arabidopsis thaliana] >gi|1173218|sp|P42798|RS1A_ARATH 40S
  misc_feature (1)..(117): Homolog of NCBI NO: 133793 NR Description: 40S RIBOSOMAL PROTEIN S15A (PPCB8)
  misc_feature (1)..(117): Homolog of NCBI NO: 15231316 NR Description: 40S ribosomal protein S15A (RPS15aD) [Arabidopsis
  misc_feature (1)..(117): Homolog of NCBI NO: 6683481 NR Description: wrp15a [Citrullus lanatus]
  misc_feature (1)..(117): Homolog of NCBI NO: 13560779 NR Description: cytoplasmic ribosomal protein S15a [Daucus carota]
  misc_feature (1)..(117): Homolog of NCBI NO: 28411802 NR Description: ribosomal protein S15 [Oryza sativa (japonica
  misc_feature (1)..(117): Homolog of NCBI NO: 2130985 NR Description: r-protein BnS15a [Brassica napus]
  misc_feature (1)..(117): Homolog of NCBI NO: 15225502 NR Description: 40S ribosomal protein S15A (RPS15aC) [Arabidopsis
  misc_feature (1)..(117): Homolog of NCBI NO: 6322271 NR Description: Homology to rat S15a; Rps22ap [Saccharomyces >gi|133884|sp|P04648|RS22_YEAST 40S RIBOSOMAL PROTEIN S22 (S24)
  misc_feature (1)..(117): Homolog of NCBI NO: 6323399 NR Description: Homology to rat S15a; Rps22bp [Saccharomyces

SEQ ID NO: 106496 - protein, 105 aa, Arabidopsis thaliana; identical to SEQ ID NO: 23620
  peptide (1)..(105): Ceres Seq. ID no. 13619707
  misc_feature (1)..(105): Pfam Name: Ribosomal protein S8 Pfam Description: Ribosomal protein S8
  misc_feature (1)..(105): Homolog of NCBI NO: 15223001 NR Description: 40S ribosomal protein S15A (RPS15aA) [Arabidopsis >gi|15238544|ref|NP_200793.1| 40S ribosomal protein S15A [Arabidopsis thaliana] >gi|1173218|sp|P42798|RS1A_ARATH 40S
  misc_feature (1)..(105): Homolog of NCBI NO: 133793 NR Description: 40S RIBOSOMAL PROTEIN S15A (PPCB8)
  misc_feature (1)..(105): Homolog of NCBI NO: 15231316 NR Description: 40S ribosomal protein S15A (RPS15aD) [Arabidopsis
  misc_feature (1)..(105): Homolog of NCBI NO: 6683481 NR Description: wrp15a [Citrullus lanatus]
  misc_feature (1)..(105): Homolog of NCBI NO: 13560779 NR Description: cytoplasmic ribosomal protein S15a [Daucus carota]
  misc_feature (1)..(105): Homolog of NCBI NO: 28411802 NR Description: ribosomal protein S15 [Oryza sativa (japonica
  misc_feature (1)..(105): Homolog of NCBI NO: 2130985 NR Description: r-protein BnS15a [Brassica napus]
  misc_feature (1)..(105): Homolog of NCBI NO: 15225502 NR Description: 40S ribosomal protein S15A (RPS15aC) [Arabidopsis
  misc_feature (1)..(105): Homolog of NCBI NO: 6322271 NR Description: Homology to rat S15a; Rps22ap [Saccharomyces >gi|133884|sp|P04648|RS22_YEAST 40S RIBOSOMAL PROTEIN S22 (S24)
  misc_feature (1)..(105): Homolog of NCBI NO: 6323399 NR Description: Homology to rat S15a; Rps22bp [Saccharomyces

SEQ ID NO: 106497 - DNA, 2719 bp, Arabidopsis thaliana
  misc_feature (1)..(2719): Ceres Seq. ID no. 13619708
  misc_feature: MA Experiment ID: 20000173 Result: Down-regulated in Transcription
  misc_feature: MA Experiment 20000173 PARAMETER Experiment Name: At_42deg_Heat_P Parameter: Age (day) Value: 14
  misc_feature: MA Experiment 20000173 PARAMETER Experiment Name: At_42deg_Heat_P Parameter: Organism Value: A. thaliana
  misc_feature: MA Experiment 20000173 PARAMETER Experiment Name: At_42deg_Heat_P Parameter: Plant Line Value: WS
  misc_feature: MA Experiment 20000173 PARAMETER Experiment Name: At_42deg_Heat_P Parameter: Temperature (deg C) Value: 42 vs. 22
  misc_feature: MA Experiment 20000173 PARAMETER Experiment Name: At_42deg_Heat_P Parameter: Timepoint (hr) Value: 6
  misc_feature: MA Experiment 20000173 PARAMETER Experiment Name: At_42deg_Heat_P Parameter: Tissue Value: Aerial
  misc_feature: MA Experiment ID: 20000227 Result: Up-regulated in Transcription
  misc_feature: MA Experiment 20000227 PARAMETER Experiment Name: At_Root-Tips-vs-Tops_P Parameter: Tissue Value: Root Tips vs. Root Tops
  misc_feature: MA Experiment ID: 20000234 Result: Up-regulated in Transcription
  misc_feature: MA Experiment 20000234 PARAMETER Experiment Name: At_Siliques_P Parameter: Age (day) Value: 21
  misc_feature: MA Experiment 20000234 PARAMETER Experiment Name: At_Siliques_P Parameter: Organism Value: A. thaliana
  misc_feature: MA Experiment 20000234 PARAMETER Experiment Name: At_Siliques_P Parameter: Plant Line Value: WS
  misc_feature: MA Experiment 20000234 PARAMETER Experiment Name: At_Siliques_P Parameter: Tissue Value: Less Than 5mm Siliques vs. Whole Plant
  misc_feature: MA Experiment ID: 20000235 Result: Up-regulated in Transcription
  misc_feature: MA Experiment 20000235 PARAMETER Experiment Name: At_Siliques_P Parameter: Age (day) Value: 21
  misc_feature: MA Experiment 20000235 PARAMETER Experiment Name: At_Siliques_P Parameter: Organism Value: A. thaliana
  misc_feature: MA Experiment 20000235 PARAMETER Experiment Name: At_Siliques_P Parameter: Plant Line Value: WS
  misc_feature: MA Experiment 20000235 PARAMETER Experiment Name: At_Siliques_P Parameter: Tissue Value: 5-10mm Siliques vs. Whole Plant
  misc_feature: MA Experiment ID: 20000264 Result: Up-regulated in Transcription
  misc_feature: MA Experiment 20000264 PARAMETER Experiment Name: At_Open_Flower_P Parameter: Age (day) Value: 21
  misc_feature: MA Experiment 20000264 PARAMETER Experiment Name: At_Open_Flower_P Parameter: Plant Line Value: WS
  misc_feature: MA Experiment 20000264 PARAMETER Experiment Name: At_Open_Flower_P Parameter: Tissue Value: Open Flower vs. Whole Plant
  misc_feature: MA Experiment ID: 20000286 Result: Up-regulated in Transcription
  misc_feature: MA Experiment 20000286 PARAMETER Experiment Name: At_Open_Flower_P Parameter: Age (day) Value: 21
  misc_feature: MA Experiment 20000286 PARAMETER Experiment Name: At_Open_Flower_P Parameter: Plant Line Value: WS
  misc_feature: MA Experiment 20000286 PARAMETER Experiment Name: At_Open_Flower_P Parameter: Tissue Value: Half Open vs. Whole Plant
  misc_feature: MA Experiment ID: 20000794 Result: Up-regulated in Transcription
  misc_feature: MA Experiment 20000794 PARAMETER Experiment Name: At_Petals_P Parameter: Age (day) Value: 23-25 days
  misc_feature: MA Experiment 20000794 PARAMETER Experiment Name: At_Petals_P Parameter: Plant Line Value: WS
  misc_feature: MA Experiment 20000794 PARAMETER Experiment Name: At_Petals_P Parameter: Tissue Value: Petals vs. Whole plant
  misc_feature: MA Experiment ID: 20001450 Result: Down-regulated in Transcription
  misc_feature: MA Experiment 20001450 PARAMETER Experiment Name: At_Far-red-induction_P Parameter: Age (day) Value: 7
  misc_feature: MA Experiment 20001450 PARAMETER Experiment Name: At_Far-red-induction_P Parameter: Light Value: Far-red vs. White
  misc_feature: MA Experiment 20001450 PARAMETER Experiment Name: At_Far-red-induction_P Parameter: Organism Value: A. thaliana
  misc_feature: MA Experiment 20001450 PARAMETER Experiment Name: At_Far-red-induction_P Parameter: Plant Line Value: Columbia
  misc_feature: MA Experiment 20001450 PARAMETER Experiment Name: At_Far-red-induction_P Parameter: Timepoint (hr) Value: 8
  misc_feature: MA Experiment 20001450 PARAMETER Experiment Name: At_Far-red-induction_P Parameter: Tissue Value: Whole Plant
  misc_feature: MA Experiment ID: 20001451 Result: Down-regulated in Transcription
  misc_feature: MA Experiment 20001451 PARAMETER Experiment Name: At_Far-red-induction_P Parameter: Age (day) Value: 7
  misc_feature: MA Experiment 20001451 PARAMETER Experiment Name: At_Far-red-induction_P Parameter: Light Value: Far-red vs. White
  misc_feature: MA Experiment 20001451 PARAMETER Experiment Name: At_Far-red-induction_P Parameter: Organism Value: A. thaliana
  misc_feature: MA Experiment 20001451 PARAMETER Experiment Name: At_Far-red-induction_P Parameter: Plant Line Value: Columbia
  misc_feature: MA Experiment 20001451 PARAMETER Experiment Name: At_Far-red-induction_P Parameter: Timepoint (hr) Value: 24
  misc_feature: MA Experiment 20001451 PARAMETER Experiment Name: At_Far-red-induction_P Parameter: Tissue Value: Whole Plant
gtcgagaaccgaatttggcccaacataaaggagagagtggcgggtgagaaattctgccgccaatatattatcacctttcttcaaggttgcaaacttgcaacacctgtcctttctaaaaccctaatttcaaaatcgactgatgttagcgattcgatcgtcgaattacctccgatgcataccttctctctgtactaaaacccaaatctctcaattctcctccgtgttaatctcttttagccgccaaatttcccacttgcgtcttagctcgtgccatagagccatgtcttcttcccgcccttctgcatttgatgctctcatgtccaatgctcgtgcagccgccaagaagaagactccccagacaactaatttgtctcgctcgccgaacaaaaggaaaattggagaaacccaagatgctaatttgggcaaaactattgtttccgaaggtacacttccaaaaacggaggatctgctggagcctgtttctgattctgcaaatcccagatcggatacatcgtcaattgcggaggattcaaagacgggagcgaaaaaggctaagactttgagcaagacagacgaaatgaagagcaaaattggattgctgaagaagaagccgaatgatttcgatcctgaaaaaatgtcttgctgggagaaaggggagagagttccgtttctgtttgtcgcattggcttttgatctgatctcaaatgaaagtggccggattgtgattactgatattctgtgtaacatgttgagaactgttattgccactactcctgaggatttggtcgctactgtttatctttcggcgaatgagattgccccggctcatgaaggtgtagaattgggaattggtgagagtacaattatcaaggctatctctgaggcttttggtagaactgaggatcatgttaagaagcagaatacggaactgggagacttgggacttgtagcaaaaggaagccgttcgactcagactatgatgttcaagcccgaaccattgactgttgtcaaggttttcgatacgtttcgacaaattgctaaggaaagtggaaaagatagtaatgaaaagaagaagaatcgaatgaaggcacttcttgtggcgacaacagactgtgaacctctttacttaacacgattacttcaggcaaaattgcggttagggttctcaggtcagactgtcttagccgcattgggacaagccgctgtatataatgaagagcactcaaagccacccccaaataccaagtctcctttagaagaggctgcaaagattgttaaacaagtattcactgtacttcctgtctatgacattattgttcctgctcttctaagtggcggtgtgtggaatcttccaaaaacttgtaactttacattgggtgttccaattggacccatgcttgcaaaaccaaccaaaggtgtagctgagatactgaataaattccaggacatcgttttcacatgtgaatacaaatatgatggggaacgtgcacagatacattttatggaggatggtacatttgagatatacagtcgaaatgctgaaagaaacactgggaagtacccggatgttgctcttgcgttatcaagattaaagaagccttctgtgaaatcttttattctggattgtgaagttgttgctttcgacagggagaaaaagaaaattcttccgttccagattttgagcactcgagcccgtaaaaatgtgaatgtcaatgatatcaaggttggcgtatgcatctttgcttttgacatgttatatctaaatggccaacaacttatccaggagaatcttaaaattcgccgagagaagctatacgaatcatttgaggaagatcctgggtatttccagtttgcaactgctgtaacatctaacgatatcgatgaaatacaaaagtttcttgacgcttctgttgatgttggctgcgaaggtttaatcattaaaacattggactcagatgctacctatgagcctgcaaagcgatcaaataattggctaaaactgaagaaagactatatggacagcattggggactctgtggatcttgtaccaattgctgctttccatggacgtggaaaacgcacaggtgtctatggtgcatttttactcgcttgctatgatgttgataaggaagagttccagagcatttgtaaaattggtactggattttctgatgccatgcttgacgagcggtcgtccagtcttcgctctcaagtgattgctactccaaaacaatactaccgagttggagacagcctcaatccagatgtttggtttgagcccactgaggtctgggaagtgaaagcagctgacttaacaattagccctgtgcaccgtgcagctactggcatagtggatcctgataaggggatttctcttcgttttcctcgtctacttcgtgtacgggaagacaagaagcccgaggaagcaacatcatctgagcagattgctgatttgtaccaagctcagaaacacaatcatccaagtaatgaagtcaaaggtgacgatgattgaacaacagtaatctggcctcagagcacatttcctcgtatgtacgacattgctcgtaacttgctaatgatgcacattgcgtgtttgagttttcaactgtaactgcttatgtaaaactgcttttaggaaaagtgaatgaaaggttctggaaaaaaattggtacactcatcaactgactctggaatgaataaaaacactgccctgattgac

SEQ ID NO: 106498 - protein, 790 aa, Arabidopsis thaliana
  peptide (1)..(790): Ceres Seq. ID no. 13619709
  misc_feature (415)..(622): Pfam Name: ATP dependent DNA ligase domain Pfam Description: ATP dependent DNA ligase domain
  misc_feature (190)..(790): Homolog of NCBI NO: 15222077 NR Description: hypothetical protein [Arabidopsis thaliana]
  misc_feature (40)..(790): Homolog of NCBI NO: 37535574 NR Description: putative DNA ligase [Oryza sativa (japonica >gi|16905197|gb|AAL31067.1| putative DNA ligase [Oryza sativa]
  misc_feature (132)..(790): Homolog of NCBI NO: 28830036 NR Description: similar to Xenopus laevis (African clawed frog). ligase I (EC 6.5.1.1) (Polydeoxyribonucleotide synthase [ATP])
  misc_feature (112)..(790): Homolog of NCBI NO: 1706480 NR Description: DNA LIGASE I (POLYDEOXYRIBONUCLEOTIDE SYNTHASE
  misc_feature (78)..(788): Homolog of NCBI NO: 20271416 NR Description: ligase I, DNA, ATP-dependent [Mus musculus]
  misc_feature (78)..(788): Homolog of NCBI NO: 6754544 NR Description: ligase I, DNA, ATP-dependent [Mus musculus]
  misc_feature (159)..(789): Homolog of NCBI NO: 4557719 NR Description: DNA ligase I [Homo sapiens] DNA ligase I (Polydeoxyribonucleotide synthase [ATP])
  misc_feature (61)..(790): Homolog of NCBI NO: 31239171 NR Description: ENSANGP00000010547 [Anopheles gambiae]
  misc_feature (78)..(788): Homolog of NCBI NO: 13540673 NR Description: DNA ligase I [Rattus norvegicus] DNA ligase I (Polydeoxyribonucleotide synthase [ATP])
  misc_feature (58)..(790): Homolog of NCBI NO: 30962491 NR Description: DNA ligase I [Coprinopsis cinerea]
MLAIRSSNYLRCIPSLCTKTQISQFSSVLISFSRQISHLRLSSCHRAMSSSRPSAFDALMSNARAAAKKKTPQTTNLSRSPNKRKIGETQDANLGKTIVSEGTLPKTEDLLEPVSDSANPRSDTSSIAEDSKTGAKKAKTLSKTDEMKSKIGLLKKKPNDFDPEKMSCWEKGERVPFLFVALAFDLISNESGRIVITDILCNMLRTVIATTPEDLVATVYLSANEIAPAHEGVELGIGESTIIKAISEAFGRTEDHVKKQNTELGDLGLVAKGSRSTQTMMFKPEPLTVVKVFDTFRQIAKESGKDSNEKKKNRMKALLVATTDCEPLYLTRLLQAKLRLGFSGQTVLAALGQAAVYNEEHSKPPPNTKSPLEEAAKIVKQVFTVLPVYDIIVPALLSGGVWNLPKTCNFTLGVPIGPMLAKPTKGVAEILNKFQDIVFTCEYKYDGERAQIHFMEDGTFEIYSRNAERNTGKYPDVALALSRLKKPSVKSFILDCEVVAFDREKKKILPFQILSTRARKNVNVNDIKVGVCIFAFDMLYLNGQQLIQENLKIRREKLYESFEEDPGYFQFATAVTSNDIDEIQKFLDASVDVGCEGLIIKTLDSDATYEPAKRSNNWLKLKKDYMDSIGDSVDLVPIAAFHGRGKRTGVYGAFLLACYDVDKEEFQSICKIGTGFSDAMLDERSSSLRSQVIATPKQYYRVGDSLNPDVWFEPTEVWEVKAADLTISPVHRAATGIVDPDKGISLRFPRLLRVREDKKPEEATSSEQIADLYQAQKHNHPSNEVKGDDD

SEQ ID NO: 106499 - protein, 743 aa, Arabidopsis thaliana
  peptide (1)..(743): Ceres Seq. ID no. 13619710
  misc_feature (368)..(575): Pfam Name: ATP dependent DNA ligase domain Pfam Description: ATP dependent DNA ligase domain
  misc_feature (143)..(743): Homolog of NCBI NO: 15222077 NR Description: hypothetical protein [Arabidopsis thaliana]
  misc_feature (1)..(743): Homolog of NCBI NO: 37535574 NR Description: putative DNA ligase [Oryza sativa (japonica >gi|16905197|gb|AAL31067.1| putative DNA ligase [Oryza sativa]
  misc_feature (85)..(743): Homolog of NCBI NO: 28830036 NR Description: similar to Xenopus laevis (African clawed frog). ligase I (EC 6.5.1.1) (Polydeoxyribonucleotide synthase [ATP])
  misc_feature (65)..(743): Homolog of NCBI NO: 1706480 NR Description: DNA LIGASE I (POLYDEOXYRIBONUCLEOTIDE SYNTHASE
  misc_feature (31)..(741): Homolog of NCBI NO: 20271416 NR Description: ligase I, DNA, ATP-dependent [Mus musculus]
  misc_feature (31)..(741): Homolog of NCBI NO: 6754544 NR Description: ligase I, DNA, ATP-dependent [Mus musculus]
  misc_feature (112)..(742): Homolog of NCBI NO: 4557719 NR Description: DNA ligase I [Homo sapiens] DNA ligase I (Polydeoxyribonucleotide synthase [ATP])
  misc_feature (14)..(743): Homolog of NCBI NO: 31239171 NR Description: ENSANGP00000010547 [Anopheles gambiae]
  misc_feature (31)..(741): Homolog of NCBI NO: 13540673 NR Description: DNA ligase I [Rattus norvegicus] DNA ligase I (Polydeoxyribonucleotide synthase [ATP])
  misc_feature (11)..(743): Homolog of NCBI NO: 30962491 NR Description: DNA ligase I [Coprinopsis cinerea]
MSSSRPSAFDALMSNARAAAKKKTPQTTNLSRSPNKRKIGETQDANLGKTIVSEGTLPKTEDLLEPVSDSANPRSDTSSIAEDSKTGAKKAKTLSKTDEMKSKIGLLKKKPNDFDPEKMSCWEKGERVPFLFVALAFDLISNESGRIVITDILCNMLRTVIATTPEDLVATVYLSANEIAPAHEGVELGIGESTIIKAISEAFGRTEDHVKKQNTELGDLGLVAKGSRSTQTMMFKPEPLTVVKVFDTFRQIAKESGKDSNEKKKNRMKALLVATTDCEPLYLTRLLQAKLRLGFSGQTVLAALGQAAVYNEEHSKPPPNTKSPLEEAAKIVKQVFTVLPVYDIIVPALLSGGVWNLPKTCNFTLGVPIGPMLAKPTKGVAEILNKFQDIVFTCEYKYDGERAQIHFMEDGTFEIYSRNAERNTGKYPDVALALSRLKKPSVKSFILDCEVVAFDREKKKILPFQILSTRARKNVNVNDIKVGVCIFAFDMLYLNGQQLIQENLKIRREKLYESFEEDPGYFQFATAVTSNDIDEIQKFLDASVDVGCEGLIIKTLDSDATYEPAKRSNNWLKLKKDYMDSIGDSVDLVPIAAFHGRGKRTGVYGAFLLACYDVDKEEFQSICKIGTGFSDAMLDERSSSLRSQVIATPKQYYRVGDSLNPDVWFEPTEVWEVKAADLTISPVHRAATGIVDPDKGISLRFPRLLRVREDKKPEEATSSEQIADLYQAQKHNHPSNEVKGDDD

SEQ ID NO: 106500 - protein, 731 aa, Arabidopsis thaliana
  peptide (1)..(731): Ceres Seq. ID no. 13619711
  misc_feature (356)..(563): Pfam Name: ATP dependent DNA ligase domain Pfam Description: ATP dependent DNA ligase domain
  misc_feature (131)..(731): Homolog of NCBI NO: 15222077 NR Description: hypothetical protein [Arabidopsis thaliana]
  misc_feature (1)..(731): Homolog of NCBI NO: 37535574 NR Description: putative DNA ligase [Oryza sativa (japonica >gi|16905197|gb|AAL31067.1| putative DNA ligase [Oryza sativa]
  misc_feature (73)..(731): Homolog of NCBI NO: 28830036 NR Description: similar to Xenopus laevis (African clawed frog). ligase I (EC 6.5.1.1) (Polydeoxyribonucleotide synthase [ATP])
  misc_feature (53)..(731): Homolog of NCBI NO: 1706480 NR Description: DNA LIGASE I (POLYDEOXYRIBONUCLEOTIDE SYNTHASE
  misc_feature (19)..(729): Homolog of NCBI NO: 20271416 NR Description: ligase I, DNA, ATP-dependent [Mus musculus]
  misc_feature (19)..(729): Homolog of NCBI NO: 6754544 NR Description: ligase I, DNA, ATP-dependent [Mus musculus]
  misc_feature (100)..(730): Homolog of NCBI NO: 4557719 NR Description: DNA ligase I [Homo sapiens] DNA ligase I (Polydeoxyribonucleotide synthase [ATP])
  misc_feature (2)..(731): Homolog of NCBI NO: 31239171 NR Description: ENSANGP00000010547 [Anopheles gambiae]
  misc_feature (19)..(729): Homolog of NCBI NO: 13540673 NR Description: DNA ligase I [Rattus norvegicus] DNA ligase I (Polydeoxyribonucleotide synthase [ATP])
  misc_feature (1)..(731): Homolog of NCBI NO: 30962491 NR Description: DNA ligase I [Coprinopsis cinerea]
MSNARAAAKKKTPQTTNLSRSPNKRKIGETQDANLGKTIVSEGTLPKTEDLLEPVSDSANPRSDTSSIAEDSKTGAKKAKTLSKTDEMKSKIGLLKKKPNDFDPEKMSCWEKGERVPFLFVALAFDLISNESGRIVITDILCNMLRTVIATTPEDLVATVYLSANEIAPAHEGVELGIGESTIIKAISEAFGRTEDHVKKQNTELGDLGLVAKGSRSTQTMMFKPEPLTVVKVFDTFRQIAKESGKDSNEKKKNRMKALLVATTDCEPLYLTRLLQAKLRLGFSGQTVLAALGQAAVYNEEHSKPPPNTKSPLEEAAKIVKQVFTVLPVYDIIVPALLSGGVWNLPKTCNFTLGVPIGPMLAKPTKGVAEILNKFQDIVFTCEYKYDGERAQIHFMEDGTFEIYSRNAERNTGKYPDVALALSRLKKPSVKSFILDCEVVAFDREKKKILPFQILSTRARKNVNVNDIKVGVCIFAFDMLYLNGQQLIQENLKIRREKLYESFEEDPGYFQFATAVTSNDIDEIQKFLDASVDVGCEGLIIKTLDSDATYEPAKRSNNWLKLKKDYMDSIGDSVDLVPIAAFHGRGKRTGVYGAFLLACYDVDKEEFQSICKIGTGFSDAMLDERSSSLRSQVIATPKQYYRVGDSLNPDVWFEPTEVWEVKAADLTISPVHRAATGIVDPDKGISLRFPRLLRVREDKKPEEATSSEQIADLYQAQKHNHPSNEVKGDDD

SEQ ID NO: 106501 - DNA, 1313 bp, Arabidopsis thaliana
  misc_feature (1)..(1313): Ceres Seq. ID no. 13619728
  misc_feature: MA Experiment ID: 108434 Result: Down-regulated in Transcription
  misc_feature: MA Experiment 108434 PARAMETER Experiment Name: At_Root_Tips_cDNA_P Parameter: Tissue Value: Root Tips
  misc_feature: MA Experiment ID: 108462 Result: Up-regulated in Transcription
  misc_feature: MA Experiment 108462 PARAMETER Experiment Name: At_Germinating_Seeds_cDNA_P Parameter: Age (day) Value: 2 vs. 0
  misc_feature: MA Experiment 108462 PARAMETER Experiment Name: At_Germinating_Seeds_cDNA_P Parameter: Tissue Value: Germinating Seeds
  misc_feature: MA Experiment ID: 108463 Result: Up-regulated in Transcription
  misc_feature: MA Experiment 108463 PARAMETER Experiment Name: At_Germinating_Seeds_cDNA_P Parameter: Age (day) Value: 3 vs. 0
  misc_feature: MA Experiment 108463 PARAMETER Experiment Name: At_Germinating_Seeds_cDNA_P Parameter: Tissue Value: Germinating Seeds
  misc_feature: MA Experiment ID: 108464 Result: Up-regulated in Transcription
  misc_feature: MA Experiment 108464 PARAMETER Experiment Name: At_Germinating_Seeds_cDNA_P Parameter: Age (day) Value: 4 vs. 0
  misc_feature: MA Experiment 108464 PARAMETER Experiment Name: At_Germinating_Seeds_cDNA_P Parameter: Tissue Value: Germinating Seeds
  misc_feature: MA Experiment ID: 108469 Result: Up-regulated in Transcription
  misc_feature: MA Experiment ID: 108473 Result: Down-regulated in Transcription
  misc_feature: MA Experiment 108473 PARAMETER Experiment Name: At_Drought_Flowers_cDNA_P Parameter: Timepoint (hr) Value: 7 d
  misc_feature: MA Experiment 108473 PARAMETER Experiment Name: At_Drought_Flowers_cDNA_P Parameter: Tissue Value: Flower
  misc_feature: MA Experiment 108473 PARAMETER Experiment Name: At_Drought_Flowers_cDNA_P Parameter: Treatment Value: Drought vs. No Drought
  misc_feature: MA Experiment ID: 108489 Result: Down-regulated in Transcription
  misc_feature: MA Experiment ID: 108572 Result: Down-regulated in Transcription
  misc_feature: MA Experiment 108572 PARAMETER Experiment Name: At_Drought_cDNA_P Parameter: Timepoint (hr) Value: 1
  misc_feature: MA Experiment 108572 PARAMETER Experiment Name: At_Drought_cDNA_P Parameter: Tissue Value: Aerial
  misc_feature: MA Experiment 108572 PARAMETER Experiment Name: At_Drought_cDNA_P Parameter: Treatment Value: Drought vs. No Drought
  misc_feature: MA Experiment ID: 108573 Result: Down-regulated in Transcription
  misc_feature: MA Experiment 108573 PARAMETER Experiment Name: At_Drought_cDNA_P Parameter: Timepoint (hr) Value: 6
  misc_feature: MA Experiment 108573 PARAMETER Experiment Name: At_Drought_cDNA_P Parameter: Tissue Value: Aerial
  misc_feature: MA Experiment 108573 PARAMETER Experiment Name: At_Drought_cDNA_P Parameter: Treatment Value: Drought vs. No Drought
  misc_feature: MA Experiment ID: 108574 Result: Up-regulated in Transcription
  misc_feature: MA Experiment 108574 PARAMETER Experiment Name: At_Wounding__cDNA_P Parameter: Timepoint (hr) Value: 1
  misc_feature: MA Experiment 108574 PARAMETER Experiment Name: At_Wounding__cDNA_P Parameter: Tissue Value: Aerial
  misc_feature: MA Experiment 108574 PARAMETER Experiment Name: At_Wounding__cDNA_P Parameter: Treatment Value: Wounding vs. No Wounding
  misc_feature: MA Experiment ID: 108579 Result: Up-regulated in Transcription
  misc_feature: MA Experiment 108579 PARAMETER Experiment Name: At_4deg_Cold_cDNA_P Parameter: Temperature (deg C) Value: 4 vs. 22
  misc_feature: MA Experiment 108579 PARAMETER Experiment Name: At_4deg_Cold_cDNA_P Parameter: Timepoint (hr) Value: 6
  misc_feature: MA Experiment 108579 PARAMETER Experiment Name: At_4deg_Cold_cDNA_P Parameter: Tissue Value: Aerial
  misc_feature: MA Experiment ID: 108585 Result: Up-regulated in Transcription
  misc_feature: MA Experiment 108585 PARAMETER Experiment Name: At_5mM_NaNP_cDNA_P Parameter: Timepoint (hr) Value: 6
  misc_feature: MA Experiment 108585 PARAMETER Experiment Name: At_5mM_NaNP_cDNA_P Parameter: Tissue Value: Aerial
  misc_feature: MA Experiment 108585 PARAMETER Experiment Name: At_5mM_NaNP_cDNA_P Parameter: Treatment Value: null
  misc_feature: MA Experiment ID: 108594 Result: Down-regulated in Transcription
  misc_feature: MA Experiment 108594 PARAMETER Experiment Name: At_Ler-rhl_Root_cDNA_P Parameter: Plant Line Value: null
  misc_feature: MA Experiment ID: 108595 Result: Up-regulated in Transcription
  misc_feature: MA Experiment 108595 PARAMETER Experiment Name: At_Ler-pi_Ovule_cDNA_P Parameter: Plant Line Value: null
  misc_feature: MA Experiment ID: 108608 Result: Down-regulated in Transcription
  misc_feature: MA Experiment 108608 PARAMETER Experiment Name: At_100uM_ABA_cDNA_P Parameter: Timepoint (hr) Value: 1
  misc_feature: MA Experiment 108608 PARAMETER Experiment Name: At_100uM_ABA_cDNA_P Parameter: Tissue Value: Aerial
  misc_feature: MA Experiment 108608 PARAMETER Experiment Name: At_100uM_ABA_cDNA_P Parameter: Treatment Value: 100uM ABA vs. No Treatment
  misc_feature: MA Experiment ID: 108667 Result: Up-regulated in Transcription
  misc_feature: MA Experiment 108667 PARAMETER Experiment Name: At_2mM_SA_cDNA_P Parameter: Plant Line Value: WS
  misc_feature: MA Experiment 108667 PARAMETER Experiment Name: At_2mM_SA_cDNA_P Parameter: Timepoint (hr) Value: 1
  misc_feature: MA Experiment 108667 PARAMETER Experiment Name: At_2mM_SA_cDNA_P Parameter: Treatment Value: 2mM SA vs. No Treatment
  misc_feature: MA Experiment ID: 108668 Result: Up-regulated in Transcription
  misc_feature: MA Experiment 108668 PARAMETER Experiment Name: At_2mM_SA_cDNA_P Parameter: Plant Line Value: WS
  misc_feature: MA Experiment 108668 PARAMETER Experiment Name: At_2mM_SA_cDNA_P Parameter: Timepoint (hr) Value: 6
  misc_feature: MA Experiment 108668 PARAMETER Experiment Name: At_2mM_SA_cDNA_P Parameter: Treatment Value: 2mM SA vs. No Treatment
  misc_feature: MA Experiment ID: 20000089 Result: Up-regulated in Transcription
  misc_feature: MA Experiment ID: 20000173 Result: Down-regulated in Transcription
  misc_feature: MA Experiment 20000173 PARAMETER Experiment Name: At_42deg_Heat_P Parameter: Age (day) Value: 14
  misc_feature: MA Experiment 20000173 PARAMETER Experiment Name: At_42deg_Heat_P Parameter: Organism Value: A. thaliana
  misc_feature: MA Experiment 20000173 PARAMETER Experiment Name: At_42deg_Heat_P Parameter: Plant Line Value: WS
  misc_feature: MA Experiment 20000173 PARAMETER Experiment Name: At_42deg_Heat_P Parameter: Temperature (deg C) Value: 42 vs. 22
  misc_feature: MA Experiment 20000173 PARAMETER Experiment Name: At_42deg_Heat_P Parameter: Timepoint (hr) Value: 6
  misc_feature: MA Experiment 20000173 PARAMETER Experiment Name: At_42deg_Heat_P Parameter: Tissue Value: Aerial
  misc_feature: MA Experiment ID: 20000182 Result: Up-regulated in Transcription
  misc_feature: MA Experiment 20000182 PARAMETER Experiment Name: At_2mM_SA_P Parameter: Age (day) Value: 14
  misc_feature: MA Experiment 20000182 PARAMETER Experiment Name: At_2mM_SA_P Parameter: Organism Value: A. thaliana
  misc_feature: MA Experiment 20000182 PARAMETER Experiment Name: At_2mM_SA_P Parameter: Plant Line Value: WS
  misc_feature: MA Experiment 20000182 PARAMETER Experiment Name: At_2mM_SA_P Parameter: Timepoint (hr) Value: 6
  misc_feature: MA Experiment 20000182 PARAMETER Experiment Name: At_2mM_SA_P Parameter: Tissue Value: Aerial
  misc_feature: MA Experiment 20000182 PARAMETER Experiment Name: At_2mM_SA_P Parameter: Treatment Value: 2mM SA vs. No Treatment
  misc_feature: MA Experiment ID: 20000185 Result: Up-regulated in Transcription
  misc_feature: MA Experiment 20000185 PARAMETER Experiment Name: At_Roots__P Parameter: Age (day) Value: 7 vs. 21
  misc_feature: MA Experiment 20000185 PARAMETER Experiment Name: At_Roots__P Parameter: Organism Value: A. thaliana
  misc_feature: MA Experiment 20000185 PARAMETER Experiment Name: At_Roots__P Parameter: Tissue Value: Roots vs. Whole Plant
  misc_feature: MA Experiment ID: 20000456 Result: Up-regulated in Transcription
  misc_feature: MA Experiment 20000456 PARAMETER Experiment Name: At_100uM_BA_P Parameter: Age (day) Value: 14
  misc_feature: MA Experiment 20000456 PARAMETER Experiment Name: At_100uM_BA_P Parameter: Organism Value: A. thaliana
  misc_feature: MA Experiment 20000456 PARAMETER Experiment Name: At_100uM_BA_P Parameter: Plant Line Value: WS
  misc_feature: MA Experiment 20000456 PARAMETER Experiment Name: At_100uM_BA_P Parameter: Timepoint (hr) Value: 6
  misc_feature: MA Experiment 20000456 PARAMETER Experiment Name: At_100uM_BA_P Parameter: Tissue Value: Aerial
  misc_feature: MA Experiment 20000456 PARAMETER Experiment Name: At_100uM_BA_P Parameter: Treatment Value: 100uM BA vs. No Treatment
  misc_feature: MA Experiment ID: 20000527 Result: Down-regulated in Transcription
  misc_feature: MA Experiment 20000527 PARAMETER Experiment Name: At_10percent_PEG_P Parameter: Age (day) Value: 20
  misc_feature: MA Experiment 20000527 PARAMETER Experiment Name: At_10percent_PEG_P Parameter: Organism Value: A. thaliana
  misc_feature: MA Experiment 20000527 PARAMETER Experiment Name: At_10percent_PEG_P Parameter: Plant Line Value: WS
  misc_feature: MA Experiment 20000527 PARAMETER Experiment Name: At_10percent_PEG_P Parameter: Timepoint (day) Value: 20
  misc_feature: MA Experiment 20000527 PARAMETER Experiment Name: At_10percent_PEG_P Parameter: Tissue Value: Whole Plant
  misc_feature: MA Experiment 20000527 PARAMETER Experiment Name: At_10percent_PEG_P Parameter: Treatment Value: 10percent PEG vs. No Treatment
  misc_feature: MA Experiment ID: 20000709 Result: Up-regulated in Transcription
  misc_feature: MA Experiment 20000709 PARAMETER Experiment Name: At_15mM_NH4NO3_L-to-H_P Parameter: Age (hr) Value: 14
  misc_feature: MA Experiment 20000709 PARAMETER Experiment Name: At_15mM_NH4NO3_L-to-H_P Parameter: Organism Value: A. thaliana
  misc_feature: MA Experiment 20000709 PARAMETER Experiment Name: At_15mM_NH4NO3_L-to-H_P Parameter: Plant Line Value: WS
  misc_feature: MA Experiment 20000709 PARAMETER Experiment Name: At_15mM_NH4NO3_L-to-H_P Parameter: Timepoint (hr) Value: 4
  misc_feature: MA Experiment 20000709 PARAMETER Experiment Name: At_15mM_NH4NO3_L-to-H_P Parameter: Tissue Value: Aerial
  misc_feature: MA Experiment 20000709 PARAMETER Experiment Name: At_15mM_NH4NO3_L-to-H_P Parameter: Treatment Value: 15mM NH4NO3 vs. 30mM Mannitol
  misc_feature: MA Experiment ID: 20001450 Result: Down-regulated in Transcription
  misc_feature: MA Experiment 20001450 PARAMETER Experiment Name: At_Far-red-induction_P Parameter: Age (day) Value: 7
  misc_feature: MA Experiment 20001450 PARAMETER Experiment Name: At_Far-red-induction_P Parameter: Light Value: Far-red vs. White
  misc_feature: MA Experiment 20001450 PARAMETER Experiment Name: At_Far-red-induction_P Parameter: Organism Value: A. thaliana
  misc_feature: MA Experiment 20001450 PARAMETER Experiment Name: At_Far-red-induction_P Parameter: Plant Line Value: Columbia
  misc_feature: MA Experiment 20001450 PARAMETER Experiment Name: At_Far-red-induction_P Parameter: Timepoint (hr) Value: 8
  misc_feature: MA Experiment 20001450 PARAMETER Experiment Name: At_Far-red-induction_P Parameter: Tissue Value: Whole Plant
  misc_feature: MA Experiment ID: 20001451 Result: Down-regulated in Transcription
  misc_feature: MA Experiment 20001451 PARAMETER Experiment Name: At_Far-red-induction_P Parameter: Age (day) Value: 7
  misc_feature: MA Experiment 20001451 PARAMETER Experiment Name: At_Far-red-induction_P Parameter: Light Value: Far-red vs. White
  misc_feature: MA Experiment 20001451 PARAMETER Experiment Name: At_Far-red-induction_P Parameter: Organism Value: A. thaliana
  misc_feature: MA Experiment 20001451 PARAMETER Experiment Name: At_Far-red-induction_P Parameter: Plant Line Value: Columbia
  misc_feature: MA Experiment 20001451 PARAMETER Experiment Name: At_Far-red-induction_P Parameter: Timepoint (hr) Value: 24
  misc_feature: MA Experiment 20001451 PARAMETER Experiment Name: At_Far-red-induction_P Parameter: Tissue Value: Whole Plant
aatcttgaaaagtgtttttgagagaaatataggttttacaaaatccaccgttgtgaattcatggaaatggtaaacgcagaagcaaaacagagtgtccctcttctcaccccttataagatgggaagattcaatctttctcatagggttgttctagcaccattgacgagacagaaatcgtacggaagcgttcctcagcctcacgctatcttgtattactctcagagaacgtcaccgggaggttttctcatcgctgaagccaccggggtttcagatacagctcaagggtatccagatacacctgggatatggactaaagagcatgtggaggcatggaagccaatcgttgatgctgtacatgccaaaggtggtatcttcttctgtcagatctggcatgttggccgcgtttctaatcgcggttttcagccaaggaggcaagctcctatctcttgtacggggaagccaattatgcctcaaatgcgtgctaatggcattgatgaagctcgctttacccctccaagacgtctaagtatcgaagaaatccccggcattgtcaatgattttaggcttgctgcaagaaatgctatggaagctggttttgatggagttgagattcatggagctcatggctatctgattgatcagttcatgaaggacaaagtgaatgacagaactgatgaatatggtggatcattgcaaaaccgttgcaaatttgctctggaagtagtcgatgcagtggctaaggagatcgggccagaccgtgttggaatcaggctctctccgtttgcagactatatggaatccggagacactaatccagaagcattagggctgtacatggtggaatctctgaacaaatatggaatcctctactgtcatatgattgaacccagaatgaaaacagtgggagaaatagcagcgtgttctcacacactaatgccaatgagggaagcctttaaggggactttcatctctgcaggaggtttcacgagggaagatgggaatgaggccgtggcaaagggacgaactgatcttgtggcttatggtcgatggtttctagccaacccagacctgccaaagcggttccaactggatgcaccgctgaataaatacaataggtcaacgttttacacttctgatcctgtcgtgggttacaccgattacccttcccttgaatcaacagcttaaaatcgtgttatcagtaatgtaatgtgtttccctaatgatgtaataagtttctggcttttgtttatactctaagtcattataccttcataataatttacatggatacattatcacaaaagagcttttat

SEQ ID NO: 106502 - protein, 374 aa, Arabidopsis thaliana
  peptide (1)..(374): Ceres Seq. ID no. 13619729
  misc_feature (13)..(348): Pfam Name: NADH:flavin oxidoreductase / NADH oxidase family Pfam Description: NADH:flavin oxidoreductase / NADH oxidase family
  misc_feature (1)..(374): Homolog of NCBI NO: 15223140 NR Description: 12-oxophytodienoate reductase (OPR2) [Arabidopsis
  misc_feature (1)..(374): Homolog of NCBI NO: 26450549 NR Description: putative 12-oxophytodienoate reductase OPR2
  misc_feature (3)..(374): Homolog of NCBI NO: 15223138 NR Description: 12-oxophytodienoate reductase (OPR1) [Arabidopsis
  misc_feature (3)..(374): Homolog of NCBI NO: 21593388 NR Description: 12-oxophytodienoate reductase (OPR1) [Arabidopsis
  misc_feature (3)..(374): Homolog of NCBI NO: 2765083 NR Description: 12-oxophytodienoate reductase [Arabidopsis
  misc_feature (13)..(373): Homolog of NCBI NO: 7449901 NR Description: probable 12-oxophytodienoate reductase (EC
  misc_feature (1)..(372): Homolog of NCBI NO: 4894182 NR Description: 12-oxophytodienoate reductase [Lycopersicon
  misc_feature (1)..(372): Homolog of NCBI NO: 14277800 NR Description: Chain A, Crystal Structure Of 12-Oxophytodienoate
  misc_feature (6)..(374): Homolog of NCBI NO: 7449902 NR Description: probable 12-oxophytodienoate reductase (EC
  misc_feature (4)..(370): Homolog of NCBI NO: 13516922 NR Description: 12-oxophytodienoic acid 10, 11-reductase [Pisum
MEMVNAEAKQSVPLLTPYKMGRFNLSHRVVLAPLTRQKSYGSVPQPHAILYYSQRTSPGGFLIAEATGVSDTAQGYPDTPGIWTKEHVEAWKPIVDAVHAKGGIFFCQIWHVGRVSNRGFQPRRQAPISCTGKPIMPQMRANGIDEARFTPPRRLSIEEIPGIVNDFRLAARNAMEAGFDGVEIHGAHGYLIDQFMKDKVNDRTDEYGGSLQNRCKFALEVVDAVAKEIGPDRVGIRLSPFADYMESGDTNPEALGLYMVESLNKYGILYCHMIEPRMKTVGEIAACSHTLMPMREAFKGTFISAGGFTREDGNEAVAKGRTDLVAYGRWFLANPDLPKRFQLDAPLNKYNRSTFYTSDPVVGYTDYPSLESTA

SEQ ID NO: 106503 - protein, 372 aa, Arabidopsis thaliana
  peptide (1)..(372): Ceres Seq. ID no. 13619730
  misc_feature (11)..(346): Pfam Name: NADH:flavin oxidoreductase / NADH oxidase family Pfam Description: NADH:flavin oxidoreductase / NADH oxidase family
  misc_feature (1)..(372): Homolog of NCBI NO: 15223140 NR Description: 12-oxophytodienoate reductase (OPR2) [Arabidopsis
  misc_feature (1)..(372): Homolog of NCBI NO: 26450549 NR Description: putative 12-oxophytodienoate reductase OPR2
  misc_feature (1)..(372): Homolog of NCBI NO: 15223138 NR Description: 12-oxophytodienoate reductase (OPR1) [Arabidopsis
  misc_feature (1)..(372): Homolog of NCBI NO: 21593388 NR Description: 12-oxophytodienoate reductase (OPR1) [Arabidopsis
  misc_feature (1)..(372): Homolog of NCBI NO: 2765083 NR Description: 12-oxophytodienoate reductase [Arabidopsis
  misc_feature (11)..(371): Homolog of NCBI NO: 7449901 NR Description: probable 12-oxophytodienoate reductase (EC
  misc_feature (1)..(370): Homolog of NCBI NO: 4894182 NR Description: 12-oxophytodienoate reductase [Lycopersicon
  misc_feature (1)..(370): Homolog of NCBI NO: 14277800 NR Description: Chain A, Crystal Structure Of 12-Oxophytodienoate
  misc_feature (4)..(372): Homolog of NCBI NO: 7449902 NR Description: probable 12-oxophytodienoate reductase (EC
  misc_feature (2)..(368): Homolog of NCBI NO: 13516922 NR Description: 12-oxophytodienoic acid 10, 11-reductase [Pisum
MVNAEAKQSVPLLTPYKMGRFNLSHRVVLAPLTRQKSYGSVPQPHAILYYSQRTSPGGFLIAEATGVSDTAQGYPDTPGIWTKEHVEAWKPIVDAVHAKGGIFFCQIWHVGRVSNRGFQPRRQAPISCTGKPIMPQMRANGIDEARFTPPRRLSIEEIPGIVNDFRLAARNAMEAGFDGVEIHGAHGYLIDQFMKDKVNDRTDEYGGSLQNRCKFALEVVDAVAKEIGPDRVGIRLSPFADYMESGDTNPEALGLYMVESLNKYGILYCHMIEPRMKTVGEIAACSHTLMPMREAFKGTFISAGGFTREDGNEAVAKGRTDLVAYGRWFLANPDLPKRFQLDAPLNKYNRSTFYTSDPVVGYTDYPSLESTA

SEQ ID NO: 106504 - protein, 355 aa, Arabidopsis thaliana
  peptide (1)..(355): Ceres Seq. ID no. 13619731
  misc_feature (1)..(329): Pfam Name: NADH:flavin oxidoreductase / NADH oxidase family Pfam Description: NADH:flavin oxidoreductase / NADH oxidase family
  misc_feature (1)..(355): Homolog of NCBI NO: 15223140 NR Description: 12-oxophytodienoate reductase (OPR2) [Arabidopsis
  misc_feature (1)..(355): Homolog of NCBI NO: 26450549 NR Description: putative 12-oxophytodienoate reductase OPR2
  misc_feature (1)..(355): Homolog of NCBI NO: 15223138 NR Description: 12-oxophytodienoate reductase (OPR1) [Arabidopsis
  misc_feature (1)..(355): Homolog of NCBI NO: 21593388 NR Description: 12-oxophytodienoate reductase (OPR1) [Arabidopsis
  misc_feature (1)..(355): Homolog of NCBI NO: 2765083 NR Description: 12-oxophytodienoate reductase [Arabidopsis
  misc_feature (1)..(354): Homolog of NCBI NO: 7449901 NR Description: probable 12-oxophytodienoate reductase (EC
  misc_feature (1)..(353): Homolog of NCBI NO: 4894182 NR Description: 12-oxophytodienoate reductase [Lycopersicon
  misc_feature (1)..(353): Homolog of NCBI NO: 14277800 NR Description: Chain A, Crystal Structure Of 12-Oxophytodienoate
  misc_feature (1)..(355): Homolog of NCBI NO: 7449902 NR Description: probable 12-oxophytodienoate reductase (EC
  misc_feature (1)..(351): Homolog of NCBI NO: 13516922 NR Description: 12-oxophytodienoic acid 10, 11-reductase [Pisum
MGRFNLSHRVVLAPLTRQKSYGSVPQPHAILYYSQRTSPGGFLIAEATGVSDTAQGYPDTPGIWTKEHVEAWKPIVDAVHAKGGIFFCQIWHVGRVSNRGFQPRRQAPISCTGKPIMPQMRANGIDEARFTPPRRLSIEEIPGIVNDFRLAARNAMEAGFDGVEIHGAHGYLIDQFMKDKVNDRTDEYGGSLQNRCKFALEVVDAVAKEIGPDRVGIRLSPFADYMESGDTNPEALGLYMVESLNKYGILYCHMIEPRMKTVGEIAACSHTLMPMREAFKGTFISAGGFTREDGNEAVAKGRTDLVAYGRWFLANPDLPKRFQLDAPLNKYNRSTFYTSDPVVGYTDYPSLESTA

SEQ ID NO: 106505 - DNA, 1611 bp, Arabidopsis thaliana
  misc_feature (1)..(1611): Ceres Seq. ID no. 13619788
  misc_feature: MA Experiment ID: 20001906 Result: Up-regulated in Transcription
  misc_feature: MA Experiment 20001906 PARAMETER Experiment Name: At_Drought_Reproduction_P Parameter: Age (day) Value: 35
  misc_feature: MA Experiment 20001906 PARAMETER Experiment Name: At_Drought_Reproduction_P Parameter: Organism Value: A. thaliana
  misc_feature: MA Experiment 20001906 PARAMETER Experiment Name: At_Drought_Reproduction_P Parameter: Plant Line Value: WS
  misc_feature: MA Experiment 20001906 PARAMETER Experiment Name: At_Drought_Reproduction_P Parameter: Timepoint (day) Value: 5
  misc_feature: MA Experiment 20001906 PARAMETER Experiment Name: At_Drought_Reproduction_P Parameter: Tissue Value: Siliques
  misc_feature: MA Experiment 20001906 PARAMETER Experiment Name: At_Drought_Reproduction_P Parameter: Treatment Value: Drought vs. No Drought
atgtcacacacaaagtcgcaaccacaaacgtgaaacgtgtaaaatatgactgtgctttggtttgtatcacttatcttactcatctctatccttctcgttgccgtcaaacactctaagcggcgatgggtccggcaaccaccgtctcctccaggcttaccaatcattggaaacttgcaccagcttggagaattaccacatcaatctctatgtaagctctcaaagaagtatggtcctgtaatgttactgaaacttggaagagttccaacagttatagtttctactcctgaaacagcaaaacaagttcttaaagactatgacctccactgttgtagccgtccaagcttggaaggtacaagaaagctttcttacaactatctagacattgctttctctagatttgatgattattggaaagaattaaggaagctttgtgttgaagaactcttttgtaataaacgaattaactcgattcaaccaatcaaggaggcggagatggagaaactgattgactcaattgctgaatctgcttctcagaaaactctggttaacttgagtgatacgtttctttctttaaacgttaacgtaatttgcaaggcagtatttggtgtgaatttccaaggaactgtgcttaacaatgataagttccaagatttagtccacgaggcacttgagatgttggggagcttctctgcttcggatttcttcccgtatgtcggttggattgtcgattggttcacgggtttacacgctcggagggagagaagcgtacgagatcttgatgctttctatgaacaaatgattgatttacatctacagaaaaacagagaagaaagtgaagatgattttgtggacttgctcttgaggttggaaaaggaagaagctgttcttggatatggcaaactcacaagaaaccacatcaaagcaatcttgatgaacattcttttggggggaatcaatacttctgcaataaccatgacatgggcaatggcggaactcataagaaacccacgagtgatgaagaaagttcaatccgaaatcagagcccaaatagggaaaaacaacaaaacaagaatcataagtttagatgagataaatcatctcagttacctaaatatggttatcaaagaaacatgccggttacatccagtagcacctcttctagtcccaagagaagtgatatctgaattcaagatcaacggctacacgattcaaccgaagacaaggcttcatgtcaacgtatgggctatcggacgtgatcccgagatatggaaagatccagaagagtttctcccagagaggtttatggactgtgacattgatgttaaaggacaagactatgagttgttaccatttggaagtggtcgaagaatttgtccagcagtgtacatggggataacaacagttgagtttggtcttgctaatctcttgtatcactttgattggaagttaccagaaggtgttgccgttgaagatatttacatggatgaagcttctggactcacttctcataagaaacatgaccttttacttgttcctgtgaaatctttagtgtaacacttgtgtaagtaaacatgaccttttacttctcataagtaatgtaatggttaaacc

SEQ ID NO: 106506 - protein, 502 aa, Arabidopsis thaliana
  peptide (1)..(502): Ceres Seq. ID no. 13619789
  misc_feature (31)..(496): Pfam Name: Cytochrome P450 Pfam Description: Cytochrome P450
  misc_feature (1)..(502): Homolog of NCBI NO: 13878390 NR Description: Cytochrome P450 71B10 >gi|8777359|dbj|BAA96949.1|
  misc_feature (1)..(502): Homolog of NCBI NO: 30696845 NR Description: cytochrome P450 71B10 [Arabidopsis thaliana]
  misc_feature (1)..(502): Homolog of NCBI NO: 28393289 NR Description: putative cytochrome p450 [Arabidopsis thaliana]
  misc_feature (1)..(501): Homolog of NCBI NO: 15231538 NR Description: cytochrome P450 family [Arabidopsis thaliana] Cytochrome P450 71B34 >gi|9294288|dbj|BAB02190.1| cytochrome P450
  misc_feature (1)..(501): Homolog of NCBI NO: 15231542 NR Description: cytochrome p450 family [Arabidopsis thaliana]
  misc_feature (1)..(501): Homolog of NCBI NO: 15227003 NR Description: cytochrome P450 family [Arabidopsis thaliana] Cytochrome P450 71B9 >gi|20197089|gb|AAC18928.2| putative
  misc_feature (1)..(501): Homolog of NCBI NO: 15231541 NR Description: cytochrome P450 71B36 [Arabidopsis thaliana] Cytochrome P450 71B36 >gi|9294290|dbj|BAB02192.1| cytochrome P450
  misc_feature (1)..(501): Homolog of NCBI NO: 18175891 NR Description: putative cytochrome P450 protein [Arabidopsis
  misc_feature (1)..(501): Homolog of NCBI NO: 9294291 NR Description: cytochrome p450 [Arabidopsis thaliana]
  misc_feature (1)..(497): Homolog of NCBI NO: 15231539 NR Description: cytochrome P450 family [Arabidopsis thaliana] Cytochrome P450 71B35 >gi|9294289|dbj|BAB02191.1| cytochrome P450
MTVLWFVSLILLISILLVAVKHSKRRWVRQPPSPPGLPIIGNLHQLGELPHQSLCKLSKKYGPVMLLKLGRVPTVIVSTPETAKQVLKDYDLHCCSRPSLEGTRKLSYNYLDIAFSRFDDYWKELRKLCVEELFCNKRINSIQPIKEAEMEKLIDSIAESASQKTLVNLSDTFLSLNVNVICKAVFGVNFQGTVLNNDKFQDLVHEALEMLGSFSASDFFPYVGWIVDWFTGLHARRERSVRDLDAFYEQMIDLHLQKNREESEDDFVDLLLRLEKEEAVLGYGKLTRNHIKAILMNILLGGINTSAITMTWAMAELIRNPRVMKKVQSEIRAQIGKNNKTRIISLDEINHLSYLNMVIKETCRLHPVAPLLVPREVISEFKINGYTIQPKTRLHVNVWAIGRDPEIWKDPEEFLPERFMDCDIDVKGQDYELLPFGSGRRICPAVYMGITTVEFGLANLLYHFDWKLPEGVAVEDIYMDEASGLTSHKKHDLLLVPVKSLV

SEQ ID NO: 106507 - protein, 438 aa, Arabidopsis thaliana
  peptide (1)..(438): Ceres Seq. ID no. 13619790
  misc_feature (1)..(432): Pfam Name: Cytochrome P450 Pfam Description: Cytochrome P450
  misc_feature (1)..(438): Homolog of NCBI NO: 13878390 NR Description: Cytochrome P450 71B10 >gi|8777359|dbj|BAA96949.1|
  misc_feature (1)..(438): Homolog of NCBI NO: 30696845 NR Description: cytochrome P450 71B10 [Arabidopsis thaliana]
  misc_feature (1)..(438): Homolog of NCBI NO: 28393289 NR Description: putative cytochrome p450 [Arabidopsis thaliana]
  misc_feature (1)..(437): Homolog of NCBI NO: 15231538 NR Description: cytochrome P450 family [Arabidopsis thaliana] Cytochrome P450 71B34 >gi|9294288|dbj|BAB02190.1| cytochrome P450
  misc_feature (1)..(437): Homolog of NCBI NO: 15231542 NR Description: cytochrome p450 family [Arabidopsis thaliana]
  misc_feature (1)..(437): Homolog of NCBI NO: 15227003 NR Description: cytochrome P450 family [Arabidopsis thaliana] Cytochrome P450 71B9 >gi|20197089|gb|AAC18928.2| putative
  misc_feature (1)..(437): Homolog of NCBI NO: 15231541 NR Description: cytochrome P450 71B36 [Arabidopsis thaliana] Cytochrome P450 71B36 >gi|9294290|dbj|BAB02192.1| cytochrome P450
  misc_feature (1)..(437): Homolog of NCBI NO: 18175891 NR Description: putative cytochrome P450 protein [Arabidopsis
  misc_feature (1)..(437): Homolog of NCBI NO: 9294291 NR Description: cytochrome p450 [Arabidopsis thaliana]
  misc_feature (1)..(433): Homolog of NCBI NO: 15231539 NR Description: cytochrome P450 family [Arabidopsis thaliana] Cytochrome P450 71B35 >gi|9294289|dbj|BAB02191.1| cytochrome P450
MLLKLGRVPTVIVSTPETAKQVLKDYDLHCCSRPSLEGTRKLSYNYLDIAFSRFDDYWKELRKLCVEELFCNKRINSIQPIKEAEMEKLIDSIAESASQKTLVNLSDTFLSLNVNVICKAVFGVNFQGTVLNNDKFQDLVHEALEMLGSFSASDFFPYVGWIVDWFTGLHARRERSVRDLDAFYEQMIDLHLQKNREESEDDFVDLLLRLEKEEAVLGYGKLTRNHIKAILMNILLGGINTSAITMTWAMAELIRNPRVMKKVQSEIRAQIGKNNKTRIISLDEINHLSYLNMVIKETCRLHPVAPLLVPREVISEFKINGYTIQPKTRLHVNVWAIGRDPEIWKDPEEFLPERFMDCDIDVKGQDYELLPFGSGRRICPAVYMGITTVEFGLANLLYHFDWKLPEGVAVEDIYMDEASGLTSHKKHDLLLVPVKSLV

SEQ ID NO: 106508 - protein, 353 aa, Arabidopsis thaliana
  peptide (1)..(353): Ceres Seq. ID no. 13619791
  misc_feature (1)..(347): Pfam Name: Cytochrome P450 Pfam Description: Cytochrome P450
  misc_feature (1)..(353): Homolog of NCBI NO: 13878390 NR Description: Cytochrome P450 71B10 >gi|8777359|dbj|BAA96949.1|
  misc_feature (1)..(353): Homolog of NCBI NO: 30696845 NR Description: cytochrome P450 71B10 [Arabidopsis thaliana]
  misc_feature (1)..(353): Homolog of NCBI NO: 28393289 NR Description: putative cytochrome p450 [Arabidopsis thaliana]
  misc_feature (1)..(352): Homolog of NCBI NO: 15231538 NR Description: cytochrome P450 family [Arabidopsis thaliana] Cytochrome P450 71B34 >gi|9294288|dbj|BAB02190.1| cytochrome P450
  misc_feature (1)..(352): Homolog of NCBI NO: 15231542 NR Description: cytochrome p450 family [Arabidopsis thaliana]
  misc_feature (1)..(352): Homolog of NCBI NO: 15227003 NR Description: cytochrome P450 family [Arabidopsis thaliana] Cytochrome P450 71B9 >gi|20197089|gb|AAC18928.2| putative
  misc_feature (1)..(352): Homolog of NCBI NO: 15231541 NR Description: cytochrome P450 71B36 [Arabidopsis thaliana] Cytochrome P450 71B36 >gi|9294290|dbj|BAB02192.1| cytochrome P450
  misc_feature (1)..(352): Homolog of NCBI NO: 18175891 NR Description: putative cytochrome P450 protein [Arabidopsis
  misc_feature (1)..(352): Homolog of NCBI NO: 9294291 NR Description: cytochrome p450 [Arabidopsis thaliana]
  misc_feature (1)..(348): Homolog of NCBI NO: 15231539 NR Description: cytochrome P450 family [Arabidopsis thaliana] Cytochrome P450 71B35 >gi|9294289|dbj|BAB02191.1| cytochrome P450
MEKLIDSIAESASQKTLVNLSDTFLSLNVNVICKAVFGVNFQGTVLNNDKFQDLVHEALEMLGSFSASDFFPYVGWIVDWFTGLHARRERSVRDLDAFYEQMIDLHLQKNREESEDDFVDLLLRLEKEEAVLGYGKLTRNHIKAILMNILLGGINTSAITMTWAMAELIRNPRVMKKVQSEIRAQIGKNNKTRIISLDEINHLSYLNMVIKETCRLHPVAPLLVPREVISEFKINGYTIQPKTRLHVNVWAIGRDPEIWKDPEEFLPERFMDCDIDVKGQDYELLPFGSGRRICPAVYMGITTVEFGLANLLYHFDWKLPEGVAVEDIYMDEASGLTSHKKHDLLLVPVKSLV

SEQ ID NO: 106509 - DNA, 865 bp, Arabidopsis thaliana
  misc_feature (1)..(865): Ceres Seq. ID no. 13619795
  misc_feature: MA Experiment ID: 20000307 Result: Up-regulated in Transcription
  misc_feature: MA Experiment 20000307 PARAMETER Experiment Name: At_Germinating_Seeds_Sub_P Parameter: Age (hr) Value: 24 vs. 0
  misc_feature: MA Experiment 20000307 PARAMETER Experiment Name: At_Germinating_Seeds_Sub_P Parameter: Organism Value: A. thaliana
  misc_feature: MA Experiment 20000307 PARAMETER Experiment Name: At_Germinating_Seeds_Sub_P Parameter: Plant Line Value: WS
  misc_feature: MA Experiment 20000307 PARAMETER Experiment Name: At_Germinating_Seeds_Sub_P Parameter: Tissue Value: Germinating Seeds
  misc_feature: MA Experiment ID: 20000314 Result: Up-regulated in Transcription
  misc_feature: MA Experiment 20000314 PARAMETER Experiment Name: At_14day_Shoots-Roots_Sub_P Parameter: Age (day) Value: 14
  misc_feature: MA Experiment 20000314 PARAMETER Experiment Name: At_14day_Shoots-Roots_Sub_P Parameter: Organism Value: A. thaliana
  misc_feature: MA Experiment 20000314 PARAMETER Experiment Name: At_14day_Shoots-Roots_Sub_P Parameter: Plant Line Value: WS
  misc_feature: MA Experiment 20000314 PARAMETER Experiment Name: At_14day_Shoots-Roots_Sub_P Parameter: Tissue Value: Roots vs. Whole Plant
  misc_feature: MA Experiment ID: 20000328 Result: Up-regulated in Transcription
  misc_feature: MA Experiment 20000328 PARAMETER Experiment Name: At_42deg_Heat_Sub_P Parameter: Age (day) Value: 14
  misc_feature: MA Experiment 20000328 PARAMETER Experiment Name: At_42deg_Heat_Sub_P Parameter: Organism Value: A. thaliana
  misc_feature: MA Experiment 20000328 PARAMETER Experiment Name: At_42deg_Heat_Sub_P Parameter: Plant Line Value: WS
  misc_feature: MA Experiment 20000328 PARAMETER Experiment Name: At_42deg_Heat_Sub_P Parameter: Temperature (deg C) Value: 42 vs. 22
  misc_feature: MA Experiment 20000328 PARAMETER Experiment Name: At_42deg_Heat_Sub_P Parameter: Timepoint (hr) Value: 6
  misc_feature: MA Experiment 20000328 PARAMETER Experiment Name: At_42deg_Heat_Sub_P Parameter: Tissue Value: Aerial
  misc_feature: MA Experiment ID: 20000440 Result: Up-regulated in Transcription
  misc_feature: MA Experiment 20000440 PARAMETER Experiment Name: At_Closed-Flower__Sub_P Parameter: Tissue Value: Closed Flower vs. Whole Plant
accacccacaaagccatggcgaccacttcatcgacaaaacaagtcattgtcttcacaatttcccttctcttggttgctttccaagcagtccatgcagactattaccgtcagaggccaccggttacccctaccccttacgttcctaagccacggtacccacttccgagcccgagccccaagcctgtttatcgaccacctactacccctagtctacccgctggctcaatcgctagactattccttgatccacataacgctcttcggtccggactaggtttgcctccattgatttgggacggtaaactagcgagctacgcaacatggtgggctaaccagaggcgttacgactgctccttaacccattccaccggcccatacggtgagaacttgttctggggaagcggctcgagctgggcaccaggtttcgcggtgcagtcatggatcgttgaaggaaggtcatacaaccacaacaccaactcgtgtgacggaagtggaatgtgtggtcactacactcagatggtgtggcgggacaccaaaaggctcggatgcgcacgtgtggtgtgtgagaacggtgccggagttttcatcacttgtaactacgacccaccgggtaactacgttggcgagaagccatactaaaaaaacaaaacacattaaacggggtttttgtttggtatttgatttcatttaatatcttttgtatctgttttcgttatatcttcgtgaaattaaaatttccgacaaatctaatttgtatgtatcattgtatgttgttgtttccaatgtcctctcggtcatgtcctcaaaattttgttgagtggcctacttatttaaacatcgtaaaacaaacagtcagaaaaattac

SEQ ID NO: 106510 - protein, 212 aa, Arabidopsis thaliana
  peptide (1)..(212): Ceres Seq. ID no. 13619796
  misc_feature (81)..(199): Pfam Name: SCP-like extracellular protein Pfam Description: SCP-like extracellular protein
  misc_feature (6)..(212): Homolog of NCBI NO: 22327916 NR Description: pathogenesis-related protein family [Arabidopsis
  misc_feature (6)..(212): Homolog of NCBI NO: 15235994 NR Description: pathogenesis-related protein, putative
  misc_feature (80)..(212): Homolog of NCBI NO: 15234704 NR Description: pathogenesis-related protein family [Arabidopsis
  misc_feature (66)..(212): Homolog of NCBI NO: 2500715 NR Description: Pathogenesis-related protein PR-1 precursor
  misc_feature (80)..(212): Homolog of NCBI NO: 15235992 NR Description: pathogenesis-related protein, putative
  misc_feature (80)..(212): Homolog of NCBI NO: 100907 NR Description: pathogenesis-related protein 1 - maize
  misc_feature (80)..(212): Homolog of NCBI NO: 7442179 NR Description: pathogenesis related protein-1 - maize
  misc_feature (53)..(212): Homolog of NCBI NO: 15235962 NR Description: pathogenesis-related protein, putative
  misc_feature (80)..(212): Homolog of NCBI NO: 480679 NR Description: pathogenesis-related protein 1a - barley
  misc_feature (73)..(212): Homolog of NCBI NO: 11277195 NR Description: acidic pathogenesis-related protein 1a precursor
TTHKAMATTSSTKQVIVFTISLLLVAFQAVHADYYRQRPPVTPTPYVPKPRYPLPSPSPKPVYRPPTTPSLPAGSIARLFLDPHNALRSGLGLPPLIWDGKLASYATWWANQRRYDCSLTHSTGPYGENLFWGSGSSWAPGFAVQSWIVEGRSYNHNTNSCDGSGMCGHYTQMVWRDTKRLGCARVVCENGAGVFITCNYDPPGNYVGEKPY

SEQ ID NO: 106511 - protein, 207 aa, Arabidopsis thaliana
  peptide (1)..(207): Ceres Seq. ID no. 13619797
  misc_feature (76)..(194): Pfam Name: SCP-like extracellular protein Pfam Description: SCP-like extracellular protein
  misc_feature (1)..(207): Homolog of NCBI NO: 22327916 NR Description: pathogenesis-related protein family [Arabidopsis
  misc_feature (1)..(207): Homolog of NCBI NO: 15235994 NR Description: pathogenesis-related protein, putative
  misc_feature (75)..(207): Homolog of NCBI NO: 15234704 NR Description: pathogenesis-related protein family [Arabidopsis
  misc_feature (61)..(207): Homolog of NCBI NO: 2500715 NR Description: Pathogenesis-related protein PR-1 precursor
  misc_feature (75)..(207): Homolog of NCBI NO: 15235992 NR Description: pathogenesis-related protein, putative
  misc_feature (75)..(207): Homolog of NCBI NO: 100907 NR Description: pathogenesis-related protein 1 - maize
  misc_feature (75)..(207): Homolog of NCBI NO: 7442179 NR Description: pathogenesis related protein-1 - maize
  misc_feature (48)..(207): Homolog of NCBI NO: 15235962 NR Description: pathogenesis-related protein, putative
  misc_feature (75)..(207): Homolog of NCBI NO: 480679 NR Description: pathogenesis-related protein 1a - barley
  misc_feature (68)..(207): Homolog of NCBI NO: 11277195 NR Description: acidic pathogenesis-related protein 1a precursor
MATTSSTKQVIVFTISLLLVAFQAVHADYYRQRPPVTPTPYVPKPRYPLPSPSPKPVYRPPTTPSLPAGSIARLFLDPHNALRSGLGLPPLIWDGKLASYATWWANQRRYDCSLTHSTGPYGENLFWGSGSSWAPGFAVQSWIVEGRSYNHNTNSCDGSGMCGHYTQMVWRDTKRLGCARVVCENGAGVFITCNYDPPGNYVGEKPY

SEQ ID NO: 106512 - DNA, 1021 bp, Arabidopsis thaliana
  misc_feature (1)..(1021): Ceres Seq. ID no. 13619802
  misc_feature: MA Experiment ID: 20000087 Result: Up-regulated in Transcription
  misc_feature: MA Experiment 20000087 PARAMETER Experiment Name: At_100uM_ABA_Mutants_cDNA_P Parameter: Plant Line Value: WS
  misc_feature: MA Experiment 20000087 PARAMETER Experiment Name: At_100uM_ABA_Mutants_cDNA_P Parameter: Timepoint (hr) Value: 6
  misc_feature: MA Experiment 20000087 PARAMETER Experiment Name: At_100uM_ABA_Mutants_cDNA_P Parameter: Tissue Value: Aerial
  misc_feature: MA Experiment 20000087 PARAMETER Experiment Name: At_100uM_ABA_Mutants_cDNA_P Parameter: Treatment Value: 100uM ABA vs. No Treatment
aaattcctcctcattgttaaagtcgaaaaaagggtaaagcagcaaaaccctaataaaatcacaacaaattaacacaaaaaaaccagatcttaaaactctctctacccaccaagaggatcaaccagtctcttccccttcagattctcctttccacagtgaatggatcaacaagaccatggacagtctggagctatgaactatggcacaaacccataccaaaccaacccgatgagcaccactgctgctactgtagcaggaggtgcggcacaaccaggccagctggcgttccaccagatccatcagcagcagcagcagcaacagctggcacagcagcttcaagcattttgggagaaccaattcaaagagattgagaagactaccgatttcaagaaccacagccttccccttgcgagaatcaagaaaatcatgaaagcggatgaagatgtccgtatgatctcggctgaggcgcctgtcgtgtttgcaagggcctgtgagatgttcatcctggagctgacactcaggtcgtggaaccacactgaggagaataagaggcggacgttgcagaagaacgatattgctgctgctgtgactagaaccgatatttttgatttccttgtggatattgttccccgggaggatctccgagatgaagtcttgggaagtattccgaggggcactgtcccggaagctgctgctgctggttacccgtatggatacttgcctgcaggaactgctccaataggaaatccgggaatggttatgggtaatcccggtggtgcgtatccacctaatccttatatgggtcaaccaatgtggcaacaacaggcacctgaccaacctgaccaggaaaattagcaagaaactgtgagtcttccagcttcttttaggcctaccttgtagtcttggggttttgtttctgttttcgaataatggtaacctttgtataacttatttcagtatcgtctcagtttggtactatgtcagttttggtattcttatcttattgaagtaaaaatgtgat

SEQ ID NO: 106513 - protein, 231 aa, Arabidopsis thaliana; identical to SEQ ID NO: 26129
  peptide (1)..(231): Ceres Seq. ID no. 13619803
  misc_feature (1)..(231): Homolog of NCBI NO: 15223986 NR Description: transcription factor Hap5a, putative [Arabidopsis >gi|30680893|ref|NP_849619.1| transcription factor Hap5a, [Arabidopsis thaliana] >gi|21553992|gb|AAM63073.1| putative
  misc_feature (1)..(231): Homolog of NCBI NO: 6289057 NR Description: heme activated protein [Arabidopsis thaliana]
  misc_feature (24)..(231): Homolog of NCBI NO: 25372763 NR Description: hypothetical protein [imported] - Arabidopsis
  misc_feature (1)..(231): Homolog of NCBI NO: 15221912 NR Description: transcription factor Hap5a, putative [Arabidopsis >gi|30695834|ref|NP_849808.1| transcription factor Hap5a, [Arabidopsis thaliana] >gi|3776575|gb|AAC64892.1| Similar to
  misc_feature (1)..(187): Homolog of NCBI NO: 15223482 NR Description: transcription factor Hap5a, putative [Arabidopsis >gi|18252953|gb|AAL62403.1| transcription factor, putative thaliana] >gi|21389649|gb|AAM48023.1| putative transcription
  misc_feature (23)..(220): Homolog of NCBI NO: 15228405 NR Description: transcription factor Hap5a, putative [Arabidopsis
  misc_feature (23)..(223): Homolog of NCBI NO: 15242784 NR Description: transcription factor Hap5a, putative [Arabidopsis
  misc_feature (1)..(187): Homolog of NCBI NO: 21554704 NR Description: transcription factor, putative [Arabidopsis
  misc_feature (52)..(183): Homolog of NCBI NO: 5257260 NR Description: Similar to sequence of BAC F7G19 from Arabidopsis
  misc_feature (68)..(187): Homolog of NCBI NO: 2398533 NR Description: Transcription factor [Arabidopsis thaliana]

SEQ ID NO: 106514 - protein, 220 aa, Arabidopsis thaliana; identical to SEQ ID NO: 26130
  peptide (1)..(220): Ceres Seq. ID no. 13619804
  misc_feature (1)..(220): Homolog of NCBI NO: 15223986 NR Description: transcription factor Hap5a, putative [Arabidopsis >gi|30680893|ref|NP_849619.1| transcription factor Hap5a, [Arabidopsis thaliana] >gi|21553992|gb|AAM63073.1| putative
  misc_feature (1)..(220): Homolog of NCBI NO: 6289057 NR Description: heme activated protein [Arabidopsis thaliana]
  misc_feature (13)..(220): Homolog of NCBI NO: 25372763 NR Description: hypothetical protein [imported] - Arabidopsis
  misc_feature (1)..(220): Homolog of NCBI NO: 15221912 NR Description: transcription factor Hap5a, putative [Arabidopsis >gi|30695834|ref|NP_849808.1| transcription factor Hap5a, [Arabidopsis thaliana] >gi|3776575|gb|AAC64892.1| Similar to
  misc_feature (1)..(176): Homolog of NCBI NO: 15223482 NR Description: transcription factor Hap5a, putative [Arabidopsis >gi|18252953|gb|AAL62403.1| transcription factor, putative thaliana] >gi|21389649|gb|AAM48023.1| putative transcription
  misc_feature (12)..(209): Homolog of NCBI NO: 15228405 NR Description: transcription factor Hap5a, putative [Arabidopsis
  misc_feature (12)..(212): Homolog of NCBI NO: 15242784 NR Description: transcription factor Hap5a, putative [Arabidopsis
  misc_feature (1)..(176): Homolog of NCBI NO: 21554704 NR Description: transcription factor, putative [Arabidopsis
  misc_feature (41)..(172): Homolog of NCBI NO: 5257260 NR Description: Similar to sequence of BAC F7G19 from Arabidopsis
  misc_feature (57)..(176): Homolog of NCBI NO: 2398533 NR Description: Transcription factor [Arabidopsis thaliana]

SEQ ID NO: 106515 - protein, 208 aa, Arabidopsis thaliana; identical to SEQ ID NO: 26131
  peptide (1)..(208): Ceres Seq. ID no. 13619805
  misc_feature (1)..(208): Homolog of NCBI NO: 15223986 NR Description: transcription factor Hap5a, putative [Arabidopsis >gi|30680893|ref|NP_849619.1| transcription factor Hap5a, [Arabidopsis thaliana] >gi|21553992|gb|AAM63073.1| putative
  misc_feature (1)..(208): Homolog of NCBI NO: 6289057 NR Description: heme activated protein [Arabidopsis thaliana]
  misc_feature (1)..(208): Homolog of NCBI NO: 25372763 NR Description: hypothetical protein [imported] - Arabidopsis
  misc_feature (1)..(208): Homolog of NCBI NO: 15221912 NR Description: transcription factor Hap5a, putative [Arabidopsis >gi|30695834|ref|NP_849808.1| transcription factor Hap5a, [Arabidopsis thaliana] >gi|3776575|gb|AAC64892.1| Similar to
  misc_feature (1)..(164): Homolog of NCBI NO: 15223482 NR Description: transcription factor Hap5a, putative [Arabidopsis >gi|18252953|gb|AAL62403.1| transcription factor, putative thaliana] >gi|21389649|gb|AAM48023.1| putative transcription
  misc_feature (1)..(197): Homolog of NCBI NO: 15228405 NR Description: transcription factor Hap5a, putative [Arabidopsis
  misc_feature (1)..(200): Homolog of NCBI NO: 15242784 NR Description: transcription factor Hap5a, putative [Arabidopsis
  misc_feature (1)..(164): Homolog of NCBI NO: 21554704 NR Description: transcription factor, putative [Arabidopsis
  misc_feature (29)..(160): Homolog of NCBI NO: 5257260 NR Description: Similar to sequence of BAC F7G19 from Arabidopsis
  misc_feature (45)..(164): Homolog of NCBI NO: 2398533 NR Description: Transcription factor [Arabidopsis thaliana]

SEQ ID NO: 106516 - DNA, 723 bp, Arabidopsis thaliana
  misc_feature (1)..(723): Ceres Seq. ID no. 13619806
  misc_feature: MA Experiment ID: 108434 Result: Up-regulated in Transcription
  misc_feature: MA Experiment 108434 PARAMETER Experiment Name: At_Root_Tips_cDNA_P Parameter: Tissue Value: Root Tips
  misc_feature: MA Experiment ID: 108488 Result: Down-regulated in Transcription
  misc_feature: MA Experiment ID: 108573 Result: Down-regulated in Transcription
  misc_feature: MA Experiment 108573 PARAMETER Experiment Name: At_Drought_cDNA_P Parameter: Timepoint (hr) Value: 6
  misc_feature: MA Experiment 108573 PARAMETER Experiment Name: At_Drought_cDNA_P Parameter: Tissue Value: Aerial
  misc_feature: MA Experiment 108573 PARAMETER Experiment Name: At_Drought_cDNA_P Parameter: Treatment Value: Drought vs. No Drought
  misc_feature: MA Experiment ID: 108579 Result: Up-regulated in Transcription
  misc_feature: MA Experiment 108579 PARAMETER Experiment Name: At_4deg_Cold_cDNA_P Parameter: Temperature (deg C) Value: 4 vs. 22
  misc_feature: MA Experiment 108579 PARAMETER Experiment Name: At_4deg_Cold_cDNA_P Parameter: Timepoint (hr) Value: 6
  misc_feature: MA Experiment 108579 PARAMETER Experiment Name: At_4deg_Cold_cDNA_P Parameter: Tissue Value: Aerial
  misc_feature: MA Experiment ID: 20000093 Result: Down-regulated in Transcription
  misc_feature: MA Experiment 20000093 PARAMETER Experiment Name: At_42deg_Heat_cDNA_P Parameter: Temperature (deg C) Value: 42 vs. 22
  misc_feature: MA Experiment 20000093 PARAMETER Experiment Name: At_42deg_Heat_cDNA_P Parameter: Timepoint (hr) Value: 0.5
  misc_feature: MA Experiment 20000093 PARAMETER Experiment Name: At_42deg_Heat_cDNA_P Parameter: Tissue Value: Aerial
  misc_feature: MA Experiment ID: 20000286 Result: Up-regulated in Transcription
  misc_feature: MA Experiment 20000286 PARAMETER Experiment Name: At_Open_Flower_P Parameter: Age (day) Value: 21
  misc_feature: MA Experiment 20000286 PARAMETER Experiment Name: At_Open_Flower_P Parameter: Plant Line Value: WS
  misc_feature: MA Experiment 20000286 PARAMETER Experiment Name: At_Open_Flower_P Parameter: Tissue Value: Half Open vs. Whole Plant
  misc_feature: MA Experiment ID: 20000794 Result: Up-regulated in Transcription
  misc_feature: MA Experiment 20000794 PARAMETER Experiment Name: At_Petals_P Parameter: Age (day) Value: 23-25 days
  misc_feature: MA Experiment 20000794 PARAMETER Experiment Name: At_Petals_P Parameter: Plant Line Value: WS
  misc_feature: MA Experiment 20000794 PARAMETER Experiment Name: At_Petals_P Parameter: Tissue Value: Petals vs. Whole plant
cccactcatcttctcaattcccagatcatctacaatagtcatttctcttcgatttcttcaaactctcatcaaatcgtttatctgttctaaatttcgaagaagacgatgagtacaggcgcaggaagcggaacaaccaaaggtggcagaggaaagccaaaggccaccaaatccgtctctcgatcatctaaagccggtcttcaattccccgtcggaagaatcgctagattcctcaaatccggtaaatacgccgagcgtgtcggtgccggagctccggtctatctctccgctgttctcgagtacctcgccgccgaggtgttggagctggcgggaaacgcagcaagggataacaagaagacacgtatagtaccaagacacattcagcttgcagtgaggaacgatgaagagttaagcaaacttctgggaagtgtgacgattgcgaatggaggagttttgccaaatattcatcagactcttttgccatccaaggttggcaagaacaaaggagatattggatctgcttctcaggagttctgaggttcttagacttcttagttcagttctcttgtttggattcggaacttgtaaaatagaccctgatggtgttttttggggatcaaattaggttttaaagctaagtatatttggcttttgcctaagtatgtttaattagtgaatgatatgatatttcggaacgaatcatgtatcaatggaactgaattaatc

SEQ ID NO: 106517 - protein, 142 aa, Arabidopsis thaliana; identical to SEQ ID NO: 25026
  peptide (1)..(142): Ceres Seq. ID no. 13619807
  misc_feature (3)..(127): Pfam Name: Core histone H2A/H2B/H3/H4 Pfam Description: Core histone H2A/H2B/H3/H4
  misc_feature (1)..(142): Homolog of NCBI NO: 15223948 NR Description: histone H2A, putative [Arabidopsis thaliana]
  misc_feature (1)..(142): Homolog of NCBI NO: 15221875 NR Description: histone H2A, putative [Arabidopsis thaliana]
  misc_feature (1)..(142): Homolog of NCBI NO: 21593507 NR Description: putative histone H2A [Arabidopsis thaliana]
  misc_feature (5)..(142): Homolog of NCBI NO: 15214035 NR Description: Histone H2A >gi|3204129|emb|CAA07234.1| histone
  misc_feature (7)..(142): Homolog of NCBI NO: 462234 NR Description: Histone H2A >gi|419741|pir||S30155 histone H2A - spruce >gi|297871|emb|CAA48030.1| histone H2A [Picea abies]
  misc_feature (12)..(142): Homolog of NCBI NO: 21321778 NR Description: unknown protein [Oryza sativa (japonica
  misc_feature (5)..(132): Homolog of NCBI NO: 15239697 NR Description: histone H2A [Arabidopsis thaliana] histone H2A [Arabidopsis thaliana] histone H2A [Arabidopsis thaliana] >gi|9758956|dbj|BAB09343.1|
  misc_feature (2)..(135): Homolog of NCBI NO: 685035 NR Description: histone H2A homolog [Phaseolus vulgaris, Great
  misc_feature (13)..(132): Homolog of NCBI NO: 15237024 NR Description: histone H2A, putative [Arabidopsis thaliana]
  misc_feature (5)..(131): Homolog of NCBI NO: 7439709 NR Description: histone H2A - loblolly pine

SEQ ID NO: 106518 - DNA, 2270 bp, Arabidopsis thaliana
  misc_feature (1)..(2270): Ceres Seq. ID no. 13619808
  misc_feature: MA Experiment ID: 20000185 Result: Up-regulated in Transcription
  misc_feature: MA Experiment 20000185 PARAMETER Experiment Name: At_Roots__P Parameter: Age (day) Value: 7 vs. 21
  misc_feature: MA Experiment 20000185 PARAMETER Experiment Name: At_Roots__P Parameter: Organism Value: A. thaliana
  misc_feature: MA Experiment 20000185 PARAMETER Experiment Name: At_Roots__P Parameter: Tissue Value: Roots vs. Whole Plant
gttaacacttttgtgccgaccgatgaatcaaaattagagtaacagtgaaacgcattcttccctcaatcgttcaaatgcaagatttcttcggctccgttcgtcgatcgcttgttttccgtccttcttccgacgacgataaccaggagaaccagcctccgtttcccggtgttctcgccgataagatcacctcttgcatccgcaaatcgaagatttttatcaaaccctccttctcgcctcctcctcctgctaacactgtagacatggcacctccgatttcgtggaggaaaggtcagttaattggtcgcggcgcgtttggtacggtgtacatgggtatgaatcttgactccggggagcttctcgccgtcaaacaggttctgattgcagccaattttgcttccaaggaaaagactcaggctcatattcaggagcttgaagaagaagttaagcttcttaaaaatctctcccatcctaatatagttagatatttgggtacagtgagggaagatgataccctgaatatccttctcgagtttgttcccggtggatcgatatcatcgctcttggagaaatttggaccttttcctgaatcagttgtccggacatacacaaggcaactgcttttagggttggagtacctgcacaatcatgcaattatgcacagagacattaagggggctaatatccttgtggataataaaggatgcattaagcttgctgattttggtgcatccaaacaagtagctgagttggctacgatgactggtgcaaaatctatgaaagggacaccatattggatggctccggaagttattcttcaaactggacatagcttctctgctgacatatggagcgtcggctgtacagttattgaaatggtgactgggaaggctccttggagtcagcagtataaagaggttgctgctatcttcttcataggaacaacaaaatcacatcctccaatacctgatactctctcctctgatgcaaaagattttctgctcaagtgtctgcaggaggtaccaaatctgcggccaaccgcatctgagctactaaagcatccttttgttatggggaaacacaaggagtctgcttctactgatcttggttctgtcctgaacaatcttagcactccactaccgttacagataaataacaccaagagcactccagattctacttgcgacgatgtaggtgacatgtgtaactttggcagtttgaattattcacttgtagatcctgtgaaatcaatccaaaacaaaaatttatggcaacaaaatgataatggaggtgatgaagacgatatgtgtttgatagatgatgagaatttcttgacatttgacggagaaatgagttctacccttgaaaaagattgtcatctgaagaagagctgtgatgacataagtgatatgtccattgctttgaagtccaaatttgacgaaagtcctggtaatggagagaaagagtctacaatgagcatggaatgtgaccaaccttcatactcagaggatgatgatgagctgaccgagtcaaaaattaaagctttcttagatgagaaggctgcagatctaaagaagttacagactcctctctatgaagaattctacaatagtttgatcacattctctcccagttgtatggagagtaatttaagtaacagtaaaagagaggacactgctcgtggtttcctgaaactgcctccaaaaagcaggtcaccgagtcggggccctcttggtggttcaccttcaagagcaacagacgcaactagttgttccaagagcccaggaagtggaggtagtcgtgaattgaatattaacaatggaggtgatgaagcttcacaggatggtgtatcagcacgggtcacagactggaggggtctcgttgttgacactaagcaggaattaagccagtgtgttgctttgtcagagatagagaagaagtggaaggaagagcttgatcaagaactggaaagaaagcgacaagaaatcatgcgccaagcagggttgggatcatccccaagagacagaggcatgagccgacagagagagaagtcgaggtttgcatcaccaggaaaatgacttgcacaaaaagtctccggctttttgatttttgattgctcaactagtatatatatctgtaactcttatcttgctgtgatgaaaagtagacacgaggtttggtctgaatatatgattctgaactggttgttgaaggtattagatgtgtgtaatgtgagtgtcgggtgcatatttaagtgcgctacaaattgctag

SEQ ID NO: 106519 - protein, 666 aa, Arabidopsis thaliana
  peptide (1)..(666): Ceres Seq. ID no. 13619809
  misc_feature (69)..(331): Pfam Name: Protein kinase domain Pfam Description: Protein kinase domain
  misc_feature (1)..(666): Homolog of NCBI NO: 25387090 NR Description: NPK1-related protein kinase 2 [imported] -
  misc_feature (10)..(666): Homolog of NCBI NO: 2342425 NR Description: NPK1-related protein kinase 2 [Arabidopsis
  misc_feature (1)..(494): Homolog of NCBI NO: 15221948 NR Description: protein kinase, putative [Arabidopsis thaliana]
  misc_feature (610)..(666): Homolog of NCBI NO: 15221948 NR Description: protein kinase, putative [Arabidopsis thaliana]
  misc_feature (549)..(624): Homolog of NCBI NO: 15221948 NR Description: protein kinase, putative [Arabidopsis thaliana]
  misc_feature (1)..(372): Homolog of NCBI NO: 2342423 NR Description: NPK1-related protein kinase 1S [Arabidopsis
  misc_feature (365)..(666): Homolog of NCBI NO: 25402508 NR Description: hypothetical protein [imported] - Arabidopsis >gi|2342692|gb|AAB70419.1| Similar to Nicotiana protein kinase
  misc_feature (1)..(666): Homolog of NCBI NO: 477094 NR Description: STE11 protein kinase homolog NPK1 - common tobacco
  misc_feature (1)..(666): Homolog of NCBI NO: 456309 NR Description: protein kinase [Nicotiana tabacum]
  misc_feature (1)..(644): Homolog of NCBI NO: 15230612 NR Description: protein kinase, putative [Arabidopsis thaliana]
MQDFFGSVRRSLVFRPSSDDDNQENQPPFPGVLADKITSCIRKSKIFIKPSFSPPPPANTVDMAPPISWRKGQLIGRGAFGTVYMGMNLDSGELLAVKQVLIAANFASKEKTQAHIQELEEEVKLLKNLSHPNIVRYLGTVREDDTLNILLEFVPGGSISSLLEKFGPFPESVVRTYTRQLLLGLEYLHNHAIMHRDIKGANILVDNKGCIKLADFGASKQVAELATMTGAKSMKGTPYWMAPEVILQTGHSFSADIWSVGCTVIEMVTGKAPWSQQYKEVAAIFFIGTTKSHPPIPDTLSSDAKDFLLKCLQEVPNLRPTASELLKHPFVMGKHKESASTDLGSVLNNLSTPLPLQINNTKSTPDSTCDDVGDMCNFGSLNYSLVDPVKSIQNKNLWQQNDNGGDEDDMCLIDDENFLTFDGEMSSTLEKDCHLKKSCDDISDMSIALKSKFDESPGNGEKESTMSMECDQPSYSEDDDELTESKIKAFLDEKAADLKKLQTPLYEEFYNSLITFSPSCMESNLSNSKREDTARGFLKLPPKSRSPSRGPLGGSPSRATDATSCSKSPGSGGSRELNINNGGDEASQDGVSARVTDWRGLVVDTKQELSQCVALSEIEKKWKEELDQELERKRQEIMRQAGLGSSPRDRGMSRQREKSRFASPGK

SEQ ID NO: 106520 - protein, 604 aa, Arabidopsis thaliana
  peptide (1)..(604): Ceres Seq. ID no. 13619810
  misc_feature (7)..(269): Pfam Name: Protein kinase domain Pfam Description: Protein kinase domain
  misc_feature (1)..(604): Homolog of NCBI NO: 25387090 NR Description: NPK1-related protein kinase 2 [imported] -
  misc_feature (1)..(604): Homolog of NCBI NO: 2342425 NR Description: NPK1-related protein kinase 2 [Arabidopsis
  misc_feature (1)..(432): Homolog of NCBI NO: 15221948 NR Description: protein kinase, putative [Arabidopsis thaliana]
  misc_feature (548)..(604): Homolog of NCBI NO: 15221948 NR Description: protein kinase, putative [Arabidopsis thaliana]
  misc_feature (487)..(562): Homolog of NCBI NO: 15221948 NR Description: protein kinase, putative [Arabidopsis thaliana]
  misc_feature (1)..(310): Homolog of NCBI NO: 2342423 NR Description: NPK1-related protein kinase 1S [Arabidopsis
  misc_feature (303)..(604): Homolog of NCBI NO: 25402508 NR Description: hypothetical protein [imported] - Arabidopsis >gi|2342692|gb|AAB70419.1| Similar to Nicotiana protein kinase
  misc_feature (1)..(604): Homolog of NCBI NO: 477094 NR Description: STE11 protein kinase homolog NPK1 - common tobacco
  misc_feature (1)..(604): Homolog of NCBI NO: 456309 NR Description: protein kinase [Nicotiana tabacum]
  misc_feature (1)..(582): Homolog of NCBI NO: 15230612 NR Description: protein kinase, putative [Arabidopsis thaliana]
MAPPISWRKGQLIGRGAFGTVYMGMNLDSGELLAVKQVLIAANFASKEKTQAHIQELEEEVKLLKNLSHPNIVRYLGTVREDDTLNILLEFVPGGSISSLLEKFGPFPESVVRTYTRQLLLGLEYLHNHAIMHRDIKGANILVDNKGCIKLADFGASKQVAELATMTGAKSMKGTPYWMAPEVILQTGHSFSADIWSVGCTVIEMVTGKAPWSQQYKEVAAIFFIGTTKSHPPIPDTLSSDAKDFLLKCLQEVPNLRPTASELLKHPFVMGKHKESASTDLGSVLNNLSTPLPLQINNTKSTPDSTCDDVGDMCNFGSLNYSLVDPVKSIQNKNLWQQNDNGGDEDDMCLIDDENFLTFDGEMSSTLEKDCHLKKSCDDISDMSIALKSKFDESPGNGEKESTMSMECDQPSYSEDDDELTESKIKAFLDEKAADLKKLQTPLYEEFYNSLITFSPSCMESNLSNSKREDTARGFLKLPPKSRSPSRGPLGGSPSRATDATSCSKSPGSGGSRELNINNGGDEASQDGVSARVTDWRGLVVDTKQELSQCVALSEIEKKWKEELDQELERKRQEIMRQAGLGSSPRDRGMSRQREKSRFASPGK

SEQ ID NO: 106521 - protein, 582 aa, Arabidopsis thaliana
  peptide (1)..(582): Ceres Seq. ID no. 13619811
  misc_feature (1)..(247): Pfam Name: Protein kinase domain Pfam Description: Protein kinase domain
  misc_feature (1)..(582): Homolog of NCBI NO: 25387090 NR Description: NPK1-related protein kinase 2 [imported] -
  misc_feature (1)..(582): Homolog of NCBI NO: 2342425 NR Description: NPK1-related protein kinase 2 [Arabidopsis
  misc_feature (1)..(410): Homolog of NCBI NO: 15221948 NR Description: protein kinase, putative [Arabidopsis thaliana]
  misc_feature (526)..(582): Homolog of NCBI NO: 15221948 NR Description: protein kinase, putative [Arabidopsis thaliana]
  misc_feature (465)..(540): Homolog of NCBI NO: 15221948 NR Description: protein kinase, putative [Arabidopsis thaliana]
  misc_feature (1)..(288): Homolog of NCBI NO: 2342423 NR Description: NPK1-related protein kinase 1S [Arabidopsis
  misc_feature (281)..(582): Homolog of NCBI NO: 25402508 NR Description: hypothetical protein [imported] - Arabidopsis >gi|2342692|gb|AAB70419.1| Similar to Nicotiana protein kinase
  misc_feature (1)..(582): Homolog of NCBI NO: 477094 NR Description: STE11 protein kinase homolog NPK1 - common tobacco
  misc_feature (1)..(582): Homolog of NCBI NO: 456309 NR Description: protein kinase [Nicotiana tabacum]
  misc_feature (1)..(560): Homolog of NCBI NO: 15230612 NR Description: protein kinase, putative [Arabidopsis thaliana]
MGMNLDSGELLAVKQVLIAANFASKEKTQAHIQELEEEVKLLKNLSHPNIVRYLGTVREDDTLNILLEFVPGGSISSLLEKFGPFPESVVRTYTRQLLLGLEYLHNHAIMHRDIKGANILVDNKGCIKLADFGASKQVAELATMTGAKSMKGTPYWMAPEVILQTGHSFSADIWSVGCTVIEMVTGKAPWSQQYKEVAAIFFIGTTKSHPPIPDTLSSDAKDFLLKCLQEVPNLRPTASELLKHPFVMGKHKESASTDLGSVLNNLSTPLPLQINNTKSTPDSTCDDVGDMCNFGSLNYSLVDPVKSIQNKNLWQQNDNGGDEDDMCLIDDENFLTFDGEMSSTLEKDCHLKKSCDDISDMSIALKSKFDESPGNGEKESTMSMECDQPSYSEDDDELTESKIKAFLDEKAADLKKLQTPLYEEFYNSLITFSPSCMESNLSNSKREDTARGFLKLPPKSRSPSRGPLGGSPSRATDATSCSKSPGSGGSRELNINNGGDEASQDGVSARVTDWRGLVVDTKQELSQCVALSEIEKKWKEELDQELERKRQEIMRQAGLGSSPRDRGMSRQREKSRFASPGK

SEQ ID NO: 106522 - DNA, 1547 bp, Arabidopsis thaliana
  misc_feature (1)..(1547): Ceres Seq. ID no. 13619816
  misc_feature: MA Experiment ID: 108434 Result: Up-regulated in Transcription
  misc_feature: MA Experiment 108434 PARAMETER Experiment Name: At_Root_Tips_cDNA_P Parameter: Tissue Value: Root Tips
  misc_feature: MA Experiment ID: 108463 Result: Down-regulated in Transcription
  misc_feature: MA Experiment 108463 PARAMETER Experiment Name: At_Germinating_Seeds_cDNA_P Parameter: Age (day) Value: 3 vs. 0
  misc_feature: MA Experiment 108463 PARAMETER Experiment Name: At_Germinating_Seeds_cDNA_P Parameter: Tissue Value: Germinating Seeds
  misc_feature: MA Experiment ID: 108572 Result: Down-regulated in Transcription
  misc_feature: MA Experiment 108572 PARAMETER Experiment Name: At_Drought_cDNA_P Parameter: Timepoint (hr) Value: 1
  misc_feature: MA Experiment 108572 PARAMETER Experiment Name: At_Drought_cDNA_P Parameter: Tissue Value: Aerial
  misc_feature: MA Experiment 108572 PARAMETER Experiment Name: At_Drought_cDNA_P Parameter: Treatment Value: Drought vs. No Drought
  misc_feature: MA Experiment ID: 108573 Result: Down-regulated in Transcription
  misc_feature: MA Experiment 108573 PARAMETER Experiment Name: At_Drought_cDNA_P Parameter: Timepoint (hr) Value: 6
  misc_feature: MA Experiment 108573 PARAMETER Experiment Name: At_Drought_cDNA_P Parameter: Tissue Value: Aerial
  misc_feature: MA Experiment 108573 PARAMETER Experiment Name: At_Drought_cDNA_P Parameter: Treatment Value: Drought vs. No Drought
  misc_feature: MA Experiment ID: 20000090 Result: Up-regulated in Transcription
  misc_feature: MA Experiment ID: 20000093 Result: Up-regulated in Transcription
  misc_feature: MA Experiment 20000093 PARAMETER Experiment Name: At_42deg_Heat_cDNA_P Parameter: Temperature (deg C) Value: 42 vs. 22
  misc_feature: MA Experiment 20000093 PARAMETER Experiment Name: At_42deg_Heat_cDNA_P Parameter: Timepoint (hr) Value: 0.5
  misc_feature: MA Experiment 20000093 PARAMETER Experiment Name: At_42deg_Heat_cDNA_P Parameter: Tissue Value: Aerial
  misc_feature: MA Experiment ID: 20000144 Result: Up-regulated in Transcription
  misc_feature: MA Experiment 20000144 PARAMETER Experiment Name: At_42deg_Heat_cDNA_P Parameter: Temperature (deg C) Value: 42 vs. 22
  misc_feature: MA Experiment 20000144 PARAMETER Experiment Name: At_42deg_Heat_cDNA_P Parameter: Timepoint (hr) Value: 1
  misc_feature: MA Experiment 20000144 PARAMETER Experiment Name: At_42deg_Heat_cDNA_P Parameter: Tissue Value: Aerial
  misc_feature: MA Experiment ID: 20000179 Result: Up-regulated in Transcription
  misc_feature: MA Experiment 20000179 PARAMETER Experiment Name: At_Germinating_Seeds_P Parameter: Age (hr) Value: 6 vs. 0
  misc_feature: MA Experiment 20000179 PARAMETER Experiment Name: At_Germinating_Seeds_P Parameter: Tissue Value: Germinating Seeds
  misc_feature: MA Experiment ID: 20000185 Result: Up-regulated in Transcription
  misc_feature: MA Experiment 20000185 PARAMETER Experiment Name: At_Roots__P Parameter: Age (day) Value: 7 vs. 21
  misc_feature: MA Experiment 20000185 PARAMETER Experiment Name: At_Roots__P Parameter: Organism Value: A. thaliana
  misc_feature: MA Experiment 20000185 PARAMETER Experiment Name: At_Roots__P Parameter: Tissue Value: Roots vs. Whole Plant
  misc_feature: MA Experiment ID: 20000224 Result: Up-regulated in Transcription
  misc_feature: MA Experiment ID: 20000227 Result: Up-regulated in Transcription
  misc_feature: MA Experiment 20000227 PARAMETER Experiment Name: At_Root-Tips-vs-Tops_P Parameter: Tissue Value: Root Tips vs. Root Tops
  misc_feature: MA Experiment ID: 20000234 Result: Up-regulated in Transcription
  misc_feature: MA Experiment 20000234 PARAMETER Experiment Name: At_Siliques_P Parameter: Age (day) Value: 21
  misc_feature: MA Experiment 20000234 PARAMETER Experiment Name: At_Siliques_P Parameter: Organism Value: A. thaliana
  misc_feature: MA Experiment 20000234 PARAMETER Experiment Name: At_Siliques_P Parameter: Plant Line Value: WS
  misc_feature: MA Experiment 20000234 PARAMETER Experiment Name: At_Siliques_P Parameter: Tissue Value: Less Than 5mm Siliques vs. Whole Plant
  misc_feature: MA Experiment ID: 20000235 Result: Up-regulated in Transcription
  misc_feature: MA Experiment 20000235 PARAMETER Experiment Name: At_Siliques_P Parameter: Age (day) Value: 21
  misc_feature: MA Experiment 20000235 PARAMETER Experiment Name: At_Siliques_P Parameter: Organism Value: A. thaliana
  misc_feature: MA Experiment 20000235 PARAMETER Experiment Name: At_Siliques_P Parameter: Plant Line Value: WS
  misc_feature: MA Experiment 20000235 PARAMETER Experiment Name: At_Siliques_P Parameter: Tissue Value: 5-10mm Siliques vs. Whole Plant
  misc_feature: MA Experiment ID: 20000264 Result: Up-regulated in Transcription
  misc_feature: MA Experiment 20000264 PARAMETER Experiment Name: At_Open_Flower_P Parameter: Age (day) Value: 21
  misc_feature: MA Experiment 20000264 PARAMETER Experiment Name: At_Open_Flower_P Parameter: Plant Line Value: WS
  misc_feature: MA Experiment 20000264 PARAMETER Experiment Name: At_Open_Flower_P Parameter: Tissue Value: Open Flower vs. Whole Plant
  misc_feature: MA Experiment ID: 20000265 Result: Up-regulated in Transcription
  misc_feature: MA Experiment 20000265 PARAMETER Experiment Name: At_Open_Flower_P Parameter: Age (day) Value: 21
  misc_feature: MA Experiment 20000265 PARAMETER Experiment Name: At_Open_Flower_P Parameter: Plant Line Value: WS
  misc_feature: MA Experiment 20000265 PARAMETER Experiment Name: At_Open_Flower_P Parameter: Tissue Value: Closed Flower vs. Whole Plant
  misc_feature: MA Experiment ID: 20000437 Result: Down-regulated in Transcription
  misc_feature: MA Experiment 20000437 PARAMETER Experiment Name: At_Drought_P Parameter: Age (day) Value: 8
  misc_feature: MA Experiment 20000437 PARAMETER Experiment Name: At_Drought_P Parameter: Organism Value: A. thaliana
  misc_feature: MA Experiment 20000437 PARAMETER Experiment Name: At_Drought_P Parameter: Plant Line Value: WS
  misc_feature: MA Experiment 20000437 PARAMETER Experiment Name: At_Drought_P Parameter: Timepoint (hr) Value: 24
  misc_feature: MA Experiment 20000437 PARAMETER Experiment Name: At_Drought_P Parameter: Tissue Value: Whole Plant
  misc_feature: MA Experiment 20000437 PARAMETER Experiment Name: At_Drought_P Parameter: Treatment Value: Drought vs. No Drought
  misc_feature: MA Experiment ID: 20001560 Result: Up-regulated in Transcription
  misc_feature: MA Experiment 20001560 PARAMETER Experiment Name: At_Drought_Soil_Dry_P Parameter: Age (day) Value: 28
  misc_feature: MA Experiment 20001560 PARAMETER Experiment Name: At_Drought_Soil_Dry_P Parameter: Organism Value: A. thaliana
  misc_feature: MA Experiment 20001560 PARAMETER Experiment Name: At_Drought_Soil_Dry_P Parameter: Plant Line Value: WS
  misc_feature: MA Experiment 20001560 PARAMETER Experiment Name: At_Drought_Soil_Dry_P Parameter: Post Timepoint (hr) Value: None
  misc_feature: MA Experiment 20001560 PARAMETER Experiment Name: At_Drought_Soil_Dry_P Parameter: Post-Treatment Value: None
  misc_feature: MA Experiment 20001560 PARAMETER Experiment Name: At_Drought_Soil_Dry_P Parameter: Timepoint (day) Value: 14
  misc_feature: MA Experiment 20001560 PARAMETER Experiment Name: At_Drought_Soil_Dry_P Parameter: Treatment Value: Drought vs. No Drought
  misc_feature: MA Experiment ID: 20001905 Result: Down-regulated in Transcription
  misc_feature: MA Experiment 20001905 PARAMETER Experiment Name: At_Drought_Reproduction_P Parameter: Age (day) Value: 40
  misc_feature: MA Experiment 20001905 PARAMETER Experiment Name: At_Drought_Reproduction_P Parameter: Organism Value: A. thaliana
  misc_feature: MA Experiment 20001905 PARAMETER Experiment Name: At_Drought_Reproduction_P Parameter: Plant Line Value: WS
  misc_feature: MA Experiment 20001905 PARAMETER Experiment Name: At_Drought_Reproduction_P Parameter: Timepoint (day) Value: 10
  misc_feature: MA Experiment 20001905 PARAMETER Experiment Name: At_Drought_Reproduction_P Parameter: Tissue Value: Rosettes
  misc_feature: MA Experiment 20001905 PARAMETER Experiment Name: At_Drought_Reproduction_P Parameter: Treatment Value: Drought vs. No Drought
  misc_feature: MA Experiment ID: 20001911 Result: Down-regulated in Transcription
  misc_feature: MA Experiment 20001911 PARAMETER Experiment Name: At_Drought_Reproduction_P Parameter: Age (day) Value: 40
  misc_feature: MA Experiment 20001911 PARAMETER Experiment Name: At_Drought_Reproduction_P Parameter: Organism Value: A. thaliana
  misc_feature: MA Experiment 20001911 PARAMETER Experiment Name: At_Drought_Reproduction_P Parameter: Plant Line Value: WS
  misc_feature: MA Experiment 20001911 PARAMETER Experiment Name: At_Drought_Reproduction_P Parameter: Timepoint (day) Value: 10
  misc_feature: MA Experiment 20001911 PARAMETER Experiment Name: At_Drought_Reproduction_P Parameter: Tissue Value: Flowers
  misc_feature: MA Experiment 20001911 PARAMETER Experiment Name: At_Drought_Reproduction_P Parameter: Treatment Value: Drought vs. No Drought
atatataagctccaggtcttgtacatcttcatcatctgatctcggggaagctccgatctgagttttttttagcaatggcgaaaatgattcctagcctcgtctctctaattcttatcggtcttgttgcgatcgcctccgccgcagttattttcgaggagcgctttgatgatggctgggagaacagatgggttaaatctgagtggaagaaggatgataacactgctggggagtggaagcacactgcgggaaattggtctggtgacgctaacgataaaggtatccagaccagtgaagactacagattctacgccatttcagctgagttccctgaattcagtaacaaggacaagaccttagtcttccaattctcagtcaagcacgagcaaaagcttgactgcggtggtggctacatgaagctactaagtggtgatgttgaccaaaagaaatttggtggagacacaccatacagtatcatgtttggtcctgatatctgtggctacagcacaaagaaagtgcatgctatccttacctataatgaagccaaccacctgatcaagaaagatgttccatgtgaaactgaccagctcacccatgtgtacacatttatcctccgcccagatgctacttacagcattctcatcgacaatgttgagaaacaaactggtagcctttactctgactgggatcttctcccacccaagaagatcaaggaccccagcgccaagaagcctgaggactgggacgaacaagaatacatttctgaccctgaagacaagaaacctgacggttacgatgatatccctaaggagatcccagacaccgactcaaagaagcctgaggactgggatgatgaagaagatggtgagtggactgccccaacaatccccaaccctgagtacatgggtgaatggaagcctaagcaaatcaagaaccccaactacaagggcaagtgggaggctccattgattgacaaccctgacttcaaggatgacccagagctctacgtcttccccaagctgaaatatgttggactcgaattgtggcaggtgaaatcaggatcattgttcgacaatgtcttgatctgcgatgacccagactatgccaagaagttggcagatgaaacatggggaaagctcaaggatgcggagaaagcagctttcgatgaggctgagaagaagaatgaggaagaggaatccaaggacgcacctgcggaatctgatgctgaagacgaaccagaggatgatgaaggaggagatgattccgattctgaatctaaggccgaggagaccaaatcagtagatagcgaggaaacctctgagaaagacgccaccgctcatgatgagctataggtgaaaggttgaagatttgaagaccaaagttttcagtctctttattgttttatcgttttcttttgaagtattttagcatctagtttgtcggagatagaaacaagttttagcaaaactaaaagggggatacaatgtctgtcagatgctcattttagactttaaaaaaccatgaagaagttttgcagttgcttctctttc

SEQ ID NO: 106523 - protein, 424 aa, Arabidopsis thaliana; identical to SEQ ID NO: 36315
  peptide (1)..(424): Ceres Seq. ID no. 13619817
  misc_feature (24)..(336): Pfam Name: Calreticulin family Pfam Description: Calreticulin family
  misc_feature (1)..(424): Homolog of NCBI NO: 15217459 NR Description: calreticulin 2 (CRT2) [Arabidopsis thaliana] At1g09210/T12M4_8 [Arabidopsis thaliana]
  misc_feature (1)..(424): Homolog of NCBI NO: 21555174 NR Description: putative calcium-binding protein, calreticulin
  misc_feature (1)..(424): Homolog of NCBI NO: 12643243 NR Description: CALRETICULIN 2 PRECURSOR
  misc_feature (1)..(421): Homolog of NCBI NO: 25295763 NR Description: hypothetical protein [imported] - Arabidopsis >gi|3249100|gb|AAC24083.1| Match to calreticulin (AtCRTL) mRNA
  misc_feature (18)..(424): Homolog of NCBI NO: 1009712 NR Description: calreticulin
  misc_feature (1)..(424): Homolog of NCBI NO: 15223517 NR Description: calreticulin 1 (CRT1) [Arabidopsis thaliana]
  misc_feature (1)..(415): Homolog of NCBI NO: 24417462 NR Description: unknown [Arabidopsis thaliana]
  misc_feature (88)..(424): Homolog of NCBI NO: 7441500 NR Description: probable calreticulin - rape
  misc_feature (1)..(424): Homolog of NCBI NO: 11131904 NR Description: Calreticulin precursor
  misc_feature (6)..(424): Homolog of NCBI NO: 11131745 NR Description: Calreticulin precursor >gi|7441496|pir||T10172

SEQ ID NO: 106524 - protein, 421 aa, Arabidopsis thaliana; identical to SEQ ID NO: 36316
  peptide (1)..(421): Ceres Seq. ID no. 13619818
  misc_feature (21)..(333): Pfam Name: Calreticulin family Pfam Description: Calreticulin family
  misc_feature (1)..(421): Homolog of NCBI NO: 15217459 NR Description: calreticulin 2 (CRT2) [Arabidopsis thaliana] At1g09210/T12M4_8 [Arabidopsis thaliana]
  misc_feature (1)..(421): Homolog of NCBI NO: 21555174 NR Description: putative calcium-binding protein, calreticulin
  misc_feature (1)..(421): Homolog of NCBI NO: 12643243 NR Description: CALRETICULIN 2 PRECURSOR
  misc_feature (1)..(418): Homolog of NCBI NO: 25295763 NR Description: hypothetical protein [imported] - Arabidopsis >gi|3249100|gb|AAC24083.1| Match to calreticulin (AtCRTL) mRNA
  misc_feature (15)..(421): Homolog of NCBI NO: 1009712 NR Description: calreticulin
  misc_feature (1)..(421): Homolog of NCBI NO: 15223517 NR Description: calreticulin 1 (CRT1) [Arabidopsis thaliana]
  misc_feature (1)..(412): Homolog of NCBI NO: 24417462 NR Description: unknown [Arabidopsis thaliana]
  misc_feature (85)..(421): Homolog of NCBI NO: 7441500 NR Description: probable calreticulin - rape
  misc_feature (1)..(421): Homolog of NCBI NO: 11131904 NR Description: Calreticulin precursor
  misc_feature (3)..(421): Homolog of NCBI NO: 11131745 NR Description: Calreticulin precursor >gi|7441496|pir||T10172

SEQ ID NO: 106525 - protein, 312 aa, Arabidopsis thaliana; identical to SEQ ID NO: 36317
  peptide (1)..(312): Ceres Seq. ID no. 13619819
  misc_feature (1)..(224): Pfam Name: Calreticulin family Pfam Description: Calreticulin family
  misc_feature (1)..(312): Homolog of NCBI NO: 15217459 NR Description: calreticulin 2 (CRT2) [Arabidopsis thaliana] At1g09210/T12M4_8 [Arabidopsis thaliana]
  misc_feature (1)..(312): Homolog of NCBI NO: 21555174 NR Description: putative calcium-binding protein, calreticulin
  misc_feature (1)..(312): Homolog of NCBI NO: 12643243 NR Description: CALRETICULIN 2 PRECURSOR
  misc_feature (1)..(309): Homolog of NCBI NO: 25295763 NR Description: hypothetical protein [imported] - Arabidopsis >gi|3249100|gb|AAC24083.1| Match to calreticulin (AtCRTL) mRNA
  misc_feature (1)..(312): Homolog of NCBI NO: 1009712 NR Description: calreticulin
  misc_feature (1)..(312): Homolog of NCBI NO: 15223517 NR Description: calreticulin 1 (CRT1) [Arabidopsis thaliana]
  misc_feature (1)..(303): Homolog of NCBI NO: 24417462 NR Description: unknown [Arabidopsis thaliana]
  misc_feature (1)..(312): Homolog of NCBI NO: 7441500 NR Description: probable calreticulin - rape
  misc_feature (1)..(312): Homolog of NCBI NO: 11131904 NR Description: Calreticulin precursor
  misc_feature (1)..(312): Homolog of NCBI NO: 11131745 NR Description: Calreticulin precursor >gi|7441496|pir||T10172

SEQ ID NO: 106526 - DNA, 688 bp, Arabidopsis thaliana
  misc_feature (1)..(688): Ceres Seq. ID no. 13619820
  misc_feature: MA Experiment ID: 20000794 Result: Down-regulated in Transcription
  misc_feature: MA Experiment 20000794 PARAMETER Experiment Name: At_Petals_P Parameter: Age (day) Value: 23-25 days
  misc_feature: MA Experiment 20000794 PARAMETER Experiment Name: At_Petals_P Parameter: Plant Line Value: WS
  misc_feature: MA Experiment 20000794 PARAMETER Experiment Name: At_Petals_P Parameter: Tissue Value: Petals vs. Whole plant
  misc_feature: MA Experiment ID: 20001451 Result: Down-regulated in Transcription
  misc_feature: MA Experiment 20001451 PARAMETER Experiment Name: At_Far-red-induction_P Parameter: Age (day) Value: 7
  misc_feature: MA Experiment 20001451 PARAMETER Experiment Name: At_Far-red-induction_P Parameter: Light Value: Far-red vs. White
  misc_feature: MA Experiment 20001451 PARAMETER Experiment Name: At_Far-red-induction_P Parameter: Organism Value: A. thaliana
  misc_feature: MA Experiment 20001451 PARAMETER Experiment Name: At_Far-red-induction_P Parameter: Plant Line Value: Columbia
  misc_feature: MA Experiment 20001451 PARAMETER Experiment Name: At_Far-red-induction_P Parameter: Timepoint (hr) Value: 24
  misc_feature: MA Experiment 20001451 PARAMETER Experiment Name: At_Far-red-induction_P Parameter: Tissue Value: Whole Plant
  misc_feature: MA Experiment ID: 20001558 Result: Up-regulated in Transcription
  misc_feature: MA Experiment 20001558 PARAMETER Experiment Name: At_Drought_Soil_Dry_P Parameter: Age (day) Value: 27
  misc_feature: MA Experiment 20001558 PARAMETER Experiment Name: At_Drought_Soil_Dry_P Parameter: Organism Value: A. thaliana
  misc_feature: MA Experiment 20001558 PARAMETER Experiment Name: At_Drought_Soil_Dry_P Parameter: Plant Line Value: WS
  misc_feature: MA Experiment 20001558 PARAMETER Experiment Name: At_Drought_Soil_Dry_P Parameter: Post Timepoint (hr) Value: 6
  misc_feature: MA Experiment 20001558 PARAMETER Experiment Name: At_Drought_Soil_Dry_P Parameter: Post-Treatment Value: Re-Water vs. No Drought
  misc_feature: MA Experiment 20001558 PARAMETER Experiment Name: At_Drought_Soil_Dry_P Parameter: Timepoint (day) Value: 13
  misc_feature: MA Experiment 20001558 PARAMETER Experiment Name: At_Drought_Soil_Dry_P Parameter: Treatment Value: Drought vs. No Drought
  misc_feature: MA Experiment ID: 20001560 Result: Up-regulated in Transcription
  misc_feature: MA Experiment 20001560 PARAMETER Experiment Name: At_Drought_Soil_Dry_P Parameter: Age (day) Value: 28
  misc_feature: MA Experiment 20001560 PARAMETER Experiment Name: At_Drought_Soil_Dry_P Parameter: Organism Value: A. thaliana
  misc_feature: MA Experiment 20001560 PARAMETER Experiment Name: At_Drought_Soil_Dry_P Parameter: Plant Line Value: WS
  misc_feature: MA Experiment 20001560 PARAMETER Experiment Name: At_Drought_Soil_Dry_P Parameter: Post Timepoint (hr) Value: None
  misc_feature: MA Experiment 20001560 PARAMETER Experiment Name: At_Drought_Soil_Dry_P Parameter: Post-Treatment Value: None
  misc_feature: MA Experiment 20001560 PARAMETER Experiment Name: At_Drought_Soil_Dry_P Parameter: Timepoint (day) Value: 14
  misc_feature: MA Experiment 20001560 PARAMETER Experiment Name: At_Drought_Soil_Dry_P Parameter: Treatment Value: Drought vs. No Drought
  misc_feature: MA Experiment ID: 20001757 Result: Up-regulated in Transcription
  misc_feature: MA Experiment 20001757 PARAMETER Experiment Name: At_50mM_NH4NO3_L-to-H_P Parameter: Timepoint (hr) Value: 6
  misc_feature: MA Experiment 20001757 PARAMETER Experiment Name: At_50mM_NH4NO3_L-to-H_P Parameter: Tissue Value: Leaf
  misc_feature: MA Experiment 20001757 PARAMETER Experiment Name: At_50mM_NH4NO3_L-to-H_P Parameter: Treatment Value: 50mM NH4NO3 vs 100mM Mannitol
atatataaaccctaatcacatttcgcaaccaccaaagcggaggaaaaatgccggctggacatggagttcgagcgagaacgagggatctgttcgcgaggcctttcaggaagaagggttacattcctctatcgacttacctgaggaccttcaaggtcggcgattacgtcgatgtgaaggtgaatggtgcgatccacaagggtatgcctcacaagttctaccatggtcgtactggtcgtatctggaacgtcaccaagcgcgccgtcggtgttgaagtcaacaaacagattgggaacaggatcataaggaagaggattcatgttcgtgtggagcatgtgcagcagtcaagatgtgccgaggagttcaagctgaggaagaagaaaaacgatgagctcaaggctgcagccaaagccaatggtgagaccatcagcaccaagagacagcctaaaggacccaaaccaggattcatggtcgaaggaatgaccttggagactgtcactccaatcccctacgatgtcgtcaacgatctcaaaggaggctattagttctatcttcttgtgctttagaactctttttcatttgttttgtagcagacttaaaactaagaattatgatttactatataacaggagtttgcaatccagattttgtaaggatggtttatttttattattggtatttttgatcttcc

SEQ ID NO: 106527 - protein, 164 aa, Arabidopsis thaliana; identical to SEQ ID NO: 36570
  peptide (1)..(164): Ceres Seq. ID no. 13619821
  misc_feature (2)..(100): Pfam Name: Ribosomal protein L21e Pfam Description: Ribosomal protein L21e
  misc_feature (1)..(164): Homolog of NCBI NO: 18391042 NR Description: 60S ribosomal protein L21 (RPL21A) [Arabidopsis >gi|18391054|ref|NP_563849.1| 60S ribosomal protein L21 (RPL21C)
  misc_feature (1)..(164): Homolog of NCBI NO: 18406015 NR Description: 60S ribosomal protein L21 (RPL21E) [Arabidopsis
  misc_feature (1)..(164): Homolog of NCBI NO: 37535194 NR Description: 60S ribosomal protein L21 [Oryza sativa (japonica group)] >gi|13489167|gb|AAK27801.1| 60S ribosomal protein L21
  misc_feature (1)..(164): Homolog of NCBI NO: 11276828 NR Description: ribosomal protein L21 [imported] - rice
  misc_feature (1)..(164): Homolog of NCBI NO: 32400808 NR Description: 60s ribosomal protein L21 [Triticum aestivum]
  misc_feature (1)..(157): Homolog of NCBI NO: 15213768 NR Description: ribosomal protein L21 [Spodoptera frugiperda]
  misc_feature (1)..(155): Homolog of NCBI NO: 6094029 NR Description: 60S RIBOSOMAL PROTEIN L21
  misc_feature (1)..(155): Homolog of NCBI NO: 40741182 NR Description: hypothetical protein AN4802.2 [Aspergillus
  misc_feature (1)..(155): Homolog of NCBI NO: 6319668 NR Description: Homology to rat L21; Rpl21ap [Saccharomyces
  misc_feature (1)..(157): Homolog of NCBI NO: 20129705 NR Description: CG12775-PA [Drosophila melanogaster]

SEQ ID NO: 106528 - protein, 113 aa, Arabidopsis thaliana; identical to SEQ ID NO: 36571
  peptide (1)..(113): Ceres Seq. ID no. 13619822
  misc_feature (1)..(113): Homolog of NCBI NO: 18391042 NR Description: 60S ribosomal protein L21 (RPL21A) [Arabidopsis >gi|18391054|ref|NP_563849.1| 60S ribosomal protein L21 (RPL21C)
  misc_feature (1)..(113): Homolog of NCBI NO: 18406015 NR Description: 60S ribosomal protein L21 (RPL21E) [Arabidopsis
  misc_feature (1)..(113): Homolog of NCBI NO: 37535194 NR Description: 60S ribosomal protein L21 [Oryza sativa (japonica group)] >gi|13489167|gb|AAK27801.1| 60S ribosomal protein L21
  misc_feature (1)..(113): Homolog of NCBI NO: 11276828 NR Description: ribosomal protein L21 [imported] - rice
  misc_feature (1)..(113): Homolog of NCBI NO: 32400808 NR Description: 60s ribosomal protein L21 [Triticum aestivum]
  misc_feature (1)..(106): Homolog of NCBI NO: 15213768 NR Description: ribosomal protein L21 [Spodoptera frugiperda]
  misc_feature (1)..(104): Homolog of NCBI NO: 6094029 NR Description: 60S RIBOSOMAL PROTEIN L21
  misc_feature (1)..(104): Homolog of NCBI NO: 40741182 NR Description: hypothetical protein AN4802.2 [Aspergillus
  misc_feature (1)..(104): Homolog of NCBI NO: 6319668 NR Description: Homology to rat L21; Rpl21ap [Saccharomyces
  misc_feature (1)..(106): Homolog of NCBI NO: 20129705 NR Description: CG12775-PA [Drosophila melanogaster]

SEQ ID NO: 106529 - protein, 89 aa, Arabidopsis thaliana; identical to SEQ ID NO: 36572
  peptide (1)..(89): Ceres Seq. ID no. 13619823

SEQ ID NO: 106530 - DNA, 1048 bp, Arabidopsis thaliana
  misc_feature (1)..(1048): Ceres Seq. ID no. 13619830
  misc_feature: MA Experiment ID: 108435 Result: Up-regulated in Transcription
  misc_feature: MA Experiment 108435 PARAMETER Experiment Name: At_stm_Mutants_cDNA_P Parameter: Plant Line Value: wt Landsburg vs stm
  misc_feature: MA Experiment 108435 PARAMETER Experiment Name: At_stm_Mutants_cDNA_P Parameter: Tissue Value: Shoot Apical Meristem Region
  misc_feature: MA Experiment ID: 108461 Result: Up-regulated in Transcription
  misc_feature: MA Experiment 108461 PARAMETER Experiment Name: At_Germinating_Seeds_cDNA_P Parameter: Age (day) Value: 1 vs. 0
  misc_feature: MA Experiment 108461 PARAMETER Experiment Name: At_Germinating_Seeds_cDNA_P Parameter: Tissue Value: Germinating Seeds
  misc_feature: MA Experiment ID: 108462 Result: Up-regulated in Transcription
  misc_feature: MA Experiment 108462 PARAMETER Experiment Name: At_Germinating_Seeds_cDNA_P Parameter: Age (day) Value: 2 vs. 0
  misc_feature: MA Experiment 108462 PARAMETER Experiment Name: At_Germinating_Seeds_cDNA_P Parameter: Tissue Value: Germinating Seeds
  misc_feature: MA Experiment ID: 108463 Result: Up-regulated in Transcription
  misc_feature: MA Experiment 108463 PARAMETER Experiment Name: At_Germinating_Seeds_cDNA_P Parameter: Age (day) Value: 3 vs. 0
  misc_feature: MA Experiment 108463 PARAMETER Experiment Name: At_Germinating_Seeds_cDNA_P Parameter: Tissue Value: Germinating Seeds
  misc_feature: MA Experiment ID: 108488 Result: Up-regulated in Transcription
  misc_feature: MA Experiment ID: 108595 Result: Up-regulated in Transcription
  misc_feature: MA Experiment 108595 PARAMETER Experiment Name: At_Ler-pi_Ovule_cDNA_P Parameter: Plant Line Value: null
  misc_feature: MA Experiment ID: 20000111 Result: Down-regulated in Transcription
  misc_feature: MA Experiment 20000111 PARAMETER Experiment Name: At_42deg_Heat_cDNA_P Parameter: Temperature (deg C) Value: 42 vs. 22
  misc_feature: MA Experiment 20000111 PARAMETER Experiment Name: At_42deg_Heat_cDNA_P Parameter: Timepoint (hr) Value: 6
  misc_feature: MA Experiment 20000111 PARAMETER Experiment Name: At_42deg_Heat_cDNA_P Parameter: Tissue Value: Aerial
  misc_feature: MA Experiment ID: 20000113 Result: Down-regulated in Transcription
  misc_feature: MA Experiment 20000113 PARAMETER Experiment Name: At_42deg_Heat_cDNA_P Parameter: Temperature (deg C) Value: 42 vs. 22
  misc_feature: MA Experiment 20000113 PARAMETER Experiment Name: At_42deg_Heat_cDNA_P Parameter: Timepoint (hr) Value: 8
  misc_feature: MA Experiment 20000113 PARAMETER Experiment Name: At_42deg_Heat_cDNA_P Parameter: Tissue Value: Aerial
  misc_feature: MA Experiment ID: 20000180 Result: Up-regulated in Transcription
  misc_feature: MA Experiment 20000180 PARAMETER Experiment Name: At_Germinating_Seeds_P Parameter: Age (hr) Value: 24 vs. 0
  misc_feature: MA Experiment 20000180 PARAMETER Experiment Name: At_Germinating_Seeds_P Parameter: Tissue Value: Germinating Seeds
  misc_feature: MA Experiment ID: 20000234 Result: Up-regulated in Transcription
  misc_feature: MA Experiment 20000234 PARAMETER Experiment Name: At_Siliques_P Parameter: Age (day) Value: 21
  misc_feature: MA Experiment 20000234 PARAMETER Experiment Name: At_Siliques_P Parameter: Organism Value: A. thaliana
  misc_feature: MA Experiment 20000234 PARAMETER Experiment Name: At_Siliques_P Parameter: Plant Line Value: WS
  misc_feature: MA Experiment 20000234 PARAMETER Experiment Name: At_Siliques_P Parameter: Tissue Value: Less Than 5mm Siliques vs. Whole Plant
  misc_feature: MA Experiment ID: 20000264 Result: Up-regulated in Transcription
  misc_feature: MA Experiment 20000264 PARAMETER Experiment Name: At_Open_Flower_P Parameter: Age (day) Value: 21
  misc_feature: MA Experiment 20000264 PARAMETER Experiment Name: At_Open_Flower_P Parameter: Plant Line Value: WS
  misc_feature: MA Experiment 20000264 PARAMETER Experiment Name: At_Open_Flower_P Parameter: Tissue Value: Open Flower vs. Whole Plant
  misc_feature: MA Experiment ID: 20000265 Result: Up-regulated in Transcription
  misc_feature: MA Experiment 20000265 PARAMETER Experiment Name: At_Open_Flower_P Parameter: Age (day) Value: 21
  misc_feature: MA Experiment 20000265 PARAMETER Experiment Name: At_Open_Flower_P Parameter: Plant Line Value: WS
  misc_feature: MA Experiment 20000265 PARAMETER Experiment Name: At_Open_Flower_P Parameter: Tissue Value: Closed Flower vs. Whole Plant
  misc_feature: MA Experiment ID: 20001557 Result: Down-regulated in Transcription
  misc_feature: MA Experiment 20001557 PARAMETER Experiment Name: At_Drought_Soil_Dry_P Parameter: Age (day) Value: 27
  misc_feature: MA Experiment 20001557 PARAMETER Experiment Name: At_Drought_Soil_Dry_P Parameter: Organism Value: A. thaliana
  misc_feature: MA Experiment 20001557 PARAMETER Experiment Name: At_Drought_Soil_Dry_P Parameter: Plant Line Value: WS
  misc_feature: MA Experiment 20001557 PARAMETER Experiment Name: At_Drought_Soil_Dry_P Parameter: Post Timepoint (hr) Value: 3
  misc_feature: MA Experiment 20001557 PARAMETER Experiment Name: At_Drought_Soil_Dry_P Parameter: Post-Treatment Value: Re-Water vs. No Drought
  misc_feature: MA Experiment 20001557 PARAMETER Experiment Name: At_Drought_Soil_Dry_P Parameter: Timepoint (day) Value: 13
  misc_feature: MA Experiment 20001557 PARAMETER Experiment Name: At_Drought_Soil_Dry_P Parameter: Treatment Value: Drought vs. No Drought
  misc_feature: MA Experiment ID: 20001558 Result: Down-regulated in Transcription
  misc_feature: MA Experiment 20001558 PARAMETER Experiment Name: At_Drought_Soil_Dry_P Parameter: Age (day) Value: 27
  misc_feature: MA Experiment 20001558 PARAMETER Experiment Name: At_Drought_Soil_Dry_P Parameter: Organism Value: A. thaliana
  misc_feature: MA Experiment 20001558 PARAMETER Experiment Name: At_Drought_Soil_Dry_P Parameter: Plant Line Value: WS
  misc_feature: MA Experiment 20001558 PARAMETER Experiment Name: At_Drought_Soil_Dry_P Parameter: Post Timepoint (hr) Value: 6
  misc_feature: MA Experiment 20001558 PARAMETER Experiment Name: At_Drought_Soil_Dry_P Parameter: Post-Treatment Value: Re-Water vs. No Drought
  misc_feature: MA Experiment 20001558 PARAMETER Experiment Name: At_Drought_Soil_Dry_P Parameter: Timepoint (day) Value: 13
  misc_feature: MA Experiment 20001558 PARAMETER Experiment Name: At_Drought_Soil_Dry_P Parameter: Treatment Value: Drought vs. No Drought
acatggctcctcatcattcatcatcacgataaaaatgcatagtacataaagtatccattaaaacgtagatctagtctcttcacaacacttcaacagttcaactaataacgcaaaaatcagtttctctttgagtaagtgtttattacaattaaactaactcaggcaagtctatgatcatggcttcttctgctgctgcatcgatctctatgataactctaaggaacctctctcgcaatcatcaatctcaccaaagcacttttctcggtttctctagatccttccataaccaaaggatctcatctaacagtccaggtctctccacacgagcaagatccaccacttcctccactggaggtttcttcagaaccatttgcagcagcagtagcaatgactactccagaccaactaagatccaagagcttaacgtctacgagttcaacgaaggtgatcgaaacagtccagcggttttaaaactagggaaaaaaccagatcagctttgtctcggagatcttgtccccttcacaaacaaactctacacaggagatctcacaaaacgcataggaatcaccgcaggtctctgcgttttgatccaacatgttccagagaagaaaggtgatcgctttgaagcttcttacagtttctacttcggagattatggtcacatatcagttcaaggaccttatctcacttacgaggacacgtttcttgctatcaccggtggctccggcgtgtttgaaggagcttatggacaggtcaagcttcgtcagcttgtgtatcctacgaagctgttttacactttctacttgaaaggtgttgctgctgatttacctgtggagcttaccggaaaacatgttgagccgtcgaaggaagtgaaaccggcggctgaagctcaggcgactcagcccggcgctacgatcgctaactttactaattgaaatctaaatctttgtgggtgtctttgtcatggatcttattgggctgttgttcattgtgtttacattttaataatgggcctaaataatgagcctttgtattgggccgttctcgt

SEQ ID NO: 106531 - protein, 254 aa, Arabidopsis thaliana; identical to SEQ ID NO: 35412
  peptide (1)..(254): Ceres Seq. ID no. 13619831
  misc_feature (74)..(254): Pfam Name: Allene oxide cyclase Pfam Description: Allene oxide cyclase
  misc_feature (1)..(254): Homolog of NCBI NO: 15222241 NR Description: allene oxide cyclase family [Arabidopsis >gi|16323065|gb|AAL15267.1| At1g13280/T6J4_23 [Arabidopsis >gi|22655330|gb|AAM98257.1| At1g13280/T6J4_23 [Arabidopsis
  misc_feature (3)..(254): Homolog of NCBI NO: 18404658 NR Description: allene oxide cyclase family [Arabidopsis >gi|7939564|dbj|BAA95765.1| gene_id:K13N2.12~pir||S57813~similar unknown protein [Arabidopsis thaliana]
  misc_feature (78)..(254): Homolog of NCBI NO: 25518012 NR Description: T6J4.4 protein - Arabidopsis thaliana
  misc_feature (3)..(254): Homolog of NCBI NO: 18404656 NR Description: allene oxide cyclase family [Arabidopsis >gi|7939563|dbj|BAA95764.1| gene_id:K13N2.11~pir||S57813~similar unknown protein [Arabidopsis thaliana]
  misc_feature (3)..(254): Homolog of NCBI NO: 15230874 NR Description: allene oxide cyclase family [Arabidopsis >gi|7939562|dbj|BAA95763.1| gene_id:K13N2.10~pir||S57813~similar
  misc_feature (10)..(254): Homolog of NCBI NO: 15320414 NR Description: ERD12 protein [Arabidopsis thaliana]
  misc_feature (6)..(254): Homolog of NCBI NO: 40644132 NR Description: allene oxide cyclase [Medicago truncatula]
  misc_feature (1)..(254): Homolog of NCBI NO: 16416376 NR Description: mangrin [Bruguiera sexangula]
  misc_feature (3)..(254): Homolog of NCBI NO: 40644130 NR Description: allene oxide cyclase [Nicotiana tabacum]
  misc_feature (43)..(254): Homolog of NCBI NO: 21727906 NR Description: allene oxide cyclase [Oryza sativa (japonica

SEQ ID NO: 106532 - protein, 252 aa, Arabidopsis thaliana; identical to SEQ ID NO: 35413
  peptide (1)..(252): Ceres Seq. ID no. 13619832
  misc_feature (72)..(252): Pfam Name: Allene oxide cyclase Pfam Description: Allene oxide cyclase
  misc_feature (1)..(252): Homolog of NCBI NO: 15222241 NR Description: allene oxide cyclase family [Arabidopsis >gi|16323065|gb|AAL15267.1| At1g13280/T6J4_23 [Arabidopsis >gi|22655330|gb|AAM98257.1| At1g13280/T6J4_23 [Arabidopsis
  misc_feature (1)..(252): Homolog of NCBI NO: 18404658 NR Description: allene oxide cyclase family [Arabidopsis >gi|7939564|dbj|BAA95765.1| gene_id:K13N2.12~pir||S57813~similar unknown protein [Arabidopsis thaliana]
  misc_feature (76)..(252): Homolog of NCBI NO: 25518012 NR Description: T6J4.4 protein - Arabidopsis thaliana
  misc_feature (1)..(252): Homolog of NCBI NO: 18404656 NR Description: allene oxide cyclase family [Arabidopsis >gi|7939563|dbj|BAA95764.1| gene_id:K13N2.11~pir||S57813~similar unknown protein [Arabidopsis thaliana]
  misc_feature (1)..(252): Homolog of NCBI NO: 15230874 NR Description: allene oxide cyclase family [Arabidopsis >gi|7939562|dbj|BAA95763.1| gene_id:K13N2.10~pir||S57813~similar
  misc_feature (8)..(252): Homolog of NCBI NO: 15320414 NR Description: ERD12 protein [Arabidopsis thaliana]
  misc_feature (4)..(252): Homolog of NCBI NO: 40644132 NR Description: allene oxide cyclase [Medicago truncatula]
  misc_feature (1)..(252): Homolog of NCBI NO: 16416376 NR Description: mangrin [Bruguiera sexangula]
  misc_feature (1)..(252): Homolog of NCBI NO: 40644130 NR Description: allene oxide cyclase [Nicotiana tabacum]
  misc_feature (41)..(252): Homolog of NCBI NO: 21727906 NR Description: allene oxide cyclase [Oryza sativa (japonica

SEQ ID NO: 106533 - protein, 242 aa, Arabidopsis thaliana; identical to SEQ ID NO: 35414
  peptide (1)..(242): Ceres Seq. ID no. 13619833
  misc_feature (62)..(242): Pfam Name: Allene oxide cyclase Pfam Description: Allene oxide cyclase
  misc_feature (1)..(242): Homolog of NCBI NO: 15222241 NR Description: allene oxide cyclase family [Arabidopsis >gi|16323065|gb|AAL15267.1| At1g13280/T6J4_23 [Arabidopsis >gi|22655330|gb|AAM98257.1| At1g13280/T6J4_23 [Arabidopsis
  misc_feature (1)..(242): Homolog of NCBI NO: 18404658 NR Description: allene oxide cyclase family [Arabidopsis >gi|7939564|dbj|BAA95765.1| gene_id:K13N2.12~pir||S57813~similar unknown protein [Arabidopsis thaliana]
  misc_feature (66)..(242): Homolog of NCBI NO: 25518012 NR Description: T6J4.4 protein - Arabidopsis thaliana
  misc_feature (1)..(242): Homolog of NCBI NO: 18404656 NR Description: allene oxide cyclase family [Arabidopsis >gi|7939563|dbj|BAA95764.1| gene_id:K13N2.11~pir||S57813~similar unknown protein [Arabidopsis thaliana]
  misc_feature (1)..(242): Homolog of NCBI NO: 15230874 NR Description: allene oxide cyclase family [Arabidopsis >gi|7939562|dbj|BAA95763.1| gene_id:K13N2.10~pir||S57813~similar
  misc_feature (1)..(242): Homolog of NCBI NO: 15320414 NR Description: ERD12 protein [Arabidopsis thaliana]
  misc_feature (1)..(242): Homolog of NCBI NO: 40644132 NR Description: allene oxide cyclase [Medicago truncatula]
  misc_feature (1)..(242): Homolog of NCBI NO: 16416376 NR Description: mangrin [Bruguiera sexangula]
  misc_feature (1)..(242): Homolog of NCBI NO: 40644130 NR Description: allene oxide cyclase [Nicotiana tabacum]
  misc_feature (31)..(242): Homolog of NCBI NO: 21727906 NR Description: allene oxide cyclase [Oryza sativa (japonica

SEQ ID NO: 106534 - DNA, 1147 bp, Arabidopsis thaliana
  misc_feature (1)..(1147): Ceres Seq. ID no. 13619838
  misc_feature: MA Experiment ID: 108434 Result: Up-regulated in Transcription
  misc_feature: MA Experiment 108434 PARAMETER Experiment Name: At_Root_Tips_cDNA_P Parameter: Tissue Value: Root Tips
  misc_feature: MA Experiment ID: 108461 Result: Down-regulated in Transcription
  misc_feature: MA Experiment 108461 PARAMETER Experiment Name: At_Germinating_Seeds_cDNA_P Parameter: Age (day) Value: 1 vs. 0
  misc_feature: MA Experiment 108461 PARAMETER Experiment Name: At_Germinating_Seeds_cDNA_P Parameter: Tissue Value: Germinating Seeds
  misc_feature: MA Experiment ID: 108462 Result: Down-regulated in Transcription
  misc_feature: MA Experiment 108462 PARAMETER Experiment Name: At_Germinating_Seeds_cDNA_P Parameter: Age (day) Value: 2 vs. 0
  misc_feature: MA Experiment 108462 PARAMETER Experiment Name: At_Germinating_Seeds_cDNA_P Parameter: Tissue Value: Germinating Seeds
  misc_feature: MA Experiment ID: 108463 Result: Down-regulated in Transcription
  misc_feature: MA Experiment 108463 PARAMETER Experiment Name: At_Germinating_Seeds_cDNA_P Parameter: Age (day) Value: 3 vs. 0
  misc_feature: MA Experiment 108463 PARAMETER Experiment Name: At_Germinating_Seeds_cDNA_P Parameter: Tissue Value: Germinating Seeds
  misc_feature: MA Experiment ID: 108464 Result: Down-regulated in Transcription
  misc_feature: MA Experiment 108464 PARAMETER Experiment Name: At_Germinating_Seeds_cDNA_P Parameter: Age (day) Value: 4 vs. 0
  misc_feature: MA Experiment 108464 PARAMETER Experiment Name: At_Germinating_Seeds_cDNA_P Parameter: Tissue Value: Germinating Seeds
  misc_feature: MA Experiment ID: 20000180 Result: Down-regulated in Transcription
  misc_feature: MA Experiment 20000180 PARAMETER Experiment Name: At_Germinating_Seeds_P Parameter: Age (hr) Value: 24 vs. 0
  misc_feature: MA Experiment 20000180 PARAMETER Experiment Name: At_Germinating_Seeds_P Parameter: Tissue Value: Germinating Seeds
aaaagtttcagaatcgaactcgtctattctccgccggtgtgccgtcgccgatatgcttcgtcgtgtcttttacaagcgtgcacgtgatgatttatcttactgtcatcgtctgttgcacattccgtataacgaaccagagcctgactcaaaggcaatttctgaaatcgttggtatagtttcaaagaaagaagaagctgtagtagttacggaaccaactcatcattggcgtaagaattgggaagatttgagaaagaataggttaacagctagtaatttcgcgcgtgctatcggattttcgcctgacggtagacgaaatctttggttagagaaaatcggggcagcgaaaccgtttgctggaaaccgagctacgttttgggacattgagaatgaggtcgaagcactcgagaggtacaacgagttaacgggaaatgaaatcctcatacctgagtttgttgtttataagaatggtgaaagccctgaagaaaactggttaggagcttctcctgatggagtgatcaatgtagttaaggacggtgttacttcgtgtggtgtgttagaagtgaaatgcccgtttgataaccgggataactcgaaagtttatccgtggaagaaggttccttataattgtgttccacaacttcagggtttaatggagattgtggatacagattggttggatttgtattgttggactcgcaatggaagcagtctctttagagtttggcgtgataccgcgttttgggaggatatgaaaccggcactgtttgatttttggcagaatcatgttttacctgcaagagagatatacaataactttgatataaaggatcctcaagtgaagctgagagagtttaaaccgaagcattggcatgaagattgcaagaagattatgcgtggagctgagagaatcagcgcaaacgcaaaccgtttgttctatgagatcgatgggaatcttgtagactgaggtttttgtaactgattatgtgaaatttgcaagcaagcaagccaggttcccttatttcatttgaatgttatttgcttagtgtggaatgtagaaaacactaaatgaagctcttgtgttgagctaaagtacatatttcatattgtatactctgtttcttattgtctcatcagcttttgttacatc

SEQ ID NO: 106535 - protein, 320 aa, Arabidopsis thaliana
  peptide (1)..(320): Ceres Seq. ID no. 13619839
  misc_feature (18)..(320): Homolog of NCBI NO: 15222951 NR Description: hypothetical protein [Arabidopsis thaliana]
  misc_feature (29)..(320): Homolog of NCBI NO: 25402766 NR Description: protein F16A14.4 [imported] - Arabidopsis >gi|8778385|gb|AAF79393.1|AC068197_3 F16A14.4 [Arabidopsis
  misc_feature (77)..(318): Homolog of NCBI NO: 10241653 NR Description: contains similarity to F12A21.16 [Oryza sativa
  misc_feature (77)..(318): Homolog of NCBI NO: 38345347 NR Description: OSJNBa0081L15.20 [Oryza sativa (japonica
  misc_feature (77)..(318): Homolog of NCBI NO: 40253518 NR Description: unknown protein [Oryza sativa (japonica
  misc_feature (77)..(314): Homolog of NCBI NO: 25404961 NR Description: protein F12A21.19 [imported] - Arabidopsis >gi|11072024|gb|AAG28903.1|AC008113_19 F12A21.19 [Arabidopsis
  misc_feature (77)..(314): Homolog of NCBI NO: 30697546 NR Description: F12A21.19 [Arabidopsis thaliana] unknown protein [Arabidopsis thaliana]
KVSESNSSILRRCAVADMLRRVFYKRARDDLSYCHRLLHIPYNEPEPDSKAISEIVGIVSKKEEAVVVTEPTHHWRKNWEDLRKNRLTASNFARAIGFSPDGRRNLWLEKIGAAKPFAGNRATFWDIENEVEALERYNELTGNEILIPEFVVYKNGESPEENWLGASPDGVINVVKDGVTSCGVLEVKCPFDNRDNSKVYPWKKVPYNCVPQLQGLMEIVDTDWLDLYCWTRNGSSLFRVWRDTAFWEDMKPALFDFWQNHVLPAREIYNNFDIKDPQVKLREFKPKHWHEDCKKIMRGAERISANANRLFYEIDGNLVD

SEQ ID NO: 106536 - protein, 303 aa, Arabidopsis thaliana
  peptide (1)..(303): Ceres Seq. ID no. 13619840
  misc_feature (1)..(303): Homolog of NCBI NO: 15222951 NR Description: hypothetical protein [Arabidopsis thaliana]
  misc_feature (12)..(303): Homolog of NCBI NO: 25402766 NR Description: protein F16A14.4 [imported] - Arabidopsis >gi|8778385|gb|AAF79393.1|AC068197_3 F16A14.4 [Arabidopsis
  misc_feature (60)..(301): Homolog of NCBI NO: 10241653 NR Description: contains similarity to F12A21.16 [Oryza sativa
  misc_feature (60)..(301): Homolog of NCBI NO: 38345347 NR Description: OSJNBa0081L15.20 [Oryza sativa (japonica
  misc_feature (60)..(301): Homolog of NCBI NO: 40253518 NR Description: unknown protein [Oryza sativa (japonica
  misc_feature (60)..(297): Homolog of NCBI NO: 25404961 NR Description: protein F12A21.19 [imported] - Arabidopsis >gi|11072024|gb|AAG28903.1|AC008113_19 F12A21.19 [Arabidopsis
  misc_feature (60)..(297): Homolog of NCBI NO: 30697546 NR Description: F12A21.19 [Arabidopsis thaliana] unknown protein [Arabidopsis thaliana]
MLRRVFYKRARDDLSYCHRLLHIPYNEPEPDSKAISEIVGIVSKKEEAVVVTEPTHHWRKNWEDLRKNRLTASNFARAIGFSPDGRRNLWLEKIGAAKPFAGNRATFWDIENEVEALERYNELTGNEILIPEFVVYKNGESPEENWLGASPDGVINVVKDGVTSCGVLEVKCPFDNRDNSKVYPWKKVPYNCVPQLQGLMEIVDTDWLDLYCWTRNGSSLFRVWRDTAFWEDMKPALFDFWQNHVLPAREIYNNFDIKDPQVKLREFKPKHWHEDCKKIMRGAERISANANRLFYEIDGNLVD

SEQ ID NO: 106537 - DNA, 984 bp, Arabidopsis thaliana
  misc_feature (1)..(984): Ceres Seq. ID no. 13619841
  misc_feature: MA Experiment ID: 108463 Result: Up-regulated in Transcription
  misc_feature: MA Experiment 108463 PARAMETER Experiment Name: At_Germinating_Seeds_cDNA_P Parameter: Age (day) Value: 3 vs. 0
  misc_feature: MA Experiment 108463 PARAMETER Experiment Name: At_Germinating_Seeds_cDNA_P Parameter: Tissue Value: Germinating Seeds
  misc_feature: MA Experiment ID: 108464 Result: Up-regulated in Transcription
  misc_feature: MA Experiment 108464 PARAMETER Experiment Name: At_Germinating_Seeds_cDNA_P Parameter: Age (day) Value: 4 vs. 0
  misc_feature: MA Experiment 108464 PARAMETER Experiment Name: At_Germinating_Seeds_cDNA_P Parameter: Tissue Value: Germinating Seeds
  misc_feature: MA Experiment ID: 108573 Result: Up-regulated in Transcription
  misc_feature: MA Experiment 108573 PARAMETER Experiment Name: At_Drought_cDNA_P Parameter: Timepoint (hr) Value: 6
  misc_feature: MA Experiment 108573 PARAMETER Experiment Name: At_Drought_cDNA_P Parameter: Tissue Value: Aerial
  misc_feature: MA Experiment 108573 PARAMETER Experiment Name: At_Drought_cDNA_P Parameter: Treatment Value: Drought vs. No Drought
  misc_feature: MA Experiment ID: 108595 Result: Down-regulated in Transcription
  misc_feature: MA Experiment 108595 PARAMETER Experiment Name: At_Ler-pi_Ovule_cDNA_P Parameter: Plant Line Value: null
  misc_feature: MA Experiment ID: 20000179 Result: Up-regulated in Transcription
  misc_feature: MA Experiment 20000179 PARAMETER Experiment Name: At_Germinating_Seeds_P Parameter: Age (hr) Value: 6 vs. 0
  misc_feature: MA Experiment 20000179 PARAMETER Experiment Name: At_Germinating_Seeds_P Parameter: Tissue Value: Germinating Seeds
  misc_feature: MA Experiment ID: 20000180 Result: Up-regulated in Transcription
  misc_feature: MA Experiment 20000180 PARAMETER Experiment Name: At_Germinating_Seeds_P Parameter: Age (hr) Value: 24 vs. 0
  misc_feature: MA Experiment 20000180 PARAMETER Experiment Name: At_Germinating_Seeds_P Parameter: Tissue Value: Germinating Seeds
  misc_feature: MA Experiment ID: 20000185 Result: Down-regulated in Transcription
  misc_feature: MA Experiment 20000185 PARAMETER Experiment Name: At_Roots__P Parameter: Age (day) Value: 7 vs. 21
  misc_feature: MA Experiment 20000185 PARAMETER Experiment Name: At_Roots__P Parameter: Organism Value: A. thaliana
  misc_feature: MA Experiment 20000185 PARAMETER Experiment Name: At_Roots__P Parameter: Tissue Value: Roots vs. Whole Plant
  misc_feature: MA Experiment ID: 20000439 Result: Down-regulated in Transcription
  misc_feature: MA Experiment 20000439 PARAMETER Experiment Name: At_Roots__P Parameter: Age (day) Value: 14 vs. 21
  misc_feature: MA Experiment 20000439 PARAMETER Experiment Name: At_Roots__P Parameter: Organism Value: A. thaliana
  misc_feature: MA Experiment 20000439 PARAMETER Experiment Name: At_Roots__P Parameter: Tissue Value: Roots vs. Whole Plant
  misc_feature: MA Experiment ID: 20001559 Result: Down-regulated in Transcription
  misc_feature: MA Experiment 20001559 PARAMETER Experiment Name: At_Drought_Soil_Dry_P Parameter: Age (day) Value: 28
  misc_feature: MA Experiment 20001559 PARAMETER Experiment Name: At_Drought_Soil_Dry_P Parameter: Organism Value: A. thaliana
  misc_feature: MA Experiment 20001559 PARAMETER Experiment Name: At_Drought_Soil_Dry_P Parameter: Plant Line Value: WS
  misc_feature: MA Experiment 20001559 PARAMETER Experiment Name: At_Drought_Soil_Dry_P Parameter: Post Timepoint (hr) Value: 29
  misc_feature: MA Experiment 20001559 PARAMETER Experiment Name: At_Drought_Soil_Dry_P Parameter: Post-Treatment Value: Re-Water vs. No Drought
  misc_feature: MA Experiment 20001559 PARAMETER Experiment Name: At_Drought_Soil_Dry_P Parameter: Timepoint (day) Value: 14
  misc_feature: MA Experiment 20001559 PARAMETER Experiment Name: At_Drought_Soil_Dry_P Parameter: Treatment Value: Drought vs. No Drought
gtcacgacctttttgatccaaaaatcaaaatccaaaaccgaccaatggataccaacaaccagcaaccacctccctccgccgccggaatccctcctccaccacctggaaccaccatctccgccgcaggaggaggagcttcttaccaccaccttctccaacaacaacaacaacagctccaactattctggacctaccaacgccaagagatcgaacaagttaacgatttcaaaaaccatcagcttccactagctaggataaaaaagatcatgaaagccgatgaagatgttcgtatgatctccgcagaagcaccgattctcttcgcgaaagcttgtgagcttttcattctcgagctcacgatcagatcttggcttcacgctgaggagaataaacgtcgtacgcttcagaaaaacgatatcgctgctgcgattactaggactgatatcttcgatttccttgttgatattgttcctagagatgagattaaggacgaagccgcagtcctcggtggtggaatggtggtggctcctaccgcgagcggcgtgccttactattatccgccgatgggacaaccagctggtcctggagggatgatgattgggagaccagctatggatccgaatggtgtttatgtccagcctccgtctcaggcgtggcagagtgtttggcagacttcgacggggacgggagatgatgtctcttatggtagtggtggaagttccggtcaagggaatctcgacggccaaggttaagctcagagtattccagatgatgcttgacctgcttgaagatagcagatattagtcgacctcgccttgaattttggatgtgtttgatagattatgcctaaattcaatgaaaaggcttcgttaaagaagagtaaaaaaaactcttgtttctctctgttaacgtatatgttattgtagcaaaaccatcattgctgcgacttagcctaactatatataatctaatgtgcagtttctattg

SEQ ID NO: 106538 - protein, 248 aa, Arabidopsis thaliana; identical to SEQ ID NO: 35056
  peptide (1)..(248): Ceres Seq. ID no. 13619842
  misc_feature (15)..(248): Homolog of NCBI NO: 15228405 NR Description: transcription factor Hap5a, putative [Arabidopsis
  misc_feature (16)..(248): Homolog of NCBI NO: 15242784 NR Description: transcription factor Hap5a, putative [Arabidopsis
  misc_feature (94)..(248): Homolog of NCBI NO: 2398531 NR Description: Transcription factor [Arabidopsis thaliana]
  misc_feature (15)..(218): Homolog of NCBI NO: 15221912 NR Description: transcription factor Hap5a, putative [Arabidopsis >gi|30695834|ref|NP_849808.1| transcription factor Hap5a, [Arabidopsis thaliana] >gi|3776575|gb|AAC64892.1| Similar to
  misc_feature (33)..(218): Homolog of NCBI NO: 15223986 NR Description: transcription factor Hap5a, putative [Arabidopsis >gi|30680893|ref|NP_849619.1| transcription factor Hap5a, [Arabidopsis thaliana] >gi|21553992|gb|AAM63073.1| putative
  misc_feature (36)..(218): Homolog of NCBI NO: 25372763 NR Description: hypothetical protein [imported] - Arabidopsis
  misc_feature (33)..(218): Homolog of NCBI NO: 6289057 NR Description: heme activated protein [Arabidopsis thaliana]
  misc_feature (23)..(184): Homolog of NCBI NO: 15223482 NR Description: transcription factor Hap5a, putative [Arabidopsis >gi|18252953|gb|AAL62403.1| transcription factor, putative thaliana] >gi|21389649|gb|AAM48023.1| putative transcription
  misc_feature (23)..(184): Homolog of NCBI NO: 21554704 NR Description: transcription factor, putative [Arabidopsis
  misc_feature (23)..(191): Homolog of NCBI NO: 5257260 NR Description: Similar to sequence of BAC F7G19 from Arabidopsis

SEQ ID NO: 106539 - protein, 234 aa, Arabidopsis thaliana; identical to SEQ ID NO: 35057
  peptide (1)..(234): Ceres Seq. ID no. 13619843
  misc_feature (1)..(234): Homolog of NCBI NO: 15228405 NR Description: transcription factor Hap5a, putative [Arabidopsis
  misc_feature (2)..(234): Homolog of NCBI NO: 15242784 NR Description: transcription factor Hap5a, putative [Arabidopsis
  misc_feature (80)..(234): Homolog of NCBI NO: 2398531 NR Description: Transcription factor [Arabidopsis thaliana]
  misc_feature (1)..(204): Homolog of NCBI NO: 15221912 NR Description: transcription factor Hap5a, putative [Arabidopsis >gi|30695834|ref|NP_849808.1| transcription factor Hap5a, [Arabidopsis thaliana] >gi|3776575|gb|AAC64892.1| Similar to
  misc_feature (19)..(204): Homolog of NCBI NO: 15223986 NR Description: transcription factor Hap5a, putative [Arabidopsis >gi|30680893|ref|NP_849619.1| transcription factor Hap5a, [Arabidopsis thaliana] >gi|21553992|gb|AAM63073.1| putative
  misc_feature (22)..(204): Homolog of NCBI NO: 25372763 NR Description: hypothetical protein [imported] - Arabidopsis
  misc_feature (19)..(204): Homolog of NCBI NO: 6289057 NR Description: heme activated protein [Arabidopsis thaliana]
  misc_feature (9)..(170): Homolog of NCBI NO: 15223482 NR Description: transcription factor Hap5a, putative [Arabidopsis >gi|18252953|gb|AAL62403.1| transcription factor, putative thaliana] >gi|21389649|gb|AAM48023.1| putative transcription
  misc_feature (9)..(170): Homolog of NCBI NO: 21554704 NR Description: transcription factor, putative [Arabidopsis
  misc_feature (9)..(177): Homolog of NCBI NO: 5257260 NR Description: Similar to sequence of BAC F7G19 from Arabidopsis

SEQ ID NO: 106540 - protein, 160 aa, Arabidopsis thaliana; identical to SEQ ID NO: 35058
  peptide (1)..(160): Ceres Seq. ID no. 13619844
  misc_feature (1)..(160): Homolog of NCBI NO: 15228405 NR Description: transcription factor Hap5a, putative [Arabidopsis
  misc_feature (1)..(160): Homolog of NCBI NO: 15242784 NR Description: transcription factor Hap5a, putative [Arabidopsis
  misc_feature (6)..(160): Homolog of NCBI NO: 2398531 NR Description: Transcription factor [Arabidopsis thaliana]
  misc_feature (1)..(130): Homolog of NCBI NO: 15221912 NR Description: transcription factor Hap5a, putative [Arabidopsis >gi|30695834|ref|NP_849808.1| transcription factor Hap5a, [Arabidopsis thaliana] >gi|3776575|gb|AAC64892.1| Similar to
  misc_feature (1)..(130): Homolog of NCBI NO: 15223986 NR Description: transcription factor Hap5a, putative [Arabidopsis >gi|30680893|ref|NP_849619.1| transcription factor Hap5a, [Arabidopsis thaliana] >gi|21553992|gb|AAM63073.1| putative
  misc_feature (1)..(130): Homolog of NCBI NO: 25372763 NR Description: hypothetical protein [imported] - Arabidopsis
  misc_feature (1)..(130): Homolog of NCBI NO: 6289057 NR Description: heme activated protein [Arabidopsis thaliana]
  misc_feature (1)..(96): Homolog of NCBI NO: 15223482 NR Description: transcription factor Hap5a, putative [Arabidopsis >gi|18252953|gb|AAL62403.1| transcription factor, putative thaliana] >gi|21389649|gb|AAM48023.1| putative transcription
  misc_feature (1)..(96): Homolog of NCBI NO: 21554704 NR Description: transcription factor, putative [Arabidopsis
  misc_feature (1)..(103): Homolog of NCBI NO: 5257260 NR Description: Similar to sequence of BAC F7G19 from Arabidopsis

SEQ ID NO: 106541 - DNA, 1227 bp, Arabidopsis thaliana
  misc_feature (1)..(1227): Ceres Seq. ID no. 13619845
  misc_feature: MA Experiment ID: 20000267 Result: Up-regulated in Transcription
  misc_feature: MA Experiment 20000267 PARAMETER Experiment Name: At_Drought_P Parameter: Age (day) Value: 7
  misc_feature: MA Experiment 20000267 PARAMETER Experiment Name: At_Drought_P Parameter: Organism Value: A. thaliana
  misc_feature: MA Experiment 20000267 PARAMETER Experiment Name: At_Drought_P Parameter: Plant Line Value: WS
  misc_feature: MA Experiment 20000267 PARAMETER Experiment Name: At_Drought_P Parameter: Timepoint (hr) Value: 6
  misc_feature: MA Experiment 20000267 PARAMETER Experiment Name: At_Drought_P Parameter: Tissue Value: Whole Plant
  misc_feature: MA Experiment 20000267 PARAMETER Experiment Name: At_Drought_P Parameter: Treatment Value: Drought vs. No Drought
  misc_feature: MA Experiment ID: 20000436 Result: Up-regulated in Transcription
  misc_feature: MA Experiment 20000436 PARAMETER Experiment Name: At_Drought_P Parameter: Age (day) Value: 7
  misc_feature: MA Experiment 20000436 PARAMETER Experiment Name: At_Drought_P Parameter: Organism Value: A. thaliana
  misc_feature: MA Experiment 20000436 PARAMETER Experiment Name: At_Drought_P Parameter: Plant Line Value: WS
  misc_feature: MA Experiment 20000436 PARAMETER Experiment Name: At_Drought_P Parameter: Timepoint (hr) Value: 12
  misc_feature: MA Experiment 20000436 PARAMETER Experiment Name: At_Drought_P Parameter: Tissue Value: Whole Plant
  misc_feature: MA Experiment 20000436 PARAMETER Experiment Name: At_Drought_P Parameter: Treatment Value: Drought vs. No Drought
  misc_feature: MA Experiment ID: 20000437 Result: Up-regulated in Transcription
  misc_feature: MA Experiment 20000437 PARAMETER Experiment Name: At_Drought_P Parameter: Age (day) Value: 8
  misc_feature: MA Experiment 20000437 PARAMETER Experiment Name: At_Drought_P Parameter: Organism Value: A. thaliana
  misc_feature: MA Experiment 20000437 PARAMETER Experiment Name: At_Drought_P Parameter: Plant Line Value: WS
  misc_feature: MA Experiment 20000437 PARAMETER Experiment Name: At_Drought_P Parameter: Timepoint (hr) Value: 24
  misc_feature: MA Experiment 20000437 PARAMETER Experiment Name: At_Drought_P Parameter: Tissue Value: Whole Plant
  misc_feature: MA Experiment 20000437 PARAMETER Experiment Name: At_Drought_P Parameter: Treatment Value: Drought vs. No Drought
  misc_feature: MA Experiment ID: 20001247 Result: Up-regulated in Transcription
  misc_feature: MA Experiment 20001247 PARAMETER Experiment Name: At_Far-red-induction_P Parameter: Age (day) Value: 7
  misc_feature: MA Experiment 20001247 PARAMETER Experiment Name: At_Far-red-induction_P Parameter: Light Value: Far-red vs. White
  misc_feature: MA Experiment 20001247 PARAMETER Experiment Name: At_Far-red-induction_P Parameter: Organism Value: A. thaliana
  misc_feature: MA Experiment 20001247 PARAMETER Experiment Name: At_Far-red-induction_P Parameter: Plant Line Value: Columbia
  misc_feature: MA Experiment 20001247 PARAMETER Experiment Name: At_Far-red-induction_P Parameter: Timepoint (hr) Value: 1
  misc_feature: MA Experiment 20001247 PARAMETER Experiment Name: At_Far-red-induction_P Parameter: Tissue Value: Whole Plant
  misc_feature: MA Experiment ID: 20001248 Result: Down-regulated in Transcription
  misc_feature: MA Experiment 20001248 PARAMETER Experiment Name: At_Far-red-induction_P Parameter: Age (day) Value: 7
  misc_feature: MA Experiment 20001248 PARAMETER Experiment Name: At_Far-red-induction_P Parameter: Light Value: Far-red vs. White
  misc_feature: MA Experiment 20001248 PARAMETER Experiment Name: At_Far-red-induction_P Parameter: Organism Value: A. thaliana
  misc_feature: MA Experiment 20001248 PARAMETER Experiment Name: At_Far-red-induction_P Parameter: Plant Line Value: Columbia
  misc_feature: MA Experiment 20001248 PARAMETER Experiment Name: At_Far-red-induction_P Parameter: Timepoint (hr) Value: 4
  misc_feature: MA Experiment 20001248 PARAMETER Experiment Name: At_Far-red-induction_P Parameter: Tissue Value: Whole Plant
attctcaatactataatatatctctcccacacacaatcatactctctcaatctcaaccaacgatggattccgagatcgccgccgactactctccaatgctcataatctacaagagtggccgcattgagcgactcgtgggtgaaaccaccgtgccaccttcttccaacccacaaaacggagtcgtttccaaggacgtcgtttattctcctgacaacaacctctccctccgcatttacctcccggagaaagccgccaccgccgagaccgaagcctctgtaaaactccctctcctcgtctacttccacggcggaggattcctcgttgaaaccgctttctccccgacttaccacactttcctcacggcggctgtctcagcgtcagactgtgtagcggtctccgtggattaccgacgtgcaccggagcatccgattcctacttcttacgatgattcttggacagctctcaaatgggttttctcccacatcgccggatctggctcagaagattggttgaacaaacacgccgacttcagcaaagtgttcctcgccggagatagcgccggagcgaacataacgcatcacatgacgatgaaagctgcgaaagataaactcagtcccgagtctttgaacgagtcaggaatctctggaatcatcttagttcatccttatttctggtcaaaaaccccagtcgacgacaaggagacgacggatgtagcaataaggacgtggatcgagtcggtctggacgttggctagtcccaatagcaaagatggatcagatgatccattcatcaacgtggtgcaatcagagtcggtggatttgtccgggttgggttgtggtaaggttttggtaatggtggctgagaaagacgcgttggtgaggcaaggttggggttactgggagaagcttggtaagagccgttggaacggagaagtactggacgtggtggagactaagggagaaggtcatgtttttcatttgagggatcctaattctgaaaaggctcatgaactcgtgcacagattcgcagggtttatcaagggagacaagtaacattgtgctttttagtttggtgtttgagatgtgtcactgtctcactttctctaatgtttcagtaatttgcatgttgcttacaacatcattatattcaattgtattgctaataagagatgtttaattctgcccactaaatatttttattgtaatcttgatttttgtttttccactt

SEQ ID NO: 106542 - protein, 349 aa, Arabidopsis thaliana
  peptide (1)..(349): Ceres Seq. ID no. 13619846
  misc_feature (77)..(121): Pfam Name: Carboxylesterase Pfam Description: Carboxylesterase
  misc_feature (21)..(349): Homolog of NCBI NO: 15228426 NR Description: expressed protein [Arabidopsis thaliana]
  misc_feature (21)..(347): Homolog of NCBI NO: 15228425 NR Description: expressed protein [Arabidopsis thaliana]
  misc_feature (21)..(347): Homolog of NCBI NO: 18086341 NR Description: AT3g48690/T8P19_200 [Arabidopsis thaliana]
  misc_feature (21)..(345): Homolog of NCBI NO: 15227669 NR Description: expressed protein [Arabidopsis thaliana]
  misc_feature (25)..(345): Homolog of NCBI NO: 28393060 NR Description: putative esterase [Arabidopsis thaliana]
  misc_feature (21)..(346): Homolog of NCBI NO: 15221975 NR Description: expressed protein [Arabidopsis thaliana]
  misc_feature (6)..(347): Homolog of NCBI NO: 21537287 NR Description: putative esterase [Arabidopsis thaliana]
  misc_feature (6)..(347): Homolog of NCBI NO: 18402731 NR Description: expressed protein [Arabidopsis thaliana]
  misc_feature (21)..(347): Homolog of NCBI NO: 15222795 NR Description: expressed protein [Arabidopsis thaliana]
  misc_feature (21)..(345): Homolog of NCBI NO: 15222791 NR Description: hypothetical protein [Arabidopsis thaliana]
SQYYNISLPHTIILSQSQPTMDSEIAADYSPMLIIYKSGRIERLVGETTVPPSSNPQNGVVSKDVVYSPDNNLSLRIYLPEKAATAETEASVKLPLLVYFHGGGFLVETAFSPTYHTFLTAAVSASDCVAVSVDYRRAPEHPIPTSYDDSWTALKWVFSHIAGSGSEDWLNKHADFSKVFLAGDSAGANITHHMTMKAAKDKLSPESLNESGISGIILVHPYFWSKTPVDDKETTDVAIRTWIESVWTLASPNSKDGSDDPFINVVQSESVDLSGLGCGKVLVMVAEKDALVRQGWGYWEKLGKSRWNGEVLDVVETKGEGHVFHLRDPNSEKAHELVHRFAGFIKGDK

SEQ ID NO: 106543 - protein, 329 aa, Arabidopsis thaliana
  peptide (1)..(329): Ceres Seq. ID no. 13619847
  misc_feature (57)..(101): Pfam Name: Carboxylesterase Pfam Description: Carboxylesterase
  misc_feature (1)..(329): Homolog of NCBI NO: 15228426 NR Description: expressed protein [Arabidopsis thaliana]
  misc_feature (1)..(327): Homolog of NCBI NO: 15228425 NR Description: expressed protein [Arabidopsis thaliana]
  misc_feature (1)..(327): Homolog of NCBI NO: 18086341 NR Description: AT3g48690/T8P19_200 [Arabidopsis thaliana]
  misc_feature (1)..(325): Homolog of NCBI NO: 15227669 NR Description: expressed protein [Arabidopsis thaliana]
  misc_feature (5)..(325): Homolog of NCBI NO: 28393060 NR Description: putative esterase [Arabidopsis thaliana]
  misc_feature (1)..(326): Homolog of NCBI NO: 15221975 NR Description: expressed protein [Arabidopsis thaliana]
  misc_feature (1)..(327): Homolog of NCBI NO: 21537287 NR Description: putative esterase [Arabidopsis thaliana]
  misc_feature (1)..(327): Homolog of NCBI NO: 18402731 NR Description: expressed protein [Arabidopsis thaliana]
  misc_feature (1)..(327): Homolog of NCBI NO: 15222795 NR Description: expressed protein [Arabidopsis thaliana]
  misc_feature (1)..(325): Homolog of NCBI NO: 15222791 NR Description: hypothetical protein [Arabidopsis thaliana]
MDSEIAADYSPMLIIYKSGRIERLVGETTVPPSSNPQNGVVSKDVVYSPDNNLSLRIYLPEKAATAETEASVKLPLLVYFHGGGFLVETAFSPTYHTFLTAAVSASDCVAVSVDYRRAPEHPIPTSYDDSWTALKWVFSHIAGSGSEDWLNKHADFSKVFLAGDSAGANITHHMTMKAAKDKLSPESLNESGISGIILVHPYFWSKTPVDDKETTDVAIRTWIESVWTLASPNSKDGSDDPFINVVQSESVDLSGLGCGKVLVMVAEKDALVRQGWGYWEKLGKSRWNGEVLDVVETKGEGHVFHLRDPNSEKAHELVHRFAGFIKGDK

SEQ ID NO: 106544 - protein, 318 aa, Arabidopsis thaliana
  peptide (1)..(318): Ceres Seq. ID no. 13619848
  misc_feature (46)..(90): Pfam Name: Carboxylesterase Pfam Description: Carboxylesterase
  misc_feature (1)..(318): Homolog of NCBI NO: 15228426 NR Description: expressed protein [Arabidopsis thaliana]
  misc_feature (1)..(316): Homolog of NCBI NO: 15228425 NR Description: expressed protein [Arabidopsis thaliana]
  misc_feature (1)..(316): Homolog of NCBI NO: 18086341 NR Description: AT3g48690/T8P19_200 [Arabidopsis thaliana]
  misc_feature (1)..(314): Homolog of NCBI NO: 15227669 NR Description: expressed protein [Arabidopsis thaliana]
  misc_feature (1)..(314): Homolog of NCBI NO: 28393060 NR Description: putative esterase [Arabidopsis thaliana]
  misc_feature (1)..(315): Homolog of NCBI NO: 15221975 NR Description: expressed protein [Arabidopsis thaliana]
  misc_feature (1)..(316): Homolog of NCBI NO: 21537287 NR Description: putative esterase [Arabidopsis thaliana]
  misc_feature (1)..(316): Homolog of NCBI NO: 18402731 NR Description: expressed protein [Arabidopsis thaliana]
  misc_feature (1)..(316): Homolog of NCBI NO: 15222795 NR Description: expressed protein [Arabidopsis thaliana]
  misc_feature (1)..(314): Homolog of NCBI NO: 15222791 NR Description: hypothetical protein [Arabidopsis thaliana]
MLIIYKSGRIERLVGETTVPPSSNPQNGVVSKDVVYSPDNNLSLRIYLPEKAATAETEASVKLPLLVYFHGGGFLVETAFSPTYHTFLTAAVSASDCVAVSVDYRRAPEHPIPTSYDDSWTALKWVFSHIAGSGSEDWLNKHADFSKVFLAGDSAGANITHHMTMKAAKDKLSPESLNESGISGIILVHPYFWSKTPVDDKETTDVAIRTWIESVWTLASPNSKDGSDDPFINVVQSESVDLSGLGCGKVLVMVAEKDALVRQGWGYWEKLGKSRWNGEVLDVVETKGEGHVFHLRDPNSEKAHELVHRFAGFIKGDK

SEQ ID NO: 106545 - DNA, 3377 bp, Arabidopsis thaliana
  misc_feature (1)..(3377): Ceres Seq. ID no. 13619869
  misc_feature: MA Experiment ID: 20000173 Result: Down-regulated in Transcription
  misc_feature: MA Experiment 20000173 PARAMETER Experiment Name: At_42deg_Heat_P Parameter: Age (day) Value: 14
  misc_feature: MA Experiment 20000173 PARAMETER Experiment Name: At_42deg_Heat_P Parameter: Organism Value: A. thaliana
  misc_feature: MA Experiment 20000173 PARAMETER Experiment Name: At_42deg_Heat_P Parameter: Plant Line Value: WS
  misc_feature: MA Experiment 20000173 PARAMETER Experiment Name: At_42deg_Heat_P Parameter: Temperature (deg C) Value: 42 vs. 22
  misc_feature: MA Experiment 20000173 PARAMETER Experiment Name: At_42deg_Heat_P Parameter: Timepoint (hr) Value: 6
  misc_feature: MA Experiment 20000173 PARAMETER Experiment Name: At_42deg_Heat_P Parameter: Tissue Value: Aerial
  misc_feature: MA Experiment ID: 20000180 Result: Up-regulated in Transcription
  misc_feature: MA Experiment 20000180 PARAMETER Experiment Name: At_Germinating_Seeds_P Parameter: Age (hr) Value: 24 vs. 0
  misc_feature: MA Experiment 20000180 PARAMETER Experiment Name: At_Germinating_Seeds_P Parameter: Tissue Value: Germinating Seeds
  misc_feature: MA Experiment ID: 20000184 Result: Down-regulated in Transcription
  misc_feature: MA Experiment 20000184 PARAMETER Experiment Name: At_Shoots__P Parameter: Age (day) Value: 7
  misc_feature: MA Experiment 20000184 PARAMETER Experiment Name: At_Shoots__P Parameter: Tissue Value: Shoots vs. Whole Plant
  misc_feature: MA Experiment ID: 20000214 Result: Down-regulated in Transcription
  misc_feature: MA Experiment 20000214 PARAMETER Experiment Name: At_4deg_Cold_P Parameter: Timepoint (hr) Value: 6
  misc_feature: MA Experiment ID: 20000234 Result: Up-regulated in Transcription
  misc_feature: MA Experiment 20000234 PARAMETER Experiment Name: At_Siliques_P Parameter: Age (day) Value: 21
  misc_feature: MA Experiment 20000234 PARAMETER Experiment Name: At_Siliques_P Parameter: Organism Value: A. thaliana
  misc_feature: MA Experiment 20000234 PARAMETER Experiment Name: At_Siliques_P Parameter: Plant Line Value: WS
  misc_feature: MA Experiment 20000234 PARAMETER Experiment Name: At_Siliques_P Parameter: Tissue Value: Less Than 5mm Siliques vs. Whole Plant
  misc_feature: MA Experiment ID: 20000265 Result: Up-regulated in Transcription
  misc_feature: MA Experiment 20000265 PARAMETER Experiment Name: At_Open_Flower_P Parameter: Age (day) Value: 21
  misc_feature: MA Experiment 20000265 PARAMETER Experiment Name: At_Open_Flower_P Parameter: Plant Line Value: WS
  misc_feature: MA Experiment 20000265 PARAMETER Experiment Name: At_Open_Flower_P Parameter: Tissue Value: Closed Flower vs. Whole Plant
  misc_feature: MA Experiment ID: 20000495 Result: Up-regulated in Transcription
  misc_feature: MA Experiment 20000495 PARAMETER Experiment Name: At_Guard_Cells_P Parameter: Harvest Date Value: 8/2/2002
  misc_feature: MA Experiment 20000495 PARAMETER Experiment Name: At_Guard_Cells_P Parameter: Organism Value: A. thaliana
  misc_feature: MA Experiment 20000495 PARAMETER Experiment Name: At_Guard_Cells_P Parameter: Tissue Value: Guard Cells vs. Leaves
  misc_feature: MA Experiment ID: 20001557 Result: Down-regulated in Transcription
  misc_feature: MA Experiment 20001557 PARAMETER Experiment Name: At_Drought_Soil_Dry_P Parameter: Age (day) Value: 27
  misc_feature: MA Experiment 20001557 PARAMETER Experiment Name: At_Drought_Soil_Dry_P Parameter: Organism Value: A. thaliana
  misc_feature: MA Experiment 20001557 PARAMETER Experiment Name: At_Drought_Soil_Dry_P Parameter: Plant Line Value: WS
  misc_feature: MA Experiment 20001557 PARAMETER Experiment Name: At_Drought_Soil_Dry_P Parameter: Post Timepoint (hr) Value: 3
  misc_feature: MA Experiment 20001557 PARAMETER Experiment Name: At_Drought_Soil_Dry_P Parameter: Post-Treatment Value: Re-Water vs. No Drought
  misc_feature: MA Experiment 20001557 PARAMETER Experiment Name: At_Drought_Soil_Dry_P Parameter: Timepoint (day) Value: 13
  misc_feature: MA Experiment 20001557 PARAMETER Experiment Name: At_Drought_Soil_Dry_P Parameter: Treatment Value: Drought vs. No Drought
cgtcgaccttcttcttcactttttcttctcccgaggaacaagacgaaattgagactctgattcaacttttcttctcatactcgtcgaagaaaaggagattcctcgatggaatcacattcttccttatcgtcctcttcttcttcttctcctccgtcgtcgttgtcgtcggagagttgttgtgttaaagtagcggttaacgttcgtcctttgatcggagatgaagtaactcaaggttgtagggaatgcgtttctgtttctccggtaactcctcaggtgcaaatgggaacacatccatttacatttgatcatgtatatggaagtaatggttctccatcttctttgatgtttgaagaatgtgttgctcctcttgttgatggtttgtttcatggatacaatgctactgtcttggcttatggtcagacaggatctggaaagacatacactatggggactggtattaaagatggtacaaaaaatgggctgattcctcaagttatgagtgctttgttcaacaaaattgattcagtaaagcaccaaatggggttccagttacatgtctctttcatcgagattttaaaagaagaagttctggatttgctggatagtagtgtgccgtttaacagactagccaatggaacccctgggaaggttgttcttagtaagtcaccggtgcagattcgtgaatcaccaaacggggttataacactatccggtgcaactgaagttcccatagctactaaagaagaaatggcttcctgcctagagcaaggatctctaaccagggcaactgggagcaccaatatgaataatgagtcgagtcggtcacatgccatcttcacgattaccttagaacaaatgcgcaagatatcttcaatctcagtggttaaagacaccgtagatgaagatatgggtgaggaatattgttgtgccaagcttcacttggtagatcttgctggatctgaaagagctaaacgaacaggttcaggcggtgttcgattaaaagaaggaattcacatcaataggggacttcttgcacttggtaatgttatcagtgcgcttggggatgagaaaaggcgaaaagaaggtgcacatgttccataccgtgatagtaaacttactcggttattgcaggattctcttggtggaaatagtaaaacagtcatgatagcttgcatcagtcctgctgacatcaatgctgaggaaactcttaacacgctcaagtatgcaaatcgtgctcggaatatccagaacaaacctgttgccaataaagacttaatatgttctgagatgcaaaagatgcgtcaagagctacaatatctacaagctacactttgtgctcgtggggcaacctcatcagaggaagtgcaggtaatgcgagagaaaatcatgaaactagagtctgccaatgaagagctttctcgagaacttcacatctatcgcagcaagagagtgactcttgattattgcaatattgatgcacaggaagatggtgtaattttttcaaaagatgatggccttaaaaggggtttcgaaagcatggattcagattatgaaatgagtgaagcaacatcaggtggaatttctgaagatattggtgcagcagaagagtgggaacatgcacttaggcagaatagcatgggcaaggaactaaatgaactaagtaaacgtcttgaggagaaagagtccgagatgagagtatgtgggattggaactgaaactatcagacaacatttcgaaaaaaaaatgatggaacttgagaaagagaaaagaactgtacaggatgagagagatatgttgttggctgaagttgaggaacttgcagctagctctgatagacaagcacaagttgcaagagataaccatgcacacaaattaaaagcacttgagacacagattttaaatcttaagaagaaacaagaaaatcaagttgaggtcttaaaacaaaagcaaaaaagtgaagatgcagcaaagcgtttgaaaactgaaatacaatgcatcaaggctcaaaaggttcaactacaacagaagatgaaacaagaagctgaacaattccggcagtggaaagcttctcaagagaaggagttgttgcagcttaagaaagaaggaagaaaaactgagcatgaaagactcaaactcgaagctctcaatcgacgtcagaaaatggttcttcagagaaaaacagaagaagcagcaatggctaccaaaagacttaaagagctgctagaagcccgcaagtcttcacctcatgatatatcagtgattgccaatggccaaccaccaagtcgacagacgaatgaaaaatctcttcggaaatggctggataacgagctagaggttatggcaaaagtacatcaagttcgttttcaatatgaaaagcaaattcaagtacgagctgcactggctgtagagttaacatcgttgagacaagagatggagtttccttcaaattcccatcaagagaaaaatggacagttcagatttttatcaccaaacacaagattggagagaatagcttctcttgagagtatgttggatgtttcctcaaatgctctcacagccatgggctctcagctctcagaagcagaggaaagagagcatagcctacatgctaagcctcggtggaaccacattcagtccatgactgatgccaagtatttgcttcaatatgtgtttgattccactgctgaagcaaggtccaaaatctgggagaaagacagagacatcaaagagaagaaggaacagctcaatgacctcctctgcttattacaactaaccgaagtccagaaccgagaaatccttaaagagaaaaagacaagggagcaaacagtgtccattgcgctggcttcaacatcatcatcatactcgggaagttcaagaagctcatcaaagcactatggagataataacgctagtgacgacccatcatctccatcttctacttatcatcgagcaacaaagcatctcaaatacactgggccgggtatagtcaatatctcggtgagagaatcagaagctttattagaagagacgaggaagatgaaagcaatgaagaaaatgggacagagtggcaagctatggaagtggaaaagaagtcaccatcaatggctgcttcagtttaaatggaaatggcagaaaccatggaaactctctgagtggataaagcagaacgatgagaccactatgcacgtcatgtctaagagtcatcatgatgatgaggatgatcactcgtggaaccgacactcaatgtttcaaggtgcttaaagctgtatgtatatacaagagcctttttttttctctgtcaacagattcaatattgttatacttttattacgaaaatccgtcgatattaagaaaattccaatgctaagaaaatttac

SEQ ID NO: 106546 - protein, 1051 aa, Arabidopsis thaliana
  peptide (1)..(1051): Ceres Seq. ID no. 13619870
  misc_feature (363)..(905): Pfam Name: Myosin tail Pfam Description: Myosin tail
  misc_feature (113)..(717): Homolog of NCBI NO: 29369626 NR Description: kinesin-like protein [Oryza sativa (japonica
  misc_feature (394)..(1051): Homolog of NCBI NO: 11276946 NR Description: kinesin-like protein - Arabidopsis thaliana
  misc_feature (25)..(694): Homolog of NCBI NO: 10177316 NR Description: kinesin-like protein [Arabidopsis thaliana]
  misc_feature (25)..(694): Homolog of NCBI NO: 22327992 NR Description: chromosome-associated kinesin, putative
  misc_feature (26)..(441): Homolog of NCBI NO: 7305205 NR Description: kinesin family member 4; chromokinesin [Homo >gi|7266951|gb|AAD05492.2| kinesin superfamily motor KIF4 [Homo
  misc_feature (503)..(887): Homolog of NCBI NO: 7305205 NR Description: kinesin family member 4; chromokinesin [Homo >gi|7266951|gb|AAD05492.2| kinesin superfamily motor KIF4 [Homo
  misc_feature (379)..(910): Homolog of NCBI NO: 34881081 NR Description: kinesin heavy chain member 4 [Rattus norvegicus]
  misc_feature (26)..(441): Homolog of NCBI NO: 34881081 NR Description: kinesin heavy chain member 4 [Rattus norvegicus]
  misc_feature (26)..(441): Homolog of NCBI NO: 29351664 NR Description: Similar to kinesin family member 4A [Homo sapiens]
  misc_feature (503)..(659): Homolog of NCBI NO: 29351664 NR Description: Similar to kinesin family member 4A [Homo sapiens]
MESHSSLSSSSSSSPPSSLSSESCCVKVAVNVRPLIGDEVTQGCRECVSVSPVTPQVQMGTHPFTFDHVYGSNGSPSSLMFEECVAPLVDGLFHGYNATVLAYGQTGSGKTYTMGTGIKDGTKNGLIPQVMSALFNKIDSVKHQMGFQLHVSFIEILKEEVLDLLDSSVPFNRLANGTPGKVVLSKSPVQIRESPNGVITLSGATEVPIATKEEMASCLEQGSLTRATGSTNMNNESSRSHAIFTITLEQMRKISSISVVKDTVDEDMGEEYCCAKLHLVDLAGSERAKRTGSGGVRLKEGIHINRGLLALGNVISALGDEKRRKEGAHVPYRDSKLTRLLQDSLGGNSKTVMIACISPADINAEETLNTLKYANRARNIQNKPVANKDLICSEMQKMRQELQYLQATLCARGATSSEEVQVMREKIMKLESANEELSRELHIYRSKRVTLDYCNIDAQEDGVIFSKDDGLKRGFESMDSDYEMSEATSGGISEDIGAAEEWEHALRQNSMGKELNELSKRLEEKESEMRVCGIGTETIRQHFEKKMMELEKEKRTVQDERDMLLAEVEELAASSDRQAQVARDNHAHKLKALETQILNLKKKQENQVEVLKQKQKSEDAAKRLKTEIQCIKAQKVQLQQKMKQEAEQFRQWKASQEKELLQLKKEGRKTEHERLKLEALNRRQKMVLQRKTEEAAMATKRLKELLEARKSSPHDISVIANGQPPSRQTNEKSLRKWLDNELEVMAKVHQVRFQYEKQIQVRAALAVELTSLRQEMEFPSNSHQEKNGQFRFLSPNTRLERIASLESMLDVSSNALTAMGSQLSEAEEREHSLHAKPRWNHIQSMTDAKYLLQYVFDSTAEARSKIWEKDRDIKEKKEQLNDLLCLLQLTEVQNREILKEKKTREQTVSIALASTSSSYSGSSRSSSKHYGDNNASDDPSSPSSTYHRATKHLKYTGPGIVNISVRESEALLEETRKMKAMKKMGQSGKLWKWKRSHHQWLLQFKWKWQKPWKLSEWIKQNDETTMHVMSKSHHDDEDDHSWNRHSMFQGA

SEQ ID NO: 106547 - protein, 993 aa, Arabidopsis thaliana
  peptide (1)..(993): Ceres Seq. ID no. 13619871
  misc_feature (305)..(847): Pfam Name: Myosin tail Pfam Description: Myosin tail
  misc_feature (55)..(659): Homolog of NCBI NO: 29369626 NR Description: kinesin-like protein [Oryza sativa (japonica
  misc_feature (336)..(993): Homolog of NCBI NO: 11276946 NR Description: kinesin-like protein - Arabidopsis thaliana
  misc_feature (1)..(636): Homolog of NCBI NO: 10177316 NR Description: kinesin-like protein [Arabidopsis thaliana]
  misc_feature (1)..(636): Homolog of NCBI NO: 22327992 NR Description: chromosome-associated kinesin, putative
  misc_feature (1)..(383): Homolog of NCBI NO: 7305205 NR Description: kinesin family member 4; chromokinesin [Homo >gi|7266951|gb|AAD05492.2| kinesin superfamily motor KIF4 [Homo
  misc_feature (445)..(829): Homolog of NCBI NO: 7305205 NR Description: kinesin family member 4; chromokinesin [Homo >gi|7266951|gb|AAD05492.2| kinesin superfamily motor KIF4 [Homo
  misc_feature (321)..(852): Homolog of NCBI NO: 34881081 NR Description: kinesin heavy chain member 4 [Rattus norvegicus]
  misc_feature (1)..(383): Homolog of NCBI NO: 34881081 NR Description: kinesin heavy chain member 4 [Rattus norvegicus]
  misc_feature (1)..(383): Homolog of NCBI NO: 29351664 NR Description: Similar to kinesin family member 4A [Homo sapiens]
  misc_feature (445)..(601): Homolog of NCBI NO: 29351664 NR Description: Similar to kinesin family member 4A [Homo sapiens]
MGTHPFTFDHVYGSNGSPSSLMFEECVAPLVDGLFHGYNATVLAYGQTGSGKTYTMGTGIKDGTKNGLIPQVMSALFNKIDSVKHQMGFQLHVSFIEILKEEVLDLLDSSVPFNRLANGTPGKVVLSKSPVQIRESPNGVITLSGATEVPIATKEEMASCLEQGSLTRATGSTNMNNESSRSHAIFTITLEQMRKISSISVVKDTVDEDMGEEYCCAKLHLVDLAGSERAKRTGSGGVRLKEGIHINRGLLALGNVISALGDEKRRKEGAHVPYRDSKLTRLLQDSLGGNSKTVMIACISPADINAEETLNTLKYANRARNIQNKPVANKDLICSEMQKMRQELQYLQATLCARGATSSEEVQVMREKIMKLESANEELSRELHIYRSKRVTLDYCNIDAQEDGVIFSKDDGLKRGFESMDSDYEMSEATSGGISEDIGAAEEWEHALRQNSMGKELNELSKRLEEKESEMRVCGIGTETIRQHFEKKMMELEKEKRTVQDERDMLLAEVEELAASSDRQAQVARDNHAHKLKALETQILNLKKKQENQVEVLKQKQKSEDAAKRLKTEIQCIKAQKVQLQQKMKQEAEQFRQWKASQEKELLQLKKEGRKTEHERLKLEALNRRQKMVLQRKTEEAAMATKRLKELLEARKSSPHDISVIANGQPPSRQTNEKSLRKWLDNELEVMAKVHQVRFQYEKQIQVRAALAVELTSLRQEMEFPSNSHQEKNGQFRFLSPNTRLERIASLESMLDVSSNALTAMGSQLSEAEEREHSLHAKPRWNHIQSMTDAKYLLQYVFDSTAEARSKIWEKDRDIKEKKEQLNDLLCLLQLTEVQNREILKEKKTREQTVSIALASTSSSYSGSSRSSSKHYGDNNASDDPSSPSSTYHRATKHLKYTGPGIVNISVRESEALLEETRKMKAMKKMGQSGKLWKWKRSHHQWLLQFKWKWQKPWKLSEWIKQNDETTMHVMSKSHHDDEDDHSWNRHSMFQGA

SEQ ID NO: 106548 - protein, 972 aa, Arabidopsis thaliana
  peptide (1)..(972): Ceres Seq. ID no. 13619872
  misc_feature (284)..(826): Pfam Name: Myosin tail Pfam Description: Myosin tail
  misc_feature (34)..(638): Homolog of NCBI NO: 29369626 NR Description: kinesin-like protein [Oryza sativa (japonica
  misc_feature (315)..(972): Homolog of NCBI NO: 11276946 NR Description: kinesin-like protein - Arabidopsis thaliana
  misc_feature (1)..(615): Homolog of NCBI NO: 10177316 NR Description: kinesin-like protein [Arabidopsis thaliana]
  misc_feature (1)..(615): Homolog of NCBI NO: 22327992 NR Description: chromosome-associated kinesin, putative
  misc_feature (1)..(362): Homolog of NCBI NO: 7305205 NR Description: kinesin family member 4; chromokinesin [Homo >gi|7266951|gb|AAD05492.2| kinesin superfamily motor KIF4 [Homo
  misc_feature (424)..(808): Homolog of NCBI NO: 7305205 NR Description: kinesin family member 4; chromokinesin [Homo >gi|7266951|gb|AAD05492.2| kinesin superfamily motor KIF4 [Homo
  misc_feature (300)..(831): Homolog of NCBI NO: 34881081 NR Description: kinesin heavy chain member 4 [Rattus norvegicus]
  misc_feature (1)..(362): Homolog of NCBI NO: 34881081 NR Description: kinesin heavy chain member 4 [Rattus norvegicus]
  misc_feature (1)..(362): Homolog of NCBI NO: 29351664 NR Description: Similar to kinesin family member 4A [Homo sapiens]
  misc_feature (424)..(580): Homolog of NCBI NO: 29351664 NR Description: Similar to kinesin family member 4A [Homo sapiens]
MFEECVAPLVDGLFHGYNATVLAYGQTGSGKTYTMGTGIKDGTKNGLIPQVMSALFNKIDSVKHQMGFQLHVSFIEILKEEVLDLLDSSVPFNRLANGTPGKVVLSKSPVQIRESPNGVITLSGATEVPIATKEEMASCLEQGSLTRATGSTNMNNESSRSHAIFTITLEQMRKISSISVVKDTVDEDMGEEYCCAKLHLVDLAGSERAKRTGSGGVRLKEGIHINRGLLALGNVISALGDEKRRKEGAHVPYRDSKLTRLLQDSLGGNSKTVMIACISPADINAEETLNTLKYANRARNIQNKPVANKDLICSEMQKMRQELQYLQATLCARGATSSEEVQVMREKIMKLESANEELSRELHIYRSKRVTLDYCNIDAQEDGVIFSKDDGLKRGFESMDSDYEMSEATSGGISEDIGAAEEWEHALRQNSMGKELNELSKRLEEKESEMRVCGIGTETIRQHFEKKMMELEKEKRTVQDERDMLLAEVEELAASSDRQAQVARDNHAHKLKALETQILNLKKKQENQVEVLKQKQKSEDAAKRLKTEIQCIKAQKVQLQQKMKQEAEQFRQWKASQEKELLQLKKEGRKTEHERLKLEALNRRQKMVLQRKTEEAAMATKRLKELLEARKSSPHDISVIANGQPPSRQTNEKSLRKWLDNELEVMAKVHQVRFQYEKQIQVRAALAVELTSLRQEMEFPSNSHQEKNGQFRFLSPNTRLERIASLESMLDVSSNALTAMGSQLSEAEEREHSLHAKPRWNHIQSMTDAKYLLQYVFDSTAEARSKIWEKDRDIKEKKEQLNDLLCLLQLTEVQNREILKEKKTREQTVSIALASTSSSYSGSSRSSSKHYGDNNASDDPSSPSSTYHRATKHLKYTGPGIVNISVRESEALLEETRKMKAMKKMGQSGKLWKWKRSHHQWLLQFKWKWQKPWKLSEWIKQNDETTMHVMSKSHHDDEDDHSWNRHSMFQGA

SEQ ID NO: 106549 - DNA, 927 bp, Arabidopsis thaliana
  misc_feature (1)..(927): Ceres Seq. ID no. 13619922
  misc_feature: MA Experiment ID: 20000179 Result: Down-regulated in Transcription
  misc_feature: MA Experiment 20000179 PARAMETER Experiment Name: At_Germinating_Seeds_P Parameter: Age (hr) Value: 6 vs. 0
  misc_feature: MA Experiment 20000179 PARAMETER Experiment Name: At_Germinating_Seeds_P Parameter: Tissue Value: Germinating Seeds
  misc_feature: MA Experiment ID: 20000180 Result: Down-regulated in Transcription
  misc_feature: MA Experiment 20000180 PARAMETER Experiment Name: At_Germinating_Seeds_P Parameter: Age (hr) Value: 24 vs. 0
  misc_feature: MA Experiment 20000180 PARAMETER Experiment Name: At_Germinating_Seeds_P Parameter: Tissue Value: Germinating Seeds
  misc_feature: MA Experiment ID: 20000182 Result: Up-regulated in Transcription
  misc_feature: MA Experiment 20000182 PARAMETER Experiment Name: At_2mM_SA_P Parameter: Age (day) Value: 14
  misc_feature: MA Experiment 20000182 PARAMETER Experiment Name: At_2mM_SA_P Parameter: Organism Value: A. thaliana
  misc_feature: MA Experiment 20000182 PARAMETER Experiment Name: At_2mM_SA_P Parameter: Plant Line Value: WS
  misc_feature: MA Experiment 20000182 PARAMETER Experiment Name: At_2mM_SA_P Parameter: Timepoint (hr) Value: 6
  misc_feature: MA Experiment 20000182 PARAMETER Experiment Name: At_2mM_SA_P Parameter: Tissue Value: Aerial
  misc_feature: MA Experiment 20000182 PARAMETER Experiment Name: At_2mM_SA_P Parameter: Treatment Value: 2mM SA vs. No Treatment
  misc_feature: MA Experiment ID: 20000184 Result: Down-regulated in Transcription
  misc_feature: MA Experiment 20000184 PARAMETER Experiment Name: At_Shoots__P Parameter: Age (day) Value: 7
  misc_feature: MA Experiment 20000184 PARAMETER Experiment Name: At_Shoots__P Parameter: Tissue Value: Shoots vs. Whole Plant
  misc_feature: MA Experiment ID: 20000185 Result: Down-regulated in Transcription
  misc_feature: MA Experiment 20000185 PARAMETER Experiment Name: At_Roots__P Parameter: Age (day) Value: 7 vs. 21
  misc_feature: MA Experiment 20000185 PARAMETER Experiment Name: At_Roots__P Parameter: Organism Value: A. thaliana
  misc_feature: MA Experiment 20000185 PARAMETER Experiment Name: At_Roots__P Parameter: Tissue Value: Roots vs. Whole Plant
  misc_feature: MA Experiment ID: 20000211 Result: Up-regulated in Transcription
  misc_feature: MA Experiment 20000211 PARAMETER Experiment Name: At_0.001percent_MeJA__P Parameter: Age (day) Value: 14
  misc_feature: MA Experiment 20000211 PARAMETER Experiment Name: At_0.001percent_MeJA__P Parameter: Organism Value: A. thaliana
  misc_feature: MA Experiment 20000211 PARAMETER Experiment Name: At_0.001percent_MeJA__P Parameter: Plant Line Value: WS
  misc_feature: MA Experiment 20000211 PARAMETER Experiment Name: At_0.001percent_MeJA__P Parameter: Timepoint (hr) Value: 1
  misc_feature: MA Experiment 20000211 PARAMETER Experiment Name: At_0.001percent_MeJA__P Parameter: Tissue Value: Aerial
  misc_feature: MA Experiment 20000211 PARAMETER Experiment Name: At_0.001percent_MeJA__P Parameter: Treatment Value: 0.001percent MeJA vs. No Treatment
  misc_feature: MA Experiment ID: 20000234 Result: Down-regulated in Transcription
  misc_feature: MA Experiment 20000234 PARAMETER Experiment Name: At_Siliques_P Parameter: Age (day) Value: 21
  misc_feature: MA Experiment 20000234 PARAMETER Experiment Name: At_Siliques_P Parameter: Organism Value: A. thaliana
  misc_feature: MA Experiment 20000234 PARAMETER Experiment Name: At_Siliques_P Parameter: Plant Line Value: WS
  misc_feature: MA Experiment 20000234 PARAMETER Experiment Name: At_Siliques_P Parameter: Tissue Value: Less Than 5mm Siliques vs. Whole Plant
  misc_feature: MA Experiment ID: 20000235 Result: Down-regulated in Transcription
  misc_feature: MA Experiment 20000235 PARAMETER Experiment Name: At_Siliques_P Parameter: Age (day) Value: 21
  misc_feature: MA Experiment 20000235 PARAMETER Experiment Name: At_Siliques_P Parameter: Organism Value: A. thaliana
  misc_feature: MA Experiment 20000235 PARAMETER Experiment Name: At_Siliques_P Parameter: Plant Line Value: WS
  misc_feature: MA Experiment 20000235 PARAMETER Experiment Name: At_Siliques_P Parameter: Tissue Value: 5-10mm Siliques vs. Whole Plant
  misc_feature: MA Experiment ID: 20000265 Result: Down-regulated in Transcription
  misc_feature: MA Experiment 20000265 PARAMETER Experiment Name: At_Open_Flower_P Parameter: Age (day) Value: 21
  misc_feature: MA Experiment 20000265 PARAMETER Experiment Name: At_Open_Flower_P Parameter: Plant Line Value: WS
  misc_feature: MA Experiment 20000265 PARAMETER Experiment Name: At_Open_Flower_P Parameter: Tissue Value: Closed Flower vs. Whole Plant
  misc_feature: MA Experiment ID: 20000286 Result: Down-regulated in Transcription
  misc_feature: MA Experiment 20000286 PARAMETER Experiment Name: At_Open_Flower_P Parameter: Age (day) Value: 21
  misc_feature: MA Experiment 20000286 PARAMETER Experiment Name: At_Open_Flower_P Parameter: Plant Line Value: WS
  misc_feature: MA Experiment 20000286 PARAMETER Experiment Name: At_Open_Flower_P Parameter: Tissue Value: Half Open vs. Whole Plant
  misc_feature: MA Experiment ID: 20000439 Result: Down-regulated in Transcription
  misc_feature: MA Experiment 20000439 PARAMETER Experiment Name: At_Roots__P Parameter: Age (day) Value: 14 vs. 21
  misc_feature: MA Experiment 20000439 PARAMETER Experiment Name: At_Roots__P Parameter: Organism Value: A. thaliana
  misc_feature: MA Experiment 20000439 PARAMETER Experiment Name: At_Roots__P Parameter: Tissue Value: Roots vs. Whole Plant
  misc_feature: MA Experiment ID: 20000496 Result: Down-regulated in Transcription
  misc_feature: MA Experiment 20000496 PARAMETER Experiment Name: At_Guard_Cells_P Parameter: Harvest Date Value: 7/19/2002
  misc_feature: MA Experiment 20000496 PARAMETER Experiment Name: At_Guard_Cells_P Parameter: Organism Value: Canola
  misc_feature: MA Experiment 20000496 PARAMETER Experiment Name: At_Guard_Cells_P Parameter: Tissue Value: Guard Cells vs. Leaves
  misc_feature: MA Experiment ID: 20000527 Result: Down-regulated in Transcription
  misc_feature: MA Experiment 20000527 PARAMETER Experiment Name: At_10percent_PEG_P Parameter: Age (day) Value: 20
  misc_feature: MA Experiment 20000527 PARAMETER Experiment Name: At_10percent_PEG_P Parameter: Organism Value: A. thaliana
  misc_feature: MA Experiment 20000527 PARAMETER Experiment Name: At_10percent_PEG_P Parameter: Plant Line Value: WS
  misc_feature: MA Experiment 20000527 PARAMETER Experiment Name: At_10percent_PEG_P Parameter: Timepoint (day) Value: 20
  misc_feature: MA Experiment 20000527 PARAMETER Experiment Name: At_10percent_PEG_P Parameter: Tissue Value: Whole Plant
  misc_feature: MA Experiment 20000527 PARAMETER Experiment Name: At_10percent_PEG_P Parameter: Treatment Value: 10percent PEG vs. No Treatment
  misc_feature: MA Experiment ID: 20000574 Result: Up-regulated in Transcription
  misc_feature: MA Experiment 20000574 PARAMETER Experiment Name: At_100uM_ABA_Mutants__P Parameter: Organism Value: A. thaliana
  misc_feature: MA Experiment 20000574 PARAMETER Experiment Name: At_100uM_ABA_Mutants__P Parameter: Plant Line Value: CS23 vs. Ler wt
  misc_feature: MA Experiment 20000574 PARAMETER Experiment Name: At_100uM_ABA_Mutants__P Parameter: Timepoint (hr) Value: N/A
  misc_feature: MA Experiment 20000574 PARAMETER Experiment Name: At_100uM_ABA_Mutants__P Parameter: Tissue Value: Whole Plant
  misc_feature: MA Experiment 20000574 PARAMETER Experiment Name: At_100uM_ABA_Mutants__P Parameter: Treatment Value: None
  misc_feature: MA Experiment ID: 20000709 Result: Up-regulated in Transcription
  misc_feature: MA Experiment 20000709 PARAMETER Experiment Name: At_15mM_NH4NO3_L-to-H_P Parameter: Age (hr) Value: 14
  misc_feature: MA Experiment 20000709 PARAMETER Experiment Name: At_15mM_NH4NO3_L-to-H_P Parameter: Organism Value: A. thaliana
  misc_feature: MA Experiment 20000709 PARAMETER Experiment Name: At_15mM_NH4NO3_L-to-H_P Parameter: Plant Line Value: WS
  misc_feature: MA Experiment 20000709 PARAMETER Experiment Name: At_15mM_NH4NO3_L-to-H_P Parameter: Timepoint (hr) Value: 4
  misc_feature: MA Experiment 20000709 PARAMETER Experiment Name: At_15mM_NH4NO3_L-to-H_P Parameter: Tissue Value: Aerial
  misc_feature: MA Experiment 20000709 PARAMETER Experiment Name: At_15mM_NH4NO3_L-to-H_P Parameter: Treatment Value: 15mM NH4NO3 vs. 30mM Mannitol
  misc_feature: MA Experiment ID: 20000794 Result: Down-regulated in Transcription
  misc_feature: MA Experiment 20000794 PARAMETER Experiment Name: At_Petals_P Parameter: Age (day) Value: 23-25 days
  misc_feature: MA Experiment 20000794 PARAMETER Experiment Name: At_Petals_P Parameter: Plant Line Value: WS
  misc_feature: MA Experiment 20000794 PARAMETER Experiment Name: At_Petals_P Parameter: Tissue Value: Petals vs. Whole plant
  misc_feature: MA Experiment ID: 20001905 Result: Up-regulated in Transcription
  misc_feature: MA Experiment 20001905 PARAMETER Experiment Name: At_Drought_Reproduction_P Parameter: Age (day) Value: 40
  misc_feature: MA Experiment 20001905 PARAMETER Experiment Name: At_Drought_Reproduction_P Parameter: Organism Value: A. thaliana
  misc_feature: MA Experiment 20001905 PARAMETER Experiment Name: At_Drought_Reproduction_P Parameter: Plant Line Value: WS
  misc_feature: MA Experiment 20001905 PARAMETER Experiment Name: At_Drought_Reproduction_P Parameter: Timepoint (day) Value: 10
  misc_feature: MA Experiment 20001905 PARAMETER Experiment Name: At_Drought_Reproduction_P Parameter: Tissue Value: Rosettes
  misc_feature: MA Experiment 20001905 PARAMETER Experiment Name: At_Drought_Reproduction_P Parameter: Treatment Value: Drought vs. No Drought
catcgctgtctggaacagatcaaaccacagctgttcaattcctatcccacacaaaaaaaaaaaaaacacgcacacaaaaacaagagctgtgagtttgatcaatctcttcaaaaagtgtaacacatgggtctaatgaatcggtcaaagaatgatgagtacgtaaagctactaggagcatggcctagcccttttgtgctgagaactcggatcgcacttaacctaaagaacgtagcatacgagtatctagaagaagaagatactttgagttcggagagcgttttaaactataaccccgtccataaacagatccctatcctcattcatggcaacaaaccaatccgtgaatctctcaacatcgtcatgtatgttgatgagacttggctctccggtcctcccatccttccctctgatccatttgatcgcgctgtggctcgattttgggacgtctatatcgatgaacactgtttcacatcaatcaatggagtggcagtagcaaaaggtgaggagaacataaatgcggcgatagctaagctagagcagtgtatggctctattggaagaaacgtttcaagaatgcagcaaaggaagaggcttctttggaggagaaaacatcgggttcatcgacattggtttcggctcgatgttgggtcctcttacggttcttgagaaatttaccggcgtcaagttcatacatcctgaaaacacaccaggtcttttccattgggctgacagattctacgcccatgaagcggtcaagcctgtcatgcccgatatcgaaaaactggtccagttcgctaggctcaagttcaatacttcaatctttaaatgaaaaccaaggacttataaatatatatacgacgactaaattaacataatcgagttcatggaattaataagatgtaaactcgtttagttaaaaggcgtagtc

SEQ ID NO: 106550 - protein, 234 aa, Arabidopsis thaliana
  peptide (1)..(234): Ceres Seq. ID no. 13619923
  misc_feature (1)..(234): Homolog of NCBI NO: 15222499 NR Description: glutathione transferase, putative [Arabidopsis
  misc_feature (7)..(229): Homolog of NCBI NO: 15223432 NR Description: glutathione transferase, putative [Arabidopsis
  misc_feature (7)..(229): Homolog of NCBI NO: 25403291 NR Description: protein T7N9.20 [imported] - Arabidopsis thaliana
  misc_feature (13)..(229): Homolog of NCBI NO: 21592561 NR Description: glutathione transferase, putative [Arabidopsis
  misc_feature (7)..(234): Homolog of NCBI NO: 15223440 NR Description: glutathione transferase, putative [Arabidopsis
  misc_feature (4)..(229): Homolog of NCBI NO: 15222497 NR Description: glutathione transferase, putative [Arabidopsis
  misc_feature (4)..(229): Homolog of NCBI NO: 38454100 NR Description: At1g69920 [Arabidopsis thaliana]
  misc_feature (4)..(226): Homolog of NCBI NO: 6856103 NR Description: glutathione S-transferase [Gossypium hirsutum]
  misc_feature (13)..(228): Homolog of NCBI NO: 11096016 NR Description: glutathione S-transferase [Arabidopsis thaliana]
  misc_feature (11)..(230): Homolog of NCBI NO: 6652870 NR Description: glutathione S-transferase 1 [Papaver somniferum]
MGLMNRSKNDEYVKLLGAWPSPFVLRTRIALNLKNVAYEYLEEEDTLSSESVLNYNPVHKQIPILIHGNKPIRESLNIVMYVDETWLSGPPILPSDPFDRAVARFWDVYIDEHCFTSINGVAVAKGEENINAAIAKLEQCMALLEETFQECSKGRGFFGGENIGFIDIGFGSMLGPLTVLEKFTGVKFIHPENTPGLFHWADRFYAHEAVKPVMPDIEKLVQFARLKFNTSIFK

SEQ ID NO: 106551 - protein, 231 aa, Arabidopsis thaliana
  peptide (1)..(231): Ceres Seq. ID no. 13619924
  misc_feature (1)..(231): Homolog of NCBI NO: 15222499 NR Description: glutathione transferase, putative [Arabidopsis
  misc_feature (4)..(226): Homolog of NCBI NO: 15223432 NR Description: glutathione transferase, putative [Arabidopsis
  misc_feature (4)..(226): Homolog of NCBI NO: 25403291 NR Description: protein T7N9.20 [imported] - Arabidopsis thaliana
  misc_feature (10)..(226): Homolog of NCBI NO: 21592561 NR Description: glutathione transferase, putative [Arabidopsis
  misc_feature (4)..(231): Homolog of NCBI NO: 15223440 NR Description: glutathione transferase, putative [Arabidopsis
  misc_feature (1)..(226): Homolog of NCBI NO: 15222497 NR Description: glutathione transferase, putative [Arabidopsis
  misc_feature (1)..(226): Homolog of NCBI NO: 38454100 NR Description: At1g69920 [Arabidopsis thaliana]
  misc_feature (1)..(223): Homolog of NCBI NO: 6856103 NR Description: glutathione S-transferase [Gossypium hirsutum]
  misc_feature (10)..(225): Homolog of NCBI NO: 11096016 NR Description: glutathione S-transferase [Arabidopsis thaliana]
  misc_feature (8)..(227): Homolog of NCBI NO: 6652870 NR Description: glutathione S-transferase 1 [Papaver somniferum]
MNRSKNDEYVKLLGAWPSPFVLRTRIALNLKNVAYEYLEEEDTLSSESVLNYNPVHKQIPILIHGNKPIRESLNIVMYVDETWLSGPPILPSDPFDRAVARFWDVYIDEHCFTSINGVAVAKGEENINAAIAKLEQCMALLEETFQECSKGRGFFGGENIGFIDIGFGSMLGPLTVLEKFTGVKFIHPENTPGLFHWADRFYAHEAVKPVMPDIEKLVQFARLKFNTSIFK

SEQ ID NO: 106552 - protein, 155 aa, Arabidopsis thaliana
  peptide (1)..(155): Ceres Seq. ID no. 13619925
  misc_feature (1)..(155): Homolog of NCBI NO: 15222499 NR Description: glutathione transferase, putative [Arabidopsis
  misc_feature (1)..(150): Homolog of NCBI NO: 15223432 NR Description: glutathione transferase, putative [Arabidopsis
  misc_feature (1)..(150): Homolog of NCBI NO: 25403291 NR Description: protein T7N9.20 [imported] - Arabidopsis thaliana
  misc_feature (1)..(150): Homolog of NCBI NO: 21592561 NR Description: glutathione transferase, putative [Arabidopsis
  misc_feature (1)..(155): Homolog of NCBI NO: 15223440 NR Description: glutathione transferase, putative [Arabidopsis
  misc_feature (1)..(150): Homolog of NCBI NO: 15222497 NR Description: glutathione transferase, putative [Arabidopsis
  misc_feature (1)..(150): Homolog of NCBI NO: 38454100 NR Description: At1g69920 [Arabidopsis thaliana]
  misc_feature (1)..(147): Homolog of NCBI NO: 6856103 NR Description: glutathione S-transferase [Gossypium hirsutum]
  misc_feature (1)..(149): Homolog of NCBI NO: 11096016 NR Description: glutathione S-transferase [Arabidopsis thaliana]
  misc_feature (1)..(151): Homolog of NCBI NO: 6652870 NR Description: glutathione S-transferase 1 [Papaver somniferum]
MYVDETWLSGPPILPSDPFDRAVARFWDVYIDEHCFTSINGVAVAKGEENINAAIAKLEQCMALLEETFQECSKGRGFFGGENIGFIDIGFGSMLGPLTVLEKFTGVKFIHPENTPGLFHWADRFYAHEAVKPVMPDIEKLVQFARLKFNTSIFK

SEQ ID NO: 106553 - DNA, 1802 bp, Arabidopsis thaliana
  misc_feature (1)..(1802): Ceres Seq. ID no. 13619930
  misc_feature: MA Experiment ID: 20000171 Result: Down-regulated in Transcription
  misc_feature: MA Experiment 20000171 PARAMETER Experiment Name: At_42deg_Heat_P Parameter: Age (day) Value: 14
  misc_feature: MA Experiment 20000171 PARAMETER Experiment Name: At_42deg_Heat_P Parameter: Organism Value: A. thaliana
  misc_feature: MA Experiment 20000171 PARAMETER Experiment Name: At_42deg_Heat_P Parameter: Plant Line Value: WS
  misc_feature: MA Experiment 20000171 PARAMETER Experiment Name: At_42deg_Heat_P Parameter: Temperature (deg C) Value: 42 vs. 22
  misc_feature: MA Experiment 20000171 PARAMETER Experiment Name: At_42deg_Heat_P Parameter: Timepoint (hr) Value: 1
  misc_feature: MA Experiment 20000171 PARAMETER Experiment Name: At_42deg_Heat_P Parameter: Tissue Value: Aerial
  misc_feature: MA Experiment ID: 20000173 Result: Down-regulated in Transcription
  misc_feature: MA Experiment 20000173 PARAMETER Experiment Name: At_42deg_Heat_P Parameter: Age (day) Value: 14
  misc_feature: MA Experiment 20000173 PARAMETER Experiment Name: At_42deg_Heat_P Parameter: Organism Value: A. thaliana
  misc_feature: MA Experiment 20000173 PARAMETER Experiment Name: At_42deg_Heat_P Parameter: Plant Line Value: WS
  misc_feature: MA Experiment 20000173 PARAMETER Experiment Name: At_42deg_Heat_P Parameter: Temperature (deg C) Value: 42 vs. 22
  misc_feature: MA Experiment 20000173 PARAMETER Experiment Name: At_42deg_Heat_P Parameter: Timepoint (hr) Value: 6
  misc_feature: MA Experiment 20000173 PARAMETER Experiment Name: At_42deg_Heat_P Parameter: Tissue Value: Aerial
  misc_feature: MA Experiment ID: 20000182 Result: Down-regulated in Transcription
  misc_feature: MA Experiment 20000182 PARAMETER Experiment Name: At_2mM_SA_P Parameter: Age (day) Value: 14
  misc_feature: MA Experiment 20000182 PARAMETER Experiment Name: At_2mM_SA_P Parameter: Organism Value: A. thaliana
  misc_feature: MA Experiment 20000182 PARAMETER Experiment Name: At_2mM_SA_P Parameter: Plant Line Value: WS
  misc_feature: MA Experiment 20000182 PARAMETER Experiment Name: At_2mM_SA_P Parameter: Timepoint (hr) Value: 6
  misc_feature: MA Experiment 20000182 PARAMETER Experiment Name: At_2mM_SA_P Parameter: Tissue Value: Aerial
  misc_feature: MA Experiment 20000182 PARAMETER Experiment Name: At_2mM_SA_P Parameter: Treatment Value: 2mM SA vs. No Treatment
  misc_feature: MA Experiment ID: 20000184 Result: Down-regulated in Transcription
  misc_feature: MA Experiment 20000184 PARAMETER Experiment Name: At_Shoots__P Parameter: Age (day) Value: 7
  misc_feature: MA Experiment 20000184 PARAMETER Experiment Name: At_Shoots__P Parameter: Tissue Value: Shoots vs. Whole Plant
  misc_feature: MA Experiment ID: 20000185 Result: Down-regulated in Transcription
  misc_feature: MA Experiment 20000185 PARAMETER Experiment Name: At_Roots__P Parameter: Age (day) Value: 7 vs. 21
  misc_feature: MA Experiment 20000185 PARAMETER Experiment Name: At_Roots__P Parameter: Organism Value: A. thaliana
  misc_feature: MA Experiment 20000185 PARAMETER Experiment Name: At_Roots__P Parameter: Tissue Value: Roots vs. Whole Plant
  misc_feature: MA Experiment ID: 20000436 Result: Down-regulated in Transcription
  misc_feature: MA Experiment 20000436 PARAMETER Experiment Name: At_Drought_P Parameter: Age (day) Value: 7
  misc_feature: MA Experiment 20000436 PARAMETER Experiment Name: At_Drought_P Parameter: Organism Value: A. thaliana
  misc_feature: MA Experiment 20000436 PARAMETER Experiment Name: At_Drought_P Parameter: Plant Line Value: WS
  misc_feature: MA Experiment 20000436 PARAMETER Experiment Name: At_Drought_P Parameter: Timepoint (hr) Value: 12
  misc_feature: MA Experiment 20000436 PARAMETER Experiment Name: At_Drought_P Parameter: Tissue Value: Whole Plant
  misc_feature: MA Experiment 20000436 PARAMETER Experiment Name: At_Drought_P Parameter: Treatment Value: Drought vs. No Drought
  misc_feature: MA Experiment ID: 20000439 Result: Down-regulated in Transcription
  misc_feature: MA Experiment 20000439 PARAMETER Experiment Name: At_Roots__P Parameter: Age (day) Value: 14 vs. 21
  misc_feature: MA Experiment 20000439 PARAMETER Experiment Name: At_Roots__P Parameter: Organism Value: A. thaliana
  misc_feature: MA Experiment 20000439 PARAMETER Experiment Name: At_Roots__P Parameter: Tissue Value: Roots vs. Whole Plant
  misc_feature: MA Experiment ID: 20001558 Result: Up-regulated in Transcription
  misc_feature: MA Experiment 20001558 PARAMETER Experiment Name: At_Drought_Soil_Dry_P Parameter: Age (day) Value: 27
  misc_feature: MA Experiment 20001558 PARAMETER Experiment Name: At_Drought_Soil_Dry_P Parameter: Organism Value: A. thaliana
  misc_feature: MA Experiment 20001558 PARAMETER Experiment Name: At_Drought_Soil_Dry_P Parameter: Plant Line Value: WS
  misc_feature: MA Experiment 20001558 PARAMETER Experiment Name: At_Drought_Soil_Dry_P Parameter: Post Timepoint (hr) Value: 6
  misc_feature: MA Experiment 20001558 PARAMETER Experiment Name: At_Drought_Soil_Dry_P Parameter: Post-Treatment Value: Re-Water vs. No Drought
  misc_feature: MA Experiment 20001558 PARAMETER Experiment Name: At_Drought_Soil_Dry_P Parameter: Timepoint (day) Value: 13
  misc_feature: MA Experiment 20001558 PARAMETER Experiment Name: At_Drought_Soil_Dry_P Parameter: Treatment Value: Drought vs. No Drought
agtttcttctccggcgaagaagaggataacgaaaagaaaacacatagctatgaacggagcttcgctctgcaactccgttttgcttcattctcattctctctctcgttttcagtcatcctcttcttcttgttctgtgtatctgatttcttctgcgcgtactacgtctaagtatatctcaatttctcatagaattcgacagagctttcgagaagttattgaaaaaaggagtaatgggttttgttcattcgctgtaaacaagcgtagaagtggcgattccgttattgtggagtcagacgatgatgatgaagaagatgatgaagattggggtgaatttgatggagaagatgaaggagaagaagaagaagaagatgaaggagagttcttaccaatggataagatgaagaaatggttagagaaaaagcctcgtggatttggtttaggtaaaaagtacgaaactttaattgaagataagttgctcgacgaaattgagcaaagttggaaagctcaagctgctaatctcaataagcttaagaatgatcctctcaagtctcaacagcttaagcgtgacgataatctcctcaaaggaactggagaaactcaaattgggtttcgtgttcgtgtgactaatcttcctaagaagaagaatgttcatagagatcttaaggttgcgtttaaagaagtaagtggcgttttgagtataacaccagctgtgtctgggaataagaagactaaggatcctgtgtgtaaaggatttgctcatgttgatttcaaaactgagattgatgcaaacaggtttgtgaaacagttcacgggacagagcttagcatttgggaaggttataaagcaaatcaaatgtcaggttgtggagtttacttctgatgattctgtatcgaaggaagtgtacttagataacggtttcaaggtgcagaagcttccgtattctggtcttgaaggagattctagtgctgatgttgttgaagaagaggttttgttgggttcaggggaagaatcggatgattcagaagaagaggtagatgaaagagaagtggaagacgatgagcggaatcatatctctagtagcatagaatcttctcccattgaaatgacacgtgattcgaataccaagttaaagtttgagaaacaagttgtgaagcgagagataagagaacatgaggaactagagacacctttagtttcattccaggtgaataaatctgaggaagctgcagcggaaacacacttggatgatgaacaatctgaggaagctgtagcagaaacactcttgaatgatgaacttgatggggatgatgaagaagaagttgctgaagacaatcttgaacctctgaacagttcattgtcatcctcagaagaaaatagagtagatagaatccgtaggctagagcaaaagcttctcggtaaagaaaaactcttgggtggaggagttggctttgataaaccagaagcaaaacccgctagagttgaaggaaagaagaaggagaaaaagaagaagacaaagattcttgtgaaaggccaagccaaaaaggggacaaagatagaaatccctggatcatcaaagaggttaaaggtgaaggagaaggctctattaactggcgtcttagtcaagtatgcggctaaagttgcttcaacctcaaacaatgatgaatgatatcattaacaagtgatcaaattttgatataatctttcatcaactgctagtagtgagccatcttcgatttgtttttataaaagtgttacatgaataggtgataacgttacgtggggaaatgctattttttctttct

SEQ ID NO: 106554 - protein, 554 aa, Arabidopsis thaliana
  peptide (1)..(554): Ceres Seq. ID no. 13619931
  misc_feature (17)..(554): Homolog of NCBI NO: 30698005 NR Description: RNA recognition motif (RRM)-containing protein thaliana] >gi|28392945|gb|AAO41908.1| unknown protein thaliana] >gi|28827688|gb|AAO50688.1| unknown protein
  misc_feature (17)..(526): Homolog of NCBI NO: 25406039 NR Description: F20P5.8 [imported] - Arabidopsis thaliana
  misc_feature (326)..(537): Homolog of NCBI NO: 9837385 NR Description: retinitis pigmentosa GTPase regulator-like
  misc_feature (83)..(165): Homolog of NCBI NO: 9837385 NR Description: retinitis pigmentosa GTPase regulator-like
  misc_feature (314)..(517): Homolog of NCBI NO: 9837385 NR Description: retinitis pigmentosa GTPase regulator-like
  misc_feature (317)..(467): Homolog of NCBI NO: 9837385 NR Description: retinitis pigmentosa GTPase regulator-like
  misc_feature (98)..(476): Homolog of NCBI NO: 1076839 NR Description: protein kinase - slime mold (Dictyostelium >gi|551446|emb|CAA86053.1| protein kinase [Dictyostelium
  misc_feature (96)..(127): Homolog of NCBI NO: 1076839 NR Description: protein kinase - slime mold (Dictyostelium >gi|551446|emb|CAA86053.1| protein kinase [Dictyostelium
  misc_feature (326)..(469): Homolog of NCBI NO: 9837385 NR Description: retinitis pigmentosa GTPase regulator-like
  misc_feature (323)..(517): Homolog of NCBI NO: 28829807 NR Description: similar to Oryza sativa (japonica
VSSPAKKRITKRKHIAMNGASLCNSVLLHSHSLSRFQSSSSSCSVYLISSARTTSKYISISHRIRQSFREVIEKRSNGFCSFAVNKRRSGDSVIVESDDDDEEDDEDWGEFDGEDEGEEEEEDEGEFLPMDKMKKWLEKKPRGFGLGKKYETLIEDKLLDEIEQSWKAQAANLNKLKNDPLKSQQLKRDDNLLKGTGETQIGFRVRVTNLPKKKNVHRDLKVAFKEVSGVLSITPAVSGNKKTKDPVCKGFAHVDFKTEIDANRFVKQFTGQSLAFGKVIKQIKCQVVEFTSDDSVSKEVYLDNGFKVQKLPYSGLEGDSSADVVEEEVLLGSGEESDDSEEEVDEREVEDDERNHISSSIESSPIEMTRDSNTKLKFEKQVVKREIREHEELETPLVSFQVNKSEEAAAETHLDDEQSEEAVAETLLNDELDGDDEEEVAEDNLEPLNSSLSSSEENRVDRIRRLEQKLLGKEKLLGGGVGFDKPEAKPARVEGKKKEKKKKTKILVKGQAKKGTKIEIPGSSKRLKVKEKALLTGVLVKYAAKVASTSNNDE

SEQ ID NO: 106555 - protein, 538 aa, Arabidopsis thaliana
  peptide (1)..(538): Ceres Seq. ID no. 13619932
  misc_feature (1)..(538): Homolog of NCBI NO: 30698005 NR Description: RNA recognition motif (RRM)-containing protein thaliana] >gi|28392945|gb|AAO41908.1| unknown protein thaliana] >gi|28827688|gb|AAO50688.1| unknown protein
  misc_feature (1)..(510): Homolog of NCBI NO: 25406039 NR Description: F20P5.8 [imported] - Arabidopsis thaliana
  misc_feature (310)..(521): Homolog of NCBI NO: 9837385 NR Description: retinitis pigmentosa GTPase regulator-like
  misc_feature (67)..(149): Homolog of NCBI NO: 9837385 NR Description: retinitis pigmentosa GTPase regulator-like
  misc_feature (298)..(501): Homolog of NCBI NO: 9837385 NR Description: retinitis pigmentosa GTPase regulator-like
  misc_feature (301)..(451): Homolog of NCBI NO: 9837385 NR Description: retinitis pigmentosa GTPase regulator-like
  misc_feature (82)..(460): Homolog of NCBI NO: 1076839 NR Description: protein kinase - slime mold (Dictyostelium >gi|551446|emb|CAA86053.1| protein kinase [Dictyostelium
  misc_feature (80)..(111): Homolog of NCBI NO: 1076839 NR Description: protein kinase - slime mold (Dictyostelium >gi|551446|emb|CAA86053.1| protein kinase [Dictyostelium
  misc_feature (310)..(453): Homolog of NCBI NO: 9837385 NR Description: retinitis pigmentosa GTPase regulator-like
  misc_feature (307)..(501): Homolog of NCBI NO: 28829807 NR Description: similar to Oryza sativa (japonica
MNGASLCNSVLLHSHSLSRFQSSSSSCSVYLISSARTTSKYISISHRIRQSFREVIEKRSNGFCSFAVNKRRSGDSVIVESDDDDEEDDEDWGEFDGEDEGEEEEEDEGEFLPMDKMKKWLEKKPRGFGLGKKYETLIEDKLLDEIEQSWKAQAANLNKLKNDPLKSQQLKRDDNLLKGTGETQIGFRVRVTNLPKKKNVHRDLKVAFKEVSGVLSITPAVSGNKKTKDPVCKGFAHVDFKTEIDANRFVKQFTGQSLAFGKVIKQIKCQVVEFTSDDSVSKEVYLDNGFKVQKLPYSGLEGDSSADVVEEEVLLGSGEESDDSEEEVDEREVEDDERNHISSSIESSPIEMTRDSNTKLKFEKQVVKREIREHEELETPLVSFQVNKSEEAAAETHLDDEQSEEAVAETLLNDELDGDDEEEVAEDNLEPLNSSLSSSEENRVDRIRRLEQKLLGKEKLLGGGVGFDKPEAKPARVEGKKKEKKKKTKILVKGQAKKGTKIEIPGSSKRLKVKEKALLTGVLVKYAAKVASTSNNDE

SEQ ID NO: 106556 - protein, 425 aa, Arabidopsis thaliana
  peptide (1)..(425): Ceres Seq. ID no. 13619933
  misc_feature (1)..(425): Homolog of NCBI NO: 30698005 NR Description: RNA recognition motif (RRM)-containing protein thaliana] >gi|28392945|gb|AAO41908.1| unknown protein thaliana] >gi|28827688|gb|AAO50688.1| unknown protein
  misc_feature (1)..(397): Homolog of NCBI NO: 25406039 NR Description: F20P5.8 [imported] - Arabidopsis thaliana
  misc_feature (197)..(408): Homolog of NCBI NO: 9837385 NR Description: retinitis pigmentosa GTPase regulator-like
  misc_feature (1)..(36): Homolog of NCBI NO: 9837385 NR Description: retinitis pigmentosa GTPase regulator-like
  misc_feature (185)..(388): Homolog of NCBI NO: 9837385 NR Description: retinitis pigmentosa GTPase regulator-like
  misc_feature (188)..(338): Homolog of NCBI NO: 9837385 NR Description: retinitis pigmentosa GTPase regulator-like
  misc_feature (1)..(347): Homolog of NCBI NO: 1076839 NR Description: protein kinase - slime mold (Dictyostelium >gi|551446|emb|CAA86053.1| protein kinase [Dictyostelium
  misc_feature (197)..(340): Homolog of NCBI NO: 9837385 NR Description: retinitis pigmentosa GTPase regulator-like
  misc_feature (194)..(388): Homolog of NCBI NO: 28829807 NR Description: similar to Oryza sativa (japonica
  misc_feature (197)..(370): Homolog of NCBI NO: 18846043 NR Description: ORF 73; extensive acidic domains, potential zipper; immediate early protein homolog [Human herpesvirus 8]
MDKMKKWLEKKPRGFGLGKKYETLIEDKLLDEIEQSWKAQAANLNKLKNDPLKSQQLKRDDNLLKGTGETQIGFRVRVTNLPKKKNVHRDLKVAFKEVSGVLSITPAVSGNKKTKDPVCKGFAHVDFKTEIDANRFVKQFTGQSLAFGKVIKQIKCQVVEFTSDDSVSKEVYLDNGFKVQKLPYSGLEGDSSADVVEEEVLLGSGEESDDSEEEVDEREVEDDERNHISSSIESSPIEMTRDSNTKLKFEKQVVKREIREHEELETPLVSFQVNKSEEAAAETHLDDEQSEEAVAETLLNDELDGDDEEEVAEDNLEPLNSSLSSSEENRVDRIRRLEQKLLGKEKLLGGGVGFDKPEAKPARVEGKKKEKKKKTKILVKGQAKKGTKIEIPGSSKRLKVKEKALLTGVLVKYAAKVASTSNNDE

SEQ ID NO: 106557 - DNA, 1430 bp, Arabidopsis thaliana
  misc_feature (1)..(1430): Ceres Seq. ID no. 13619958
  misc_feature: MA Experiment ID: 20000184 Result: Down-regulated in Transcription
  misc_feature: MA Experiment 20000184 PARAMETER Experiment Name: At_Shoots__P Parameter: Age (day) Value: 7
  misc_feature: MA Experiment 20000184 PARAMETER Experiment Name: At_Shoots__P Parameter: Tissue Value: Shoots vs. Whole Plant
  misc_feature: MA Experiment ID: 20000495 Result: Up-regulated in Transcription
  misc_feature: MA Experiment 20000495 PARAMETER Experiment Name: At_Guard_Cells_P Parameter: Harvest Date Value: 8/2/2002
  misc_feature: MA Experiment 20000495 PARAMETER Experiment Name: At_Guard_Cells_P Parameter: Organism Value: A. thaliana
  misc_feature: MA Experiment 20000495 PARAMETER Experiment Name: At_Guard_Cells_P Parameter: Tissue Value: Guard Cells vs. Leaves
  misc_feature: MA Experiment ID: 20000573 Result: Up-regulated in Transcription
  misc_feature: MA Experiment 20000573 PARAMETER Experiment Name: At_100uM_ABA_Mutants__P Parameter: Organism Value: A. thaliana
  misc_feature: MA Experiment 20000573 PARAMETER Experiment Name: At_100uM_ABA_Mutants__P Parameter: Plant Line Value: CS22 vs. Ler wt
  misc_feature: MA Experiment 20000573 PARAMETER Experiment Name: At_100uM_ABA_Mutants__P Parameter: Timepoint (hr) Value: N/A
  misc_feature: MA Experiment 20000573 PARAMETER Experiment Name: At_100uM_ABA_Mutants__P Parameter: Tissue Value: Whole Plant
  misc_feature: MA Experiment 20000573 PARAMETER Experiment Name: At_100uM_ABA_Mutants__P Parameter: Treatment Value: None
  misc_feature: MA Experiment ID: 20000574 Result: Up-regulated in Transcription
  misc_feature: MA Experiment 20000574 PARAMETER Experiment Name: At_100uM_ABA_Mutants__P Parameter: Organism Value: A. thaliana
  misc_feature: MA Experiment 20000574 PARAMETER Experiment Name: At_100uM_ABA_Mutants__P Parameter: Plant Line Value: CS23 vs. Ler wt
  misc_feature: MA Experiment 20000574 PARAMETER Experiment Name: At_100uM_ABA_Mutants__P Parameter: Timepoint (hr) Value: N/A
  misc_feature: MA Experiment 20000574 PARAMETER Experiment Name: At_100uM_ABA_Mutants__P Parameter: Tissue Value: Whole Plant
  misc_feature: MA Experiment 20000574 PARAMETER Experiment Name: At_100uM_ABA_Mutants__P Parameter: Treatment Value: None
  misc_feature: MA Experiment ID: 20000575 Result: Up-regulated in Transcription
  misc_feature: MA Experiment 20000575 PARAMETER Experiment Name: At_100uM_ABA_Mutants__P Parameter: Organism Value: A. thaliana
  misc_feature: MA Experiment 20000575 PARAMETER Experiment Name: At_100uM_ABA_Mutants__P Parameter: Plant Line Value: CS22
  misc_feature: MA Experiment 20000575 PARAMETER Experiment Name: At_100uM_ABA_Mutants__P Parameter: Timepoint (hr) Value: 6
  misc_feature: MA Experiment 20000575 PARAMETER Experiment Name: At_100uM_ABA_Mutants__P Parameter: Tissue Value: Whole Plant
  misc_feature: MA Experiment 20000575 PARAMETER Experiment Name: At_100uM_ABA_Mutants__P Parameter: Treatment Value: 1uM ABA vs. No Treatment
atcattcacattacactctttaagtcttaaacgaaacaatggcccttcaagctgcttctttggtctcctctgctttctctgtccgcaaagatggaaaattaaatgcttcagcatcatcatcattcaaagagtctagtctgttcggtgtttcactttcggagcaaagcaaagctgactttgtctcttcctcattgagatgcaagagggaacagagcttgaggaataataaagcgattattcgagctcaagcaatcgcgacttcaactccatcagtcacaaaatcttccttagaccgcaagaaaacacttagaaaaggaaacgtggttgtcacgggagcttcttcagggctaggtttagcaacggcaaaggcattagccgagacaggtaaatggcacgtgataatggcgtgcagagacttcctcaaggctgagagagccgctcaatctgcagggatgcctaaggacagctacactgtgatgcatttggacttggcgtctttggacagcgtgaggcagtttgttgataacttcaggcgagctgagatgcctctcgatgtgttggtctgcaatgccgcagtctatcagccaacggctaatcaacctactttcactgctgaagggtttgagcttagcgttgggataaaccatttgggccactttcttctttcaagattgttgattgatgacttgaagaactccgattatccatcaaaacgtctcatcattgttggatccataaccggaaacactaatacattggctggtaatgtacctccaaaggctaatcttggtgatttgaggggactagcaggcgggttgaacgggctaaacagctcggcgatgatagatggaggagattttgttggcgcaaaggcgtataaagatagcaaagtctgcaacatgttgacaatgcaggagtttcataggcgtttccatgaagacaccggcataacttttgcttccctttaccccggttgtattgcaacgactggtttgttcagagagcatattcctcttttccgtaccctcttccctcctttccagaagtacatcacaaaaggttacgtctccgagtcagaggctgggaaaagacttgctcaggtggtggctgatccaagcttgacgaagtcgggagtgtattggagctggaacaagacctcggcttcatttgagaatcagctgtctcaagaagctagcgatgtcgagaaggctcgtagagtttgggaagtcagcgagaagctcgtaggcttggcctaaaatttgatatgagatttttcctcggtgtttcaacctttggtttggcttaagatgagaaacaaacaaaaaaggagacattaataaagcctgtaacaactttgatttagtagttgtgttttggctgattctatctgtaatgaaacaaataattccacttttcaagttttttttgtc

SEQ ID NO: 106558 - protein, 405 aa, Arabidopsis thaliana
  peptide (1)..(405): Ceres Seq. ID no. 13619959
  misc_feature (1)..(405): Homolog of NCBI NO: 15239574 NR Description: protochlorophyllide reductase A (PCR A/POR A) thaliana] >gi|26454645|sp|Q42536|PORA_ARATH Protochlorophyllide
  misc_feature (1)..(405): Homolog of NCBI NO: 968975 NR Description: NADPH:protochlorophyllide oxidoreductase A
  misc_feature (1)..(405): Homolog of NCBI NO: 15234129 NR Description: protochlorophyllide reductase B (PCR B/POR B) thaliana] >gi|2507092|sp|P21218|PORB_ARATH Protochlorophyllide
  misc_feature (1)..(405): Homolog of NCBI NO: 21593167 NR Description: protochlorophyllide reductase precursor
  misc_feature (1)..(405): Homolog of NCBI NO: 81946 NR Description: protochlorophyllide reductase (EC 1.3.1.33)
  misc_feature (1)..(405): Homolog of NCBI NO: 266742 NR Description: Protochlorophyllide reductase, chloroplast
  misc_feature (1)..(405): Homolog of NCBI NO: 21068893 NR Description: NADPH:protochlorophyllide oxidoreductase
  misc_feature (1)..(405): Homolog of NCBI NO: 10720233 NR Description: Protochlorophyllide reductase, chloroplast
  misc_feature (1)..(405): Homolog of NCBI NO: 10720220 NR Description: Protochlorophyllide reductase, chloroplast
  misc_feature (1)..(405): Homolog of NCBI NO: 9587209 NR Description: NADPH-protochlorophyllide oxidoreductase [Vigna
MALQAASLVSSAFSVRKDGKLNASASSSFKESSLFGVSLSEQSKADFVSSSLRCKREQSLRNNKAIIRAQAIATSTPSVTKSSLDRKKTLRKGNVVVTGASSGLGLATAKALAETGKWHVIMACRDFLKAERAAQSAGMPKDSYTVMHLDLASLDSVRQFVDNFRRAEMPLDVLVCNAAVYQPTANQPTFTAEGFELSVGINHLGHFLLSRLLIDDLKNSDYPSKRLIIVGSITGNTNTLAGNVPPKANLGDLRGLAGGLNGLNSSAMIDGGDFVGAKAYKDSKVCNMLTMQEFHRRFHEDTGITFASLYPGCIATTGLFREHIPLFRTLFPPFQKYITKGYVSESEAGKRLAQVVADPSLTKSGVYWSWNKTSASFENQLSQEASDVEKARRVWEVSEKLVGLA

SEQ ID NO: 106559 - protein, 284 aa, Arabidopsis thaliana
  peptide (1)..(284): Ceres Seq. ID no. 13619960
  misc_feature (1)..(284): Homolog of NCBI NO: 15239574 NR Description: protochlorophyllide reductase A (PCR A/POR A) thaliana] >gi|26454645|sp|Q42536|PORA_ARATH Protochlorophyllide
  misc_feature (1)..(284): Homolog of NCBI NO: 968975 NR Description: NADPH:protochlorophyllide oxidoreductase A
  misc_feature (1)..(284): Homolog of NCBI NO: 15234129 NR Description: protochlorophyllide reductase B (PCR B/POR B) thaliana] >gi|2507092|sp|P21218|PORB_ARATH Protochlorophyllide
  misc_feature (1)..(284): Homolog of NCBI NO: 21593167 NR Description: protochlorophyllide reductase precursor
  misc_feature (1)..(284): Homolog of NCBI NO: 81946 NR Description: protochlorophyllide reductase (EC 1.3.1.33)
  misc_feature (1)..(284): Homolog of NCBI NO: 266742 NR Description: Protochlorophyllide reductase, chloroplast
  misc_feature (1)..(284): Homolog of NCBI NO: 21068893 NR Description: NADPH:protochlorophyllide oxidoreductase
  misc_feature (1)..(284): Homolog of NCBI NO: 10720233 NR Description: Protochlorophyllide reductase, chloroplast
  misc_feature (1)..(284): Homolog of NCBI NO: 10720220 NR Description: Protochlorophyllide reductase, chloroplast
  misc_feature (1)..(284): Homolog of NCBI NO: 9587209 NR Description: NADPH-protochlorophyllide oxidoreductase [Vigna
MACRDFLKAERAAQSAGMPKDSYTVMHLDLASLDSVRQFVDNFRRAEMPLDVLVCNAAVYQPTANQPTFTAEGFELSVGINHLGHFLLSRLLIDDLKNSDYPSKRLIIVGSITGNTNTLAGNVPPKANLGDLRGLAGGLNGLNSSAMIDGGDFVGAKAYKDSKVCNMLTMQEFHRRFHEDTGITFASLYPGCIATTGLFREHIPLFRTLFPPFQKYITKGYVSESEAGKRLAQVVADPSLTKSGVYWSWNKTSASFENQLSQEASDVEKARRVWEVSEKLVGLA

SEQ ID NO: 106560 - protein, 267 aa, Arabidopsis thaliana
  peptide (1)..(267): Ceres Seq. ID no. 13619961
  misc_feature (1)..(267): Homolog of NCBI NO: 15239574 NR Description: protochlorophyllide reductase A (PCR A/POR A) thaliana] >gi|26454645|sp|Q42536|PORA_ARATH Protochlorophyllide
  misc_feature (1)..(267): Homolog of NCBI NO: 968975 NR Description: NADPH:protochlorophyllide oxidoreductase A
  misc_feature (1)..(267): Homolog of NCBI NO: 15234129 NR Description: protochlorophyllide reductase B (PCR B/POR B) thaliana] >gi|2507092|sp|P21218|PORB_ARATH Protochlorophyllide
  misc_feature (1)..(267): Homolog of NCBI NO: 21593167 NR Description: protochlorophyllide reductase precursor
  misc_feature (1)..(267): Homolog of NCBI NO: 81946 NR Description: protochlorophyllide reductase (EC 1.3.1.33)
  misc_feature (1)..(267): Homolog of NCBI NO: 266742 NR Description: Protochlorophyllide reductase, chloroplast
  misc_feature (1)..(267): Homolog of NCBI NO: 21068893 NR Description: NADPH:protochlorophyllide oxidoreductase
  misc_feature (1)..(267): Homolog of NCBI NO: 10720233 NR Description: Protochlorophyllide reductase, chloroplast
  misc_feature (1)..(267): Homolog of NCBI NO: 10720220 NR Description: Protochlorophyllide reductase, chloroplast
  misc_feature (1)..(267): Homolog of NCBI NO: 9587209 NR Description: NADPH-protochlorophyllide oxidoreductase [Vigna
MPKDSYTVMHLDLASLDSVRQFVDNFRRAEMPLDVLVCNAAVYQPTANQPTFTAEGFELSVGINHLGHFLLSRLLIDDLKNSDYPSKRLIIVGSITGNTNTLAGNVPPKANLGDLRGLAGGLNGLNSSAMIDGGDFVGAKAYKDSKVCNMLTMQEFHRRFHEDTGITFASLYPGCIATTGLFREHIPLFRTLFPPFQKYITKGYVSESEAGKRLAQVVADPSLTKSGVYWSWNKTSASFENQLSQEASDVEKARRVWEVSEKLVGLA

SEQ ID NO: 106561 - DNA, 1205 bp, Arabidopsis thaliana
  misc_feature (1)..(1205): Ceres Seq. ID no. 13619962
  misc_feature: MA Experiment ID: 20000307 Result: Up-regulated in Transcription
  misc_feature: MA Experiment 20000307 PARAMETER Experiment Name: At_Germinating_Seeds_Sub_P Parameter: Age (hr) Value: 24 vs. 0
  misc_feature: MA Experiment 20000307 PARAMETER Experiment Name: At_Germinating_Seeds_Sub_P Parameter: Organism Value: A. thaliana
  misc_feature: MA Experiment 20000307 PARAMETER Experiment Name: At_Germinating_Seeds_Sub_P Parameter: Plant Line Value: WS
  misc_feature: MA Experiment 20000307 PARAMETER Experiment Name: At_Germinating_Seeds_Sub_P Parameter: Tissue Value: Germinating Seeds
  misc_feature: MA Experiment ID: 20000315 Result: Down-regulated in Transcription
  misc_feature: MA Experiment 20000315 PARAMETER Experiment Name: At_14day_Shoots-Roots_Sub_P Parameter: Age (day) Value: 14
  misc_feature: MA Experiment 20000315 PARAMETER Experiment Name: At_14day_Shoots-Roots_Sub_P Parameter: Organism Value: A. thaliana
  misc_feature: MA Experiment 20000315 PARAMETER Experiment Name: At_14day_Shoots-Roots_Sub_P Parameter: Plant Line Value: WS
  misc_feature: MA Experiment 20000315 PARAMETER Experiment Name: At_14day_Shoots-Roots_Sub_P Parameter: Tissue Value: Shoots vs. Whole Plant
  misc_feature: MA Experiment ID: 20000328 Result: Up-regulated in Transcription
  misc_feature: MA Experiment 20000328 PARAMETER Experiment Name: At_42deg_Heat_Sub_P Parameter: Age (day) Value: 14
  misc_feature: MA Experiment 20000328 PARAMETER Experiment Name: At_42deg_Heat_Sub_P Parameter: Organism Value: A. thaliana
  misc_feature: MA Experiment 20000328 PARAMETER Experiment Name: At_42deg_Heat_Sub_P Parameter: Plant Line Value: WS
  misc_feature: MA Experiment 20000328 PARAMETER Experiment Name: At_42deg_Heat_Sub_P Parameter: Temperature (deg C) Value: 42 vs. 22
  misc_feature: MA Experiment 20000328 PARAMETER Experiment Name: At_42deg_Heat_Sub_P Parameter: Timepoint (hr) Value: 6
  misc_feature: MA Experiment 20000328 PARAMETER Experiment Name: At_42deg_Heat_Sub_P Parameter: Tissue Value: Aerial
  misc_feature: MA Experiment ID: 20000346 Result: Up-regulated in Transcription
  misc_feature: MA Experiment 20000346 PARAMETER Experiment Name: At_2mM_SA_Sub_P Parameter: Age (day) Value: 14
  misc_feature: MA Experiment 20000346 PARAMETER Experiment Name: At_2mM_SA_Sub_P Parameter: Organism Value: A. thaliana
  misc_feature: MA Experiment 20000346 PARAMETER Experiment Name: At_2mM_SA_Sub_P Parameter: Plant Line Value: WS
  misc_feature: MA Experiment 20000346 PARAMETER Experiment Name: At_2mM_SA_Sub_P Parameter: Timepoint (hr) Value: 1
  misc_feature: MA Experiment 20000346 PARAMETER Experiment Name: At_2mM_SA_Sub_P Parameter: Tissue Value: Aerial
  misc_feature: MA Experiment 20000346 PARAMETER Experiment Name: At_2mM_SA_Sub_P Parameter: Treatment Value: 2mM SA vs. No Treatment
  misc_feature: MA Experiment ID: 20000347 Result: Up-regulated in Transcription
  misc_feature: MA Experiment 20000347 PARAMETER Experiment Name: At_2mM_SA_Sub_P Parameter: Age (day) Value: 14
  misc_feature: MA Experiment 20000347 PARAMETER Experiment Name: At_2mM_SA_Sub_P Parameter: Organism Value: A. thaliana
  misc_feature: MA Experiment 20000347 PARAMETER Experiment Name: At_2mM_SA_Sub_P Parameter: Plant Line Value: WS
  misc_feature: MA Experiment 20000347 PARAMETER Experiment Name: At_2mM_SA_Sub_P Parameter: Timepoint (hr) Value: 6
  misc_feature: MA Experiment 20000347 PARAMETER Experiment Name: At_2mM_SA_Sub_P Parameter: Tissue Value: Aerial
  misc_feature: MA Experiment 20000347 PARAMETER Experiment Name: At_2mM_SA_Sub_P Parameter: Treatment Value: 2mM SA vs. No Treatment
  misc_feature: MA Experiment ID: 20000349 Result: Up-regulated in Transcription
  misc_feature: MA Experiment 20000349 PARAMETER Experiment Name: At_100uM_ABA_Sub_P Parameter: Age (day) Value: 14
  misc_feature: MA Experiment 20000349 PARAMETER Experiment Name: At_100uM_ABA_Sub_P Parameter: Organism Value: A. thaliana
  misc_feature: MA Experiment 20000349 PARAMETER Experiment Name: At_100uM_ABA_Sub_P Parameter: Plant Line Value: WS
  misc_feature: MA Experiment 20000349 PARAMETER Experiment Name: At_100uM_ABA_Sub_P Parameter: Timepoint (hr) Value: 6
  misc_feature: MA Experiment 20000349 PARAMETER Experiment Name: At_100uM_ABA_Sub_P Parameter: Tissue Value: Aerial
  misc_feature: MA Experiment 20000349 PARAMETER Experiment Name: At_100uM_ABA_Sub_P Parameter: Treatment Value: 100uM ABA vs. No Treatment
  misc_feature: MA Experiment ID: 20001807 Result: Down-regulated in Transcription
  misc_feature: MA Experiment 20001807 PARAMETER Experiment Name: At_50mM_NH4NO3_L-to-H_Sub_P Parameter: Timepoint (hr) Value: 6
  misc_feature: MA Experiment 20001807 PARAMETER Experiment Name: At_50mM_NH4NO3_L-to-H_Sub_P Parameter: Tissue Value: Leaf
  misc_feature: MA Experiment 20001807 PARAMETER Experiment Name: At_50mM_NH4NO3_L-to-H_Sub_P Parameter: Treatment Value: 50mM NH4NO3 vs 100mM Mannitol
atggcgcctcgtcttttcacatgttttggcgtcaaaggatcttcaacttccaccaccaccggaaaaggtatttccggtcataacgcggctaatgtagctgctgatgttccggtaggtgatggacctattcttgttcagcttttctcatctcaaggatgtaaaacttcgcctgaggcggagatgcttgtatcacgtcttggacgtggtgatttcgatggaaagatccgtcgagacggtggatctagtggttctccggcgatggttttggtttttcacgttgattattgggattatcttggatggaaagatccttatggatcgagtcagtggaccgtgagacaaaaggcctatatcgaggctttgaatcaagatacaatgtttactccacagtttgttgttcaaggtcgtgttcaattacttgggaatgaagaagagtccttgcttaagtctattgttgaagctcctaggtttccgtctcctgcgtttcgggccacatttcaaagaccaacatcagaaacccttcaagtatctctcaccggagctttgaggatgaaagtggactcgagcgggatcgatataatggtggcgctatatgaaaacggtttggtgaatgattgcgctcgaggagagaactcaggaagagtcttgtccaatgactacgttgtaagaaagctagaaaagttatgcaccgttaaagatttaacgggaaaaaagacggtgtcagggacagctcatttcacggtttgggatggattcaacagctctaaatgtggagtcgctgtttttctacagaacacatctcttcaaatttttggtacgcagagttttcaattgcctgatgagatttgacaaaggaacaaaatttctgaatctattttttttttttttatagaaatgaattttgcacttttgtgttcgttcatatttggttattattggaacttttgtgtgtatagaaggatatttgtcactctcattataggcatttgctttgtttaaaccctttcaattttctttctttctaagttatgccatcccactccacttttaggacagcattatataatgattttaatatataaaccaaacttagtattttgtgggtttaaatccgatgcaggttgacaaatgttttgttgacttgtgttaattcgtgaagttttgtaaggacgataataattgaaacattaatatggaagttattg

SEQ ID NO: 106562 - protein, 282 aa, Arabidopsis thaliana
  peptide (1)..(282): Ceres Seq. ID no. 13619963
  misc_feature (1)..(282): Homolog of NCBI NO: 15239579 NR Description: expressed protein [Arabidopsis thaliana] gene_id:MDK4.6~pir||T05759~strong similarity to unknown protein
  misc_feature (1)..(282): Homolog of NCBI NO: 15234089 NR Description: membrane lipo protein lipid attachment expressed protein [Arabidopsis thaliana] >gi|7460217|pir||T05759
  misc_feature (1)..(282): Homolog of NCBI NO: 21593063 NR Description: unknown [Arabidopsis thaliana]
  misc_feature (1)..(282): Homolog of NCBI NO: 13265463 NR Description: AT4g27350 [Arabidopsis thaliana]
  misc_feature (1)..(282): Homolog of NCBI NO: 34394018 NR Description: membrane lipoprotein lipid attachment
  misc_feature (210)..(282): Homolog of NCBI NO: 28393652 NR Description: unknown protein [Arabidopsis thaliana]
  misc_feature (34)..(267): Homolog of NCBI NO: 22962198 NR Description: hypothetical protein [Rhodopseudomonas palustris]
  misc_feature (42)..(223): Homolog of NCBI NO: 23014426 NR Description: hypothetical protein [Magnetospirillum
  misc_feature (24)..(228): Homolog of NCBI NO: 13473812 NR Description: hypothetical protein [Mesorhizobium loti]
  misc_feature (17)..(217): Homolog of NCBI NO: 13473665 NR Description: hypothetical protein, - Arabidopsis thaliana loti] >gi|14024415|dbj|BAB51019.1| hypothetical protein
MAPRLFTCFGVKGSSTSTTTGKGISGHNAANVAADVPVGDGPILVQLFSSQGCKTSPEAEMLVSRLGRGDFDGKIRRDGGSSGSPAMVLVFHVDYWDYLGWKDPYGSSQWTVRQKAYIEALNQDTMFTPQFVVQGRVQLLGNEEESLLKSIVEAPRFPSPAFRATFQRPTSETLQVSLTGALRMKVDSSGIDIMVALYENGLVNDCARGENSGRVLSNDYVVRKLEKLCTVKDLTGKKTVSGTAHFTVWDGFNSSKCGVAVFLQNTSLQIFGTQSFQLPDEI

SEQ ID NO: 106563 - protein, 222 aa, Arabidopsis thaliana
  peptide (1)..(222): Ceres Seq. ID no. 13619964
  misc_feature (1)..(222): Homolog of NCBI NO: 15239579 NR Description: expressed protein [Arabidopsis thaliana] gene_id:MDK4.6~pir||T05759~strong similarity to unknown protein
  misc_feature (1)..(222): Homolog of NCBI NO: 15234089 NR Description: membrane lipo protein lipid attachment expressed protein [Arabidopsis thaliana] >gi|7460217|pir||T05759
  misc_feature (1)..(222): Homolog of NCBI NO: 21593063 NR Description: unknown [Arabidopsis thaliana]
  misc_feature (1)..(222): Homolog of NCBI NO: 13265463 NR Description: AT4g27350 [Arabidopsis thaliana]
  misc_feature (1)..(222): Homolog of NCBI NO: 34394018 NR Description: membrane lipoprotein lipid attachment
  misc_feature (150)..(222): Homolog of NCBI NO: 28393652 NR Description: unknown protein [Arabidopsis thaliana]
  misc_feature (1)..(207): Homolog of NCBI NO: 22962198 NR Description: hypothetical protein [Rhodopseudomonas palustris]
  misc_feature (1)..(163): Homolog of NCBI NO: 23014426 NR Description: hypothetical protein [Magnetospirillum
  misc_feature (1)..(168): Homolog of NCBI NO: 13473812 NR Description: hypothetical protein [Mesorhizobium loti]
  misc_feature (1)..(157): Homolog of NCBI NO: 13473665 NR Description: hypothetical protein, - Arabidopsis thaliana loti] >gi|14024415|dbj|BAB51019.1| hypothetical protein
MLVSRLGRGDFDGKIRRDGGSSGSPAMVLVFHVDYWDYLGWKDPYGSSQWTVRQKAYIEALNQDTMFTPQFVVQGRVQLLGNEEESLLKSIVEAPRFPSPAFRATFQRPTSETLQVSLTGALRMKVDSSGIDIMVALYENGLVNDCARGENSGRVLSNDYVVRKLEKLCTVKDLTGKKTVSGTAHFTVWDGFNSSKCGVAVFLQNTSLQIFGTQSFQLPDEI

SEQ ID NO: 106564 - protein, 196 aa, Arabidopsis thaliana
  peptide (1)..(196): Ceres Seq. ID no. 13619965
  misc_feature (1)..(196): Homolog of NCBI NO: 15239579 NR Description: expressed protein [Arabidopsis thaliana] gene_id:MDK4.6~pir||T05759~strong similarity to unknown protein
  misc_feature (1)..(196): Homolog of NCBI NO: 15234089 NR Description: membrane lipo protein lipid attachment expressed protein [Arabidopsis thaliana] >gi|7460217|pir||T05759
  misc_feature (1)..(196): Homolog of NCBI NO: 21593063 NR Description: unknown [Arabidopsis thaliana]
  misc_feature (1)..(196): Homolog of NCBI NO: 13265463 NR Description: AT4g27350 [Arabidopsis thaliana]
  misc_feature (1)..(196): Homolog of NCBI NO: 34394018 NR Description: membrane lipoprotein lipid attachment
  misc_feature (124)..(196): Homolog of NCBI NO: 28393652 NR Description: unknown protein [Arabidopsis thaliana]
  misc_feature (1)..(181): Homolog of NCBI NO: 22962198 NR Description: hypothetical protein [Rhodopseudomonas palustris]
  misc_feature (1)..(137): Homolog of NCBI NO: 23014426 NR Description: hypothetical protein [Magnetospirillum
  misc_feature (1)..(142): Homolog of NCBI NO: 13473812 NR Description: hypothetical protein [Mesorhizobium loti]
  misc_feature (1)..(131): Homolog of NCBI NO: 13473665 NR Description: hypothetical protein, - Arabidopsis thaliana loti] >gi|14024415|dbj|BAB51019.1| hypothetical protein
MVLVFHVDYWDYLGWKDPYGSSQWTVRQKAYIEALNQDTMFTPQFVVQGRVQLLGNEEESLLKSIVEAPRFPSPAFRATFQRPTSETLQVSLTGALRMKVDSSGIDIMVALYENGLVNDCARGENSGRVLSNDYVVRKLEKLCTVKDLTGKKTVSGTAHFTVWDGFNSSKCGVAVFLQNTSLQIFGTQSFQLPDEI

SEQ ID NO: 106565 - DNA, 1050 bp, Arabidopsis thaliana
  misc_feature (1)..(1050): Ceres Seq. ID no. 13619970
  misc_feature: MA Experiment ID: 20000173 Result: Down-regulated in Transcription
  misc_feature: MA Experiment 20000173 PARAMETER Experiment Name: At_42deg_Heat_P Parameter: Age (day) Value: 14
  misc_feature: MA Experiment 20000173 PARAMETER Experiment Name: At_42deg_Heat_P Parameter: Organism Value: A. thaliana
  misc_feature: MA Experiment 20000173 PARAMETER Experiment Name: At_42deg_Heat_P Parameter: Plant Line Value: WS
  misc_feature: MA Experiment 20000173 PARAMETER Experiment Name: At_42deg_Heat_P Parameter: Temperature (deg C) Value: 42 vs. 22
  misc_feature: MA Experiment 20000173 PARAMETER Experiment Name: At_42deg_Heat_P Parameter: Timepoint (hr) Value: 6
  misc_feature: MA Experiment 20000173 PARAMETER Experiment Name: At_42deg_Heat_P Parameter: Tissue Value: Aerial
  misc_feature: MA Experiment ID: 20000182 Result: Up-regulated in Transcription
  misc_feature: MA Experiment 20000182 PARAMETER Experiment Name: At_2mM_SA_P Parameter: Age (day) Value: 14
  misc_feature: MA Experiment 20000182 PARAMETER Experiment Name: At_2mM_SA_P Parameter: Organism Value: A. thaliana
  misc_feature: MA Experiment 20000182 PARAMETER Experiment Name: At_2mM_SA_P Parameter: Plant Line Value: WS
  misc_feature: MA Experiment 20000182 PARAMETER Experiment Name: At_2mM_SA_P Parameter: Timepoint (hr) Value: 6
  misc_feature: MA Experiment 20000182 PARAMETER Experiment Name: At_2mM_SA_P Parameter: Tissue Value: Aerial
  misc_feature: MA Experiment 20000182 PARAMETER Experiment Name: At_2mM_SA_P Parameter: Treatment Value: 2mM SA vs. No Treatment
  misc_feature: MA Experiment ID: 20000184 Result: Down-regulated in Transcription
  misc_feature: MA Experiment 20000184 PARAMETER Experiment Name: At_Shoots__P Parameter: Age (day) Value: 7
  misc_feature: MA Experiment 20000184 PARAMETER Experiment Name: At_Shoots__P Parameter: Tissue Value: Shoots vs. Whole Plant
  misc_feature: MA Experiment ID: 20000185 Result: Up-regulated in Transcription
  misc_feature: MA Experiment 20000185 PARAMETER Experiment Name: At_Roots__P Parameter: Age (day) Value: 7 vs. 21
  misc_feature: MA Experiment 20000185 PARAMETER Experiment Name: At_Roots__P Parameter: Organism Value: A. thaliana
  misc_feature: MA Experiment 20000185 PARAMETER Experiment Name: At_Roots__P Parameter: Tissue Value: Roots vs. Whole Plant
  misc_feature: MA Experiment ID: 20000227 Result: Down-regulated in Transcription
  misc_feature: MA Experiment 20000227 PARAMETER Experiment Name: At_Root-Tips-vs-Tops_P Parameter: Tissue Value: Root Tips vs. Root Tops
  misc_feature: MA Experiment ID: 20000234 Result: Down-regulated in Transcription
  misc_feature: MA Experiment 20000234 PARAMETER Experiment Name: At_Siliques_P Parameter: Age (day) Value: 21
  misc_feature: MA Experiment 20000234 PARAMETER Experiment Name: At_Siliques_P Parameter: Organism Value: A. thaliana
  misc_feature: MA Experiment 20000234 PARAMETER Experiment Name: At_Siliques_P Parameter: Plant Line Value: WS
  misc_feature: MA Experiment 20000234 PARAMETER Experiment Name: At_Siliques_P Parameter: Tissue Value: Less Than 5mm Siliques vs. Whole Plant
  misc_feature: MA Experiment ID: 20000235 Result: Down-regulated in Transcription
  misc_feature: MA Experiment 20000235 PARAMETER Experiment Name: At_Siliques_P Parameter: Age (day) Value: 21
  misc_feature: MA Experiment 20000235 PARAMETER Experiment Name: At_Siliques_P Parameter: Organism Value: A. thaliana
  misc_feature: MA Experiment 20000235 PARAMETER Experiment Name: At_Siliques_P Parameter: Plant Line Value: WS
  misc_feature: MA Experiment 20000235 PARAMETER Experiment Name: At_Siliques_P Parameter: Tissue Value: 5-10mm Siliques vs. Whole Plant
  misc_feature: MA Experiment ID: 20000437 Result: Up-regulated in Transcription
  misc_feature: MA Experiment 20000437 PARAMETER Experiment Name: At_Drought_P Parameter: Age (day) Value: 8
  misc_feature: MA Experiment 20000437 PARAMETER Experiment Name: At_Drought_P Parameter: Organism Value: A. thaliana
  misc_feature: MA Experiment 20000437 PARAMETER Experiment Name: At_Drought_P Parameter: Plant Line Value: WS
  misc_feature: MA Experiment 20000437 PARAMETER Experiment Name: At_Drought_P Parameter: Timepoint (hr) Value: 24
  misc_feature: MA Experiment 20000437 PARAMETER Experiment Name: At_Drought_P Parameter: Tissue Value: Whole Plant
  misc_feature: MA Experiment 20000437 PARAMETER Experiment Name: At_Drought_P Parameter: Treatment Value: Drought vs. No Drought
  misc_feature: MA Experiment ID: 20000439 Result: Up-regulated in Transcription
  misc_feature: MA Experiment 20000439 PARAMETER Experiment Name: At_Roots__P Parameter: Age (day) Value: 14 vs. 21
  misc_feature: MA Experiment 20000439 PARAMETER Experiment Name: At_Roots__P Parameter: Organism Value: A. thaliana
  misc_feature: MA Experiment 20000439 PARAMETER Experiment Name: At_Roots__P Parameter: Tissue Value: Roots vs. Whole Plant
  misc_feature: MA Experiment ID: 20000527 Result: Down-regulated in Transcription
  misc_feature: MA Experiment 20000527 PARAMETER Experiment Name: At_10percent_PEG_P Parameter: Age (day) Value: 20
  misc_feature: MA Experiment 20000527 PARAMETER Experiment Name: At_10percent_PEG_P Parameter: Organism Value: A. thaliana
  misc_feature: MA Experiment 20000527 PARAMETER Experiment Name: At_10percent_PEG_P Parameter: Plant Line Value: WS
  misc_feature: MA Experiment 20000527 PARAMETER Experiment Name: At_10percent_PEG_P Parameter: Timepoint (day) Value: 20
  misc_feature: MA Experiment 20000527 PARAMETER Experiment Name: At_10percent_PEG_P Parameter: Tissue Value: Whole Plant
  misc_feature: MA Experiment 20000527 PARAMETER Experiment Name: At_10percent_PEG_P Parameter: Treatment Value: 10percent PEG vs. No Treatment
  misc_feature: MA Experiment ID: 20000794 Result: Up-regulated in Transcription
  misc_feature: MA Experiment 20000794 PARAMETER Experiment Name: At_Petals_P Parameter: Age (day) Value: 23-25 days
  misc_feature: MA Experiment 20000794 PARAMETER Experiment Name: At_Petals_P Parameter: Plant Line Value: WS
  misc_feature: MA Experiment 20000794 PARAMETER Experiment Name: At_Petals_P Parameter: Tissue Value: Petals vs. Whole plant
  misc_feature: MA Experiment ID: 20001554 Result: Up-regulated in Transcription
  misc_feature: MA Experiment 20001554 PARAMETER Experiment Name: At_Drought_Soil_Dry_P Parameter: Age (day) Value: 21
  misc_feature: MA Experiment 20001554 PARAMETER Experiment Name: At_Drought_Soil_Dry_P Parameter: Organism Value: A. thaliana
  misc_feature: MA Experiment 20001554 PARAMETER Experiment Name: At_Drought_Soil_Dry_P Parameter: Plant Line Value: WS
  misc_feature: MA Experiment 20001554 PARAMETER Experiment Name: At_Drought_Soil_Dry_P Parameter: Post Timepoint (hr) Value: None
  misc_feature: MA Experiment 20001554 PARAMETER Experiment Name: At_Drought_Soil_Dry_P Parameter: Post-Treatment Value: None
  misc_feature: MA Experiment 20001554 PARAMETER Experiment Name: At_Drought_Soil_Dry_P Parameter: Timepoint (day) Value: 7
  misc_feature: MA Experiment 20001554 PARAMETER Experiment Name: At_Drought_Soil_Dry_P Parameter: Treatment Value: Drought vs. No Drought
  misc_feature: MA Experiment ID: 20001559 Result: Up-regulated in Transcription
  misc_feature: MA Experiment 20001559 PARAMETER Experiment Name: At_Drought_Soil_Dry_P Parameter: Age (day) Value: 28
  misc_feature: MA Experiment 20001559 PARAMETER Experiment Name: At_Drought_Soil_Dry_P Parameter: Organism Value: A. thaliana
  misc_feature: MA Experiment 20001559 PARAMETER Experiment Name: At_Drought_Soil_Dry_P Parameter: Plant Line Value: WS
  misc_feature: MA Experiment 20001559 PARAMETER Experiment Name: At_Drought_Soil_Dry_P Parameter: Post Timepoint (hr) Value: 29
  misc_feature: MA Experiment 20001559 PARAMETER Experiment Name: At_Drought_Soil_Dry_P Parameter: Post-Treatment Value: Re-Water vs. No Drought
  misc_feature: MA Experiment 20001559 PARAMETER Experiment Name: At_Drought_Soil_Dry_P Parameter: Timepoint (day) Value: 14
  misc_feature: MA Experiment 20001559 PARAMETER Experiment Name: At_Drought_Soil_Dry_P Parameter: Treatment Value: Drought vs. No Drought
  misc_feature: MA Experiment ID: 20001904 Result: Up-regulated in Transcription
  misc_feature: MA Experiment 20001904 PARAMETER Experiment Name: At_Drought_Reproduction_P Parameter: Age (day) Value: 37
  misc_feature: MA Experiment 20001904 PARAMETER Experiment Name: At_Drought_Reproduction_P Parameter: Organism Value: A. thaliana
  misc_feature: MA Experiment 20001904 PARAMETER Experiment Name: At_Drought_Reproduction_P Parameter: Plant Line Value: WS
  misc_feature: MA Experiment 20001904 PARAMETER Experiment Name: At_Drought_Reproduction_P Parameter: Timepoint (day) Value: 7
  misc_feature: MA Experiment 20001904 PARAMETER Experiment Name: At_Drought_Reproduction_P Parameter: Tissue Value: Rosettes
  misc_feature: MA Experiment 20001904 PARAMETER Experiment Name: At_Drought_Reproduction_P Parameter: Treatment Value: Drought vs. No Drought
  misc_feature: MA Experiment ID: 20001906 Result: Up-regulated in Transcription
  misc_feature: MA Experiment 20001906 PARAMETER Experiment Name: At_Drought_Reproduction_P Parameter: Age (day) Value: 35
  misc_feature: MA Experiment 20001906 PARAMETER Experiment Name: At_Drought_Reproduction_P Parameter: Organism Value: A. thaliana
  misc_feature: MA Experiment 20001906 PARAMETER Experiment Name: At_Drought_Reproduction_P Parameter: Plant Line Value: WS
  misc_feature: MA Experiment 20001906 PARAMETER Experiment Name: At_Drought_Reproduction_P Parameter: Timepoint (day) Value: 5
  misc_feature: MA Experiment 20001906 PARAMETER Experiment Name: At_Drought_Reproduction_P Parameter: Tissue Value: Siliques
  misc_feature: MA Experiment 20001906 PARAMETER Experiment Name: At_Drought_Reproduction_P Parameter: Treatment Value: Drought vs. No Drought
  misc_feature: MA Experiment ID: 20001911 Result: Up-regulated in Transcription
  misc_feature: MA Experiment 20001911 PARAMETER Experiment Name: At_Drought_Reproduction_P Parameter: Age (day) Value: 40
  misc_feature: MA Experiment 20001911 PARAMETER Experiment Name: At_Drought_Reproduction_P Parameter: Organism Value: A. thaliana
  misc_feature: MA Experiment 20001911 PARAMETER Experiment Name: At_Drought_Reproduction_P Parameter: Plant Line Value: WS
  misc_feature: MA Experiment 20001911 PARAMETER Experiment Name: At_Drought_Reproduction_P Parameter: Timepoint (day) Value: 10
  misc_feature: MA Experiment 20001911 PARAMETER Experiment Name: At_Drought_Reproduction_P Parameter: Tissue Value: Flowers
  misc_feature: MA Experiment 20001911 PARAMETER Experiment Name: At_Drought_Reproduction_P Parameter: Treatment Value: Drought vs. No Drought
aacaaaagaaaaacataaaaggaaaggcaaaaagaagatgtgagcttgtgaatgccaaaagatcacataactttctctctgtttcatcaatggccgagaaagtccatgagatcgccggaaagataactcctttctgccggaaaatagttcacgtgaacagaaaatggagaatcatcgagagggtatcgatctttggagatttctttaggtttctatggagaaaaattgtttcttgttcaagtatcatcgaaaaacctattctttaccggcgaatcgttcacaagatttcttccaccgcgggcgatatctttgacggagacgacgatactacgacagaacctactgtttccggtagaaggtttggttcaagttcggattcggatttggttagtctcaagatcagtttattaggcgattgtcaaacagggaagactacttttgtagtaaaatatgttggagatgagaatcaaagtttcttggagatgacgggtttgaatttgatggacaaaactttttatgttcaaggagttactatttcgtttagcatttgggatgtgggaggtgatgaaaagagatcaaaagatcatataccaattgcttgtaaagatgcagtagcaatcttgttcatgtttgatctaaccagtcgatctactcttaacagtgtcttcgggtggtatagccaggcaagaaaatggaacaagacggcaattccgattctaataggaacaaaattcgatgactttgttcggctcccacccaatcttcagtggaccatcgtcactcaggcaagagcatatgcgaaggtgatgaatgcgtcattgttcttctcaagtgcgacacacaacataaatgtgaacaagatcttcaaattcattttggctagactttttaatttgccttggaagattgacagaaatttgaccttaggtgaacccattatcgactacgattcctaatttagtctactttaattatttatcatttttgtacataattttttttttttaaaaagaggtgaacgaatatcgtcgataaaaaaaaatatagttg

SEQ ID NO: 106566 - protein, 317 aa, Arabidopsis thaliana
  peptide (1)..(317): Ceres Seq. ID no. 13619971
  misc_feature (135)..(297): Pfam Name: Ras family Pfam Description: Ras family
  misc_feature (30)..(317): Homolog of NCBI NO: 15239761 NR Description: SGP1 monomeric G-protein (emb|CAB54517.1)
  misc_feature (48)..(315): Homolog of NCBI NO: 33146727 NR Description: putative Septum-promoting GTP-binding protein 1
  misc_feature (45)..(315): Homolog of NCBI NO: 18403119 NR Description: SGP1 monomeric G-protein -related [Arabidopsis
  misc_feature (52)..(315): Homolog of NCBI NO: 30686351 NR Description: SGP1 monomeric G-protein -related [Arabidopsis
  misc_feature (116)..(317): Homolog of NCBI NO: 38105787 NR Description: hypothetical protein MG04862.4 [Magnaporthe
  misc_feature (121)..(317): Homolog of NCBI NO: 32421653 NR Description: hypothetical protein [Neurospora crassa]
  misc_feature (45)..(261): Homolog of NCBI NO: 30686347 NR Description: SGP1 monomeric G-protein -related [Arabidopsis
  misc_feature (129)..(315): Homolog of NCBI NO: 19114197 NR Description: sid3 protein; gtpase; inducer of septum formation
  misc_feature (129)..(315): Homolog of NCBI NO: 2408103 NR Description: sid3 [Schizosaccharomyces pombe]
  misc_feature (121)..(315): Homolog of NCBI NO: 28396142 NR Description: Tem-1-like protein [Giardia intestinalis]
QKKNIKGKAKRRCELVNAKRSHNFLSVSSMAEKVHEIAGKITPFCRKIVHVNRKWRIIERVSIFGDFFRFLWRKIVSCSSIIEKPILYRRIVHKISSTAGDIFDGDDDTTTEPTVSGRRFGSSSDSDLVSLKISLLGDCQTGKTTFVVKYVGDENQSFLEMTGLNLMDKTFYVQGVTISFSIWDVGGDEKRSKDHIPIACKDAVAILFMFDLTSRSTLNSVFGWYSQARKWNKTAIPILIGTKFDDFVRLPPNLQWTIVTQARAYAKVMNASLFFSSATHNINVNKIFKFILARLFNLPWKIDRNLTLGEPIIDYDS

SEQ ID NO: 106567 - protein, 288 aa, Arabidopsis thaliana
  peptide (1)..(288): Ceres Seq. ID no. 13619972
  misc_feature (106)..(268): Pfam Name: Ras family Pfam Description: Ras family
  misc_feature (1)..(288): Homolog of NCBI NO: 15239761 NR Description: SGP1 monomeric G-protein (emb|CAB54517.1)
  misc_feature (19)..(286): Homolog of NCBI NO: 33146727 NR Description: putative Septum-promoting GTP-binding protein 1
  misc_feature (16)..(286): Homolog of NCBI NO: 18403119 NR Description: SGP1 monomeric G-protein -related [Arabidopsis
  misc_feature (23)..(286): Homolog of NCBI NO: 30686351 NR Description: SGP1 monomeric G-protein -related [Arabidopsis
  misc_feature (87)..(288): Homolog of NCBI NO: 38105787 NR Description: hypothetical protein MG04862.4 [Magnaporthe
  misc_feature (92)..(288): Homolog of NCBI NO: 32421653 NR Description: hypothetical protein [Neurospora crassa]
  misc_feature (16)..(232): Homolog of NCBI NO: 30686347 NR Description: SGP1 monomeric G-protein -related [Arabidopsis
  misc_feature (100)..(286): Homolog of NCBI NO: 19114197 NR Description: sid3 protein; gtpase; inducer of septum formation
  misc_feature (100)..(286): Homolog of NCBI NO: 2408103 NR Description: sid3 [Schizosaccharomyces pombe]
  misc_feature (92)..(286): Homolog of NCBI NO: 28396142 NR Description: Tem-1-like protein [Giardia intestinalis]
MAEKVHEIAGKITPFCRKIVHVNRKWRIIERVSIFGDFFRFLWRKIVSCSSIIEKPILYRRIVHKISSTAGDIFDGDDDTTTEPTVSGRRFGSSSDSDLVSLKISLLGDCQTGKTTFVVKYVGDENQSFLEMTGLNLMDKTFYVQGVTISFSIWDVGGDEKRSKDHIPIACKDAVAILFMFDLTSRSTLNSVFGWYSQARKWNKTAIPILIGTKFDDFVRLPPNLQWTIVTQARAYAKVMNASLFFSSATHNINVNKIFKFILARLFNLPWKIDRNLTLGEPIIDYDS

SEQ ID NO: 106568 - DNA, 723 bp, Arabidopsis thaliana
  misc_feature (1)..(723): Ceres Seq. ID no. 13619973
  misc_feature: MA Experiment ID: 20000527 Result: Up-regulated in Transcription
  misc_feature: MA Experiment 20000527 PARAMETER Experiment Name: At_10percent_PEG_P Parameter: Age (day) Value: 20
  misc_feature: MA Experiment 20000527 PARAMETER Experiment Name: At_10percent_PEG_P Parameter: Organism Value: A. thaliana
  misc_feature: MA Experiment 20000527 PARAMETER Experiment Name: At_10percent_PEG_P Parameter: Plant Line Value: WS
  misc_feature: MA Experiment 20000527 PARAMETER Experiment Name: At_10percent_PEG_P Parameter: Timepoint (day) Value: 20
  misc_feature: MA Experiment 20000527 PARAMETER Experiment Name: At_10percent_PEG_P Parameter: Tissue Value: Whole Plant
  misc_feature: MA Experiment 20000527 PARAMETER Experiment Name: At_10percent_PEG_P Parameter: Treatment Value: 10percent PEG vs. No Treatment
  misc_feature: MA Experiment ID: 20000794 Result: Down-regulated in Transcription
  misc_feature: MA Experiment 20000794 PARAMETER Experiment Name: At_Petals_P Parameter: Age (day) Value: 23-25 days
  misc_feature: MA Experiment 20000794 PARAMETER Experiment Name: At_Petals_P Parameter: Plant Line Value: WS
  misc_feature: MA Experiment 20000794 PARAMETER Experiment Name: At_Petals_P Parameter: Tissue Value: Petals vs. Whole plant
cacttgaagctattcaacaatttttatagctttcttcctctccaaaaccacaccaaaaaaaaaaaaaaaaaatttgattttcagatccaatcaaccagagatgagagataacaacaataacaacacaagagaagaagagagaagcagttcttcaaagcagcaacaaccacaagctcctatgtctttgaagatcatagattcatgtctcagactaagtgtggttcctctcagtgttgcaaccatctggttaactgtcactaaccacgaatccaacccggactacggcaatttagagtacaactccatcatgggtctcaagtatatggttggtgtgagtgccatatctgctatttatgctctgctctctactgtttcttcatgggtcacatgtttagtctccaaagcttggctcttctttattcctgaccaggttttagcttatgtgatgacaacatcagtagcaggagcaacagagatagtgtatctacttaacaaaggagacaaaatagtgacatggagtgaaatgtgttcttcttatccacattattgttcaaaactcacaattgctttgggacttcatgtctttgttcttttctttttcttatttctctctgtcatttctgcttatagagcttttagtccctttgatcctccttgtgattctcaaaccaataatgatgcttaaattagtcagttttggattcaactttatcaaaatgttgc

SEQ ID NO: 106569 - protein, 194 aa, Arabidopsis thaliana
  peptide (1)..(194): Ceres Seq. ID no. 13619974
  misc_feature (26)..(166): Pfam Name: Domain of unknown function (DUF588) Pfam Description: Domain of unknown function (DUF588)
  misc_feature (1)..(194): Homolog of NCBI NO: 15240435 NR Description: expressed protein [Arabidopsis thaliana] gb|AAD50013.1~gene_id:MBG8.25~similar to unknown protein thaliana] >gi|27754655|gb|AAO22772.1| unknown protein
  misc_feature (17)..(185): Homolog of NCBI NO: 16973324 NR Description: hypothetical protein [Gossypium hirsutum]
  misc_feature (2)..(191): Homolog of NCBI NO: 17380964 NR Description: unknown protein [Arabidopsis thaliana]
  misc_feature (2)..(191): Homolog of NCBI NO: 18394453 NR Description: expressed integral membrane protein common family
  misc_feature (14)..(194): Homolog of NCBI NO: 38344646 NR Description: OSJNBa0094P09.18 [Oryza sativa (japonica
  misc_feature (61)..(185): Homolog of NCBI NO: 14030504 NR Description: salicylic acid-induced fragment 1 protein
  misc_feature (30)..(185): Homolog of NCBI NO: 15231842 NR Description: expressed protein [Arabidopsis thaliana] gb|AAD50013.1~gene_id:MLN21.16~similar to unknown protein
  misc_feature (29)..(190): Homolog of NCBI NO: 18414659 NR Description: expressed integral membrane protein common family thaliana] >gi|21595041|gb|AAM66067.1| unknown [Arabidopsis >gi|28393080|gb|AAO41974.1| unknown protein [Arabidopsis
  misc_feature (25)..(175): Homolog of NCBI NO: 15227576 NR Description: hypothetical integral membrane protein common [Arabidopsis thaliana] >gi|25408448|pir||H84776 hypothetical
  misc_feature (11)..(177): Homolog of NCBI NO: 15242268 NR Description: expressed protein [Arabidopsis thaliana]
MRDNNNNNTREEERSSSSKQQQPQAPMSLKIIDSCLRLSVVPLSVATIWLTVTNHESNPDYGNLEYNSIMGLKYMVGVSAISAIYALLSTVSSWVTCLVSKAWLFFIPDQVLAYVMTTSVAGATEIVYLLNKGDKIVTWSEMCSSYPHYCSKLTIALGLHVFVLFFFLFLSVISAYRAFSPFDPPCDSQTNNDA

SEQ ID NO: 106570 - protein, 168 aa, Arabidopsis thaliana
  peptide (1)..(168): Ceres Seq. ID no. 13619975
  misc_feature (1)..(140): Pfam Name: Domain of unknown function (DUF588) Pfam Description: Domain of unknown function (DUF588)
  misc_feature (1)..(168): Homolog of NCBI NO: 15240435 NR Description: expressed protein [Arabidopsis thaliana] gb|AAD50013.1~gene_id:MBG8.25~similar to unknown protein thaliana] >gi|27754655|gb|AAO22772.1| unknown protein
  misc_feature (1)..(159): Homolog of NCBI NO: 16973324 NR Description: hypothetical protein [Gossypium hirsutum]
  misc_feature (1)..(165): Homolog of NCBI NO: 17380964 NR Description: unknown protein [Arabidopsis thaliana]
  misc_feature (1)..(165): Homolog of NCBI NO: 18394453 NR Description: expressed integral membrane protein common family
  misc_feature (1)..(168): Homolog of NCBI NO: 38344646 NR Description: OSJNBa0094P09.18 [Oryza sativa (japonica
  misc_feature (35)..(159): Homolog of NCBI NO: 14030504 NR Description: salicylic acid-induced fragment 1 protein
  misc_feature (4)..(159): Homolog of NCBI NO: 15231842 NR Description: expressed protein [Arabidopsis thaliana] gb|AAD50013.1~gene_id:MLN21.16~similar to unknown protein
  misc_feature (3)..(164): Homolog of NCBI NO: 18414659 NR Description: expressed integral membrane protein common family thaliana] >gi|21595041|gb|AAM66067.1| unknown [Arabidopsis >gi|28393080|gb|AAO41974.1| unknown protein [Arabidopsis
  misc_feature (1)..(149): Homolog of NCBI NO: 15227576 NR Description: hypothetical integral membrane protein common [Arabidopsis thaliana] >gi|25408448|pir||H84776 hypothetical
  misc_feature (1)..(151): Homolog of NCBI NO: 15242268 NR Description: expressed protein [Arabidopsis thaliana]
MSLKIIDSCLRLSVVPLSVATIWLTVTNHESNPDYGNLEYNSIMGLKYMVGVSAISAIYALLSTVSSWVTCLVSKAWLFFIPDQVLAYVMTTSVAGATEIVYLLNKGDKIVTWSEMCSSYPHYCSKLTIALGLHVFVLFFFLFLSVISAYRAFSPFDPPCDSQTNNDA

SEQ ID NO: 106571 - protein, 125 aa, Arabidopsis thaliana
  peptide (1)..(125): Ceres Seq. ID no. 13619976
  misc_feature (1)..(97): Pfam Name: Domain of unknown function (DUF588) Pfam Description: Domain of unknown function (DUF588)
  misc_feature (1)..(125): Homolog of NCBI NO: 15240435 NR Description: expressed protein [Arabidopsis thaliana] gb|AAD50013.1~gene_id:MBG8.25~similar to unknown protein thaliana] >gi|27754655|gb|AAO22772.1| unknown protein
  misc_feature (1)..(116): Homolog of NCBI NO: 16973324 NR Description: hypothetical protein [Gossypium hirsutum]
  misc_feature (1)..(122): Homolog of NCBI NO: 17380964 NR Description: unknown protein [Arabidopsis thaliana]
  misc_feature (1)..(122): Homolog of NCBI NO: 18394453 NR Description: expressed integral membrane protein common family
  misc_feature (1)..(125): Homolog of NCBI NO: 38344646 NR Description: OSJNBa0094P09.18 [Oryza sativa (japonica
  misc_feature (1)..(116): Homolog of NCBI NO: 14030504 NR Description: salicylic acid-induced fragment 1 protein
  misc_feature (1)..(116): Homolog of NCBI NO: 15231842 NR Description: expressed protein [Arabidopsis thaliana] gb|AAD50013.1~gene_id:MLN21.16~similar to unknown protein
  misc_feature (1)..(121): Homolog of NCBI NO: 18414659 NR Description: expressed integral membrane protein common family thaliana] >gi|21595041|gb|AAM66067.1| unknown [Arabidopsis >gi|28393080|gb|AAO41974.1| unknown protein [Arabidopsis
  misc_feature (1)..(106): Homolog of NCBI NO: 15227576 NR Description: hypothetical integral membrane protein common [Arabidopsis thaliana] >gi|25408448|pir||H84776 hypothetical
  misc_feature (1)..(108): Homolog of NCBI NO: 15242268 NR Description: expressed protein [Arabidopsis thaliana]
MGLKYMVGVSAISAIYALLSTVSSWVTCLVSKAWLFFIPDQVLAYVMTTSVAGATEIVYLLNKGDKIVTWSEMCSSYPHYCSKLTIALGLHVFVLFFFLFLSVISAYRAFSPFDPPCDSQTNNDA

SEQ ID NO: 106572 - DNA, 962 bp, Arabidopsis thaliana
  misc_feature (1)..(962): Ceres Seq. ID no. 13619977
  misc_feature: MA Experiment ID: 20000306 Result: Down-regulated in Transcription
  misc_feature: MA Experiment 20000306 PARAMETER Experiment Name: At_Germinating_Seeds_Sub_P Parameter: Age (hr) Value: 6 vs. 0
  misc_feature: MA Experiment 20000306 PARAMETER Experiment Name: At_Germinating_Seeds_Sub_P Parameter: Organism Value: A. thaliana
  misc_feature: MA Experiment 20000306 PARAMETER Experiment Name: At_Germinating_Seeds_Sub_P Parameter: Plant Line Value: WS
  misc_feature: MA Experiment 20000306 PARAMETER Experiment Name: At_Germinating_Seeds_Sub_P Parameter: Tissue Value: Germinating Seeds
  misc_feature: MA Experiment ID: 20000307 Result: Down-regulated in Transcription
  misc_feature: MA Experiment 20000307 PARAMETER Experiment Name: At_Germinating_Seeds_Sub_P Parameter: Age (hr) Value: 24 vs. 0
  misc_feature: MA Experiment 20000307 PARAMETER Experiment Name: At_Germinating_Seeds_Sub_P Parameter: Organism Value: A. thaliana
  misc_feature: MA Experiment 20000307 PARAMETER Experiment Name: At_Germinating_Seeds_Sub_P Parameter: Plant Line Value: WS
  misc_feature: MA Experiment 20000307 PARAMETER Experiment Name: At_Germinating_Seeds_Sub_P Parameter: Tissue Value: Germinating Seeds
attctcactgttgagagagagcagacagcagagagcaatgacgtcgatggagaggatggagagagacgcaatggagacggtggctccatacgctcgggtgacttatcaccgccgtgttcgtggtgacttggatgacacacttcctaaaccttatttgccgagagcactacaagcacctgacatggaacacccacaaggaacaccagatcatagacataatggccttagtgttcttcagcaacatgtcgctttcttcgatttggacaataatggcatcatttatccctttgaaaccttctctgggttccggttactcggtttcaatttactcgcgtcgcttatcttggctgctggtatcaacatagctcttagctatgctactctcccgggatggttaccgtctccgttcttccctatatatattcacaacattcacaaggcaaagcacggaagcgactctaaaacatatgacaatgaaggaaggtatacaccagcgaatcttgagttgatgtttagcaaatacgcgaggaccataccagacaagttgagtcttggagagctatgggacatgaccgaaggaaaccgcgatgcctttgacttttttggatggttagcgagcaaagtggaatggggtgtattgtatgcattagcgagtgatgaagaaggattcttgtctaaagaagccataaggcggtgcttcgatgggagcttgttcgagtattgtgccaagaactacgctgagatcaaggagtacaagacgtactactgatcatgatgatcggtggttttttgtattcaaagcaacacgctcgtaggcttctgaactattacgggaaacaattgaattgaaccaaatagtggttatgttaggaagcaataaggtgtatgttgtgttcgtttattatgcataaaaacacttcaatagtggtttattcaatataatatccacttgcgttttcttt

SEQ ID NO: 106573 - protein, 255 aa, Arabidopsis thaliana
  peptide (1)..(255): Ceres Seq. ID no. 13619978
  misc_feature (70)..(243): Pfam Name: Caleosin related protein Pfam Description: Caleosin related protein
  misc_feature (13)..(255): Homolog of NCBI NO: 15240486 NR Description: embryo-specific protein 1 (ATS1) [Arabidopsis
  misc_feature (17)..(255): Homolog of NCBI NO: 15236846 NR Description: embryo-specific protein 1 (ATS1) [Arabidopsis
  misc_feature (17)..(255): Homolog of NCBI NO: 17380858 NR Description: putative embryo-specific protein ATS1
FSLLRESRQQRAMTSMERMERDAMETVAPYARVTYHRRVRGDLDDTLPKPYLPRALQAPDMEHPQGTPDHRHNGLSVLQQHVAFFDLDNNGIIYPFETFSGFRLLGFNLLASLILAAGINIALSYATLPGWLPSPFFPIYIHNIHKAKHGSDSKTYDNEGRYTPANLELMFSKYARTIPDKLSLGELWDMTEGNRDAFDFFGWLASKVEWGVLYALASDEEGFLSKEAIRRCFDGSLFEYCAKNYAEIKEYKTYY

SEQ ID NO: 106574 - protein, 243 aa, Arabidopsis thaliana
  peptide (1)..(243): Ceres Seq. ID no. 13619979
  misc_feature (58)..(231): Pfam Name: Caleosin related protein Pfam Description: Caleosin related protein
  misc_feature (1)..(243): Homolog of NCBI NO: 15240486 NR Description: embryo-specific protein 1 (ATS1) [Arabidopsis
  misc_feature (5)..(243): Homolog of NCBI NO: 15236846 NR Description: embryo-specific protein 1 (ATS1) [Arabidopsis
  misc_feature (5)..(243): Homolog of NCBI NO: 17380858 NR Description: putative embryo-specific protein ATS1
MTSMERMERDAMETVAPYARVTYHRRVRGDLDDTLPKPYLPRALQAPDMEHPQGTPDHRHNGLSVLQQHVAFFDLDNNGIIYPFETFSGFRLLGFNLLASLILAAGINIALSYATLPGWLPSPFFPIYIHNIHKAKHGSDSKTYDNEGRYTPANLELMFSKYARTIPDKLSLGELWDMTEGNRDAFDFFGWLASKVEWGVLYALASDEEGFLSKEAIRRCFDGSLFEYCAKNYAEIKEYKTYY

SEQ ID NO: 106575 - protein, 240 aa, Arabidopsis thaliana
  peptide (1)..(240): Ceres Seq. ID no. 13619980
  misc_feature (55)..(228): Pfam Name: Caleosin related protein Pfam Description: Caleosin related protein
  misc_feature (1)..(240): Homolog of NCBI NO: 15240486 NR Description: embryo-specific protein 1 (ATS1) [Arabidopsis
  misc_feature (2)..(240): Homolog of NCBI NO: 15236846 NR Description: embryo-specific protein 1 (ATS1) [Arabidopsis
  misc_feature (2)..(240): Homolog of NCBI NO: 17380858 NR Description: putative embryo-specific protein ATS1
MERMERDAMETVAPYARVTYHRRVRGDLDDTLPKPYLPRALQAPDMEHPQGTPDHRHNGLSVLQQHVAFFDLDNNGIIYPFETFSGFRLLGFNLLASLILAAGINIALSYATLPGWLPSPFFPIYIHNIHKAKHGSDSKTYDNEGRYTPANLELMFSKYARTIPDKLSLGELWDMTEGNRDAFDFFGWLASKVEWGVLYALASDEEGFLSKEAIRRCFDGSLFEYCAKNYAEIKEYKTYY

SEQ ID NO: 106576 - DNA, 1071 bp, Arabidopsis thaliana
  misc_feature (1)..(1071): Ceres Seq. ID no. 13619985
  misc_feature: MA Experiment ID: 108595 Result: Down-regulated in Transcription
  misc_feature: MA Experiment 108595 PARAMETER Experiment Name: At_Ler-pi_Ovule_cDNA_P Parameter: Plant Line Value: null
  misc_feature: MA Experiment ID: 20000179 Result: Up-regulated in Transcription
  misc_feature: MA Experiment 20000179 PARAMETER Experiment Name: At_Germinating_Seeds_P Parameter: Age (hr) Value: 6 vs. 0
  misc_feature: MA Experiment 20000179 PARAMETER Experiment Name: At_Germinating_Seeds_P Parameter: Tissue Value: Germinating Seeds
  misc_feature: MA Experiment ID: 20000180 Result: Up-regulated in Transcription
  misc_feature: MA Experiment 20000180 PARAMETER Experiment Name: At_Germinating_Seeds_P Parameter: Age (hr) Value: 24 vs. 0
  misc_feature: MA Experiment 20000180 PARAMETER Experiment Name: At_Germinating_Seeds_P Parameter: Tissue Value: Germinating Seeds
attgtgttagtggtaatcaaatccggtgaaaatggagcggagccgagtgaccagagaagcaccgaccggaaccaggatcctgcttgcttcactctctgcgatggttgcagagtcagttacgtttccgattgatctcacaaagactagaatgcagctccatggttcgggatccgcttctggtgcgcatcggattggcgctttcggagtcgtatcggagattgcgagaaaggaaggagtgattggtctctacaaaggtctatctccggcgattatcagacacctgttctacacgcctatcagaatcattggatacgagaatttgaaaggactcatcgtcagatctgaaactaacaatagcgagtctcttcctctcgccacaaaggctctcgtcggaggattttctggtgttatagctcaggtagtggctagtccagctgatttggtcaaagtgagaatgcaagcagatggtagattggtgagccaaggcctgaaaccgaggtactcgggaccaatcgaggcttttaccaaaatcctacaatcagaaggagtaaaagggttatggaaaggtgttcttccaaacatccagagagcatttctagtgaatatgggagaactagcttgctatgatcacgccaaacactttgtcatcgataagaagattgctgaggataacatttttgcgcacactcttgcttctataatgtcgggtcttgcttcgacaagtttgagttgtccagctgatgtggtgaagacgaggatgatgaaccagggtgaaaatgctgtgtacagaaattcttacgactgtttggtgaagacggttaagtttgaaggaataagagctttgtggaaaggtttcttcccgacatgggcaaggcttggaccgtggcagttcgtgttttgggtctcctatgagaagtttagactgctggcaggaatctcttccttctagacctgagaaactggaaaagcaaatttgagatttgtgttctttagttcttacttgttagttgttacacattttgtaagaaccttgagaagtagcatcagtttctgattaacgcgagaagagtt

SEQ ID NO: 106577 - protein, 305 aa, Arabidopsis thaliana; identical to SEQ ID NO: 39574
  peptide (1)..(305): Ceres Seq. ID no. 13619986
  misc_feature (1)..(305): Homolog of NCBI NO: 15223098 NR Description: mitochondrial carrier protein family [Arabidopsis
  misc_feature (12)..(305): Homolog of NCBI NO: 38344836 NR Description: OSJNBa0064H22.17 [Oryza sativa (japonica
  misc_feature (11)..(305): Homolog of NCBI NO: 31418769 NR Description: Unknown (protein for MGC:63899) [Danio rerio]
  misc_feature (6)..(305): Homolog of NCBI NO: 16758260 NR Description: uncoupling protein UCP-4 [Rattus norvegicus]
  misc_feature (6)..(305): Homolog of NCBI NO: 21312006 NR Description: RIKEN cDNA 3632410G24 [Mus musculus] unnamed protein product [Mus musculus] unnamed protein product [Mus musculus]
  misc_feature (1)..(129): Homolog of NCBI NO: 26450423 NR Description: putative mitochondrial uncoupling protein
  misc_feature (17)..(305): Homolog of NCBI NO: 18860079 NR Description: CG6492-PA [Drosophila melanogaster]
  misc_feature (17)..(305): Homolog of NCBI NO: 31231996 NR Description: ENSANGP00000020981 [Anopheles gambiae]
  misc_feature (14)..(305): Homolog of NCBI NO: 17562272 NR Description: Uncoupling protein [Caenorhabditis elegans]
  misc_feature (18)..(305): Homolog of NCBI NO: 7505416 NR Description: hypothetical protein K07B1.3 - Caenorhabditis

SEQ ID NO: 106578 - protein, 282 aa, Arabidopsis thaliana; identical to SEQ ID NO: 39575
  peptide (1)..(282): Ceres Seq. ID no. 13619987
  misc_feature (1)..(282): Homolog of NCBI NO: 15223098 NR Description: mitochondrial carrier protein family [Arabidopsis
  misc_feature (1)..(282): Homolog of NCBI NO: 38344836 NR Description: OSJNBa0064H22.17 [Oryza sativa (japonica
  misc_feature (1)..(282): Homolog of NCBI NO: 31418769 NR Description: Unknown (protein for MGC:63899) [Danio rerio]
  misc_feature (1)..(282): Homolog of NCBI NO: 16758260 NR Description: uncoupling protein UCP-4 [Rattus norvegicus]
  misc_feature (1)..(282): Homolog of NCBI NO: 21312006 NR Description: RIKEN cDNA 3632410G24 [Mus musculus] unnamed protein product [Mus musculus] unnamed protein product [Mus musculus]
  misc_feature (1)..(106): Homolog of NCBI NO: 26450423 NR Description: putative mitochondrial uncoupling protein
  misc_feature (1)..(282): Homolog of NCBI NO: 18860079 NR Description: CG6492-PA [Drosophila melanogaster]
  misc_feature (1)..(282): Homolog of NCBI NO: 31231996 NR Description: ENSANGP00000020981 [Anopheles gambiae]
  misc_feature (1)..(282): Homolog of NCBI NO: 17562272 NR Description: Uncoupling protein [Caenorhabditis elegans]
  misc_feature (1)..(282): Homolog of NCBI NO: 7505416 NR Description: hypothetical protein K07B1.3 - Caenorhabditis

SEQ ID NO: 106579 - protein, 266 aa, Arabidopsis thaliana; identical to SEQ ID NO: 39576
  peptide (1)..(266): Ceres Seq. ID no. 13619988
  misc_feature (1)..(266): Homolog of NCBI NO: 15223098 NR Description: mitochondrial carrier protein family [Arabidopsis
  misc_feature (1)..(266): Homolog of NCBI NO: 38344836 NR Description: OSJNBa0064H22.17 [Oryza sativa (japonica
  misc_feature (1)..(266): Homolog of NCBI NO: 31418769 NR Description: Unknown (protein for MGC:63899) [Danio rerio]
  misc_feature (1)..(266): Homolog of NCBI NO: 16758260 NR Description: uncoupling protein UCP-4 [Rattus norvegicus]
  misc_feature (1)..(266): Homolog of NCBI NO: 21312006 NR Description: RIKEN cDNA 3632410G24 [Mus musculus] unnamed protein product [Mus musculus] unnamed protein product [Mus musculus]
  misc_feature (1)..(90): Homolog of NCBI NO: 26450423 NR Description: putative mitochondrial uncoupling protein
  misc_feature (1)..(266): Homolog of NCBI NO: 18860079 NR Description: CG6492-PA [Drosophila melanogaster]
  misc_feature (1)..(266): Homolog of NCBI NO: 31231996 NR Description: ENSANGP00000020981 [Anopheles gambiae]
  misc_feature (1)..(266): Homolog of NCBI NO: 17562272 NR Description: Uncoupling protein [Caenorhabditis elegans]
  misc_feature (1)..(266): Homolog of NCBI NO: 7505416 NR Description: hypothetical protein K07B1.3 - Caenorhabditis

SEQ ID NO: 106580 - DNA, 971 bp, Arabidopsis thaliana
  misc_feature (1)..(971): Ceres Seq. ID no. 13619993
  misc_feature: MA Experiment ID: 108434 Result: Down-regulated in Transcription
  misc_feature: MA Experiment 108434 PARAMETER Experiment Name: At_Root_Tips_cDNA_P Parameter: Tissue Value: Root Tips
  misc_feature: MA Experiment ID: 108594 Result: Down-regulated in Transcription
  misc_feature: MA Experiment 108594 PARAMETER Experiment Name: At_Ler-rhl_Root_cDNA_P Parameter: Plant Line Value: null
  misc_feature: MA Experiment ID: 108605 Result: Up-regulated in Transcription
  misc_feature: MA Experiment 108605 PARAMETER Experiment Name: At_100uM_ABA_cDNA_P Parameter: Timepoint (hr) Value: 6
  misc_feature: MA Experiment 108605 PARAMETER Experiment Name: At_100uM_ABA_cDNA_P Parameter: Tissue Value: Aerial
  misc_feature: MA Experiment 108605 PARAMETER Experiment Name: At_100uM_ABA_cDNA_P Parameter: Treatment Value: 100uM ABA vs. No Treatment
  misc_feature: MA Experiment ID: 20000111 Result: Down-regulated in Transcription
  misc_feature: MA Experiment 20000111 PARAMETER Experiment Name: At_42deg_Heat_cDNA_P Parameter: Temperature (deg C) Value: 42 vs. 22
  misc_feature: MA Experiment 20000111 PARAMETER Experiment Name: At_42deg_Heat_cDNA_P Parameter: Timepoint (hr) Value: 6
  misc_feature: MA Experiment 20000111 PARAMETER Experiment Name: At_42deg_Heat_cDNA_P Parameter: Tissue Value: Aerial
  misc_feature: MA Experiment ID: 20000184 Result: Down-regulated in Transcription
  misc_feature: MA Experiment 20000184 PARAMETER Experiment Name: At_Shoots__P Parameter: Age (day) Value: 7
  misc_feature: MA Experiment 20000184 PARAMETER Experiment Name: At_Shoots__P Parameter: Tissue Value: Shoots vs. Whole Plant
  misc_feature: MA Experiment ID: 20000227 Result: Down-regulated in Transcription
  misc_feature: MA Experiment 20000227 PARAMETER Experiment Name: At_Root-Tips-vs-Tops_P Parameter: Tissue Value: Root Tips vs. Root Tops
  misc_feature: MA Experiment ID: 20000234 Result: Down-regulated in Transcription
  misc_feature: MA Experiment 20000234 PARAMETER Experiment Name: At_Siliques_P Parameter: Age (day) Value: 21
  misc_feature: MA Experiment 20000234 PARAMETER Experiment Name: At_Siliques_P Parameter: Organism Value: A. thaliana
  misc_feature: MA Experiment 20000234 PARAMETER Experiment Name: At_Siliques_P Parameter: Plant Line Value: WS
  misc_feature: MA Experiment 20000234 PARAMETER Experiment Name: At_Siliques_P Parameter: Tissue Value: Less Than 5mm Siliques vs. Whole Plant
  misc_feature: MA Experiment ID: 20000265 Result: Down-regulated in Transcription
  misc_feature: MA Experiment 20000265 PARAMETER Experiment Name: At_Open_Flower_P Parameter: Age (day) Value: 21
  misc_feature: MA Experiment 20000265 PARAMETER Experiment Name: At_Open_Flower_P Parameter: Plant Line Value: WS
  misc_feature: MA Experiment 20000265 PARAMETER Experiment Name: At_Open_Flower_P Parameter: Tissue Value: Closed Flower vs. Whole Plant
  misc_feature: MA Experiment ID: 20000451 Result: Down-regulated in Transcription
  misc_feature: MA Experiment 20000451 PARAMETER Experiment Name: At_CS6879_Shoots-Roots_P Parameter: Age (day) Value: 14
  misc_feature: MA Experiment 20000451 PARAMETER Experiment Name: At_CS6879_Shoots-Roots_P Parameter: Organism Value: A. thaliana
  misc_feature: MA Experiment 20000451 PARAMETER Experiment Name: At_CS6879_Shoots-Roots_P Parameter: Plant Line Value: CS6879 vs. WS
  misc_feature: MA Experiment 20000451 PARAMETER Experiment Name: At_CS6879_Shoots-Roots_P Parameter: Tissue Value: Roots
acatcatcaacttcatcaattcatcacctttgtctctctttcaagcttctctgtgtgtgatctccgttggtcaacaacaactacaacagcttattgagcagagatggatcatcaatttggatatggtgttgaagttactgggttatctccatctgttactcataatgatcttatcgatttcttctctttctctggtactatccaagatattgatattgtcaggtcgggtgagcaagcttgtactgcttatgtgatgtttaaggattcttattctcaagaaactgctgttttactcactggcgcaacgatattggatcagcgtgtttgtataactcgttggggacaacatcacgaagagttcgatttctggaatgcgacttcgcgaggttttgaagatgaatcggactcacaacattatgctcaacgaagcgagttcaacgctggagaagcagtgacaaaagctcaagaagtggtgaaaataatgcttgccacaggattcgtgctaggcaaagacgctttaagcaaagctaaagcctttgatgaatcccacggcgtatcagctgcagcggtggctagagtatctcaactagaacagaggattggtcttactgacaaaatctttaccggacttgaagctgttagaatgactgaccaaaggtatcatgtttcagatacagctaaatcagctgtctttgccacaggaagaaccgcggcagcagctgcaactagtgttgtcaatagcagttacttctccagcggagctctttggctgtctggtgcattagagagagctgctaaagccgcatctgatctcggtacccgcggctcaaggcagtgaatagaccaatggcccgattcagaaccgtattcgtctgtgaatatatatgatgcaaagctgatcatgaataactggctcatgaagtgtgataagaccaaattttatcaaaacgaataccatatagaaatctatc

SEQ ID NO: 106581 - protein, 244 aa, Arabidopsis thaliana; identical to SEQ ID NO: 28288
  peptide (1)..(244): Ceres Seq. ID no. 13619994
  misc_feature (9)..(77): Pfam Name: RNA recognition motif. (a.k.a. RRM, RBD, or RNP domain) Pfam Description: RNA recognition motif. (a.k.a. RRM, RBD, or RNP
  misc_feature (1)..(244): Homolog of NCBI NO: 18394102 NR Description: RNA recognition motif (RRM)-containing protein thaliana] >gi|15292971|gb|AAK93596.1| unknown protein thaliana] >gi|20259677|gb|AAM14356.1| unknown protein
  misc_feature (1)..(244): Homolog of NCBI NO: 21618045 NR Description: unknown [Arabidopsis thaliana]
  misc_feature (1)..(239): Homolog of NCBI NO: 25518024 NR Description: F14L17.11 protein - Arabidopsis thaliana Contains similarity to Vip1 protein from Schizosaccharomyces gb|Y13635.1 and contains a RNA recognition motif PF|00076. EST
  misc_feature (6)..(241): Homolog of NCBI NO: 38344906 NR Description: OSJNBb0079B02.9 [Oryza sativa (japonica
  misc_feature (6)..(242): Homolog of NCBI NO: 6714467 NR Description: unknown protein [Arabidopsis thaliana]
  misc_feature (9)..(244): Homolog of NCBI NO: 18414951 NR Description: RNA recognition motif (RRM)-containing protein thaliana] >gi|21593540|gb|AAM65507.1| putative splicing
  misc_feature (9)..(244): Homolog of NCBI NO: 8809670 NR Description: gene_id:MSD23.5~pir||C71447~similar to unknown
  misc_feature (9)..(244): Homolog of NCBI NO: 30695063 NR Description: RNA recognition motif (RRM)-containing protein
  misc_feature (9)..(244): Homolog of NCBI NO: 38347069 NR Description: OSJNBa0006A01.10 [Oryza sativa (japonica
  misc_feature (9)..(240): Homolog of NCBI NO: 18421342 NR Description: RNA recognition motif (RRM)-containing protein thaliana] >gi|21593919|gb|AAM65884.1| unknown [Arabidopsis >gi|26450493|dbj|BAC42360.1| unknown protein [Arabidopsis protein

SEQ ID NO: 106582 - protein, 194 aa, Arabidopsis thaliana; identical to SEQ ID NO: 28289
  peptide (1)..(194): Ceres Seq. ID no. 13619995
  misc_feature (1)..(194): Homolog of NCBI NO: 18394102 NR Description: RNA recognition motif (RRM)-containing protein thaliana] >gi|15292971|gb|AAK93596.1| unknown protein thaliana] >gi|20259677|gb|AAM14356.1| unknown protein
  misc_feature (1)..(194): Homolog of NCBI NO: 21618045 NR Description: unknown [Arabidopsis thaliana]
  misc_feature (1)..(189): Homolog of NCBI NO: 25518024 NR Description: F14L17.11 protein - Arabidopsis thaliana Contains similarity to Vip1 protein from Schizosaccharomyces gb|Y13635.1 and contains a RNA recognition motif PF|00076. EST
  misc_feature (1)..(191): Homolog of NCBI NO: 38344906 NR Description: OSJNBb0079B02.9 [Oryza sativa (japonica
  misc_feature (1)..(192): Homolog of NCBI NO: 6714467 NR Description: unknown protein [Arabidopsis thaliana]
  misc_feature (1)..(194): Homolog of NCBI NO: 18414951 NR Description: RNA recognition motif (RRM)-containing protein thaliana] >gi|21593540|gb|AAM65507.1| putative splicing
  misc_feature (1)..(194): Homolog of NCBI NO: 8809670 NR Description: gene_id:MSD23.5~pir||C71447~similar to unknown
  misc_feature (1)..(194): Homolog of NCBI NO: 30695063 NR Description: RNA recognition motif (RRM)-containing protein
  misc_feature (1)..(194): Homolog of NCBI NO: 38347069 NR Description: OSJNBa0006A01.10 [Oryza sativa (japonica
  misc_feature (1)..(190): Homolog of NCBI NO: 18421342 NR Description: RNA recognition motif (RRM)-containing protein thaliana] >gi|21593919|gb|AAM65884.1| unknown [Arabidopsis >gi|26450493|dbj|BAC42360.1| unknown protein [Arabidopsis protein

SEQ ID NO: 106583 - DNA, 1575 bp, Arabidopsis thaliana
  misc_feature (1)..(1575): Ceres Seq. ID no. 13620003
  misc_feature: MA Experiment ID: 108461 Result: Up-regulated in Transcription
  misc_feature: MA Experiment 108461 PARAMETER Experiment Name: At_Germinating_Seeds_cDNA_P Parameter: Age (day) Value: 1 vs. 0
  misc_feature: MA Experiment 108461 PARAMETER Experiment Name: At_Germinating_Seeds_cDNA_P Parameter: Tissue Value: Germinating Seeds
  misc_feature: MA Experiment ID: 20000111 Result: Down-regulated in Transcription
  misc_feature: MA Experiment 20000111 PARAMETER Experiment Name: At_42deg_Heat_cDNA_P Parameter: Temperature (deg C) Value: 42 vs. 22
  misc_feature: MA Experiment 20000111 PARAMETER Experiment Name: At_42deg_Heat_cDNA_P Parameter: Timepoint (hr) Value: 6
  misc_feature: MA Experiment 20000111 PARAMETER Experiment Name: At_42deg_Heat_cDNA_P Parameter: Tissue Value: Aerial
  misc_feature: MA Experiment ID: 20000113 Result: Down-regulated in Transcription
  misc_feature: MA Experiment 20000113 PARAMETER Experiment Name: At_42deg_Heat_cDNA_P Parameter: Temperature (deg C) Value: 42 vs. 22
  misc_feature: MA Experiment 20000113 PARAMETER Experiment Name: At_42deg_Heat_cDNA_P Parameter: Timepoint (hr) Value: 8
  misc_feature: MA Experiment 20000113 PARAMETER Experiment Name: At_42deg_Heat_cDNA_P Parameter: Tissue Value: Aerial
  misc_feature: MA Experiment ID: 20000173 Result: Down-regulated in Transcription
  misc_feature: MA Experiment 20000173 PARAMETER Experiment Name: At_42deg_Heat_P Parameter: Age (day) Value: 14
  misc_feature: MA Experiment 20000173 PARAMETER Experiment Name: At_42deg_Heat_P Parameter: Organism Value: A. thaliana
  misc_feature: MA Experiment 20000173 PARAMETER Experiment Name: At_42deg_Heat_P Parameter: Plant Line Value: WS
  misc_feature: MA Experiment 20000173 PARAMETER Experiment Name: At_42deg_Heat_P Parameter: Temperature (deg C) Value: 42 vs. 22
  misc_feature: MA Experiment 20000173 PARAMETER Experiment Name: At_42deg_Heat_P Parameter: Timepoint (hr) Value: 6
  misc_feature: MA Experiment 20000173 PARAMETER Experiment Name: At_42deg_Heat_P Parameter: Tissue Value: Aerial
  misc_feature: MA Experiment ID: 20000180 Result: Up-regulated in Transcription
  misc_feature: MA Experiment 20000180 PARAMETER Experiment Name: At_Germinating_Seeds_P Parameter: Age (hr) Value: 24 vs. 0
  misc_feature: MA Experiment 20000180 PARAMETER Experiment Name: At_Germinating_Seeds_P Parameter: Tissue Value: Germinating Seeds
  misc_feature: MA Experiment ID: 20000184 Result: Up-regulated in Transcription
  misc_feature: MA Experiment 20000184 PARAMETER Experiment Name: At_Shoots__P Parameter: Age (day) Value: 7
  misc_feature: MA Experiment 20000184 PARAMETER Experiment Name: At_Shoots__P Parameter: Tissue Value: Shoots vs. Whole Plant
  misc_feature: MA Experiment ID: 20000234 Result: Up-regulated in Transcription
  misc_feature: MA Experiment 20000234 PARAMETER Experiment Name: At_Siliques_P Parameter: Age (day) Value: 21
  misc_feature: MA Experiment 20000234 PARAMETER Experiment Name: At_Siliques_P Parameter: Organism Value: A. thaliana
  misc_feature: MA Experiment 20000234 PARAMETER Experiment Name: At_Siliques_P Parameter: Plant Line Value: WS
  misc_feature: MA Experiment 20000234 PARAMETER Experiment Name: At_Siliques_P Parameter: Tissue Value: Less Than 5mm Siliques vs. Whole Plant
  misc_feature: MA Experiment ID: 20000264 Result: Up-regulated in Transcription
  misc_feature: MA Experiment 20000264 PARAMETER Experiment Name: At_Open_Flower_P Parameter: Age (day) Value: 21
  misc_feature: MA Experiment 20000264 PARAMETER Experiment Name: At_Open_Flower_P Parameter: Plant Line Value: WS
  misc_feature: MA Experiment 20000264 PARAMETER Experiment Name: At_Open_Flower_P Parameter: Tissue Value: Open Flower vs. Whole Plant
  misc_feature: MA Experiment ID: 20000265 Result: Up-regulated in Transcription
  misc_feature: MA Experiment 20000265 PARAMETER Experiment Name: At_Open_Flower_P Parameter: Age (day) Value: 21
  misc_feature: MA Experiment 20000265 PARAMETER Experiment Name: At_Open_Flower_P Parameter: Plant Line Value: WS
  misc_feature: MA Experiment 20000265 PARAMETER Experiment Name: At_Open_Flower_P Parameter: Tissue Value: Closed Flower vs. Whole Plant
  misc_feature: MA Experiment ID: 20000286 Result: Up-regulated in Transcription
  misc_feature: MA Experiment 20000286 PARAMETER Experiment Name: At_Open_Flower_P Parameter: Age (day) Value: 21
  misc_feature: MA Experiment 20000286 PARAMETER Experiment Name: At_Open_Flower_P Parameter: Plant Line Value: WS
  misc_feature: MA Experiment 20000286 PARAMETER Experiment Name: At_Open_Flower_P Parameter: Tissue Value: Half Open vs. Whole Plant
  misc_feature: MA Experiment ID: 20000436 Result: Down-regulated in Transcription
  misc_feature: MA Experiment 20000436 PARAMETER Experiment Name: At_Drought_P Parameter: Age (day) Value: 7
  misc_feature: MA Experiment 20000436 PARAMETER Experiment Name: At_Drought_P Parameter: Organism Value: A. thaliana
  misc_feature: MA Experiment 20000436 PARAMETER Experiment Name: At_Drought_P Parameter: Plant Line Value: WS
  misc_feature: MA Experiment 20000436 PARAMETER Experiment Name: At_Drought_P Parameter: Timepoint (hr) Value: 12
  misc_feature: MA Experiment 20000436 PARAMETER Experiment Name: At_Drought_P Parameter: Tissue Value: Whole Plant
  misc_feature: MA Experiment 20000436 PARAMETER Experiment Name: At_Drought_P Parameter: Treatment Value: Drought vs. No Drought
  misc_feature: MA Experiment ID: 20000437 Result: Down-regulated in Transcription
  misc_feature: MA Experiment 20000437 PARAMETER Experiment Name: At_Drought_P Parameter: Age (day) Value: 8
  misc_feature: MA Experiment 20000437 PARAMETER Experiment Name: At_Drought_P Parameter: Organism Value: A. thaliana
  misc_feature: MA Experiment 20000437 PARAMETER Experiment Name: At_Drought_P Parameter: Plant Line Value: WS
  misc_feature: MA Experiment 20000437 PARAMETER Experiment Name: At_Drought_P Parameter: Timepoint (hr) Value: 24
  misc_feature: MA Experiment 20000437 PARAMETER Experiment Name: At_Drought_P Parameter: Tissue Value: Whole Plant
  misc_feature: MA Experiment 20000437 PARAMETER Experiment Name: At_Drought_P Parameter: Treatment Value: Drought vs. No Drought
  misc_feature: MA Experiment ID: 20000438 Result: Up-regulated in Transcription
  misc_feature: MA Experiment 20000438 PARAMETER Experiment Name: At_Shoots__P Parameter: Age (day) Value: 14
  misc_feature: MA Experiment 20000438 PARAMETER Experiment Name: At_Shoots__P Parameter: Tissue Value: Shoots vs. Whole Plant
  misc_feature: MA Experiment ID: 20000495 Result: Up-regulated in Transcription
  misc_feature: MA Experiment 20000495 PARAMETER Experiment Name: At_Guard_Cells_P Parameter: Harvest Date Value: 8/2/2002
  misc_feature: MA Experiment 20000495 PARAMETER Experiment Name: At_Guard_Cells_P Parameter: Organism Value: A. thaliana
  misc_feature: MA Experiment 20000495 PARAMETER Experiment Name: At_Guard_Cells_P Parameter: Tissue Value: Guard Cells vs. Leaves
  misc_feature: MA Experiment ID: 20001451 Result: Down-regulated in Transcription
  misc_feature: MA Experiment 20001451 PARAMETER Experiment Name: At_Far-red-induction_P Parameter: Age (day) Value: 7
  misc_feature: MA Experiment 20001451 PARAMETER Experiment Name: At_Far-red-induction_P Parameter: Light Value: Far-red vs. White
  misc_feature: MA Experiment 20001451 PARAMETER Experiment Name: At_Far-red-induction_P Parameter: Organism Value: A. thaliana
  misc_feature: MA Experiment 20001451 PARAMETER Experiment Name: At_Far-red-induction_P Parameter: Plant Line Value: Columbia
  misc_feature: MA Experiment 20001451 PARAMETER Experiment Name: At_Far-red-induction_P Parameter: Timepoint (hr) Value: 24
  misc_feature: MA Experiment 20001451 PARAMETER Experiment Name: At_Far-red-induction_P Parameter: Tissue Value: Whole Plant
  misc_feature: MA Experiment ID: 20001557 Result: Up-regulated in Transcription
  misc_feature: MA Experiment 20001557 PARAMETER Experiment Name: At_Drought_Soil_Dry_P Parameter: Age (day) Value: 27
  misc_feature: MA Experiment 20001557 PARAMETER Experiment Name: At_Drought_Soil_Dry_P Parameter: Organism Value: A. thaliana
  misc_feature: MA Experiment 20001557 PARAMETER Experiment Name: At_Drought_Soil_Dry_P Parameter: Plant Line Value: WS
  misc_feature: MA Experiment 20001557 PARAMETER Experiment Name: At_Drought_Soil_Dry_P Parameter: Post Timepoint (hr) Value: 3
  misc_feature: MA Experiment 20001557 PARAMETER Experiment Name: At_Drought_Soil_Dry_P Parameter: Post-Treatment Value: Re-Water vs. No Drought
  misc_feature: MA Experiment 20001557 PARAMETER Experiment Name: At_Drought_Soil_Dry_P Parameter: Timepoint (day) Value: 13
  misc_feature: MA Experiment 20001557 PARAMETER Experiment Name: At_Drought_Soil_Dry_P Parameter: Treatment Value: Drought vs. No Drought
  misc_feature: MA Experiment ID: 20001558 Result: Up-regulated in Transcription
  misc_feature: MA Experiment 20001558 PARAMETER Experiment Name: At_Drought_Soil_Dry_P Parameter: Age (day) Value: 27
  misc_feature: MA Experiment 20001558 PARAMETER Experiment Name: At_Drought_Soil_Dry_P Parameter: Organism Value: A. thaliana
  misc_feature: MA Experiment 20001558 PARAMETER Experiment Name: At_Drought_Soil_Dry_P Parameter: Plant Line Value: WS
  misc_feature: MA Experiment 20001558 PARAMETER Experiment Name: At_Drought_Soil_Dry_P Parameter: Post Timepoint (hr) Value: 6
  misc_feature: MA Experiment 20001558 PARAMETER Experiment Name: At_Drought_Soil_Dry_P Parameter: Post-Treatment Value: Re-Water vs. No Drought
  misc_feature: MA Experiment 20001558 PARAMETER Experiment Name: At_Drought_Soil_Dry_P Parameter: Timepoint (day) Value: 13
  misc_feature: MA Experiment 20001558 PARAMETER Experiment Name: At_Drought_Soil_Dry_P Parameter: Treatment Value: Drought vs. No Drought
tttgtcactgggagggaagggagagagtgaaaaattgaaaatatctagttttttttttctctctcttgcttttaggctttaggctttcactactaatactctcttagtttaagacattgccttcacatccaaacacaaatgcaaatctttgtctcctctcttccttcaaagtctttcattacaaaaccctaatatctctaatcttctctctgtctctcttaagggcaatatcttcaatagagttctgaactttggaagcatattaagatatcaaagtaattttctacttttagttgtgaagctagtctctcctctgtccccaaaccaagaaacaatttgcaaagagaaagcaaaaggtttttgaagaagacccaattaaaaaagatggaaattgcaagtcaagaagatcatgatatgcccatcccattaaacactacatttggtggtggtggtagtcatggtcacatgatccatcatcatgatcatcatgctgctaattctgctcctccaactcacaacaacaacaatactactcaaccacctccaatgccgttacatggtaatggtcatggcaacaattatgatcatcatcatcatcaagatcctcatcatgttggttacaacgctatcatcaagaagcctatgataaagtacaaggagtgtctcaagaaccatgcagcagctatgggaggcaatgctactgatgggtgtggagagtttatgccaagtggtgaagatggctccattgaggctctcacttgctcagcttgcaattgccacaggaacttccatagaaaagaagtggaaggcgaactcgcagccaccgccatgtccccttaccaccaacaccctccacaccgaaaactcatgctcaaccaccaaaagatcagatcagctatgccacaccaaatgatcatgcccattggagtctctaactaccggtacatgcataacaactccgagtccgaggactttatggaggaagatggcgtaaccaccgcatctagatcgctaccaaacctgccatacaaccagaagaagaggttcaggacaaagttcacgccggaacagaaggagaagatgcttagttttgctgagaaagttgggtggaaaatacaaaggcaagaagattgtgttgttcaaaggttttgtgaagagattggagtgaagagaagagtgcttaaggtttggatgcacaacaacaagatccatttctccaagaagaacaacattaacctcgaagacaacgacaacgaaaagatcaacaatctcaacaatgttgatctgtccggtaataacgacatgactaagatcgtcccatgatataattaataacgttatttttatatgatctttgataattatttagttatctttatgttagctactagggttttaattttatcttctagctggtttggttttattttatatatataagctcatttcgctatctctcgttaaacccatggattttatataattttctgctctttgttgtgttttatttatttggaagttatatatattaatcttgttgtaataaatgtatgaccagccgtatttttcttcttc

SEQ ID NO: 106584 - protein, 312 aa, Arabidopsis thaliana; identical to SEQ ID NO: 43570
  peptide (1)..(312): Ceres Seq. ID no. 13620004
  misc_feature (85)..(144): Pfam Name: ZF-HD protein dimerisation region Pfam Description: ZF-HD protein dimerisation region
  misc_feature (1)..(312): Homolog of NCBI NO: 15223757 NR Description: expressed protein [Arabidopsis thaliana]
  misc_feature (1)..(309): Homolog of NCBI NO: 15226993 NR Description: expressed protein [Arabidopsis thaliana]
  misc_feature (1)..(309): Homolog of NCBI NO: 20148768 NR Description: hypothetical protein At2g02540/T822.16
  misc_feature (89)..(280): Homolog of NCBI NO: 13374061 NR Description: ZF-HD homeobox protein [Flaveria bidentis]
  misc_feature (169)..(280): Homolog of NCBI NO: 15233925 NR Description: expressed protein [Arabidopsis thaliana]
  misc_feature (88)..(159): Homolog of NCBI NO: 15233925 NR Description: expressed protein [Arabidopsis thaliana]
  misc_feature (65)..(280): Homolog of NCBI NO: 13277218 NR Description: ZF-HD homeobox protein [Flaveria bidentis]
  misc_feature (89)..(274): Homolog of NCBI NO: 15238445 NR Description: expressed protein [Arabidopsis thaliana] contains similarity to unknown [Arabidopsis thaliana] >gi|27311559|gb|AAO00745.1| putative
  misc_feature (40)..(290): Homolog of NCBI NO: 15228530 NR Description: expressed protein [Arabidopsis thaliana] contains similarity to unknown [Arabidopsis thaliana] >gi|20260544|gb|AAM13170.1| unknown
  misc_feature (88)..(274): Homolog of NCBI NO: 5091602 NR Description: 10A19I.6 [Oryza sativa]

SEQ ID NO: 106585 - protein, 302 aa, Arabidopsis thaliana; identical to SEQ ID NO: 43571
  peptide (1)..(302): Ceres Seq. ID no. 13620005
  misc_feature (75)..(134): Pfam Name: ZF-HD protein dimerisation region Pfam Description: ZF-HD protein dimerisation region
  misc_feature (1)..(302): Homolog of NCBI NO: 15223757 NR Description: expressed protein [Arabidopsis thaliana]
  misc_feature (1)..(299): Homolog of NCBI NO: 15226993 NR Description: expressed protein [Arabidopsis thaliana]
  misc_feature (1)..(299): Homolog of NCBI NO: 20148768 NR Description: hypothetical protein At2g02540/T822.16
  misc_feature (79)..(270): Homolog of NCBI NO: 13374061 NR Description: ZF-HD homeobox protein [Flaveria bidentis]
  misc_feature (159)..(270): Homolog of NCBI NO: 15233925 NR Description: expressed protein [Arabidopsis thaliana]
  misc_feature (78)..(149): Homolog of NCBI NO: 15233925 NR Description: expressed protein [Arabidopsis thaliana]
  misc_feature (55)..(270): Homolog of NCBI NO: 13277218 NR Description: ZF-HD homeobox protein [Flaveria bidentis]
  misc_feature (79)..(264): Homolog of NCBI NO: 15238445 NR Description: expressed protein [Arabidopsis thaliana] contains similarity to unknown [Arabidopsis thaliana] >gi|27311559|gb|AAO00745.1| putative
  misc_feature (30)..(280): Homolog of NCBI NO: 15228530 NR Description: expressed protein [Arabidopsis thaliana] contains similarity to unknown [Arabidopsis thaliana] >gi|20260544|gb|AAM13170.1| unknown
  misc_feature (78)..(264): Homolog of NCBI NO: 5091602 NR Description: 10A19I.6 [Oryza sativa]

SEQ ID NO: 106586 - protein, 285 aa, Arabidopsis thaliana; identical to SEQ ID NO: 43572
  peptide (1)..(285): Ceres Seq. ID no. 13620006
  misc_feature (58)..(117): Pfam Name: ZF-HD protein dimerisation region Pfam Description: ZF-HD protein dimerisation region
  misc_feature (1)..(285): Homolog of NCBI NO: 15223757 NR Description: expressed protein [Arabidopsis thaliana]
  misc_feature (1)..(282): Homolog of NCBI NO: 15226993 NR Description: expressed protein [Arabidopsis thaliana]
  misc_feature (1)..(282): Homolog of NCBI NO: 20148768 NR Description: hypothetical protein At2g02540/T822.16
  misc_feature (62)..(253): Homolog of NCBI NO: 13374061 NR Description: ZF-HD homeobox protein [Flaveria bidentis]
  misc_feature (142)..(253): Homolog of NCBI NO: 15233925 NR Description: expressed protein [Arabidopsis thaliana]
  misc_feature (61)..(132): Homolog of NCBI NO: 15233925 NR Description: expressed protein [Arabidopsis thaliana]
  misc_feature (38)..(253): Homolog of NCBI NO: 13277218 NR Description: ZF-HD homeobox protein [Flaveria bidentis]
  misc_feature (62)..(247): Homolog of NCBI NO: 15238445 NR Description: expressed protein [Arabidopsis thaliana] contains similarity to unknown [Arabidopsis thaliana] >gi|27311559|gb|AAO00745.1| putative
  misc_feature (13)..(263): Homolog of NCBI NO: 15228530 NR Description: expressed protein [Arabidopsis thaliana] contains similarity to unknown [Arabidopsis thaliana] >gi|20260544|gb|AAM13170.1| unknown
  misc_feature (61)..(247): Homolog of NCBI NO: 5091602 NR Description: 10A19I.6 [Oryza sativa]

SEQ ID NO: 106587 - DNA, 928 bp, Arabidopsis thaliana
  misc_feature (1)..(928): Ceres Seq. ID no. 13620007
  misc_feature: MA Experiment ID: 108434 Result: Up-regulated in Transcription
  misc_feature: MA Experiment 108434 PARAMETER Experiment Name: At_Root_Tips_cDNA_P Parameter: Tissue Value: Root Tips
  misc_feature: MA Experiment ID: 108435 Result: Up-regulated in Transcription
  misc_feature: MA Experiment 108435 PARAMETER Experiment Name: At_stm_Mutants_cDNA_P Parameter: Plant Line Value: wt Landsburg vs stm
  misc_feature: MA Experiment 108435 PARAMETER Experiment Name: At_stm_Mutants_cDNA_P Parameter: Tissue Value: Shoot Apical Meristem Region
  misc_feature: MA Experiment ID: 108576 Result: Down-regulated in Transcription
  misc_feature: MA Experiment 108576 PARAMETER Experiment Name: At_42deg_Heat_cDNA_P Parameter: Temperature (deg C) Value: 42 vs. 22
  misc_feature: MA Experiment 108576 PARAMETER Experiment Name: At_42deg_Heat_cDNA_P Parameter: Timepoint (hr) Value: 1
  misc_feature: MA Experiment 108576 PARAMETER Experiment Name: At_42deg_Heat_cDNA_P Parameter: Tissue Value: Aerial
  misc_feature: MA Experiment ID: 108579 Result: Down-regulated in Transcription
  misc_feature: MA Experiment 108579 PARAMETER Experiment Name: At_4deg_Cold_cDNA_P Parameter: Temperature (deg C) Value: 4 vs. 22
  misc_feature: MA Experiment 108579 PARAMETER Experiment Name: At_4deg_Cold_cDNA_P Parameter: Timepoint (hr) Value: 6
  misc_feature: MA Experiment 108579 PARAMETER Experiment Name: At_4deg_Cold_cDNA_P Parameter: Tissue Value: Aerial
  misc_feature: MA Experiment ID: 20000068 Result: Down-regulated in Transcription
  misc_feature: MA Experiment ID: 20000214 Result: Down-regulated in Transcription
  misc_feature: MA Experiment 20000214 PARAMETER Experiment Name: At_4deg_Cold_P Parameter: Timepoint (hr) Value: 6
  misc_feature: MA Experiment ID: 20000496 Result: Up-regulated in Transcription
  misc_feature: MA Experiment 20000496 PARAMETER Experiment Name: At_Guard_Cells_P Parameter: Harvest Date Value: 7/19/2002
  misc_feature: MA Experiment 20000496 PARAMETER Experiment Name: At_Guard_Cells_P Parameter: Organism Value: Canola
  misc_feature: MA Experiment 20000496 PARAMETER Experiment Name: At_Guard_Cells_P Parameter: Tissue Value: Guard Cells vs. Leaves
  misc_feature: MA Experiment ID: 20001905 Result: Up-regulated in Transcription
  misc_feature: MA Experiment 20001905 PARAMETER Experiment Name: At_Drought_Reproduction_P Parameter: Age (day) Value: 40
  misc_feature: MA Experiment 20001905 PARAMETER Experiment Name: At_Drought_Reproduction_P Parameter: Organism Value: A. thaliana
  misc_feature: MA Experiment 20001905 PARAMETER Experiment Name: At_Drought_Reproduction_P Parameter: Plant Line Value: WS
  misc_feature: MA Experiment 20001905 PARAMETER Experiment Name: At_Drought_Reproduction_P Parameter: Timepoint (day) Value: 10
  misc_feature: MA Experiment 20001905 PARAMETER Experiment Name: At_Drought_Reproduction_P Parameter: Tissue Value: Rosettes
  misc_feature: MA Experiment 20001905 PARAMETER Experiment Name: At_Drought_Reproduction_P Parameter: Treatment Value: Drought vs. No Drought
aaattgctttttaaaatccctcctcacacagattccttccttcatcacctcacacactctctacgcttgacatggccttcgatctccaccatggctcagcttcagatacgcattcatcagaacttccgtcgttttctctcccaccttatcctcagatgataatggaagcgattgagtccttgaacgataagaacggctgcaacaaaacgacgattgctaagcacatcgagtcgactcaacaaactctaccgccgtcacacatgacgctgctcagctaccatctcaaccagatgaagaaaaccggtcagctaatcatggtgaagaacaattatatgaaaccagatccagatgctcctcctaagcgtggtcgtggccgtcctccgaagcagaagactcaggccgaatctgacgccgctgctgctgctgttgttgctgccaccgtcgtctctacagatccgcctagatctcgtggccgtccaccgaagccgaaagatccatcggagcctccccaggagaaggtcattaccggatctggaaggccacgaggacgaccaccgaagagaccgagaacagattcggagacggttgctgcgccggaaccggcagctcaggcgacaggtgagcgtaggggacgtgggagacctccgaaggtgaagccgacggtggttgctccggttgggtgctgaattaatcggtacttatgcaatttcggaatctttagttactgaaaaatggaatctcttagagagtaagagagtgctttaatttagcttaattagatttatttggatttctttcagtatttggattgtaaactttagaatttgtgtgtgtgttgttgcttagtcctgagataagatataacattagcgactgtgtattattattattactgcattgtgttatgtgaaactttgttctcttgttg

SEQ ID NO: 106588 - protein, 204 aa, Arabidopsis thaliana; identical to SEQ ID NO: 28497
  peptide (1)..(204): Ceres Seq. ID no. 13620008
  misc_feature (22)..(91): Pfam Name: linker histone H1 and H5 family Pfam Description: linker histone H1 and H5 family
  misc_feature (1)..(204): Homolog of NCBI NO: 15223947 NR Description: linker histone protein -related [Arabidopsis
  misc_feature (1)..(204): Homolog of NCBI NO: 1808590 NR Description: HMG-I/Y [Arabidopsis thaliana]
  misc_feature (29)..(204): Homolog of NCBI NO: 21536605 NR Description: linker histone protein, putative [Arabidopsis
  misc_feature (19)..(204): Homolog of NCBI NO: 6651027 NR Description: high mobility group protein I/Y [Brassica napus]
  misc_feature (22)..(196): Homolog of NCBI NO: 7439663 NR Description: high mobility group protein HMGI/Y-1 - sword bean high mobility group protein [Canavalia gladiata]
  misc_feature (22)..(196): Homolog of NCBI NO: 7439645 NR Description: high mobility group protein HMGI/Y-2 - sword bean high mobility group protein [Canavalia gladiata]
  misc_feature (24)..(203): Homolog of NCBI NO: 7439646 NR Description: DNA binding protein PF1 - rice
  misc_feature (22)..(196): Homolog of NCBI NO: 2129885 NR Description: HMGI/Y protein - garden pea
  misc_feature (13)..(198): Homolog of NCBI NO: 9837562 NR Description: high mobility group I/Y-2 [Zea mays]
  misc_feature (13)..(198): Homolog of NCBI NO: 11544762 NR Description: HMGI/Y protein [Zea mays]

SEQ ID NO: 106589 - protein, 176 aa, Arabidopsis thaliana; identical to SEQ ID NO: 28498
  peptide (1)..(176): Ceres Seq. ID no. 13620009
  misc_feature (1)..(63): Pfam Name: linker histone H1 and H5 family Pfam Description: linker histone H1 and H5 family
  misc_feature (1)..(176): Homolog of NCBI NO: 15223947 NR Description: linker histone protein -related [Arabidopsis
  misc_feature (1)..(176): Homolog of NCBI NO: 1808590 NR Description: HMG-I/Y [Arabidopsis thaliana]
  misc_feature (1)..(176): Homolog of NCBI NO: 21536605 NR Description: linker histone protein, putative [Arabidopsis
  misc_feature (1)..(176): Homolog of NCBI NO: 6651027 NR Description: high mobility group protein I/Y [Brassica napus]
  misc_feature (1)..(168): Homolog of NCBI NO: 7439663 NR Description: high mobility group protein HMGI/Y-1 - sword bean high mobility group protein [Canavalia gladiata]
  misc_feature (1)..(168): Homolog of NCBI NO: 7439645 NR Description: high mobility group protein HMGI/Y-2 - sword bean high mobility group protein [Canavalia gladiata]
  misc_feature (1)..(175): Homolog of NCBI NO: 7439646 NR Description: DNA binding protein PF1 - rice
  misc_feature (1)..(168): Homolog of NCBI NO: 2129885 NR Description: HMGI/Y protein - garden pea
  misc_feature (1)..(170): Homolog of NCBI NO: 9837562 NR Description: high mobility group I/Y-2 [Zea mays]
  misc_feature (1)..(170): Homolog of NCBI NO: 11544762 NR Description: HMGI/Y protein [Zea mays]

SEQ ID NO: 106590 - protein, 174 aa, Arabidopsis thaliana; identical to SEQ ID NO: 28499
  peptide (1)..(174): Ceres Seq. ID no. 13620010
  misc_feature (1)..(61): Pfam Name: linker histone H1 and H5 family Pfam Description: linker histone H1 and H5 family
  misc_feature (1)..(174): Homolog of NCBI NO: 15223947 NR Description: linker histone protein -related [Arabidopsis
  misc_feature (1)..(174): Homolog of NCBI NO: 1808590 NR Description: HMG-I/Y [Arabidopsis thaliana]
  misc_feature (1)..(174): Homolog of NCBI NO: 21536605 NR Description: linker histone protein, putative [Arabidopsis
  misc_feature (1)..(174): Homolog of NCBI NO: 6651027 NR Description: high mobility group protein I/Y [Brassica napus]
  misc_feature (1)..(166): Homolog of NCBI NO: 7439663 NR Description: high mobility group protein HMGI/Y-1 - sword bean high mobility group protein [Canavalia gladiata]
  misc_feature (1)..(166): Homolog of NCBI NO: 7439645 NR Description: high mobility group protein HMGI/Y-2 - sword bean high mobility group protein [Canavalia gladiata]
  misc_feature (1)..(173): Homolog of NCBI NO: 7439646 NR Description: DNA binding protein PF1 - rice
  misc_feature (1)..(166): Homolog of NCBI NO: 2129885 NR Description: HMGI/Y protein - garden pea
  misc_feature (1)..(168): Homolog of NCBI NO: 9837562 NR Description: high mobility group I/Y-2 [Zea mays]
  misc_feature (1)..(168): Homolog of NCBI NO: 11544762 NR Description: HMGI/Y protein [Zea mays]

SEQ ID NO: 106591 - DNA, 1570 bp, Arabidopsis thaliana
  misc_feature (1)..(1570): Ceres Seq. ID no. 13620011
  misc_feature: MA Experiment ID: 108488 Result: Down-regulated in Transcription
  misc_feature: MA Experiment ID: 108572 Result: Up-regulated in Transcription
  misc_feature: MA Experiment 108572 PARAMETER Experiment Name: At_Drought_cDNA_P Parameter: Timepoint (hr) Value: 1
  misc_feature: MA Experiment 108572 PARAMETER Experiment Name: At_Drought_cDNA_P Parameter: Tissue Value: Aerial
  misc_feature: MA Experiment 108572 PARAMETER Experiment Name: At_Drought_cDNA_P Parameter: Treatment Value: Drought vs. No Drought
  misc_feature: MA Experiment ID: 108573 Result: Up-regulated in Transcription
  misc_feature: MA Experiment 108573 PARAMETER Experiment Name: At_Drought_cDNA_P Parameter: Timepoint (hr) Value: 6
  misc_feature: MA Experiment 108573 PARAMETER Experiment Name: At_Drought_cDNA_P Parameter: Tissue Value: Aerial
  misc_feature: MA Experiment 108573 PARAMETER Experiment Name: At_Drought_cDNA_P Parameter: Treatment Value: Drought vs. No Drought
  misc_feature: MA Experiment ID: 20000071 Result: Up-regulated in Transcription
  misc_feature: MA Experiment 20000071 PARAMETER Experiment Name: At_100uM_ABA_Mutants_cDNA_P Parameter: Plant Line Value: CS8104
  misc_feature: MA Experiment 20000071 PARAMETER Experiment Name: At_100uM_ABA_Mutants_cDNA_P Parameter: Timepoint (hr) Value: 6
  misc_feature: MA Experiment 20000071 PARAMETER Experiment Name: At_100uM_ABA_Mutants_cDNA_P Parameter: Tissue Value: Aerial
  misc_feature: MA Experiment 20000071 PARAMETER Experiment Name: At_100uM_ABA_Mutants_cDNA_P Parameter: Treatment Value: 100uM ABA vs. No Treatment
  misc_feature: MA Experiment ID: 20000072 Result: Up-regulated in Transcription
  misc_feature: MA Experiment 20000072 PARAMETER Experiment Name: At_100uM_ABA_Mutants_cDNA_P Parameter: Plant Line Value: CS8105
  misc_feature: MA Experiment 20000072 PARAMETER Experiment Name: At_100uM_ABA_Mutants_cDNA_P Parameter: Timepoint (hr) Value: 6
  misc_feature: MA Experiment 20000072 PARAMETER Experiment Name: At_100uM_ABA_Mutants_cDNA_P Parameter: Tissue Value: Aerial
  misc_feature: MA Experiment 20000072 PARAMETER Experiment Name: At_100uM_ABA_Mutants_cDNA_P Parameter: Treatment Value: 100uM ABA vs. No Treatment
  misc_feature: MA Experiment ID: 20000087 Result: Up-regulated in Transcription
  misc_feature: MA Experiment 20000087 PARAMETER Experiment Name: At_100uM_ABA_Mutants_cDNA_P Parameter: Plant Line Value: WS
  misc_feature: MA Experiment 20000087 PARAMETER Experiment Name: At_100uM_ABA_Mutants_cDNA_P Parameter: Timepoint (hr) Value: 6
  misc_feature: MA Experiment 20000087 PARAMETER Experiment Name: At_100uM_ABA_Mutants_cDNA_P Parameter: Tissue Value: Aerial
  misc_feature: MA Experiment 20000087 PARAMETER Experiment Name: At_100uM_ABA_Mutants_cDNA_P Parameter: Treatment Value: 100uM ABA vs. No Treatment
  misc_feature: MA Experiment ID: 20000117 Result: Up-regulated in Transcription
  misc_feature: MA Experiment 20000117 PARAMETER Experiment Name: At_100uM_ABA_Mutants_cDNA_P Parameter: Plant Line Value: Columbia
  misc_feature: MA Experiment 20000117 PARAMETER Experiment Name: At_100uM_ABA_Mutants_cDNA_P Parameter: Timepoint (hr) Value: 6
  misc_feature: MA Experiment 20000117 PARAMETER Experiment Name: At_100uM_ABA_Mutants_cDNA_P Parameter: Tissue Value: Aerial
  misc_feature: MA Experiment 20000117 PARAMETER Experiment Name: At_100uM_ABA_Mutants_cDNA_P Parameter: Treatment Value: 100uM ABA vs. No Treatment
  misc_feature: MA Experiment ID: 20000185 Result: Up-regulated in Transcription
  misc_feature: MA Experiment 20000185 PARAMETER Experiment Name: At_Roots__P Parameter: Age (day) Value: 7 vs. 21
  misc_feature: MA Experiment 20000185 PARAMETER Experiment Name: At_Roots__P Parameter: Organism Value: A. thaliana
  misc_feature: MA Experiment 20000185 PARAMETER Experiment Name: At_Roots__P Parameter: Tissue Value: Roots vs. Whole Plant
  misc_feature: MA Experiment ID: 20000437 Result: Up-regulated in Transcription
  misc_feature: MA Experiment 20000437 PARAMETER Experiment Name: At_Drought_P Parameter: Age (day) Value: 8
  misc_feature: MA Experiment 20000437 PARAMETER Experiment Name: At_Drought_P Parameter: Organism Value: A. thaliana
  misc_feature: MA Experiment 20000437 PARAMETER Experiment Name: At_Drought_P Parameter: Plant Line Value: WS
  misc_feature: MA Experiment 20000437 PARAMETER Experiment Name: At_Drought_P Parameter: Timepoint (hr) Value: 24
  misc_feature: MA Experiment 20000437 PARAMETER Experiment Name: At_Drought_P Parameter: Tissue Value: Whole Plant
  misc_feature: MA Experiment 20000437 PARAMETER Experiment Name: At_Drought_P Parameter: Treatment Value: Drought vs. No Drought
  misc_feature: MA Experiment ID: 20000439 Result: Up-regulated in Transcription
  misc_feature: MA Experiment 20000439 PARAMETER Experiment Name: At_Roots__P Parameter: Age (day) Value: 14 vs. 21
  misc_feature: MA Experiment 20000439 PARAMETER Experiment Name: At_Roots__P Parameter: Organism Value: A. thaliana
  misc_feature: MA Experiment 20000439 PARAMETER Experiment Name: At_Roots__P Parameter: Tissue Value: Roots vs. Whole Plant
  misc_feature: MA Experiment ID: 20000495 Result: Up-regulated in Transcription
  misc_feature: MA Experiment 20000495 PARAMETER Experiment Name: At_Guard_Cells_P Parameter: Harvest Date Value: 8/2/2002
  misc_feature: MA Experiment 20000495 PARAMETER Experiment Name: At_Guard_Cells_P Parameter: Organism Value: A. thaliana
  misc_feature: MA Experiment 20000495 PARAMETER Experiment Name: At_Guard_Cells_P Parameter: Tissue Value: Guard Cells vs. Leaves
  misc_feature: MA Experiment ID: 20000794 Result: Up-regulated in Transcription
  misc_feature: MA Experiment 20000794 PARAMETER Experiment Name: At_Petals_P Parameter: Age (day) Value: 23-25 days
  misc_feature: MA Experiment 20000794 PARAMETER Experiment Name: At_Petals_P Parameter: Plant Line Value: WS
  misc_feature: MA Experiment 20000794 PARAMETER Experiment Name: At_Petals_P Parameter: Tissue Value: Petals vs. Whole plant
  misc_feature: MA Experiment ID: 20001451 Result: Up-regulated in Transcription
  misc_feature: MA Experiment 20001451 PARAMETER Experiment Name: At_Far-red-induction_P Parameter: Age (day) Value: 7
  misc_feature: MA Experiment 20001451 PARAMETER Experiment Name: At_Far-red-induction_P Parameter: Light Value: Far-red vs. White
  misc_feature: MA Experiment 20001451 PARAMETER Experiment Name: At_Far-red-induction_P Parameter: Organism Value: A. thaliana
  misc_feature: MA Experiment 20001451 PARAMETER Experiment Name: At_Far-red-induction_P Parameter: Plant Line Value: Columbia
  misc_feature: MA Experiment 20001451 PARAMETER Experiment Name: At_Far-red-induction_P Parameter: Timepoint (hr) Value: 24
  misc_feature: MA Experiment 20001451 PARAMETER Experiment Name: At_Far-red-induction_P Parameter: Tissue Value: Whole Plant
  misc_feature: MA Experiment ID: 20001558 Result: Up-regulated in Transcription
  misc_feature: MA Experiment 20001558 PARAMETER Experiment Name: At_Drought_Soil_Dry_P Parameter: Age (day) Value: 27
  misc_feature: MA Experiment 20001558 PARAMETER Experiment Name: At_Drought_Soil_Dry_P Parameter: Organism Value: A. thaliana
  misc_feature: MA Experiment 20001558 PARAMETER Experiment Name: At_Drought_Soil_Dry_P Parameter: Plant Line Value: WS
  misc_feature: MA Experiment 20001558 PARAMETER Experiment Name: At_Drought_Soil_Dry_P Parameter: Post Timepoint (hr) Value: 6
  misc_feature: MA Experiment 20001558 PARAMETER Experiment Name: At_Drought_Soil_Dry_P Parameter: Post-Treatment Value: Re-Water vs. No Drought
  misc_feature: MA Experiment 20001558 PARAMETER Experiment Name: At_Drought_Soil_Dry_P Parameter: Timepoint (day) Value: 13
  misc_feature: MA Experiment 20001558 PARAMETER Experiment Name: At_Drought_Soil_Dry_P Parameter: Treatment Value: Drought vs. No Drought
  misc_feature: MA Experiment ID: 20001560 Result: Up-regulated in Transcription
  misc_feature: MA Experiment 20001560 PARAMETER Experiment Name: At_Drought_Soil_Dry_P Parameter: Age (day) Value: 28
  misc_feature: MA Experiment 20001560 PARAMETER Experiment Name: At_Drought_Soil_Dry_P Parameter: Organism Value: A. thaliana
  misc_feature: MA Experiment 20001560 PARAMETER Experiment Name: At_Drought_Soil_Dry_P Parameter: Plant Line Value: WS
  misc_feature: MA Experiment 20001560 PARAMETER Experiment Name: At_Drought_Soil_Dry_P Parameter: Post Timepoint (hr) Value: None
  misc_feature: MA Experiment 20001560 PARAMETER Experiment Name: At_Drought_Soil_Dry_P Parameter: Post-Treatment Value: None
  misc_feature: MA Experiment 20001560 PARAMETER Experiment Name: At_Drought_Soil_Dry_P Parameter: Timepoint (day) Value: 14
  misc_feature: MA Experiment 20001560 PARAMETER Experiment Name: At_Drought_Soil_Dry_P Parameter: Treatment Value: Drought vs. No Drought
  misc_feature: MA Experiment ID: 20001757 Result: Down-regulated in Transcription
  misc_feature: MA Experiment 20001757 PARAMETER Experiment Name: At_50mM_NH4NO3_L-to-H_P Parameter: Timepoint (hr) Value: 6
  misc_feature: MA Experiment 20001757 PARAMETER Experiment Name: At_50mM_NH4NO3_L-to-H_P Parameter: Tissue Value: Leaf
  misc_feature: MA Experiment 20001757 PARAMETER Experiment Name: At_50mM_NH4NO3_L-to-H_P Parameter: Treatment Value: 50mM NH4NO3 vs 100mM Mannitol
  misc_feature: MA Experiment ID: 20001905 Result: Up-regulated in Transcription
  misc_feature: MA Experiment 20001905 PARAMETER Experiment Name: At_Drought_Reproduction_P Parameter: Age (day) Value: 40
  misc_feature: MA Experiment 20001905 PARAMETER Experiment Name: At_Drought_Reproduction_P Parameter: Organism Value: A. thaliana
  misc_feature: MA Experiment 20001905 PARAMETER Experiment Name: At_Drought_Reproduction_P Parameter: Plant Line Value: WS
  misc_feature: MA Experiment 20001905 PARAMETER Experiment Name: At_Drought_Reproduction_P Parameter: Timepoint (day) Value: 10
  misc_feature: MA Experiment 20001905 PARAMETER Experiment Name: At_Drought_Reproduction_P Parameter: Tissue Value: Rosettes
  misc_feature: MA Experiment 20001905 PARAMETER Experiment Name: At_Drought_Reproduction_P Parameter: Treatment Value: Drought vs. No Drought
  misc_feature: MA Experiment ID: 20001906 Result: Up-regulated in Transcription
  misc_feature: MA Experiment 20001906 PARAMETER Experiment Name: At_Drought_Reproduction_P Parameter: Age (day) Value: 35
  misc_feature: MA Experiment 20001906 PARAMETER Experiment Name: At_Drought_Reproduction_P Parameter: Organism Value: A. thaliana
  misc_feature: MA Experiment 20001906 PARAMETER Experiment Name: At_Drought_Reproduction_P Parameter: Plant Line Value: WS
  misc_feature: MA Experiment 20001906 PARAMETER Experiment Name: At_Drought_Reproduction_P Parameter: Timepoint (day) Value: 5
  misc_feature: MA Experiment 20001906 PARAMETER Experiment Name: At_Drought_Reproduction_P Parameter: Tissue Value: Siliques
  misc_feature: MA Experiment 20001906 PARAMETER Experiment Name: At_Drought_Reproduction_P Parameter: Treatment Value: Drought vs. No Drought
  misc_feature: MA Experiment ID: 20001911 Result: Up-regulated in Transcription
  misc_feature: MA Experiment 20001911 PARAMETER Experiment Name: At_Drought_Reproduction_P Parameter: Age (day) Value: 40
  misc_feature: MA Experiment 20001911 PARAMETER Experiment Name: At_Drought_Reproduction_P Parameter: Organism Value: A. thaliana
  misc_feature: MA Experiment 20001911 PARAMETER Experiment Name: At_Drought_Reproduction_P Parameter: Plant Line Value: WS
  misc_feature: MA Experiment 20001911 PARAMETER Experiment Name: At_Drought_Reproduction_P Parameter: Timepoint (day) Value: 10
  misc_feature: MA Experiment 20001911 PARAMETER Experiment Name: At_Drought_Reproduction_P Parameter: Tissue Value: Flowers
  misc_feature: MA Experiment 20001911 PARAMETER Experiment Name: At_Drought_Reproduction_P Parameter: Treatment Value: Drought vs. No Drought
actacttggattcctacttcttcttcttcttcctctgattctctcccattccaatcaatctctagggttcttcttcagcaatacttcagaagctggttttggccatggaacccaatgggtacaggaaagaaagaagaaaggaacaacatttggggagaatgaatggtggtggtggtgatgttgagactgatcttgatccatggactgcatgggcttacaagcctcgcactatctctcttctccttattggcgcttgttttctcatttgggctagtggagctcttgatcctgacagcactacatctgatgatcttgtcacttctgtcaaaaggggagtgtgggctatgatcgctgtctttcttgcttactctttgctccaggccccttcaacggttctaatcaggccccatcctgcaatctggcgcttagttcatggaatggccgtcatttacttagttgcacttacttttttgctctttcagagacgtgatgatgcacggcagttcatgaagtttctccaccctgaccttggaatagaacttcctgagaaatcatacggtgctgattgccgtatatatgtgcctgatcacccaacaaacaggtttaagaatctttatgacacagtatttgatgagtttttcttggctcacatctttggttggtgggggaaagcaattctgatccggaaccagccgcttctttgggtgctttcaattggttttgagttattggaggttacttttcggcatatgttaccaaatttcaacgagtgctggtgggacagtattgttcttgatatcttgatatgcaactggtttggtatctgggcaggaatgtatacagttcgatattttgatggaaaaacatatgagtgggttggcattagccgccagcctaacattattggcaaagtgaaaaggacactggggcagttcacaccagctcactgggacaaagacgagtggcatccgctgcagggaccttggcgttttattcaagtactcactctttgcatcatattcttgacagtggagctgaacacattctttctcaagtttagcctgtggatcccccctcgaaacccagtgattctctataggctgatcttgtggtggctcatagcgataccaacaacacgggagtacaattcatatcttcaagacagaaaacctgtgaaaaaggtgggagcattctgttggctgtcactggggatatgcatagtagaacttctcatctgcatcaagtttggaagtggattgtacccaacagaaatgccattgtgggtagtgacactatggggaagtgtgggacttggacttgtggccttcttgctgtcttggacatggaagatccagaagatcctcgcgcaaaagagacgttaagcgcatcattattgttgcagcagagacgagagagaaatagaggtgagacagtgaaatgccattgtggtttttttttgtaaatagggagaagaaggaacgatgtaaatgcaattttctttagggatagtgtgtgatattcaacatttacgaagattccatcaattctttcatgcatcaaaagttctttc

SEQ ID NO: 106592 - protein, 425 aa, Arabidopsis thaliana
  peptide (1)..(425): Ceres Seq. ID no. 13620012
  misc_feature (101)..(384): Pfam Name: Phosphatidyl serine synthase Pfam Description: Phosphatidyl serine synthase
  misc_feature (1)..(384): Homolog of NCBI NO: 25518032 NR Description: F9L1.4 protein - Arabidopsis thaliana
  misc_feature (216)..(425): Homolog of NCBI NO: 22329573 NR Description: phosphatidylserine synthase -related [Arabidopsis
  misc_feature (214)..(328): Homolog of NCBI NO: 34911216 NR Description: putative phosphatidylserine synthase [Oryza
  misc_feature (77)..(143): Homolog of NCBI NO: 34911216 NR Description: putative phosphatidylserine synthase [Oryza
  misc_feature (1)..(56): Homolog of NCBI NO: 34911216 NR Description: putative phosphatidylserine synthase [Oryza
  misc_feature (31)..(415): Homolog of NCBI NO: 13540555 NR Description: phosphatidylserine synthase 2 [Homo sapiens] Similar to phosphatidylserine synthase 2 [Homo sapiens]
  misc_feature (10)..(415): Homolog of NCBI NO: 2190007 NR Description: phosphatidylserine synthase II [Cricetulus
  misc_feature (31)..(415): Homolog of NCBI NO: 4063700 NR Description: phosphatidylserine synthase-2 [Mus musculus]
  misc_feature (31)..(415): Homolog of NCBI NO: 31560497 NR Description: phosphatidylserine synthase 2 [Mus musculus] unnamed protein product [Mus musculus] unnamed protein product [Mus musculus]
  misc_feature (77)..(415): Homolog of NCBI NO: 14290490 NR Description: Ptdss2 protein [Mus musculus]
MEPNGYRKERRKEQHLGRMNGGGGDVETDLDPWTAWAYKPRTISLLLIGACFLIWASGALDPDSTTSDDLVTSVKRGVWAMIAVFLAYSLLQAPSTVLIRPHPAIWRLVHGMAVIYLVALTFLLFQRRDDARQFMKFLHPDLGIELPEKSYGADCRIYVPDHPTNRFKNLYDTVFDEFFLAHIFGWWGKAILIRNQPLLWVLSIGFELLEVTFRHMLPNFNECWWDSIVLDILICNWFGIWAGMYTVRYFDGKTYEWVGISRQPNIIGKVKRTLGQFTPAHWDKDEWHPLQGPWRFIQVLTLCIIFLTVELNTFFLKFSLWIPPRNPVILYRLILWWLIAIPTTREYNSYLQDRKPVKKVGAFCWLSLGICIVELLICIKFGSGLYPTEMPLWVVTLWGSVGLGLVAFLLSWTWKIQKILAQKRR

SEQ ID NO: 106593 - protein, 407 aa, Arabidopsis thaliana
  peptide (1)..(407): Ceres Seq. ID no. 13620013
  misc_feature (83)..(366): Pfam Name: Phosphatidyl serine synthase Pfam Description: Phosphatidyl serine synthase
  misc_feature (1)..(366): Homolog of NCBI NO: 25518032 NR Description: F9L1.4 protein - Arabidopsis thaliana
  misc_feature (198)..(407): Homolog of NCBI NO: 22329573 NR Description: phosphatidylserine synthase -related [Arabidopsis
  misc_feature (196)..(310): Homolog of NCBI NO: 34911216 NR Description: putative phosphatidylserine synthase [Oryza
  misc_feature (59)..(125): Homolog of NCBI NO: 34911216 NR Description: putative phosphatidylserine synthase [Oryza
  misc_feature (1)..(38): Homolog of NCBI NO: 34911216 NR Description: putative phosphatidylserine synthase [Oryza
  misc_feature (13)..(397): Homolog of NCBI NO: 13540555 NR Description: phosphatidylserine synthase 2 [Homo sapiens] Similar to phosphatidylserine synthase 2 [Homo sapiens]
  misc_feature (1)..(397): Homolog of NCBI NO: 2190007 NR Description: phosphatidylserine synthase II [Cricetulus
  misc_feature (13)..(397): Homolog of NCBI NO: 4063700 NR Description: phosphatidylserine synthase-2 [Mus musculus]
  misc_feature (13)..(397): Homolog of NCBI NO: 31560497 NR Description: phosphatidylserine synthase 2 [Mus musculus] unnamed protein product [Mus musculus] unnamed protein product [Mus musculus]
  misc_feature (59)..(397): Homolog of NCBI NO: 14290490 NR Description: Ptdss2 protein [Mus musculus]
MNGGGGDVETDLDPWTAWAYKPRTISLLLIGACFLIWASGALDPDSTTSDDLVTSVKRGVWAMIAVFLAYSLLQAPSTVLIRPHPAIWRLVHGMAVIYLVALTFLLFQRRDDARQFMKFLHPDLGIELPEKSYGADCRIYVPDHPTNRFKNLYDTVFDEFFLAHIFGWWGKAILIRNQPLLWVLSIGFELLEVTFRHMLPNFNECWWDSIVLDILICNWFGIWAGMYTVRYFDGKTYEWVGISRQPNIIGKVKRTLGQFTPAHWDKDEWHPLQGPWRFIQVLTLCIIFLTVELNTFFLKFSLWIPPRNPVILYRLILWWLIAIPTTREYNSYLQDRKPVKKVGAFCWLSLGICIVELLICIKFGSGLYPTEMPLWVVTLWGSVGLGLVAFLLSWTWKIQKILAQKRR

SEQ ID NO: 106594 - protein, 345 aa, Arabidopsis thaliana
  peptide (1)..(345): Ceres Seq. ID no. 13620014
  misc_feature (21)..(304): Pfam Name: Phosphatidyl serine synthase Pfam Description: Phosphatidyl serine synthase
  misc_feature (1)..(304): Homolog of NCBI NO: 25518032 NR Description: F9L1.4 protein - Arabidopsis thaliana
  misc_feature (136)..(345): Homolog of NCBI NO: 22329573 NR Description: phosphatidylserine synthase -related [Arabidopsis
  misc_feature (134)..(248): Homolog of NCBI NO: 34911216 NR Description: putative phosphatidylserine synthase [Oryza
  misc_feature (1)..(63): Homolog of NCBI NO: 34911216 NR Description: putative phosphatidylserine synthase [Oryza
  misc_feature (1)..(335): Homolog of NCBI NO: 13540555 NR Description: phosphatidylserine synthase 2 [Homo sapiens] Similar to phosphatidylserine synthase 2 [Homo sapiens]
  misc_feature (1)..(335): Homolog of NCBI NO: 2190007 NR Description: phosphatidylserine synthase II [Cricetulus
  misc_feature (1)..(335): Homolog of NCBI NO: 4063700 NR Description: phosphatidylserine synthase-2 [Mus musculus]
  misc_feature (1)..(335): Homolog of NCBI NO: 31560497 NR Description: phosphatidylserine synthase 2 [Mus musculus] unnamed protein product [Mus musculus] unnamed protein product [Mus musculus]
  misc_feature (1)..(335): Homolog of NCBI NO: 14290490 NR Description: Ptdss2 protein [Mus musculus]
  misc_feature (99)..(218): Homolog of NCBI NO: 34895332 NR Description: P0494A10.20 [Oryza sativa (japonica
MIAVFLAYSLLQAPSTVLIRPHPAIWRLVHGMAVIYLVALTFLLFQRRDDARQFMKFLHPDLGIELPEKSYGADCRIYVPDHPTNRFKNLYDTVFDEFFLAHIFGWWGKAILIRNQPLLWVLSIGFELLEVTFRHMLPNFNECWWDSIVLDILICNWFGIWAGMYTVRYFDGKTYEWVGISRQPNIIGKVKRTLGQFTPAHWDKDEWHPLQGPWRFIQVLTLCIIFLTVELNTFFLKFSLWIPPRNPVILYRLILWWLIAIPTTREYNSYLQDRKPVKKVGAFCWLSLGICIVELLICIKFGSGLYPTEMPLWVVTLWGSVGLGLVAFLLSWTWKIQKILAQKRR

SEQ ID NO: 106595 - DNA, 1217 bp, Arabidopsis thaliana
  misc_feature (1)..(1217): Ceres Seq. ID no. 13620022
  misc_feature: MA Experiment ID: 108434 Result: Up-regulated in Transcription
  misc_feature: MA Experiment 108434 PARAMETER Experiment Name: At_Root_Tips_cDNA_P Parameter: Tissue Value: Root Tips
  misc_feature: MA Experiment ID: 108473 Result: Down-regulated in Transcription
  misc_feature: MA Experiment 108473 PARAMETER Experiment Name: At_Drought_Flowers_cDNA_P Parameter: Timepoint (hr) Value: 7 d
  misc_feature: MA Experiment 108473 PARAMETER Experiment Name: At_Drought_Flowers_cDNA_P Parameter: Tissue Value: Flower
  misc_feature: MA Experiment 108473 PARAMETER Experiment Name: At_Drought_Flowers_cDNA_P Parameter: Treatment Value: Drought vs. No Drought
  misc_feature: MA Experiment ID: 20000113 Result: Down-regulated in Transcription
  misc_feature: MA Experiment 20000113 PARAMETER Experiment Name: At_42deg_Heat_cDNA_P Parameter: Temperature (deg C) Value: 42 vs. 22
  misc_feature: MA Experiment 20000113 PARAMETER Experiment Name: At_42deg_Heat_cDNA_P Parameter: Timepoint (hr) Value: 8
  misc_feature: MA Experiment 20000113 PARAMETER Experiment Name: At_42deg_Heat_cDNA_P Parameter: Tissue Value: Aerial
  misc_feature: MA Experiment ID: 20000144 Result: Down-regulated in Transcription
  misc_feature: MA Experiment 20000144 PARAMETER Experiment Name: At_42deg_Heat_cDNA_P Parameter: Temperature (deg C) Value: 42 vs. 22
  misc_feature: MA Experiment 20000144 PARAMETER Experiment Name: At_42deg_Heat_cDNA_P Parameter: Timepoint (hr) Value: 1
  misc_feature: MA Experiment 20000144 PARAMETER Experiment Name: At_42deg_Heat_cDNA_P Parameter: Tissue Value: Aerial
  misc_feature: MA Experiment ID: 20000171 Result: Down-regulated in Transcription
  misc_feature: MA Experiment 20000171 PARAMETER Experiment Name: At_42deg_Heat_P Parameter: Age (day) Value: 14
  misc_feature: MA Experiment 20000171 PARAMETER Experiment Name: At_42deg_Heat_P Parameter: Organism Value: A. thaliana
  misc_feature: MA Experiment 20000171 PARAMETER Experiment Name: At_42deg_Heat_P Parameter: Plant Line Value: WS
  misc_feature: MA Experiment 20000171 PARAMETER Experiment Name: At_42deg_Heat_P Parameter: Temperature (deg C) Value: 42 vs. 22
  misc_feature: MA Experiment 20000171 PARAMETER Experiment Name: At_42deg_Heat_P Parameter: Timepoint (hr) Value: 1
  misc_feature: MA Experiment 20000171 PARAMETER Experiment Name: At_42deg_Heat_P Parameter: Tissue Value: Aerial
  misc_feature: MA Experiment ID: 20000185 Result: Up-regulated in Transcription
  misc_feature: MA Experiment 20000185 PARAMETER Experiment Name: At_Roots__P Parameter: Age (day) Value: 7 vs. 21
  misc_feature: MA Experiment 20000185 PARAMETER Experiment Name: At_Roots__P Parameter: Organism Value: A. thaliana
  misc_feature: MA Experiment 20000185 PARAMETER Experiment Name: At_Roots__P Parameter: Tissue Value: Roots vs. Whole Plant
  misc_feature: MA Experiment ID: 20000265 Result: Up-regulated in Transcription
  misc_feature: MA Experiment 20000265 PARAMETER Experiment Name: At_Open_Flower_P Parameter: Age (day) Value: 21
  misc_feature: MA Experiment 20000265 PARAMETER Experiment Name: At_Open_Flower_P Parameter: Plant Line Value: WS
  misc_feature: MA Experiment 20000265 PARAMETER Experiment Name: At_Open_Flower_P Parameter: Tissue Value: Closed Flower vs. Whole Plant
  misc_feature: MA Experiment ID: 20000439 Result: Up-regulated in Transcription
  misc_feature: MA Experiment 20000439 PARAMETER Experiment Name: At_Roots__P Parameter: Age (day) Value: 14 vs. 21
  misc_feature: MA Experiment 20000439 PARAMETER Experiment Name: At_Roots__P Parameter: Organism Value: A. thaliana
  misc_feature: MA Experiment 20000439 PARAMETER Experiment Name: At_Roots__P Parameter: Tissue Value: Roots vs. Whole Plant
  misc_feature: MA Experiment ID: 20000495 Result: Up-regulated in Transcription
  misc_feature: MA Experiment 20000495 PARAMETER Experiment Name: At_Guard_Cells_P Parameter: Harvest Date Value: 8/2/2002
  misc_feature: MA Experiment 20000495 PARAMETER Experiment Name: At_Guard_Cells_P Parameter: Organism Value: A. thaliana
  misc_feature: MA Experiment 20000495 PARAMETER Experiment Name: At_Guard_Cells_P Parameter: Tissue Value: Guard Cells vs. Leaves
  misc_feature: MA Experiment ID: 20000794 Result: Down-regulated in Transcription
  misc_feature: MA Experiment 20000794 PARAMETER Experiment Name: At_Petals_P Parameter: Age (day) Value: 23-25 days
  misc_feature: MA Experiment 20000794 PARAMETER Experiment Name: At_Petals_P Parameter: Plant Line Value: WS
  misc_feature: MA Experiment 20000794 PARAMETER Experiment Name: At_Petals_P Parameter: Tissue Value: Petals vs. Whole plant
  misc_feature: MA Experiment ID: 20001248 Result: Down-regulated in Transcription
  misc_feature: MA Experiment 20001248 PARAMETER Experiment Name: At_Far-red-induction_P Parameter: Age (day) Value: 7
  misc_feature: MA Experiment 20001248 PARAMETER Experiment Name: At_Far-red-induction_P Parameter: Light Value: Far-red vs. White
  misc_feature: MA Experiment 20001248 PARAMETER Experiment Name: At_Far-red-induction_P Parameter: Organism Value: A. thaliana
  misc_feature: MA Experiment 20001248 PARAMETER Experiment Name: At_Far-red-induction_P Parameter: Plant Line Value: Columbia
  misc_feature: MA Experiment 20001248 PARAMETER Experiment Name: At_Far-red-induction_P Parameter: Timepoint (hr) Value: 4
  misc_feature: MA Experiment 20001248 PARAMETER Experiment Name: At_Far-red-induction_P Parameter: Tissue Value: Whole Plant
  misc_feature: MA Experiment ID: 20001450 Result: Down-regulated in Transcription
  misc_feature: MA Experiment 20001450 PARAMETER Experiment Name: At_Far-red-induction_P Parameter: Age (day) Value: 7
  misc_feature: MA Experiment 20001450 PARAMETER Experiment Name: At_Far-red-induction_P Parameter: Light Value: Far-red vs. White
  misc_feature: MA Experiment 20001450 PARAMETER Experiment Name: At_Far-red-induction_P Parameter: Organism Value: A. thaliana
  misc_feature: MA Experiment 20001450 PARAMETER Experiment Name: At_Far-red-induction_P Parameter: Plant Line Value: Columbia
  misc_feature: MA Experiment 20001450 PARAMETER Experiment Name: At_Far-red-induction_P Parameter: Timepoint (hr) Value: 8
  misc_feature: MA Experiment 20001450 PARAMETER Experiment Name: At_Far-red-induction_P Parameter: Tissue Value: Whole Plant
  misc_feature: MA Experiment ID: 20001911 Result: Down-regulated in Transcription
  misc_feature: MA Experiment 20001911 PARAMETER Experiment Name: At_Drought_Reproduction_P Parameter: Age (day) Value: 40
  misc_feature: MA Experiment 20001911 PARAMETER Experiment Name: At_Drought_Reproduction_P Parameter: Organism Value: A. thaliana
  misc_feature: MA Experiment 20001911 PARAMETER Experiment Name: At_Drought_Reproduction_P Parameter: Plant Line Value: WS
  misc_feature: MA Experiment 20001911 PARAMETER Experiment Name: At_Drought_Reproduction_P Parameter: Timepoint (day) Value: 10
  misc_feature: MA Experiment 20001911 PARAMETER Experiment Name: At_Drought_Reproduction_P Parameter: Tissue Value: Flowers
  misc_feature: MA Experiment 20001911 PARAMETER Experiment Name: At_Drought_Reproduction_P Parameter: Treatment Value: Drought vs. No Drought
attccatcaatttctcatccttgttgttttcttcttcttcttcttcctcttcttttatgttcatcgccgtcgaagtttctccggtaatggaagacatcacacggcagagcaaaaaaacttcggttgagaatgaaaccggcgatgatcagtcagcaacatcagtagtccttaaagctaaacgcaaacgccgatcgcaaccacgagacgctccaccccaacgtagctccgtccatagaggcgtcacaaggcatcgatggactggaaggtacgaagcacatttgtgggataagaatagttggaacgaaactcagaccaagaaaggaagacaagtatatttaggggcatatgacgaggaagatgcagcagcacgtgcctacgacttagcagcattgaaatattggggacgagacaccatcttgaacttccctttgtgtaattatgaagaagacatcaaagaaatggaaagccagtcaaaggaagagtatattggatctttgagaagaaaaagtagtgggttttcacgaggtgtatcaaaatacagaggcgttgcaaagcatcaccacaatgggagatgggaagctcgaatcggaagagtgtttggcaataaatatttataccttggaacttacgcgacgcaagaagaagcagctatagcgtacgatatcgcagctatcgagtaccgtggactcaacgccgttactaacttcgacatcagccgttatctgaaactcccggtgccggagaaccctatcgataccgcgaataatctcctcgagagtccgcattctgatcttagcccatttataaaacctaaccacgagtctgacttatcacagagtcaatcttcgtcagaggacaacgatgatcggaaaacaaagctcttgaagtcgtcacctttagtggcagaggaggtaatcggaccatcgacgccacctgagattgctccgcctcgtcggagcttcccggaagatatccagacgtatttcgggtgtcaaaactccggcaagttaacggcggaggaagatgatgttatcttcggtgatttagattctttccttacgcctgatttctacagcgagttaaatgattgctaaagtgttgttcttctgataagttttgttttttagttgttcagaatctcggttgtgaaaatcaacattgacacatcgattattctttcttgtgacaatcttatataataaagtttgaatcttttt

SEQ ID NO: 106596 - protein, 363 aa, Arabidopsis thaliana
  peptide (1)..(363): Ceres Seq. ID no. 13620023
  misc_feature (74)..(147): Pfam Name: AP2 domain Pfam Description: AP2 domain
  misc_feature (19)..(363): Homolog of NCBI NO: 18394319 NR Description: ovule development protein, putative [Arabidopsis >gi|15028185|gb|AAK76589.1| unknown protein [Arabidopsis >gi|22136940|gb|AAM91814.1| unknown protein [Arabidopsis
  misc_feature (29)..(363): Homolog of NCBI NO: 25518475 NR Description: hypothetical protein T24D18.16 - Arabidopsis >gi|6587812|gb|AAF18503.1|AC010924_16 Similar to gb|U44028 factor CKC from Arabidopsis thaliana and contains two PF|00847
  misc_feature (29)..(260): Homolog of NCBI NO: 34221733 NR Description: putative AP2 domain transcription factor
  misc_feature (263)..(361): Homolog of NCBI NO: 34221733 NR Description: putative AP2 domain transcription factor
  misc_feature (29)..(287): Homolog of NCBI NO: 15219975 NR Description: ovule development protein, putative [Arabidopsis
  misc_feature (29)..(209): Homolog of NCBI NO: 26449695 NR Description: unknown protein [Arabidopsis thaliana]
  misc_feature (72)..(286): Homolog of NCBI NO: 21069053 NR Description: AP2/EREBP transcription factor BABY BOOM2
  misc_feature (72)..(281): Homolog of NCBI NO: 21069057 NR Description: BABY BOOM [Arabidopsis thaliana]
  misc_feature (72)..(286): Homolog of NCBI NO: 21069051 NR Description: AP2/EREBP transcription factor BABY BOOM1 napus] >gi|21069055|gb|AAM33802.1| AP2/EREBP transcription factor
  misc_feature (13)..(262): Homolog of NCBI NO: 15218529 NR Description: ovule development protein, putative [Arabidopsis
SINFSSLLFSSSSSSSSFMFIAVEVSPVMEDITRQSKKTSVENETGDDQSATSVVLKAKRKRRSQPRDAPPQRSSVHRGVTRHRWTGRYEAHLWDKNSWNETQTKKGRQVYLGAYDEEDAAARAYDLAALKYWGRDTILNFPLCNYEEDIKEMESQSKEEYIGSLRRKSSGFSRGVSKYRGVAKHHHNGRWEARIGRVFGNKYLYLGTYATQEEAAIAYDIAAIEYRGLNAVTNFDISRYLKLPVPENPIDTANNLLESPHSDLSPFIKPNHESDLSQSQSSSEDNDDRKTKLLKSSPLVAEEVIGPSTPPEIAPPRRSFPEDIQTYFGCQNSGKLTAEEDDVIFGDLDSFLTPDFYSELNDC

SEQ ID NO: 106597 - protein, 345 aa, Arabidopsis thaliana
  peptide (1)..(345): Ceres Seq. ID no. 13620024
  misc_feature (56)..(129): Pfam Name: AP2 domain Pfam Description: AP2 domain
  misc_feature (1)..(345): Homolog of NCBI NO: 18394319 NR Description: ovule development protein, putative [Arabidopsis >gi|15028185|gb|AAK76589.1| unknown protein [Arabidopsis >gi|22136940|gb|AAM91814.1| unknown protein [Arabidopsis
  misc_feature (11)..(345): Homolog of NCBI NO: 25518475 NR Description: hypothetical protein T24D18.16 - Arabidopsis >gi|6587812|gb|AAF18503.1|AC010924_16 Similar to gb|U44028 factor CKC from Arabidopsis thaliana and contains two PF|00847
  misc_feature (11)..(242): Homolog of NCBI NO: 34221733 NR Description: putative AP2 domain transcription factor
  misc_feature (245)..(343): Homolog of NCBI NO: 34221733 NR Description: putative AP2 domain transcription factor
  misc_feature (11)..(269): Homolog of NCBI NO: 15219975 NR Description: ovule development protein, putative [Arabidopsis
  misc_feature (11)..(191): Homolog of NCBI NO: 26449695 NR Description: unknown protein [Arabidopsis thaliana]
  misc_feature (54)..(268): Homolog of NCBI NO: 21069053 NR Description: AP2/EREBP transcription factor BABY BOOM2
  misc_feature (54)..(263): Homolog of NCBI NO: 21069057 NR Description: BABY BOOM [Arabidopsis thaliana]
  misc_feature (54)..(268): Homolog of NCBI NO: 21069051 NR Description: AP2/EREBP transcription factor BABY BOOM1 napus] >gi|21069055|gb|AAM33802.1| AP2/EREBP transcription factor
  misc_feature (1)..(244): Homolog of NCBI NO: 15218529 NR Description: ovule development protein, putative [Arabidopsis
MFIAVEVSPVMEDITRQSKKTSVENETGDDQSATSVVLKAKRKRRSQPRDAPPQRSSVHRGVTRHRWTGRYEAHLWDKNSWNETQTKKGRQVYLGAYDEEDAAARAYDLAALKYWGRDTILNFPLCNYEEDIKEMESQSKEEYIGSLRRKSSGFSRGVSKYRGVAKHHHNGRWEARIGRVFGNKYLYLGTYATQEEAAIAYDIAAIEYRGLNAVTNFDISRYLKLPVPENPIDTANNLLESPHSDLSPFIKPNHESDLSQSQSSSEDNDDRKTKLLKSSPLVAEEVIGPSTPPEIAPPRRSFPEDIQTYFGCQNSGKLTAEEDDVIFGDLDSFLTPDFYSELNDC

SEQ ID NO: 106598 - protein, 335 aa, Arabidopsis thaliana; identical to SEQ ID NO: 42965
  peptide (1)..(335): Ceres Seq. ID no. 13620025
  misc_feature (46)..(119): Pfam Name: AP2 domain Pfam Description: AP2 domain
  misc_feature (1)..(335): Homolog of NCBI NO: 18394319 NR Description: ovule development protein, putative [Arabidopsis >gi|15028185|gb|AAK76589.1| unknown protein [Arabidopsis >gi|22136940|gb|AAM91814.1| unknown protein [Arabidopsis
  misc_feature (1)..(335): Homolog of NCBI NO: 25518475 NR Description: hypothetical protein T24D18.16 - Arabidopsis >gi|6587812|gb|AAF18503.1|AC010924_16 Similar to gb|U44028 factor CKC from Arabidopsis thaliana and contains two PF|00847
  misc_feature (1)..(232): Homolog of NCBI NO: 34221733 NR Description: putative AP2 domain transcription factor
  misc_feature (235)..(333): Homolog of NCBI NO: 34221733 NR Description: putative AP2 domain transcription factor
  misc_feature (1)..(259): Homolog of NCBI NO: 15219975 NR Description: ovule development protein, putative [Arabidopsis
  misc_feature (1)..(181): Homolog of NCBI NO: 26449695 NR Description: unknown protein [Arabidopsis thaliana]
  misc_feature (44)..(258): Homolog of NCBI NO: 21069053 NR Description: AP2/EREBP transcription factor BABY BOOM2
  misc_feature (44)..(253): Homolog of NCBI NO: 21069057 NR Description: BABY BOOM [Arabidopsis thaliana]
  misc_feature (44)..(258): Homolog of NCBI NO: 21069051 NR Description: AP2/EREBP transcription factor BABY BOOM1 napus] >gi|21069055|gb|AAM33802.1| AP2/EREBP transcription factor
  misc_feature (1)..(234): Homolog of NCBI NO: 15218529 NR Description: ovule development protein, putative [Arabidopsis

SEQ ID NO: 106599 - DNA, 993 bp, Arabidopsis thaliana
  misc_feature (1)..(993): Ceres Seq. ID no. 13620044
  misc_feature: MA Experiment ID: 20000184 Result: Down-regulated in Transcription
  misc_feature: MA Experiment 20000184 PARAMETER Experiment Name: At_Shoots__P Parameter: Age (day) Value: 7
  misc_feature: MA Experiment 20000184 PARAMETER Experiment Name: At_Shoots__P Parameter: Tissue Value: Shoots vs. Whole Plant
atttttcggatcggaccaattcgactaatcggttccggtttctttcccggggcaaggtagagctagagatttcgaagaagaaacgaaagggagagagagagatagacaagttccgcgatgaacgaaggctcgagcgaagaagtaacgaggacggtaatggaagagaaaccagaacagaaacaaagaggatctctggagaaaggaagatcgtgcaaaggctatttatattactcttccactctcaaatccaagtctaagaaccctcgctgcgtcggaatccctcgtactctccgtcaagttcctgattatgttgttggacaatctgaagctgaagcttctaaagaaggaaggaccttagctgatttttactatggatgtttgggttattccgtctacatgactgataaagactcatctgccattaagcaacatacaaagactcaacttcccgtttgtgtcggtcttgagatattagcagatagaagagcagcttctggcaatacttcatctgttccagcccgtgtccaaaatagaaaagattctcgggaggtgcctgtgcctcagcaccagaacaataaaccagcctctgccactgccactgccacaaacacagaaaacggcttcttaaccaggttcacaagaaacgcaaacctggttgcagcaggggtgatgaagaacatgaagagagttggtaactatgtgaaagaaactgtggatgattccttggacccatatcgcaagcgaccaaaataaagaaactttttacattagatgtggagacaacaaacccaaaaaaaatgaccgacagacgacaggatatgaaatcttatttgacacttttttggattctcttgaatcatcaaaataataaaatcaacaaaaaaaatggctgtatgatttgtttaagcaggccatgtcccaaagtaatatgtacaccttcctcagttctggtttactgataatattcatatcccaatgaggttcacttttatt

SEQ ID NO: 106600 - protein, 211 aa, Arabidopsis thaliana
  peptide (1)..(211): Ceres Seq. ID no. 13620045
  misc_feature (1)..(211): Homolog of NCBI NO: 15230397 NR Description: expressed protein [Arabidopsis thaliana]
MNEGSSEEVTRTVMEEKPEQKQRGSLEKGRSCKGYLYYSSTLKSKSKNPRCVGIPRTLRQVPDYVVGQSEAEASKEGRTLADFYYGCLGYSVYMTDKDSSAIKQHTKTQLPVCVGLEILADRRAASGNTSSVPARVQNRKDSREVPVPQHQNNKPASATATATNTENGFLTRFTRNANLVAAGVMKNMKRVGNYVKETVDDSLDPYRKRPK

SEQ ID NO: 106601 - protein, 198 aa, Arabidopsis thaliana
  peptide (1)..(198): Ceres Seq. ID no. 13620046
  misc_feature (1)..(198): Homolog of NCBI NO: 15230397 NR Description: expressed protein [Arabidopsis thaliana]
MEEKPEQKQRGSLEKGRSCKGYLYYSSTLKSKSKNPRCVGIPRTLRQVPDYVVGQSEAEASKEGRTLADFYYGCLGYSVYMTDKDSSAIKQHTKTQLPVCVGLEILADRRAASGNTSSVPARVQNRKDSREVPVPQHQNNKPASATATATNTENGFLTRFTRNANLVAAGVMKNMKRVGNYVKETVDDSLDPYRKRPK

SEQ ID NO: 106602 - protein, 118 aa, Arabidopsis thaliana
  peptide (1)..(118): Ceres Seq. ID no. 13620047
  misc_feature (1)..(118): Homolog of NCBI NO: 15230397 NR Description: expressed protein [Arabidopsis thaliana]
MTDKDSSAIKQHTKTQLPVCVGLEILADRRAASGNTSSVPARVQNRKDSREVPVPQHQNNKPASATATATNTENGFLTRFTRNANLVAAGVMKNMKRVGNYVKETVDDSLDPYRKRPK

SEQ ID NO: 106603 - DNA, 1829 bp, Arabidopsis thaliana
  misc_feature (1)..(1829): Ceres Seq. ID no. 13620048
  misc_feature: MA Experiment ID: 20000227 Result: Up-regulated in Transcription
  misc_feature: MA Experiment 20000227 PARAMETER Experiment Name: At_Root-Tips-vs-Tops_P Parameter: Tissue Value: Root Tips vs. Root Tops
  misc_feature: MA Experiment ID: 20000439 Result: Up-regulated in Transcription
  misc_feature: MA Experiment 20000439 PARAMETER Experiment Name: At_Roots__P Parameter: Age (day) Value: 14 vs. 21
  misc_feature: MA Experiment 20000439 PARAMETER Experiment Name: At_Roots__P Parameter: Organism Value: A. thaliana
  misc_feature: MA Experiment 20000439 PARAMETER Experiment Name: At_Roots__P Parameter: Tissue Value: Roots vs. Whole Plant
ataacactcaaacacaagtcaaagtacctcctgcttccacttgttctctgccatggctaattcagactctggtgacaaagaagcgcatcgctctagcaagcatggtggctggatcactttaccgttcatgctcgttacattgttaggcatgtcgataacttattttggatgggtaatgaacttgatcgtcttcttgatcgaggaattcaacatcaagagcatcgcagctgttcagatttcaaatattgtcaatggagttgtcaacatgttgcctgttgtcgcagccatcctagccgattccttttttgggaacattcctgtcatctcagcctccgctttcatttctctaactggaatatcgctcttgactcttattgcatctttggactatttgagacctagaccgtgtgaaacgggatcaattttatgccaatcaccatcaaaactacaacttgggatcttgtatgcagccttagctctagtgatcactggaacagctgggacgcggttcatcttggcatccgcaggtgcaaaccaatataagaaacctaaagaacaaggaaggttcttcaactggtactttttcacactatatggtggagcgattactggcacgacagcaattgtatatgcacaggacaatgctagctggaagcttggattcggtctctgcgtcgctgctaacttgatcagtttcatcattttcgtcgctgggaagagactctacgagcatgaccaacctttgggaagtccttatacaagtctagttcgcgttttagtcgctgctacaatgaaacgaaaggctgtgatttcatacaaagacgaagactatcatcaccgcgagctcgaaaaagagaccaagacttatgttgcaatgccctccaagagcttcaggttcttgaaccgtgcagcattgaagacagaaggagactcaaataataacatgtggaggctatgctctgttcaggaagtagaagatttcaaagccgttctccgacttgtccctctctggacatctgtcatgttcctcagcgctcccctagcggtgcaaatgagcatgactgtcctccaagctatggtcatggaccgtaaacttggcccacacttcaaagtctctgctgggtctatgcaagtcatagcactcgtctctggatgcgtctttatcatacttaacaactggactacctatcccatgtatcagaagctaatccgcaaaccgctgacaccgctacaaaaagtcgggatcggccacgttttgacaatcttaagcatggcgatatcagccgttgttgaagcaaagaggctgaaaacagttgaaaatagccatctcatgtcagtgctatggctggttcctgctctcgtgattaatggaataggtgaggcctttcattttccagcaaatattgcaatattctatggagaattccctgagtctctaaggaacacagcgacttcattgacctcggtggtgatgggaatctctttctatctgagcacagctcttatcgatgtgatccagaggaccaccaagtggttaccaaatgacataaaccacggaagggttgacaatgtttacttggtattagtcattataggagtctctaatttcggctacttccttgtctgctcttggttttacaaatacagaaacctcaagaatgatgatcatgaacaagatcttaaagatgttacaaactaggacactaacgtgttctgtcctcgttttctctatattgtagttgtgtcttcatgcaactaacttatgtgctacatgcaaactcactgtttgccgtttgtgtttacttttaccaataaatgttatttgtacc

SEQ ID NO: 106604 - protein, 548 aa, Arabidopsis thaliana
  peptide (1)..(548): Ceres Seq. ID no. 13620049
  misc_feature (88)..(474): Pfam Name: POT family Pfam Description: POT family
  misc_feature (1)..(548): Homolog of NCBI NO: 15231217 NR Description: transporter protein -related [Arabidopsis
  misc_feature (1)..(548): Homolog of NCBI NO: 26449486 NR Description: putative transporter protein [Arabidopsis
  misc_feature (1)..(546): Homolog of NCBI NO: 30692629 NR Description: transporter protein -related [Arabidopsis
  misc_feature (1)..(546): Homolog of NCBI NO: 11358696 NR Description: probable transporter protein - Arabidopsis >gi|7019637|emb|CAB75784.1| putative transporter protein
  misc_feature (1)..(547): Homolog of NCBI NO: 15231215 NR Description: transporter protein -related [Arabidopsis
  misc_feature (1)..(547): Homolog of NCBI NO: 26450397 NR Description: putative transporter protein [Arabidopsis
  misc_feature (6)..(548): Homolog of NCBI NO: 15231221 NR Description: transporter protein -related [Arabidopsis
  misc_feature (14)..(432): Homolog of NCBI NO: 15231216 NR Description: transporter protein -related [Arabidopsis
  misc_feature (469)..(547): Homolog of NCBI NO: 15231216 NR Description: transporter protein -related [Arabidopsis
  misc_feature (1)..(541): Homolog of NCBI NO: 15231199 NR Description: hypothetical protein [Arabidopsis thaliana]
MANSDSGDKEAHRSSKHGGWITLPFMLVTLLGMSITYFGWVMNLIVFLIEEFNIKSIAAVQISNIVNGVVNMLPVVAAILADSFFGNIPVISASAFISLTGISLLTLIASLDYLRPRPCETGSILCQSPSKLQLGILYAALALVITGTAGTRFILASAGANQYKKPKEQGRFFNWYFFTLYGGAITGTTAIVYAQDNASWKLGFGLCVAANLISFIIFVAGKRLYEHDQPLGSPYTSLVRVLVAATMKRKAVISYKDEDYHHRELEKETKTYVAMPSKSFRFLNRAALKTEGDSNNNMWRLCSVQEVEDFKAVLRLVPLWTSVMFLSAPLAVQMSMTVLQAMVMDRKLGPHFKVSAGSMQVIALVSGCVFIILNNWTTYPMYQKLIRKPLTPLQKVGIGHVLTILSMAISAVVEAKRLKTVENSHLMSVLWLVPALVINGIGEAFHFPANIAIFYGEFPESLRNTATSLTSVVMGISFYLSTALIDVIQRTTKWLPNDINHGRVDNVYLVLVIIGVSNFGYFLVCSWFYKYRNLKNDDHEQDLKDVTN

SEQ ID NO: 106605 - protein, 523 aa, Arabidopsis thaliana
  peptide (1)..(523): Ceres Seq. ID no. 13620050
  misc_feature (63)..(449): Pfam Name: POT family Pfam Description: POT family
  misc_feature (1)..(523): Homolog of NCBI NO: 15231217 NR Description: transporter protein -related [Arabidopsis
  misc_feature (1)..(523): Homolog of NCBI NO: 26449486 NR Description: putative transporter protein [Arabidopsis
  misc_feature (1)..(521): Homolog of NCBI NO: 30692629 NR Description: transporter protein -related [Arabidopsis
  misc_feature (1)..(521): Homolog of NCBI NO: 11358696 NR Description: probable transporter protein - Arabidopsis >gi|7019637|emb|CAB75784.1| putative transporter protein
  misc_feature (1)..(522): Homolog of NCBI NO: 15231215 NR Description: transporter protein -related [Arabidopsis
  misc_feature (1)..(522): Homolog of NCBI NO: 26450397 NR Description: putative transporter protein [Arabidopsis
  misc_feature (1)..(523): Homolog of NCBI NO: 15231221 NR Description: transporter protein -related [Arabidopsis
  misc_feature (1)..(407): Homolog of NCBI NO: 15231216 NR Description: transporter protein -related [Arabidopsis
  misc_feature (444)..(522): Homolog of NCBI NO: 15231216 NR Description: transporter protein -related [Arabidopsis
  misc_feature (1)..(516): Homolog of NCBI NO: 15231199 NR Description: hypothetical protein [Arabidopsis thaliana]
MLVTLLGMSITYFGWVMNLIVFLIEEFNIKSIAAVQISNIVNGVVNMLPVVAAILADSFFGNIPVISASAFISLTGISLLTLIASLDYLRPRPCETGSILCQSPSKLQLGILYAALALVITGTAGTRFILASAGANQYKKPKEQGRFFNWYFFTLYGGAITGTTAIVYAQDNASWKLGFGLCVAANLISFIIFVAGKRLYEHDQPLGSPYTSLVRVLVAATMKRKAVISYKDEDYHHRELEKETKTYVAMPSKSFRFLNRAALKTEGDSNNNMWRLCSVQEVEDFKAVLRLVPLWTSVMFLSAPLAVQMSMTVLQAMVMDRKLGPHFKVSAGSMQVIALVSGCVFIILNNWTTYPMYQKLIRKPLTPLQKVGIGHVLTILSMAISAVVEAKRLKTVENSHLMSVLWLVPALVINGIGEAFHFPANIAIFYGEFPESLRNTATSLTSVVMGISFYLSTALIDVIQRTTKWLPNDINHGRVDNVYLVLVIIGVSNFGYFLVCSWFYKYRNLKNDDHEQDLKDVTN

SEQ ID NO: 106606 - protein, 516 aa, Arabidopsis thaliana
  peptide (1)..(516): Ceres Seq. ID no. 13620051
  misc_feature (56)..(442): Pfam Name: POT family Pfam Description: POT family
  misc_feature (1)..(516): Homolog of NCBI NO: 15231217 NR Description: transporter protein -related [Arabidopsis
  misc_feature (1)..(516): Homolog of NCBI NO: 26449486 NR Description: putative transporter protein [Arabidopsis
  misc_feature (1)..(514): Homolog of NCBI NO: 30692629 NR Description: transporter protein -related [Arabidopsis
  misc_feature (1)..(514): Homolog of NCBI NO: 11358696 NR Description: probable transporter protein - Arabidopsis >gi|7019637|emb|CAB75784.1| putative transporter protein
  misc_feature (1)..(515): Homolog of NCBI NO: 15231215 NR Description: transporter protein -related [Arabidopsis
  misc_feature (1)..(515): Homolog of NCBI NO: 26450397 NR Description: putative transporter protein [Arabidopsis
  misc_feature (1)..(516): Homolog of NCBI NO: 15231221 NR Description: transporter protein -related [Arabidopsis
  misc_feature (1)..(400): Homolog of NCBI NO: 15231216 NR Description: transporter protein -related [Arabidopsis
  misc_feature (437)..(515): Homolog of NCBI NO: 15231216 NR Description: transporter protein -related [Arabidopsis
  misc_feature (1)..(509): Homolog of NCBI NO: 15231199 NR Description: hypothetical protein [Arabidopsis thaliana]
MSITYFGWVMNLIVFLIEEFNIKSIAAVQISNIVNGVVNMLPVVAAILADSFFGNIPVISASAFISLTGISLLTLIASLDYLRPRPCETGSILCQSPSKLQLGILYAALALVITGTAGTRFILASAGANQYKKPKEQGRFFNWYFFTLYGGAITGTTAIVYAQDNASWKLGFGLCVAANLISFIIFVAGKRLYEHDQPLGSPYTSLVRVLVAATMKRKAVISYKDEDYHHRELEKETKTYVAMPSKSFRFLNRAALKTEGDSNNNMWRLCSVQEVEDFKAVLRLVPLWTSVMFLSAPLAVQMSMTVLQAMVMDRKLGPHFKVSAGSMQVIALVSGCVFIILNNWTTYPMYQKLIRKPLTPLQKVGIGHVLTILSMAISAVVEAKRLKTVENSHLMSVLWLVPALVINGIGEAFHFPANIAIFYGEFPESLRNTATSLTSVVMGISFYLSTALIDVIQRTTKWLPNDINHGRVDNVYLVLVIIGVSNFGYFLVCSWFYKYRNLKNDDHEQDLKDVTN

SEQ ID NO: 106607 - DNA, 771 bp, Arabidopsis thaliana
  misc_feature (1)..(771): Ceres Seq. ID no. 13620055
  misc_feature: MA Experiment ID: 20000185 Result: Up-regulated in Transcription
  misc_feature: MA Experiment 20000185 PARAMETER Experiment Name: At_Roots__P Parameter: Age (day) Value: 7 vs. 21
  misc_feature: MA Experiment 20000185 PARAMETER Experiment Name: At_Roots__P Parameter: Organism Value: A. thaliana
  misc_feature: MA Experiment 20000185 PARAMETER Experiment Name: At_Roots__P Parameter: Tissue Value: Roots vs. Whole Plant
  misc_feature: MA Experiment ID: 20000227 Result: Down-regulated in Transcription
  misc_feature: MA Experiment 20000227 PARAMETER Experiment Name: At_Root-Tips-vs-Tops_P Parameter: Tissue Value: Root Tips vs. Root Tops
  misc_feature: MA Experiment ID: 20000264 Result: Down-regulated in Transcription
  misc_feature: MA Experiment 20000264 PARAMETER Experiment Name: At_Open_Flower_P Parameter: Age (day) Value: 21
  misc_feature: MA Experiment 20000264 PARAMETER Experiment Name: At_Open_Flower_P Parameter: Plant Line Value: WS
  misc_feature: MA Experiment 20000264 PARAMETER Experiment Name: At_Open_Flower_P Parameter: Tissue Value: Open Flower vs. Whole Plant
  misc_feature: MA Experiment ID: 20000265 Result: Down-regulated in Transcription
  misc_feature: MA Experiment 20000265 PARAMETER Experiment Name: At_Open_Flower_P Parameter: Age (day) Value: 21
  misc_feature: MA Experiment 20000265 PARAMETER Experiment Name: At_Open_Flower_P Parameter: Plant Line Value: WS
  misc_feature: MA Experiment 20000265 PARAMETER Experiment Name: At_Open_Flower_P Parameter: Tissue Value: Closed Flower vs. Whole Plant
  misc_feature: MA Experiment ID: 20000286 Result: Down-regulated in Transcription
  misc_feature: MA Experiment 20000286 PARAMETER Experiment Name: At_Open_Flower_P Parameter: Age (day) Value: 21
  misc_feature: MA Experiment 20000286 PARAMETER Experiment Name: At_Open_Flower_P Parameter: Plant Line Value: WS
  misc_feature: MA Experiment 20000286 PARAMETER Experiment Name: At_Open_Flower_P Parameter: Tissue Value: Half Open vs. Whole Plant
  misc_feature: MA Experiment ID: 20000436 Result: Down-regulated in Transcription
  misc_feature: MA Experiment 20000436 PARAMETER Experiment Name: At_Drought_P Parameter: Age (day) Value: 7
  misc_feature: MA Experiment 20000436 PARAMETER Experiment Name: At_Drought_P Parameter: Organism Value: A. thaliana
  misc_feature: MA Experiment 20000436 PARAMETER Experiment Name: At_Drought_P Parameter: Plant Line Value: WS
  misc_feature: MA Experiment 20000436 PARAMETER Experiment Name: At_Drought_P Parameter: Timepoint (hr) Value: 12
  misc_feature: MA Experiment 20000436 PARAMETER Experiment Name: At_Drought_P Parameter: Tissue Value: Whole Plant
  misc_feature: MA Experiment 20000436 PARAMETER Experiment Name: At_Drought_P Parameter: Treatment Value: Drought vs. No Drought
  misc_feature: MA Experiment ID: 20000437 Result: Down-regulated in Transcription
  misc_feature: MA Experiment 20000437 PARAMETER Experiment Name: At_Drought_P Parameter: Age (day) Value: 8
  misc_feature: MA Experiment 20000437 PARAMETER Experiment Name: At_Drought_P Parameter: Organism Value: A. thaliana
  misc_feature: MA Experiment 20000437 PARAMETER Experiment Name: At_Drought_P Parameter: Plant Line Value: WS
  misc_feature: MA Experiment 20000437 PARAMETER Experiment Name: At_Drought_P Parameter: Timepoint (hr) Value: 24
  misc_feature: MA Experiment 20000437 PARAMETER Experiment Name: At_Drought_P Parameter: Tissue Value: Whole Plant
  misc_feature: MA Experiment 20000437 PARAMETER Experiment Name: At_Drought_P Parameter: Treatment Value: Drought vs. No Drought
  misc_feature: MA Experiment ID: 20000439 Result: Up-regulated in Transcription
  misc_feature: MA Experiment 20000439 PARAMETER Experiment Name: At_Roots__P Parameter: Age (day) Value: 14 vs. 21
  misc_feature: MA Experiment 20000439 PARAMETER Experiment Name: At_Roots__P Parameter: Organism Value: A. thaliana
  misc_feature: MA Experiment 20000439 PARAMETER Experiment Name: At_Roots__P Parameter: Tissue Value: Roots vs. Whole Plant
  misc_feature: MA Experiment ID: 20000456 Result: Down-regulated in Transcription
  misc_feature: MA Experiment 20000456 PARAMETER Experiment Name: At_100uM_BA_P Parameter: Age (day) Value: 14
  misc_feature: MA Experiment 20000456 PARAMETER Experiment Name: At_100uM_BA_P Parameter: Organism Value: A. thaliana
  misc_feature: MA Experiment 20000456 PARAMETER Experiment Name: At_100uM_BA_P Parameter: Plant Line Value: WS
  misc_feature: MA Experiment 20000456 PARAMETER Experiment Name: At_100uM_BA_P Parameter: Timepoint (hr) Value: 6
  misc_feature: MA Experiment 20000456 PARAMETER Experiment Name: At_100uM_BA_P Parameter: Tissue Value: Aerial
  misc_feature: MA Experiment 20000456 PARAMETER Experiment Name: At_100uM_BA_P Parameter: Treatment Value: 100uM BA vs. No Treatment
  misc_feature: MA Experiment ID: 20000573 Result: Down-regulated in Transcription
  misc_feature: MA Experiment 20000573 PARAMETER Experiment Name: At_100uM_ABA_Mutants__P Parameter: Organism Value: A. thaliana
  misc_feature: MA Experiment 20000573 PARAMETER Experiment Name: At_100uM_ABA_Mutants__P Parameter: Plant Line Value: CS22 vs. Ler wt
  misc_feature: MA Experiment 20000573 PARAMETER Experiment Name: At_100uM_ABA_Mutants__P Parameter: Timepoint (hr) Value: N/A
  misc_feature: MA Experiment 20000573 PARAMETER Experiment Name: At_100uM_ABA_Mutants__P Parameter: Tissue Value: Whole Plant
  misc_feature: MA Experiment 20000573 PARAMETER Experiment Name: At_100uM_ABA_Mutants__P Parameter: Treatment Value: None
  misc_feature: MA Experiment ID: 20001247 Result: Down-regulated in Transcription
  misc_feature: MA Experiment 20001247 PARAMETER Experiment Name: At_Far-red-induction_P Parameter: Age (day) Value: 7
  misc_feature: MA Experiment 20001247 PARAMETER Experiment Name: At_Far-red-induction_P Parameter: Light Value: Far-red vs. White
  misc_feature: MA Experiment 20001247 PARAMETER Experiment Name: At_Far-red-induction_P Parameter: Organism Value: A. thaliana
  misc_feature: MA Experiment 20001247 PARAMETER Experiment Name: At_Far-red-induction_P Parameter: Plant Line Value: Columbia
  misc_feature: MA Experiment 20001247 PARAMETER Experiment Name: At_Far-red-induction_P Parameter: Timepoint (hr) Value: 1
  misc_feature: MA Experiment 20001247 PARAMETER Experiment Name: At_Far-red-induction_P Parameter: Tissue Value: Whole Plant
  misc_feature: MA Experiment ID: 20001248 Result: Down-regulated in Transcription
  misc_feature: MA Experiment 20001248 PARAMETER Experiment Name: At_Far-red-induction_P Parameter: Age (day) Value: 7
  misc_feature: MA Experiment 20001248 PARAMETER Experiment Name: At_Far-red-induction_P Parameter: Light Value: Far-red vs. White
  misc_feature: MA Experiment 20001248 PARAMETER Experiment Name: At_Far-red-induction_P Parameter: Organism Value: A. thaliana
  misc_feature: MA Experiment 20001248 PARAMETER Experiment Name: At_Far-red-induction_P Parameter: Plant Line Value: Columbia
  misc_feature: MA Experiment 20001248 PARAMETER Experiment Name: At_Far-red-induction_P Parameter: Timepoint (hr) Value: 4
  misc_feature: MA Experiment 20001248 PARAMETER Experiment Name: At_Far-red-induction_P Parameter: Tissue Value: Whole Plant
  misc_feature: MA Experiment ID: 20001450 Result: Down-regulated in Transcription
  misc_feature: MA Experiment 20001450 PARAMETER Experiment Name: At_Far-red-induction_P Parameter: Age (day) Value: 7
  misc_feature: MA Experiment 20001450 PARAMETER Experiment Name: At_Far-red-induction_P Parameter: Light Value: Far-red vs. White
  misc_feature: MA Experiment 20001450 PARAMETER Experiment Name: At_Far-red-induction_P Parameter: Organism Value: A. thaliana
  misc_feature: MA Experiment 20001450 PARAMETER Experiment Name: At_Far-red-induction_P Parameter: Plant Line Value: Columbia
  misc_feature: MA Experiment 20001450 PARAMETER Experiment Name: At_Far-red-induction_P Parameter: Timepoint (hr) Value: 8
  misc_feature: MA Experiment 20001450 PARAMETER Experiment Name: At_Far-red-induction_P Parameter: Tissue Value: Whole Plant
  misc_feature: MA Experiment ID: 20001451 Result: Down-regulated in Transcription
  misc_feature: MA Experiment 20001451 PARAMETER Experiment Name: At_Far-red-induction_P Parameter: Age (day) Value: 7
  misc_feature: MA Experiment 20001451 PARAMETER Experiment Name: At_Far-red-induction_P Parameter: Light Value: Far-red vs. White
  misc_feature: MA Experiment 20001451 PARAMETER Experiment Name: At_Far-red-induction_P Parameter: Organism Value: A. thaliana
  misc_feature: MA Experiment 20001451 PARAMETER Experiment Name: At_Far-red-induction_P Parameter: Plant Line Value: Columbia
  misc_feature: MA Experiment 20001451 PARAMETER Experiment Name: At_Far-red-induction_P Parameter: Timepoint (hr) Value: 24
  misc_feature: MA Experiment 20001451 PARAMETER Experiment Name: At_Far-red-induction_P Parameter: Tissue Value: Whole Plant
  misc_feature: MA Experiment ID: 20001560 Result: Up-regulated in Transcription
  misc_feature: MA Experiment 20001560 PARAMETER Experiment Name: At_Drought_Soil_Dry_P Parameter: Age (day) Value: 28
  misc_feature: MA Experiment 20001560 PARAMETER Experiment Name: At_Drought_Soil_Dry_P Parameter: Organism Value: A. thaliana
  misc_feature: MA Experiment 20001560 PARAMETER Experiment Name: At_Drought_Soil_Dry_P Parameter: Plant Line Value: WS
  misc_feature: MA Experiment 20001560 PARAMETER Experiment Name: At_Drought_Soil_Dry_P Parameter: Post Timepoint (hr) Value: None
  misc_feature: MA Experiment 20001560 PARAMETER Experiment Name: At_Drought_Soil_Dry_P Parameter: Post-Treatment Value: None
  misc_feature: MA Experiment 20001560 PARAMETER Experiment Name: At_Drought_Soil_Dry_P Parameter: Timepoint (day) Value: 14
  misc_feature: MA Experiment 20001560 PARAMETER Experiment Name: At_Drought_Soil_Dry_P Parameter: Treatment Value: Drought vs. No Drought
  misc_feature: MA Experiment ID: 20001755 Result: Up-regulated in Transcription
  misc_feature: MA Experiment 20001755 PARAMETER Experiment Name: At_50mM_NH4NO3_L-to-H_P Parameter: Timepoint (hr) Value: 2
  misc_feature: MA Experiment 20001755 PARAMETER Experiment Name: At_50mM_NH4NO3_L-to-H_P Parameter: Tissue Value: Leaf
  misc_feature: MA Experiment 20001755 PARAMETER Experiment Name: At_50mM_NH4NO3_L-to-H_P Parameter: Treatment Value: 50mM NH4NO3 vs 100mM Mannitol
  misc_feature: MA Experiment ID: 20001757 Result: Up-regulated in Transcription
  misc_feature: MA Experiment 20001757 PARAMETER Experiment Name: At_50mM_NH4NO3_L-to-H_P Parameter: Timepoint (hr) Value: 6
  misc_feature: MA Experiment 20001757 PARAMETER Experiment Name: At_50mM_NH4NO3_L-to-H_P Parameter: Tissue Value: Leaf
  misc_feature: MA Experiment 20001757 PARAMETER Experiment Name: At_50mM_NH4NO3_L-to-H_P Parameter: Treatment Value: 50mM NH4NO3 vs 100mM Mannitol
  misc_feature: MA Experiment ID: 20001905 Result: Down-regulated in Transcription
  misc_feature: MA Experiment 20001905 PARAMETER Experiment Name: At_Drought_Reproduction_P Parameter: Age (day) Value: 40
  misc_feature: MA Experiment 20001905 PARAMETER Experiment Name: At_Drought_Reproduction_P Parameter: Organism Value: A. thaliana
  misc_feature: MA Experiment 20001905 PARAMETER Experiment Name: At_Drought_Reproduction_P Parameter: Plant Line Value: WS
  misc_feature: MA Experiment 20001905 PARAMETER Experiment Name: At_Drought_Reproduction_P Parameter: Timepoint (day) Value: 10
  misc_feature: MA Experiment 20001905 PARAMETER Experiment Name: At_Drought_Reproduction_P Parameter: Tissue Value: Rosettes
  misc_feature: MA Experiment 20001905 PARAMETER Experiment Name: At_Drought_Reproduction_P Parameter: Treatment Value: Drought vs. No Drought
atgatgcaagaggagggaaaccgaaaaggtccatggacagaacaggaagacatacttctggtaaattttgttcacttatttggagatcgacgatgggattttatagcaaaagtatcaggtttgaacagaacaggaaagagttgcaggctaagatgggttaattacctacatcctggtctcaaacgtggcaagatgacgcctcaagaagagcgcctcgtccttgagcttcacgctaagtggggaaacaggtggtcgaaaatagcccgaaaattgccgggacgaacggataacgagataaagaactactggaggactcatatgaggaagaaagctcaagaaaagaagcgtcctgtttccccaacttcctcattttccaactgcagctcgtcatctgtgaccactaccaccaccaatactcaagatacatcgtgccactcgcgtaaatcttcaggggaagtgagcttttacgacactggaggttcccgatccactagagagatgaatcaagaaaacgaagacgtgtactcgttggatgatatatggagagagattgatcactcagcagtaaacataataaaaccggttaaagacatctactcagaacaaagccattgcttaagttacccaaatctagcttcaccatcatgggaaagctcattggattctatatggaacatggatgcagataaaagtaagatatcgtcttactttgcaaatgatcagtttcctttctgtttccaacacagtagatcaccatggtcgtcaggttaa

SEQ ID NO: 106608 - protein, 256 aa, Arabidopsis thaliana
  peptide (1)..(256): Ceres Seq. ID no. 13620056
  misc_feature (9)..(56): Pfam Name: Myb-like DNA-binding domain Pfam Description: Myb-like DNA-binding domain
  misc_feature (1)..(256): Homolog of NCBI NO: 15231343 NR Description: Myb family transcription factor [Arabidopsis
  misc_feature (1)..(179): Homolog of NCBI NO: 11358547 NR Description: myb-related transcription factor MYB59 [imported] Arabidopsis thaliana >gi|3941480|gb|AAC83616.1| putative
  misc_feature (1)..(174): Homolog of NCBI NO: 15238519 NR Description: myb family transcription factor [Arabidopsis
  misc_feature (40)..(174): Homolog of NCBI NO: 30697277 NR Description: myb family transcription factor [Arabidopsis
  misc_feature (8)..(217): Homolog of NCBI NO: 34906070 NR Description: putative Myb factor protein [Oryza sativa
  misc_feature (8)..(217): Homolog of NCBI NO: 11967859 NR Description: Myb factor protein [Oryza sativa (japonica
  misc_feature (2)..(123): Homolog of NCBI NO: 15230095 NR Description: myb family transcription factor [Arabidopsis
  misc_feature (2)..(112): Homolog of NCBI NO: 1732513 NR Description: snapdragon myb protein 305 homolog [Arabidopsis
  misc_feature (2)..(112): Homolog of NCBI NO: 15236297 NR Description: myb family transcription factor [Arabidopsis
  misc_feature (8)..(181): Homolog of NCBI NO: 40643882 NR Description: MYB8 protein [Gerbera hybrid cv. 'Terra Regina']
MMQEEGNRKGPWTEQEDILLVNFVHLFGDRRWDFIAKVSGLNRTGKSCRLRWVNYLHPGLKRGKMTPQEERLVLELHAKWGNRWSKIARKLPGRTDNEIKNYWRTHMRKKAQEKKRPVSPTSSFSNCSSSSVTTTTTNTQDTSCHSRKSSGEVSFYDTGGSRSTREMNQENEDVYSLDDIWREIDHSAVNIIKPVKDIYSEQSHCLSYPNLASPSWESSLDSIWNMDADKSKISSYFANDQFPFCFQHSRSPWSSG

SEQ ID NO: 106609 - protein, 255 aa, Arabidopsis thaliana
  peptide (1)..(255): Ceres Seq. ID no. 13620057
  misc_feature (8)..(55): Pfam Name: Myb-like DNA-binding domain Pfam Description: Myb-like DNA-binding domain
  misc_feature (1)..(255): Homolog of NCBI NO: 15231343 NR Description: Myb family transcription factor [Arabidopsis
  misc_feature (1)..(178): Homolog of NCBI NO: 11358547 NR Description: myb-related transcription factor MYB59 [imported] Arabidopsis thaliana >gi|3941480|gb|AAC83616.1| putative
  misc_feature (1)..(173): Homolog of NCBI NO: 15238519 NR Description: myb family transcription factor [Arabidopsis
  misc_feature (39)..(173): Homolog of NCBI NO: 30697277 NR Description: myb family transcription factor [Arabidopsis
  misc_feature (7)..(216): Homolog of NCBI NO: 34906070 NR Description: putative Myb factor protein [Oryza sativa
  misc_feature (7)..(216): Homolog of NCBI NO: 11967859 NR Description: Myb factor protein [Oryza sativa (japonica
  misc_feature (1)..(122): Homolog of NCBI NO: 15230095 NR Description: myb family transcription factor [Arabidopsis
  misc_feature (1)..(111): Homolog of NCBI NO: 1732513 NR Description: snapdragon myb protein 305 homolog [Arabidopsis
  misc_feature (1)..(111): Homolog of NCBI NO: 15236297 NR Description: myb family transcription factor [Arabidopsis
  misc_feature (7)..(180): Homolog of NCBI NO: 40643882 NR Description: MYB8 protein [Gerbera hybrid cv. 'Terra Regina']
MQEEGNRKGPWTEQEDILLVNFVHLFGDRRWDFIAKVSGLNRTGKSCRLRWVNYLHPGLKRGKMTPQEERLVLELHAKWGNRWSKIARKLPGRTDNEIKNYWRTHMRKKAQEKKRPVSPTSSFSNCSSSSVTTTTTNTQDTSCHSRKSSGEVSFYDTGGSRSTREMNQENEDVYSLDDIWREIDHSAVNIIKPVKDIYSEQSHCLSYPNLASPSWESSLDSIWNMDADKSKISSYFANDQFPFCFQHSRSPWSSG

SEQ ID NO: 106610 - protein, 192 aa, Arabidopsis thaliana
  peptide (1)..(192): Ceres Seq. ID no. 13620058
  misc_feature (1)..(192): Homolog of NCBI NO: 15231343 NR Description: Myb family transcription factor [Arabidopsis
  misc_feature (1)..(115): Homolog of NCBI NO: 11358547 NR Description: myb-related transcription factor MYB59 [imported] Arabidopsis thaliana >gi|3941480|gb|AAC83616.1| putative
  misc_feature (1)..(110): Homolog of NCBI NO: 15238519 NR Description: myb family transcription factor [Arabidopsis
  misc_feature (1)..(110): Homolog of NCBI NO: 30697277 NR Description: myb family transcription factor [Arabidopsis
  misc_feature (1)..(153): Homolog of NCBI NO: 34906070 NR Description: putative Myb factor protein [Oryza sativa
  misc_feature (1)..(153): Homolog of NCBI NO: 11967859 NR Description: Myb factor protein [Oryza sativa (japonica
  misc_feature (1)..(59): Homolog of NCBI NO: 15230095 NR Description: myb family transcription factor [Arabidopsis
  misc_feature (1)..(48): Homolog of NCBI NO: 1732513 NR Description: snapdragon myb protein 305 homolog [Arabidopsis
  misc_feature (1)..(48): Homolog of NCBI NO: 15236297 NR Description: myb family transcription factor [Arabidopsis
  misc_feature (1)..(117): Homolog of NCBI NO: 40643882 NR Description: MYB8 protein [Gerbera hybrid cv. 'Terra Regina']
MTPQEERLVLELHAKWGNRWSKIARKLPGRTDNEIKNYWRTHMRKKAQEKKRPVSPTSSFSNCSSSSVTTTTTNTQDTSCHSRKSSGEVSFYDTGGSRSTREMNQENEDVYSLDDIWREIDHSAVNIIKPVKDIYSEQSHCLSYPNLASPSWESSLDSIWNMDADKSKISSYFANDQFPFCFQHSRSPWSSG

SEQ ID NO: 106611 - DNA, 1453 bp, Arabidopsis thaliana
  misc_feature (1)..(1453): Ceres Seq. ID no. 13620067
  misc_feature: MA Experiment ID: 20000440 Result: Up-regulated in Transcription
  misc_feature: MA Experiment 20000440 PARAMETER Experiment Name: At_Closed-Flower__Sub_P Parameter: Tissue Value: Closed Flower vs. Whole Plant
aaatttttgaaacccaatttcagggcacgattccacaacctctttcttttcttctagatctacgtaaattcatcagctagagattgaaaaatggcggacggtgaagatattcagccgctcgtttgcgataacgggactggaatggtcaaggctggttttgcaggtgatgatgctcctagagctgtattcccaagtatcgttggccgtccacgtcacacgggagtgatggttggaatgggacaaaaggatgcatacgtcggagacgaggcacagtcgaaacgtggtatcttgactctcaagtatccaattgagcatggtattgtcaacaactgggatgatatggagaagatttggcatcacactttctacaatgagctgcgtgttgccccggaagagcatccggttttgctaaccgaagcgccgcttaatccgaaggctaaccgtgagaagatgacacagatcatgtttgaaacattcaacactcctgctatgtatgttgccattcaagctgttctctccctctatgctagtggccgtactactggtattgttttggactctggagatggtgtgagccacacggtaccaatctacgagggttatgcacttccacacgcaatcctgcgtcttgatcttgcaggtcgtgacctaaccgaccacctcatgaaaatcctgacagagcgtggttactcattcaccacaactgctgagcgtgagattgtcagagacatgaaggagaagctctcgtacattgccttggactatgagcaagagcttgagacttccaaaaccagctcatctgtggagaagagcttcgagctgccagacggtcaagtgataaccatcggggcagagcgtttccggtgtcctgaagttctgttccagccatccatgatcggaatggaaaatccgggaattcatgaaactacttacaactcaatcatgaaatgtgatgtggatatcaggaaggatctttatggaaacattgtgcttagtggtggcaccacaatgtttggcgggattggtgataggatgagtaaagaaatcaccgcgttggcgccgagcagtatgaagatcaaagtggttgctccaccggaaaggaagtacagtgtttggatcggtggctctatcttggcttctctcagtactttccagcagatgtggattgcgaaagccgagtatgatgaatctggaccgtcgatcgtccacaggaagtgcttctgatcaaaagtcaccaagtaaaacaagagcggtaaaaattttgatatcagtttttcaccctgaagccatttgctataattactcacaacttctctatttgtgttcttttattcttgtccctcattgttcattttaatctctcttttgcaacaaagcaacttaaaaaaacagatcagtcattaacagaatgttattattatatgtatacatattagtatacacccattatctt

SEQ ID NO: 106612 - protein, 377 aa, Arabidopsis thaliana
  peptide (1)..(377): Ceres Seq. ID no. 13620068
  misc_feature (1)..(377): Pfam Name: Actin Pfam Description: Actin
  misc_feature (1)..(377): Homolog of NCBI NO: 15231447 NR Description: actin 12 [Arabidopsis thaliana]
  misc_feature (1)..(377): Homolog of NCBI NO: 15238387 NR Description: actin 4 [Arabidopsis thaliana]
  misc_feature (1)..(377): Homolog of NCBI NO: 21593690 NR Description: actin 4 [Arabidopsis thaliana]
  misc_feature (1)..(377): Homolog of NCBI NO: 28393806 NR Description: putative actin 4 [Arabidopsis thaliana]
  misc_feature (1)..(377): Homolog of NCBI NO: 11276975 NR Description: actin [imported] - upland cotton
  misc_feature (1)..(377): Homolog of NCBI NO: 461465 NR Description: ACTIN >gi|322751|pir||S31933 actin - common
  misc_feature (1)..(377): Homolog of NCBI NO: 231496 NR Description: Actin 58 >gi|100421|pir||S20094 actin 58 - potato
  misc_feature (1)..(377): Homolog of NCBI NO: 231503 NR Description: ACTIN 97 >gi|100417|pir||S20098 actin 97 - potato
  misc_feature (1)..(377): Homolog of NCBI NO: 18409908 NR Description: actin (ACT3) [Arabidopsis thaliana] actin 3 [Arabidopsis thaliana] >gi|22002028|sp|P10671|ACT1_ARATH
  misc_feature (1)..(377): Homolog of NCBI NO: 28301928 NR Description: actin [Oryza sativa (japonica cultivar-group)]
MADGEDIQPLVCDNGTGMVKAGFAGDDAPRAVFPSIVGRPRHTGVMVGMGQKDAYVGDEAQSKRGILTLKYPIEHGIVNNWDDMEKIWHHTFYNELRVAPEEHPVLLTEAPLNPKANREKMTQIMFETFNTPAMYVAIQAVLSLYASGRTTGIVLDSGDGVSHTVPIYEGYALPHAILRLDLAGRDLTDHLMKILTERGYSFTTTAEREIVRDMKEKLSYIALDYEQELETSKTSSSVEKSFELPDGQVITIGAERFRCPEVLFQPSMIGMENPGIHETTYNSIMKCDVDIRKDLYGNIVLSGGTTMFGGIGDRMSKEITALAPSSMKIKVVAPPERKYSVWIGGSILASLSTFQQMWIAKAEYDESGPSIVHRKCF

SEQ ID NO: 106613 - protein, 360 aa, Arabidopsis thaliana
  peptide (1)..(360): Ceres Seq. ID no. 13620069
  misc_feature (1)..(360): Pfam Name: Actin Pfam Description: Actin
  misc_feature (1)..(360): Homolog of NCBI NO: 15231447 NR Description: actin 12 [Arabidopsis thaliana]
  misc_feature (1)..(360): Homolog of NCBI NO: 15238387 NR Description: actin 4 [Arabidopsis thaliana]
  misc_feature (1)..(360): Homolog of NCBI NO: 21593690 NR Description: actin 4 [Arabidopsis thaliana]
  misc_feature (1)..(360): Homolog of NCBI NO: 28393806 NR Description: putative actin 4 [Arabidopsis thaliana]
  misc_feature (1)..(360): Homolog of NCBI NO: 11276975 NR Description: actin [imported] - upland cotton
  misc_feature (1)..(360): Homolog of NCBI NO: 461465 NR Description: ACTIN >gi|322751|pir||S31933 actin - common
  misc_feature (1)..(360): Homolog of NCBI NO: 231496 NR Description: Actin 58 >gi|100421|pir||S20094 actin 58 - potato
  misc_feature (1)..(360): Homolog of NCBI NO: 231503 NR Description: ACTIN 97 >gi|100417|pir||S20098 actin 97 - potato
  misc_feature (1)..(360): Homolog of NCBI NO: 18409908 NR Description: actin (ACT3) [Arabidopsis thaliana] actin 3 [Arabidopsis thaliana] >gi|22002028|sp|P10671|ACT1_ARATH
  misc_feature (1)..(360): Homolog of NCBI NO: 28301928 NR Description: actin [Oryza sativa (japonica cultivar-group)]
MVKAGFAGDDAPRAVFPSIVGRPRHTGVMVGMGQKDAYVGDEAQSKRGILTLKYPIEHGIVNNWDDMEKIWHHTFYNELRVAPEEHPVLLTEAPLNPKANREKMTQIMFETFNTPAMYVAIQAVLSLYASGRTTGIVLDSGDGVSHTVPIYEGYALPHAILRLDLAGRDLTDHLMKILTERGYSFTTTAEREIVRDMKEKLSYIALDYEQELETSKTSSSVEKSFELPDGQVITIGAERFRCPEVLFQPSMIGMENPGIHETTYNSIMKCDVDIRKDLYGNIVLSGGTTMFGGIGDRMSKEITALAPSSMKIKVVAPPERKYSVWIGGSILASLSTFQQMWIAKAEYDESGPSIVHRKCF

SEQ ID NO: 106614 - protein, 332 aa, Arabidopsis thaliana
  peptide (1)..(332): Ceres Seq. ID no. 13620070
  misc_feature (1)..(332): Pfam Name: Actin Pfam Description: Actin
  misc_feature (1)..(332): Homolog of NCBI NO: 15231447 NR Description: actin 12 [Arabidopsis thaliana]
  misc_feature (1)..(332): Homolog of NCBI NO: 15238387 NR Description: actin 4 [Arabidopsis thaliana]
  misc_feature (1)..(332): Homolog of NCBI NO: 21593690 NR Description: actin 4 [Arabidopsis thaliana]
  misc_feature (1)..(332): Homolog of NCBI NO: 28393806 NR Description: putative actin 4 [Arabidopsis thaliana]
  misc_feature (1)..(332): Homolog of NCBI NO: 11276975 NR Description: actin [imported] - upland cotton
  misc_feature (1)..(332): Homolog of NCBI NO: 461465 NR Description: ACTIN >gi|322751|pir||S31933 actin - common
  misc_feature (1)..(332): Homolog of NCBI NO: 231496 NR Description: Actin 58 >gi|100421|pir||S20094 actin 58 - potato
  misc_feature (1)..(332): Homolog of NCBI NO: 231503 NR Description: ACTIN 97 >gi|100417|pir||S20098 actin 97 - potato
  misc_feature (1)..(332): Homolog of NCBI NO: 18409908 NR Description: actin (ACT3) [Arabidopsis thaliana] actin 3 [Arabidopsis thaliana] >gi|22002028|sp|P10671|ACT1_ARATH
  misc_feature (1)..(332): Homolog of NCBI NO: 28301928 NR Description: actin [Oryza sativa (japonica cultivar-group)]
MVGMGQKDAYVGDEAQSKRGILTLKYPIEHGIVNNWDDMEKIWHHTFYNELRVAPEEHPVLLTEAPLNPKANREKMTQIMFETFNTPAMYVAIQAVLSLYASGRTTGIVLDSGDGVSHTVPIYEGYALPHAILRLDLAGRDLTDHLMKILTERGYSFTTTAEREIVRDMKEKLSYIALDYEQELETSKTSSSVEKSFELPDGQVITIGAERFRCPEVLFQPSMIGMENPGIHETTYNSIMKCDVDIRKDLYGNIVLSGGTTMFGGIGDRMSKEITALAPSSMKIKVVAPPERKYSVWIGGSILASLSTFQQMWIAKAEYDESGPSIVHRKCF

SEQ ID NO: 106615 - DNA, 1628 bp, Arabidopsis thaliana
  misc_feature (1)..(1628): Ceres Seq. ID no. 13620071
  misc_feature: MA Experiment ID: 20000306 Result: Up-regulated in Transcription
  misc_feature: MA Experiment 20000306 PARAMETER Experiment Name: At_Germinating_Seeds_Sub_P Parameter: Age (hr) Value: 6 vs. 0
  misc_feature: MA Experiment 20000306 PARAMETER Experiment Name: At_Germinating_Seeds_Sub_P Parameter: Organism Value: A. thaliana
  misc_feature: MA Experiment 20000306 PARAMETER Experiment Name: At_Germinating_Seeds_Sub_P Parameter: Plant Line Value: WS
  misc_feature: MA Experiment 20000306 PARAMETER Experiment Name: At_Germinating_Seeds_Sub_P Parameter: Tissue Value: Germinating Seeds
  misc_feature: MA Experiment ID: 20000307 Result: Up-regulated in Transcription
  misc_feature: MA Experiment 20000307 PARAMETER Experiment Name: At_Germinating_Seeds_Sub_P Parameter: Age (hr) Value: 24 vs. 0
  misc_feature: MA Experiment 20000307 PARAMETER Experiment Name: At_Germinating_Seeds_Sub_P Parameter: Organism Value: A. thaliana
  misc_feature: MA Experiment 20000307 PARAMETER Experiment Name: At_Germinating_Seeds_Sub_P Parameter: Plant Line Value: WS
  misc_feature: MA Experiment 20000307 PARAMETER Experiment Name: At_Germinating_Seeds_Sub_P Parameter: Tissue Value: Germinating Seeds
  misc_feature: MA Experiment ID: 20000314 Result: Up-regulated in Transcription
  misc_feature: MA Experiment 20000314 PARAMETER Experiment Name: At_14day_Shoots-Roots_Sub_P Parameter: Age (day) Value: 14
  misc_feature: MA Experiment 20000314 PARAMETER Experiment Name: At_14day_Shoots-Roots_Sub_P Parameter: Organism Value: A. thaliana
  misc_feature: MA Experiment 20000314 PARAMETER Experiment Name: At_14day_Shoots-Roots_Sub_P Parameter: Plant Line Value: WS
  misc_feature: MA Experiment 20000314 PARAMETER Experiment Name: At_14day_Shoots-Roots_Sub_P Parameter: Tissue Value: Roots vs. Whole Plant
  misc_feature: MA Experiment ID: 20000315 Result: Down-regulated in Transcription
  misc_feature: MA Experiment 20000315 PARAMETER Experiment Name: At_14day_Shoots-Roots_Sub_P Parameter: Age (day) Value: 14
  misc_feature: MA Experiment 20000315 PARAMETER Experiment Name: At_14day_Shoots-Roots_Sub_P Parameter: Organism Value: A. thaliana
  misc_feature: MA Experiment 20000315 PARAMETER Experiment Name: At_14day_Shoots-Roots_Sub_P Parameter: Plant Line Value: WS
  misc_feature: MA Experiment 20000315 PARAMETER Experiment Name: At_14day_Shoots-Roots_Sub_P Parameter: Tissue Value: Shoots vs. Whole Plant
  misc_feature: MA Experiment ID: 20000347 Result: Up-regulated in Transcription
  misc_feature: MA Experiment 20000347 PARAMETER Experiment Name: At_2mM_SA_Sub_P Parameter: Age (day) Value: 14
  misc_feature: MA Experiment 20000347 PARAMETER Experiment Name: At_2mM_SA_Sub_P Parameter: Organism Value: A. thaliana
  misc_feature: MA Experiment 20000347 PARAMETER Experiment Name: At_2mM_SA_Sub_P Parameter: Plant Line Value: WS
  misc_feature: MA Experiment 20000347 PARAMETER Experiment Name: At_2mM_SA_Sub_P Parameter: Timepoint (hr) Value: 6
  misc_feature: MA Experiment 20000347 PARAMETER Experiment Name: At_2mM_SA_Sub_P Parameter: Tissue Value: Aerial
  misc_feature: MA Experiment 20000347 PARAMETER Experiment Name: At_2mM_SA_Sub_P Parameter: Treatment Value: 2mM SA vs. No Treatment
  misc_feature: MA Experiment ID: 20000349 Result: Up-regulated in Transcription
  misc_feature: MA Experiment 20000349 PARAMETER Experiment Name: At_100uM_ABA_Sub_P Parameter: Age (day) Value: 14
  misc_feature: MA Experiment 20000349 PARAMETER Experiment Name: At_100uM_ABA_Sub_P Parameter: Organism Value: A. thaliana
  misc_feature: MA Experiment 20000349 PARAMETER Experiment Name: At_100uM_ABA_Sub_P Parameter: Plant Line Value: WS
  misc_feature: MA Experiment 20000349 PARAMETER Experiment Name: At_100uM_ABA_Sub_P Parameter: Timepoint (hr) Value: 6
  misc_feature: MA Experiment 20000349 PARAMETER Experiment Name: At_100uM_ABA_Sub_P Parameter: Tissue Value: Aerial
  misc_feature: MA Experiment 20000349 PARAMETER Experiment Name: At_100uM_ABA_Sub_P Parameter: Treatment Value: 100uM ABA vs. No Treatment
  misc_feature: MA Experiment ID: 20000355 Result: Down-regulated in Transcription
  misc_feature: MA Experiment 20000355 PARAMETER Experiment Name: At_Siliques_Sub_P Parameter: Age (day) Value: 21
  misc_feature: MA Experiment 20000355 PARAMETER Experiment Name: At_Siliques_Sub_P Parameter: Organism Value: A. thaliana
  misc_feature: MA Experiment 20000355 PARAMETER Experiment Name: At_Siliques_Sub_P Parameter: Plant Line Value: WS
  misc_feature: MA Experiment 20000355 PARAMETER Experiment Name: At_Siliques_Sub_P Parameter: Tissue Value: Less Than 5mm Siliques vs. Whole Plant
  misc_feature: MA Experiment ID: 20000440 Result: Down-regulated in Transcription
  misc_feature: MA Experiment 20000440 PARAMETER Experiment Name: At_Closed-Flower__Sub_P Parameter: Tissue Value: Closed Flower vs. Whole Plant
attggcgtgcgattattcttgctttgaaaaatgaacagttgactatagaaaatggtctcatttggaagattgtgggattttagttattacttggatcacgtataggattcagagacaagagaagagaaaagaggagagaaatggagaaaagggtagagaagagaaggattgtgttagttccggttgctgcacaaggacatgtaaccccaatgatgcagcttgggaaagcccttcaatcaaagggcttcttaattactgttgctcagagacagttcaatcaaataggctcatcattgcaacactttcctggttttgactttgtcaccataccagaaagcttacctcagtctgaatctaagaaactaggaccagctgagtatcttatgaatctcaacaaaacaagcgaggcaagcttcaaggagtgtataagtcagttatcgatgcaacaaggcaatgatatagcatgtatcatctatgacaagcttatgtacttctgtgaagcagcagctaaggagtttaagattcctagtgttatcttcagcactagcagtgctacaattcaagtttgctactgtgttttaagtgaactcagtgccgagaagttcttgatcgacatgaaagatcctgaaaagcaagataaggtgttggaaggtttgcatcctttaaggtacaaagacctaccaacttcaggatttggaccattagagccacttttggagatgtgtagggaagtagttaacaaaagaacagcttccgctgttatcatcaacacggcgagctgtctagagagcttgtctctgtcatggctgcaacaagaacttggaattccagtgtatccattaggccctcttcacattacagcttcatcgccgggacctagtttactgcaagaggacatgagctgcattgaatggctgaacaagcagaaaccaaggtcagtcatatacataagcttgggaaccaaagctcacatggagaccaaggagatgttagagatggcctggggattgttgaatagcaaccaacctttcttatgggtcatccgacctggctctgttgcaggcttcgagtggatagagttattaccagaggaagtcattaagatggtaacagaaagaggatacatagcgaaatgggcaccgcagatagaagtacttggacatcctgcagtgggaggattctggagccactgtggatggaactcaacactcgagagtattgtggaaggagtcccaatgatttgcaggcctttacaaggcgaacaaaagttaaatgcgatgtatatagaaagtgtttggaaaatagggattcaacttgaaggtgaagtggaaagggaaggtgtagagagagctgtgaagaggttgatcatagatgaagaaggtgcagccatgagggagagggctcttgatttaaaagagaagctcaatgcctcggtaagaagtggaggctcctcatacaacgcactggatgagcttgtcaagttcttgaatacagagtgaagatgcttaacttcatatattacaaaagaacttcgattataagaaaactccaatagaaatgtttacattctttggaatattaatttttgtcttccgttaaagttcataattatcaaaatttaaaacttg

SEQ ID NO: 106616 - protein, 452 aa, Arabidopsis thaliana
  peptide (1)..(452): Ceres Seq. ID no. 13620072
  misc_feature (9)..(447): Pfam Name: UDP-glucoronosyl and UDP-glucosyl transferase Pfam Description: UDP-glucoronosyl and UDP-glucosyl transferase
  misc_feature (1)..(452): Homolog of NCBI NO: 15232620 NR Description: glucuronosyl transferase-related protein
  misc_feature (1)..(452): Homolog of NCBI NO: 26449469 NR Description: putative glucuronosyl transferase [Arabidopsis
  misc_feature (1)..(449): Homolog of NCBI NO: 15232619 NR Description: UDP-glycosyltransferase family [Arabidopsis
  misc_feature (1)..(452): Homolog of NCBI NO: 15232623 NR Description: glycosyltransferase family [Arabidopsis thaliana]
  misc_feature (146)..(452): Homolog of NCBI NO: 15232598 NR Description: UDP-glycosyltransferase family [Arabidopsis
  misc_feature (1)..(180): Homolog of NCBI NO: 15232598 NR Description: UDP-glycosyltransferase family [Arabidopsis
  misc_feature (1)..(449): Homolog of NCBI NO: 30697251 NR Description: glycosyltransferase family [Arabidopsis thaliana]
  misc_feature (2)..(446): Homolog of NCBI NO: 15238467 NR Description: glycosyltransferase family [Arabidopsis thaliana]
  misc_feature (1)..(451): Homolog of NCBI NO: 11258169 NR Description: glucosyltransferase-like protein - Arabidopsis
  misc_feature (1)..(451): Homolog of NCBI NO: 18408251 NR Description: glucosyltransferase-related protein [Arabidopsis >gi|15081809|gb|AAK82559.1| AT3g46660/F12A12_180 [Arabidopsis
MEKRVEKRRIVLVPVAAQGHVTPMMQLGKALQSKGFLITVAQRQFNQIGSSLQHFPGFDFVTIPESLPQSESKKLGPAEYLMNLNKTSEASFKECISQLSMQQGNDIACIIYDKLMYFCEAAAKEFKIPSVIFSTSSATIQVCYCVLSELSAEKFLIDMKDPEKQDKVLEGLHPLRYKDLPTSGFGPLEPLLEMCREVVNKRTASAVIINTASCLESLSLSWLQQELGIPVYPLGPLHITASSPGPSLLQEDMSCIEWLNKQKPRSVIYISLGTKAHMETKEMLEMAWGLLNSNQPFLWVIRPGSVAGFEWIELLPEEVIKMVTERGYIAKWAPQIEVLGHPAVGGFWSHCGWNSTLESIVEGVPMICRPLQGEQKLNAMYIESVWKIGIQLEGEVEREGVERAVKRLIIDEEGAAMRERALDLKEKLNASVRSGGSSYNALDELVKFLNTE

SEQ ID NO: 106617 - protein, 429 aa, Arabidopsis thaliana
  peptide (1)..(429): Ceres Seq. ID no. 13620073
  misc_feature (1)..(424): Pfam Name: UDP-glucoronosyl and UDP-glucosyl transferase Pfam Description: UDP-glucoronosyl and UDP-glucosyl transferase
  misc_feature (1)..(429): Homolog of NCBI NO: 15232620 NR Description: glucuronosyl transferase-related protein
  misc_feature (1)..(429): Homolog of NCBI NO: 26449469 NR Description: putative glucuronosyl transferase [Arabidopsis
  misc_feature (1)..(426): Homolog of NCBI NO: 15232619 NR Description: UDP-glycosyltransferase family [Arabidopsis
  misc_feature (1)..(429): Homolog of NCBI NO: 15232623 NR Description: glycosyltransferase family [Arabidopsis thaliana]
  misc_feature (123)..(429): Homolog of NCBI NO: 15232598 NR Description: UDP-glycosyltransferase family [Arabidopsis
  misc_feature (1)..(157): Homolog of NCBI NO: 15232598 NR Description: UDP-glycosyltransferase family [Arabidopsis
  misc_feature (1)..(426): Homolog of NCBI NO: 30697251 NR Description: glycosyltransferase family [Arabidopsis thaliana]
  misc_feature (1)..(423): Homolog of NCBI NO: 15238467 NR Description: glycosyltransferase family [Arabidopsis thaliana]
  misc_feature (1)..(428): Homolog of NCBI NO: 11258169 NR Description: glucosyltransferase-like protein - Arabidopsis
  misc_feature (1)..(428): Homolog of NCBI NO: 18408251 NR Description: glucosyltransferase-related protein [Arabidopsis >gi|15081809|gb|AAK82559.1| AT3g46660/F12A12_180 [Arabidopsis
MMQLGKALQSKGFLITVAQRQFNQIGSSLQHFPGFDFVTIPESLPQSESKKLGPAEYLMNLNKTSEASFKECISQLSMQQGNDIACIIYDKLMYFCEAAAKEFKIPSVIFSTSSATIQVCYCVLSELSAEKFLIDMKDPEKQDKVLEGLHPLRYKDLPTSGFGPLEPLLEMCREVVNKRTASAVIINTASCLESLSLSWLQQELGIPVYPLGPLHITASSPGPSLLQEDMSCIEWLNKQKPRSVIYISLGTKAHMETKEMLEMAWGLLNSNQPFLWVIRPGSVAGFEWIELLPEEVIKMVTERGYIAKWAPQIEVLGHPAVGGFWSHCGWNSTLESIVEGVPMICRPLQGEQKLNAMYIESVWKIGIQLEGEVEREGVERAVKRLIIDEEGAAMRERALDLKEKLNASVRSGGSSYNALDELVKFLNTE

SEQ ID NO: 106618 - protein, 428 aa, Arabidopsis thaliana
  peptide (1)..(428): Ceres Seq. ID no. 13620074
  misc_feature (1)..(423): Pfam Name: UDP-glucoronosyl and UDP-glucosyl transferase Pfam Description: UDP-glucoronosyl and UDP-glucosyl transferase
  misc_feature (1)..(428): Homolog of NCBI NO: 15232620 NR Description: glucuronosyl transferase-related protein
  misc_feature (1)..(428): Homolog of NCBI NO: 26449469 NR Description: putative glucuronosyl transferase [Arabidopsis
  misc_feature (1)..(425): Homolog of NCBI NO: 15232619 NR Description: UDP-glycosyltransferase family [Arabidopsis
  misc_feature (1)..(428): Homolog of NCBI NO: 15232623 NR Description: glycosyltransferase family [Arabidopsis thaliana]
  misc_feature (122)..(428): Homolog of NCBI NO: 15232598 NR Description: UDP-glycosyltransferase family [Arabidopsis
  misc_feature (1)..(156): Homolog of NCBI NO: 15232598 NR Description: UDP-glycosyltransferase family [Arabidopsis
  misc_feature (1)..(425): Homolog of NCBI NO: 30697251 NR Description: glycosyltransferase family [Arabidopsis thaliana]
  misc_feature (1)..(422): Homolog of NCBI NO: 15238467 NR Description: glycosyltransferase family [Arabidopsis thaliana]
  misc_feature (1)..(427): Homolog of NCBI NO: 11258169 NR Description: glucosyltransferase-like protein - Arabidopsis
  misc_feature (1)..(427): Homolog of NCBI NO: 18408251 NR Description: glucosyltransferase-related protein [Arabidopsis >gi|15081809|gb|AAK82559.1| AT3g46660/F12A12_180 [Arabidopsis
MQLGKALQSKGFLITVAQRQFNQIGSSLQHFPGFDFVTIPESLPQSESKKLGPAEYLMNLNKTSEASFKECISQLSMQQGNDIACIIYDKLMYFCEAAAKEFKIPSVIFSTSSATIQVCYCVLSELSAEKFLIDMKDPEKQDKVLEGLHPLRYKDLPTSGFGPLEPLLEMCREVVNKRTASAVIINTASCLESLSLSWLQQELGIPVYPLGPLHITASSPGPSLLQEDMSCIEWLNKQKPRSVIYISLGTKAHMETKEMLEMAWGLLNSNQPFLWVIRPGSVAGFEWIELLPEEVIKMVTERGYIAKWAPQIEVLGHPAVGGFWSHCGWNSTLESIVEGVPMICRPLQGEQKLNAMYIESVWKIGIQLEGEVEREGVERAVKRLIIDEEGAAMRERALDLKEKLNASVRSGGSSYNALDELVKFLNTE

SEQ ID NO: 106619 - DNA, 1681 bp, Arabidopsis thaliana
  misc_feature (1)..(1681): Ceres Seq. ID no. 13620090
  misc_feature: MA Experiment ID: 20000171 Result: Down-regulated in Transcription
  misc_feature: MA Experiment 20000171 PARAMETER Experiment Name: At_42deg_Heat_P Parameter: Age (day) Value: 14
  misc_feature: MA Experiment 20000171 PARAMETER Experiment Name: At_42deg_Heat_P Parameter: Organism Value: A. thaliana
  misc_feature: MA Experiment 20000171 PARAMETER Experiment Name: At_42deg_Heat_P Parameter: Plant Line Value: WS
  misc_feature: MA Experiment 20000171 PARAMETER Experiment Name: At_42deg_Heat_P Parameter: Temperature (deg C) Value: 42 vs. 22
  misc_feature: MA Experiment 20000171 PARAMETER Experiment Name: At_42deg_Heat_P Parameter: Timepoint (hr) Value: 1
  misc_feature: MA Experiment 20000171 PARAMETER Experiment Name: At_42deg_Heat_P Parameter: Tissue Value: Aerial
  misc_feature: MA Experiment ID: 20000173 Result: Down-regulated in Transcription
  misc_feature: MA Experiment 20000173 PARAMETER Experiment Name: At_42deg_Heat_P Parameter: Age (day) Value: 14
  misc_feature: MA Experiment 20000173 PARAMETER Experiment Name: At_42deg_Heat_P Parameter: Organism Value: A. thaliana
  misc_feature: MA Experiment 20000173 PARAMETER Experiment Name: At_42deg_Heat_P Parameter: Plant Line Value: WS
  misc_feature: MA Experiment 20000173 PARAMETER Experiment Name: At_42deg_Heat_P Parameter: Temperature (deg C) Value: 42 vs. 22
  misc_feature: MA Experiment 20000173 PARAMETER Experiment Name: At_42deg_Heat_P Parameter: Timepoint (hr) Value: 6
  misc_feature: MA Experiment 20000173 PARAMETER Experiment Name: At_42deg_Heat_P Parameter: Tissue Value: Aerial
  misc_feature: MA Experiment ID: 20000179 Result: Up-regulated in Transcription
  misc_feature: MA Experiment 20000179 PARAMETER Experiment Name: At_Germinating_Seeds_P Parameter: Age (hr) Value: 6 vs. 0
  misc_feature: MA Experiment 20000179 PARAMETER Experiment Name: At_Germinating_Seeds_P Parameter: Tissue Value: Germinating Seeds
  misc_feature: MA Experiment ID: 20000184 Result: Down-regulated in Transcription
  misc_feature: MA Experiment 20000184 PARAMETER Experiment Name: At_Shoots__P Parameter: Age (day) Value: 7
  misc_feature: MA Experiment 20000184 PARAMETER Experiment Name: At_Shoots__P Parameter: Tissue Value: Shoots vs. Whole Plant
  misc_feature: MA Experiment ID: 20000185 Result: Down-regulated in Transcription
  misc_feature: MA Experiment 20000185 PARAMETER Experiment Name: At_Roots__P Parameter: Age (day) Value: 7 vs. 21
  misc_feature: MA Experiment 20000185 PARAMETER Experiment Name: At_Roots__P Parameter: Organism Value: A. thaliana
  misc_feature: MA Experiment 20000185 PARAMETER Experiment Name: At_Roots__P Parameter: Tissue Value: Roots vs. Whole Plant
  misc_feature: MA Experiment ID: 20000213 Result: Down-regulated in Transcription
  misc_feature: MA Experiment 20000213 PARAMETER Experiment Name: At_4deg_Cold_P Parameter: Timepoint (hr) Value: 2
  misc_feature: MA Experiment ID: 20000234 Result: Down-regulated in Transcription
  misc_feature: MA Experiment 20000234 PARAMETER Experiment Name: At_Siliques_P Parameter: Age (day) Value: 21
  misc_feature: MA Experiment 20000234 PARAMETER Experiment Name: At_Siliques_P Parameter: Organism Value: A. thaliana
  misc_feature: MA Experiment 20000234 PARAMETER Experiment Name: At_Siliques_P Parameter: Plant Line Value: WS
  misc_feature: MA Experiment 20000234 PARAMETER Experiment Name: At_Siliques_P Parameter: Tissue Value: Less Than 5mm Siliques vs. Whole Plant
  misc_feature: MA Experiment ID: 20000264 Result: Down-regulated in Transcription
  misc_feature: MA Experiment 20000264 PARAMETER Experiment Name: At_Open_Flower_P Parameter: Age (day) Value: 21
  misc_feature: MA Experiment 20000264 PARAMETER Experiment Name: At_Open_Flower_P Parameter: Plant Line Value: WS
  misc_feature: MA Experiment 20000264 PARAMETER Experiment Name: At_Open_Flower_P Parameter: Tissue Value: Open Flower vs. Whole Plant
  misc_feature: MA Experiment ID: 20000265 Result: Down-regulated in Transcription
  misc_feature: MA Experiment 20000265 PARAMETER Experiment Name: At_Open_Flower_P Parameter: Age (day) Value: 21
  misc_feature: MA Experiment 20000265 PARAMETER Experiment Name: At_Open_Flower_P Parameter: Plant Line Value: WS
  misc_feature: MA Experiment 20000265 PARAMETER Experiment Name: At_Open_Flower_P Parameter: Tissue Value: Closed Flower vs. Whole Plant
  misc_feature: MA Experiment ID: 20000268 Result: Down-regulated in Transcription
  misc_feature: MA Experiment 20000268 PARAMETER Experiment Name: At_100mM_NaCl__P Parameter: Age (day) Value: 14
  misc_feature: MA Experiment 20000268 PARAMETER Experiment Name: At_100mM_NaCl__P Parameter: Organism Value: A. thaliana
  misc_feature: MA Experiment 20000268 PARAMETER Experiment Name: At_100mM_NaCl__P Parameter: Plant Line Value: WS
  misc_feature: MA Experiment 20000268 PARAMETER Experiment Name: At_100mM_NaCl__P Parameter: Timepoint (hr) Value: 6
  misc_feature: MA Experiment 20000268 PARAMETER Experiment Name: At_100mM_NaCl__P Parameter: Tissue Value: Whole Plant
  misc_feature: MA Experiment 20000268 PARAMETER Experiment Name: At_100mM_NaCl__P Parameter: Treatment Value: 100mM NaCl vs. No Treatment
  misc_feature: MA Experiment ID: 20000286 Result: Down-regulated in Transcription
  misc_feature: MA Experiment 20000286 PARAMETER Experiment Name: At_Open_Flower_P Parameter: Age (day) Value: 21
  misc_feature: MA Experiment 20000286 PARAMETER Experiment Name: At_Open_Flower_P Parameter: Plant Line Value: WS
  misc_feature: MA Experiment 20000286 PARAMETER Experiment Name: At_Open_Flower_P Parameter: Tissue Value: Half Open vs. Whole Plant
  misc_feature: MA Experiment ID: 20000439 Result: Down-regulated in Transcription
  misc_feature: MA Experiment 20000439 PARAMETER Experiment Name: At_Roots__P Parameter: Age (day) Value: 14 vs. 21
  misc_feature: MA Experiment 20000439 PARAMETER Experiment Name: At_Roots__P Parameter: Organism Value: A. thaliana
  misc_feature: MA Experiment 20000439 PARAMETER Experiment Name: At_Roots__P Parameter: Tissue Value: Roots vs. Whole Plant
  misc_feature: MA Experiment ID: 20000452 Result: Down-regulated in Transcription
  misc_feature: MA Experiment 20000452 PARAMETER Experiment Name: At_CS6879_Shoots-Roots_P Parameter: Age (day) Value: 14
  misc_feature: MA Experiment 20000452 PARAMETER Experiment Name: At_CS6879_Shoots-Roots_P Parameter: Organism Value: A. thaliana
  misc_feature: MA Experiment 20000452 PARAMETER Experiment Name: At_CS6879_Shoots-Roots_P Parameter: Plant Line Value: CS6879 vs. WS
  misc_feature: MA Experiment 20000452 PARAMETER Experiment Name: At_CS6879_Shoots-Roots_P Parameter: Tissue Value: Shoots
  misc_feature: MA Experiment ID: 20000456 Result: Down-regulated in Transcription
  misc_feature: MA Experiment 20000456 PARAMETER Experiment Name: At_100uM_BA_P Parameter: Age (day) Value: 14
  misc_feature: MA Experiment 20000456 PARAMETER Experiment Name: At_100uM_BA_P Parameter: Organism Value: A. thaliana
  misc_feature: MA Experiment 20000456 PARAMETER Experiment Name: At_100uM_BA_P Parameter: Plant Line Value: WS
  misc_feature: MA Experiment 20000456 PARAMETER Experiment Name: At_100uM_BA_P Parameter: Timepoint (hr) Value: 6
  misc_feature: MA Experiment 20000456 PARAMETER Experiment Name: At_100uM_BA_P Parameter: Tissue Value: Aerial
  misc_feature: MA Experiment 20000456 PARAMETER Experiment Name: At_100uM_BA_P Parameter: Treatment Value: 100uM BA vs. No Treatment
  misc_feature: MA Experiment ID: 20000496 Result: Down-regulated in Transcription
  misc_feature: MA Experiment 20000496 PARAMETER Experiment Name: At_Guard_Cells_P Parameter: Harvest Date Value: 7/19/2002
  misc_feature: MA Experiment 20000496 PARAMETER Experiment Name: At_Guard_Cells_P Parameter: Organism Value: Canola
  misc_feature: MA Experiment 20000496 PARAMETER Experiment Name: At_Guard_Cells_P Parameter: Tissue Value: Guard Cells vs. Leaves
  misc_feature: MA Experiment ID: 20000527 Result: Up-regulated in Transcription
  misc_feature: MA Experiment 20000527 PARAMETER Experiment Name: At_10percent_PEG_P Parameter: Age (day) Value: 20
  misc_feature: MA Experiment 20000527 PARAMETER Experiment Name: At_10percent_PEG_P Parameter: Organism Value: A. thaliana
  misc_feature: MA Experiment 20000527 PARAMETER Experiment Name: At_10percent_PEG_P Parameter: Plant Line Value: WS
  misc_feature: MA Experiment 20000527 PARAMETER Experiment Name: At_10percent_PEG_P Parameter: Timepoint (day) Value: 20
  misc_feature: MA Experiment 20000527 PARAMETER Experiment Name: At_10percent_PEG_P Parameter: Tissue Value: Whole Plant
  misc_feature: MA Experiment 20000527 PARAMETER Experiment Name: At_10percent_PEG_P Parameter: Treatment Value: 10percent PEG vs. No Treatment
  misc_feature: MA Experiment ID: 20000575 Result: Down-regulated in Transcription
  misc_feature: MA Experiment 20000575 PARAMETER Experiment Name: At_100uM_ABA_Mutants__P Parameter: Organism Value: A. thaliana
  misc_feature: MA Experiment 20000575 PARAMETER Experiment Name: At_100uM_ABA_Mutants__P Parameter: Plant Line Value: CS22
  misc_feature: MA Experiment 20000575 PARAMETER Experiment Name: At_100uM_ABA_Mutants__P Parameter: Timepoint (hr) Value: 6
  misc_feature: MA Experiment 20000575 PARAMETER Experiment Name: At_100uM_ABA_Mutants__P Parameter: Tissue Value: Whole Plant
  misc_feature: MA Experiment 20000575 PARAMETER Experiment Name: At_100uM_ABA_Mutants__P Parameter: Treatment Value: 1uM ABA vs. No Treatment
  misc_feature: MA Experiment ID: 20000794 Result: Down-regulated in Transcription
  misc_feature: MA Experiment 20000794 PARAMETER Experiment Name: At_Petals_P Parameter: Age (day) Value: 23-25 days
  misc_feature: MA Experiment 20000794 PARAMETER Experiment Name: At_Petals_P Parameter: Plant Line Value: WS
  misc_feature: MA Experiment 20000794 PARAMETER Experiment Name: At_Petals_P Parameter: Tissue Value: Petals vs. Whole plant
  misc_feature: MA Experiment ID: 20001248 Result: Up-regulated in Transcription
  misc_feature: MA Experiment 20001248 PARAMETER Experiment Name: At_Far-red-induction_P Parameter: Age (day) Value: 7
  misc_feature: MA Experiment 20001248 PARAMETER Experiment Name: At_Far-red-induction_P Parameter: Light Value: Far-red vs. White
  misc_feature: MA Experiment 20001248 PARAMETER Experiment Name: At_Far-red-induction_P Parameter: Organism Value: A. thaliana
  misc_feature: MA Experiment 20001248 PARAMETER Experiment Name: At_Far-red-induction_P Parameter: Plant Line Value: Columbia
  misc_feature: MA Experiment 20001248 PARAMETER Experiment Name: At_Far-red-induction_P Parameter: Timepoint (hr) Value: 4
  misc_feature: MA Experiment 20001248 PARAMETER Experiment Name: At_Far-red-induction_P Parameter: Tissue Value: Whole Plant
  misc_feature: MA Experiment ID: 20001450 Result: Up-regulated in Transcription
  misc_feature: MA Experiment 20001450 PARAMETER Experiment Name: At_Far-red-induction_P Parameter: Age (day) Value: 7
  misc_feature: MA Experiment 20001450 PARAMETER Experiment Name: At_Far-red-induction_P Parameter: Light Value: Far-red vs. White
  misc_feature: MA Experiment 20001450 PARAMETER Experiment Name: At_Far-red-induction_P Parameter: Organism Value: A. thaliana
  misc_feature: MA Experiment 20001450 PARAMETER Experiment Name: At_Far-red-induction_P Parameter: Plant Line Value: Columbia
  misc_feature: MA Experiment 20001450 PARAMETER Experiment Name: At_Far-red-induction_P Parameter: Timepoint (hr) Value: 8
  misc_feature: MA Experiment 20001450 PARAMETER Experiment Name: At_Far-red-induction_P Parameter: Tissue Value: Whole Plant
  misc_feature: MA Experiment ID: 20001451 Result: Up-regulated in Transcription
  misc_feature: MA Experiment 20001451 PARAMETER Experiment Name: At_Far-red-induction_P Parameter: Age (day) Value: 7
  misc_feature: MA Experiment 20001451 PARAMETER Experiment Name: At_Far-red-induction_P Parameter: Light Value: Far-red vs. White
  misc_feature: MA Experiment 20001451 PARAMETER Experiment Name: At_Far-red-induction_P Parameter: Organism Value: A. thaliana
  misc_feature: MA Experiment 20001451 PARAMETER Experiment Name: At_Far-red-induction_P Parameter: Plant Line Value: Columbia
  misc_feature: MA Experiment 20001451 PARAMETER Experiment Name: At_Far-red-induction_P Parameter: Timepoint (hr) Value: 24
  misc_feature: MA Experiment 20001451 PARAMETER Experiment Name: At_Far-red-induction_P Parameter: Tissue Value: Whole Plant
  misc_feature: MA Experiment ID: 20001557 Result: Down-regulated in Transcription
  misc_feature: MA Experiment 20001557 PARAMETER Experiment Name: At_Drought_Soil_Dry_P Parameter: Age (day) Value: 27
  misc_feature: MA Experiment 20001557 PARAMETER Experiment Name: At_Drought_Soil_Dry_P Parameter: Organism Value: A. thaliana
  misc_feature: MA Experiment 20001557 PARAMETER Experiment Name: At_Drought_Soil_Dry_P Parameter: Plant Line Value: WS
  misc_feature: MA Experiment 20001557 PARAMETER Experiment Name: At_Drought_Soil_Dry_P Parameter: Post Timepoint (hr) Value: 3
  misc_feature: MA Experiment 20001557 PARAMETER Experiment Name: At_Drought_Soil_Dry_P Parameter: Post-Treatment Value: Re-Water vs. No Drought
  misc_feature: MA Experiment 20001557 PARAMETER Experiment Name: At_Drought_Soil_Dry_P Parameter: Timepoint (day) Value: 13
  misc_feature: MA Experiment 20001557 PARAMETER Experiment Name: At_Drought_Soil_Dry_P Parameter: Treatment Value: Drought vs. No Drought
  misc_feature: MA Experiment ID: 20001560 Result: Down-regulated in Transcription
  misc_feature: MA Experiment 20001560 PARAMETER Experiment Name: At_Drought_Soil_Dry_P Parameter: Age (day) Value: 28
  misc_feature: MA Experiment 20001560 PARAMETER Experiment Name: At_Drought_Soil_Dry_P Parameter: Organism Value: A. thaliana
  misc_feature: MA Experiment 20001560 PARAMETER Experiment Name: At_Drought_Soil_Dry_P Parameter: Plant Line Value: WS
  misc_feature: MA Experiment 20001560 PARAMETER Experiment Name: At_Drought_Soil_Dry_P Parameter: Post Timepoint (hr) Value: None
  misc_feature: MA Experiment 20001560 PARAMETER Experiment Name: At_Drought_Soil_Dry_P Parameter: Post-Treatment Value: None
  misc_feature: MA Experiment 20001560 PARAMETER Experiment Name: At_Drought_Soil_Dry_P Parameter: Timepoint (day) Value: 14
  misc_feature: MA Experiment 20001560 PARAMETER Experiment Name: At_Drought_Soil_Dry_P Parameter: Treatment Value: Drought vs. No Drought
  misc_feature: MA Experiment ID: 20001757 Result: Up-regulated in Transcription
  misc_feature: MA Experiment 20001757 PARAMETER Experiment Name: At_50mM_NH4NO3_L-to-H_P Parameter: Timepoint (hr) Value: 6
  misc_feature: MA Experiment 20001757 PARAMETER Experiment Name: At_50mM_NH4NO3_L-to-H_P Parameter: Tissue Value: Leaf
  misc_feature: MA Experiment 20001757 PARAMETER Experiment Name: At_50mM_NH4NO3_L-to-H_P Parameter: Treatment Value: 50mM NH4NO3 vs 100mM Mannitol
  misc_feature: MA Experiment ID: 20001904 Result: Down-regulated in Transcription
  misc_feature: MA Experiment 20001904 PARAMETER Experiment Name: At_Drought_Reproduction_P Parameter: Age (day) Value: 37
  misc_feature: MA Experiment 20001904 PARAMETER Experiment Name: At_Drought_Reproduction_P Parameter: Organism Value: A. thaliana
  misc_feature: MA Experiment 20001904 PARAMETER Experiment Name: At_Drought_Reproduction_P Parameter: Plant Line Value: WS
  misc_feature: MA Experiment 20001904 PARAMETER Experiment Name: At_Drought_Reproduction_P Parameter: Timepoint (day) Value: 7
  misc_feature: MA Experiment 20001904 PARAMETER Experiment Name: At_Drought_Reproduction_P Parameter: Tissue Value: Rosettes
  misc_feature: MA Experiment 20001904 PARAMETER Experiment Name: At_Drought_Reproduction_P Parameter: Treatment Value: Drought vs. No Drought
  misc_feature: MA Experiment ID: 20001905 Result: Down-regulated in Transcription
  misc_feature: MA Experiment 20001905 PARAMETER Experiment Name: At_Drought_Reproduction_P Parameter: Age (day) Value: 40
  misc_feature: MA Experiment 20001905 PARAMETER Experiment Name: At_Drought_Reproduction_P Parameter: Organism Value: A. thaliana
  misc_feature: MA Experiment 20001905 PARAMETER Experiment Name: At_Drought_Reproduction_P Parameter: Plant Line Value: WS
  misc_feature: MA Experiment 20001905 PARAMETER Experiment Name: At_Drought_Reproduction_P Parameter: Timepoint (day) Value: 10
  misc_feature: MA Experiment 20001905 PARAMETER Experiment Name: At_Drought_Reproduction_P Parameter: Tissue Value: Rosettes
  misc_feature: MA Experiment 20001905 PARAMETER Experiment Name: At_Drought_Reproduction_P Parameter: Treatment Value: Drought vs. No Drought
ctcattcaaattttattacaaagagggagaccagaatattcctccttttgtcttcaagattttaaagccatggccggtggagctcttaccgatgaaggaggcctaaagagagctcatctctatgaacatcggatcacttcttacttcatcttcgcttgcatcgtcggatccatgggaggctctcttttcggctatgatcttggagtctctggtggtgttacatcaatggacgatttcttgaaagagttcttcccagggatctacaaaagaaagcaaatgcatctaaacgaaacagattactgcaaatacgacaatcaaatcctcacactcttcacttcttctctctacttcgccggtttaatctcaactttcggagcttcttacgtcaccagaatctacggtaggagaggaagcatcctcgttggctctgtcagcttcttcctcggaggagtgattaacgctgcagccaaaaacatcctcatgttaatccttggtcgaatcttcctcggcataggcattggattcggaaaccaggcggttccgctatacctctcggagatggctccagcgaagattagaggaactgtgaatcagcttttccagctaacaacttgcattggaattctagttgctaatttgataaactacaaaacagagcaaatccatccatggggatggagactctctctcggtctcgccaccgtcccagctatactcatgttcctcggtggactcgttttgcctgaaacacccaatagtcttgtcgagcaagggaagctcgagaaggctaaagccgtgctgatcaaagtacgtggcacaaacaatatagaagctgagtttcaggatcttgtcgaagccagtgacgctgctagagccgtgaagaatccgtttcgcaatcttcttgctagaagaaacagaccgcagctagtgattggagccattgggcttcctgcgtttcagcaactaaccggaatgaattcgatcctgttttatgctccggttatgtttcagagcttagggtttggtggatctgcgtcgcttatctcgtctaccattacaaatgctgcgcttgttgtcgcggcgatcatgtctatgtattcagctgataaatttggaagaaggtttcttcttcttgaagctagcgtggagatgttctgttacatggttgtagtaggagtaacactagccttgaagtttggggaaggtaaggagctaccaaaatcgctcggtctgattcttgtggtccttatctgtctatttgtattggcgtatggtcgatcttggggtccaatgggatggttagttccgagcgagcttttccctctagagactcgatcagccggtcagagcgttgtggtgtgcgtgaaccttttcttcacggctctaatcgcgcagtgtttcctggtgtcgctgtgccatctcaagtacggaatattccttttattcgccggacttatattggggatgggaagcttcgtttactttctgttgccggagacgaaacaggttccgattgaagaggtttatcttctttggagacagcattggttatggaagaaatatgtcgaagatgttgatgaataagatcaatcgataaatgaataaacattttcttgtttgtcaaaaaataagcattttttgtcacaaaaatacagaatgaataaaacattttaaattcgtt

SEQ ID NO: 106620 - protein, 527 aa, Arabidopsis thaliana
  peptide (1)..(527): Ceres Seq. ID no. 13620091
  misc_feature (52)..(512): Pfam Name: Sugar (and other) transporter Pfam Description: Sugar (and other) transporter
  misc_feature (24)..(527): Homolog of NCBI NO: 15223861 NR Description: sugar transporter, putative [Arabidopsis thaliana]
  misc_feature (24)..(527): Homolog of NCBI NO: 26453114 NR Description: unknown protein [Arabidopsis thaliana]
  misc_feature (24)..(527): Homolog of NCBI NO: 7446723 NR Description: probable monosaccharide transport protein Mst-1 -
  misc_feature (24)..(527): Homolog of NCBI NO: 15235215 NR Description: sugar transporter, putative [Arabidopsis thaliana]
  misc_feature (24)..(527): Homolog of NCBI NO: 1723182 NR Description: Sugar carrier protein A >gi|7446730|pir||T10150
  misc_feature (24)..(526): Homolog of NCBI NO: 347855 NR Description: glucose transporter [Saccharum hybrid cultivar
  misc_feature (24)..(527): Homolog of NCBI NO: 5734440 NR Description: hexose transporter [Lycopersicon esculentum]
  misc_feature (24)..(527): Homolog of NCBI NO: 7446737 NR Description: hexose transport protein - tomato
  misc_feature (26)..(524): Homolog of NCBI NO: 15240313 NR Description: hexose transporter, putative [Arabidopsis
  misc_feature (24)..(526): Homolog of NCBI NO: 100347 NR Description: monosaccharide transport protein MST1 - common >gi|19885|emb|CAA47324.1| monosaccharid transporter [Nicotiana
LIQILLQRGRPEYSSFCLQDFKAMAGGALTDEGGLKRAHLYEHRITSYFIFACIVGSMGGSLFGYDLGVSGGVTSMDDFLKEFFPGIYKRKQMHLNETDYCKYDNQILTLFTSSLYFAGLISTFGASYVTRIYGRRGSILVGSVSFFLGGVINAAAKNILMLILGRIFLGIGIGFGNQAVPLYLSEMAPAKIRGTVNQLFQLTTCIGILVANLINYKTEQIHPWGWRLSLGLATVPAILMFLGGLVLPETPNSLVEQGKLEKAKAVLIKVRGTNNIEAEFQDLVEASDAARAVKNPFRNLLARRNRPQLVIGAIGLPAFQQLTGMNSILFYAPVMFQSLGFGGSASLISSTITNAALVVAAIMSMYSADKFGRRFLLLEASVEMFCYMVVVGVTLALKFGEGKELPKSLGLILVVLICLFVLAYGRSWGPMGWLVPSELFPLETRSAGQSVVVCVNLFFTALIAQCFLVSLCHLKYGIFLLFAGLILGMGSFVYFLLPETKQVPIEEVYLLWRQHWLWKKYVEDVDE

SEQ ID NO: 106621 - protein, 504 aa, Arabidopsis thaliana
  peptide (1)..(504): Ceres Seq. ID no. 13620092
  misc_feature (29)..(489): Pfam Name: Sugar (and other) transporter Pfam Description: Sugar (and other) transporter
  misc_feature (1)..(504): Homolog of NCBI NO: 15223861 NR Description: sugar transporter, putative [Arabidopsis thaliana]
  misc_feature (1)..(504): Homolog of NCBI NO: 26453114 NR Description: unknown protein [Arabidopsis thaliana]
  misc_feature (1)..(504): Homolog of NCBI NO: 7446723 NR Description: probable monosaccharide transport protein Mst-1 -
  misc_feature (1)..(504): Homolog of NCBI NO: 15235215 NR Description: sugar transporter, putative [Arabidopsis thaliana]
  misc_feature (1)..(504): Homolog of NCBI NO: 1723182 NR Description: Sugar carrier protein A >gi|7446730|pir||T10150
  misc_feature (1)..(503): Homolog of NCBI NO: 347855 NR Description: glucose transporter [Saccharum hybrid cultivar
  misc_feature (1)..(504): Homolog of NCBI NO: 5734440 NR Description: hexose transporter [Lycopersicon esculentum]
  misc_feature (1)..(504): Homolog of NCBI NO: 7446737 NR Description: hexose transport protein - tomato
  misc_feature (3)..(501): Homolog of NCBI NO: 15240313 NR Description: hexose transporter, putative [Arabidopsis
  misc_feature (1)..(503): Homolog of NCBI NO: 100347 NR Description: monosaccharide transport protein MST1 - common >gi|19885|emb|CAA47324.1| monosaccharid transporter [Nicotiana
MAGGALTDEGGLKRAHLYEHRITSYFIFACIVGSMGGSLFGYDLGVSGGVTSMDDFLKEFFPGIYKRKQMHLNETDYCKYDNQILTLFTSSLYFAGLISTFGASYVTRIYGRRGSILVGSVSFFLGGVINAAAKNILMLILGRIFLGIGIGFGNQAVPLYLSEMAPAKIRGTVNQLFQLTTCIGILVANLINYKTEQIHPWGWRLSLGLATVPAILMFLGGLVLPETPNSLVEQGKLEKAKAVLIKVRGTNNIEAEFQDLVEASDAARAVKNPFRNLLARRNRPQLVIGAIGLPAFQQLTGMNSILFYAPVMFQSLGFGGSASLISSTITNAALVVAAIMSMYSADKFGRRFLLLEASVEMFCYMVVVGVTLALKFGEGKELPKSLGLILVVLICLFVLAYGRSWGPMGWLVPSELFPLETRSAGQSVVVCVNLFFTALIAQCFLVSLCHLKYGIFLLFAGLILGMGSFVYFLLPETKQVPIEEVYLLWRQHWLWKKYVEDVDE

SEQ ID NO: 106622 - protein, 470 aa, Arabidopsis thaliana
  peptide (1)..(470): Ceres Seq. ID no. 13620093
  misc_feature (1)..(455): Pfam Name: Sugar (and other) transporter Pfam Description: Sugar (and other) transporter
  misc_feature (1)..(470): Homolog of NCBI NO: 15223861 NR Description: sugar transporter, putative [Arabidopsis thaliana]
  misc_feature (1)..(470): Homolog of NCBI NO: 26453114 NR Description: unknown protein [Arabidopsis thaliana]
  misc_feature (1)..(470): Homolog of NCBI NO: 7446723 NR Description: probable monosaccharide transport protein Mst-1 -
  misc_feature (1)..(470): Homolog of NCBI NO: 15235215 NR Description: sugar transporter, putative [Arabidopsis thaliana]
  misc_feature (1)..(470): Homolog of NCBI NO: 1723182 NR Description: Sugar carrier protein A >gi|7446730|pir||T10150
  misc_feature (1)..(469): Homolog of NCBI NO: 347855 NR Description: glucose transporter [Saccharum hybrid cultivar
  misc_feature (1)..(470): Homolog of NCBI NO: 5734440 NR Description: hexose transporter [Lycopersicon esculentum]
  misc_feature (1)..(470): Homolog of NCBI NO: 7446737 NR Description: hexose transport protein - tomato
  misc_feature (1)..(467): Homolog of NCBI NO: 15240313 NR Description: hexose transporter, putative [Arabidopsis
  misc_feature (1)..(469): Homolog of NCBI NO: 100347 NR Description: monosaccharide transport protein MST1 - common >gi|19885|emb|CAA47324.1| monosaccharid transporter [Nicotiana
MGGSLFGYDLGVSGGVTSMDDFLKEFFPGIYKRKQMHLNETDYCKYDNQILTLFTSSLYFAGLISTFGASYVTRIYGRRGSILVGSVSFFLGGVINAAAKNILMLILGRIFLGIGIGFGNQAVPLYLSEMAPAKIRGTVNQLFQLTTCIGILVANLINYKTEQIHPWGWRLSLGLATVPAILMFLGGLVLPETPNSLVEQGKLEKAKAVLIKVRGTNNIEAEFQDLVEASDAARAVKNPFRNLLARRNRPQLVIGAIGLPAFQQLTGMNSILFYAPVMFQSLGFGGSASLISSTITNAALVVAAIMSMYSADKFGRRFLLLEASVEMFCYMVVVGVTLALKFGEGKELPKSLGLILVVLICLFVLAYGRSWGPMGWLVPSELFPLETRSAGQSVVVCVNLFFTALIAQCFLVSLCHLKYGIFLLFAGLILGMGSFVYFLLPETKQVPIEEVYLLWRQHWLWKKYVEDVDE

SEQ ID NO: 106623 - DNA, 1404 bp, Arabidopsis thaliana
  misc_feature (1)..(1404): Ceres Seq. ID no. 13620098
  misc_feature: MA Experiment ID: 20000234 Result: Up-regulated in Transcription
  misc_feature: MA Experiment 20000234 PARAMETER Experiment Name: At_Siliques_P Parameter: Age (day) Value: 21
  misc_feature: MA Experiment 20000234 PARAMETER Experiment Name: At_Siliques_P Parameter: Organism Value: A. thaliana
  misc_feature: MA Experiment 20000234 PARAMETER Experiment Name: At_Siliques_P Parameter: Plant Line Value: WS
  misc_feature: MA Experiment 20000234 PARAMETER Experiment Name: At_Siliques_P Parameter: Tissue Value: Less Than 5mm Siliques vs. Whole Plant
  misc_feature: MA Experiment ID: 20000264 Result: Up-regulated in Transcription
  misc_feature: MA Experiment 20000264 PARAMETER Experiment Name: At_Open_Flower_P Parameter: Age (day) Value: 21
  misc_feature: MA Experiment 20000264 PARAMETER Experiment Name: At_Open_Flower_P Parameter: Plant Line Value: WS
  misc_feature: MA Experiment 20000264 PARAMETER Experiment Name: At_Open_Flower_P Parameter: Tissue Value: Open Flower vs. Whole Plant
  misc_feature: MA Experiment ID: 20000265 Result: Up-regulated in Transcription
  misc_feature: MA Experiment 20000265 PARAMETER Experiment Name: At_Open_Flower_P Parameter: Age (day) Value: 21
  misc_feature: MA Experiment 20000265 PARAMETER Experiment Name: At_Open_Flower_P Parameter: Plant Line Value: WS
  misc_feature: MA Experiment 20000265 PARAMETER Experiment Name: At_Open_Flower_P Parameter: Tissue Value: Closed Flower vs. Whole Plant
  misc_feature: MA Experiment ID: 20000286 Result: Up-regulated in Transcription
  misc_feature: MA Experiment 20000286 PARAMETER Experiment Name: At_Open_Flower_P Parameter: Age (day) Value: 21
  misc_feature: MA Experiment 20000286 PARAMETER Experiment Name: At_Open_Flower_P Parameter: Plant Line Value: WS
  misc_feature: MA Experiment 20000286 PARAMETER Experiment Name: At_Open_Flower_P Parameter: Tissue Value: Half Open vs. Whole Plant
  misc_feature: MA Experiment ID: 20000439 Result: Up-regulated in Transcription
  misc_feature: MA Experiment 20000439 PARAMETER Experiment Name: At_Roots__P Parameter: Age (day) Value: 14 vs. 21
  misc_feature: MA Experiment 20000439 PARAMETER Experiment Name: At_Roots__P Parameter: Organism Value: A. thaliana
  misc_feature: MA Experiment 20000439 PARAMETER Experiment Name: At_Roots__P Parameter: Tissue Value: Roots vs. Whole Plant
  misc_feature: MA Experiment ID: 20000794 Result: Up-regulated in Transcription
  misc_feature: MA Experiment 20000794 PARAMETER Experiment Name: At_Petals_P Parameter: Age (day) Value: 23-25 days
  misc_feature: MA Experiment 20000794 PARAMETER Experiment Name: At_Petals_P Parameter: Plant Line Value: WS
  misc_feature: MA Experiment 20000794 PARAMETER Experiment Name: At_Petals_P Parameter: Tissue Value: Petals vs. Whole plant
  misc_feature: MA Experiment ID: 20001458 Result: Up-regulated in Transcription
  misc_feature: MA Experiment 20001458 PARAMETER Experiment Name: At_50mM_NH4NO3_L-to-H_P Parameter: Age (day) Value: Undefined
  misc_feature: MA Experiment 20001458 PARAMETER Experiment Name: At_50mM_NH4NO3_L-to-H_P Parameter: Organism Value: Undefined
  misc_feature: MA Experiment 20001458 PARAMETER Experiment Name: At_50mM_NH4NO3_L-to-H_P Parameter: Plant Line Value: Undefined
  misc_feature: MA Experiment 20001458 PARAMETER Experiment Name: At_50mM_NH4NO3_L-to-H_P Parameter: Timepoint (hr) Value: 2
  misc_feature: MA Experiment 20001458 PARAMETER Experiment Name: At_50mM_NH4NO3_L-to-H_P Parameter: Tissue Value: Siliques
  misc_feature: MA Experiment 20001458 PARAMETER Experiment Name: At_50mM_NH4NO3_L-to-H_P Parameter: Treatment Value: 50mM NH4NO3 vs. 100mM Manitol
  misc_feature: MA Experiment ID: 20001556 Result: Down-regulated in Transcription
  misc_feature: MA Experiment 20001556 PARAMETER Experiment Name: At_Drought_Soil_Dry_P Parameter: Age (day) Value: 26
  misc_feature: MA Experiment 20001556 PARAMETER Experiment Name: At_Drought_Soil_Dry_P Parameter: Organism Value: A. thaliana
  misc_feature: MA Experiment 20001556 PARAMETER Experiment Name: At_Drought_Soil_Dry_P Parameter: Plant Line Value: WS
  misc_feature: MA Experiment 20001556 PARAMETER Experiment Name: At_Drought_Soil_Dry_P Parameter: Post Timepoint (hr) Value: None
  misc_feature: MA Experiment 20001556 PARAMETER Experiment Name: At_Drought_Soil_Dry_P Parameter: Post-Treatment Value: None
  misc_feature: MA Experiment 20001556 PARAMETER Experiment Name: At_Drought_Soil_Dry_P Parameter: Timepoint (day) Value: 12
  misc_feature: MA Experiment 20001556 PARAMETER Experiment Name: At_Drought_Soil_Dry_P Parameter: Treatment Value: Drought vs. No Drought
ctctcttttctcctcaccttctctctctcaacatctctctctttctctgtcttctctctgtctcaacgagaatatgactaaccagaatgtcatcgtttccgacaggaaacccatcttgggtttgaaaaccatcactgtctctgtctctaactctcctctgttctctaattcctttcccacttactttaacttccctcgtcgaaagctcttgaaacttcttgaagcagccgacaaaaacaacttagttgttgctccaaagattacgtctatgatcgattccatgcgtgattcttcccctacacgtctcagatcctcttcctatgactctgtttcagataacgacgacaaaacatcttggatcgttcgttttccttcggctttaaatatgtttgatgagattgtgaatgctgcgaaagggaaacagattgtcatgtttcttgattacgacggaactctttctcccatagttgaagatcccgacaaagctttcataacccatgagatgagagaagtcgtaaaagacgtggcttcgaatttcccgactgctattgtcaccgggagatccattgagaaggttcgtagttttgtccaagtaaacgagatttactacgccggaagccacggcatggacattgaaggtccgaccaacgaaaatagtaacggccagagtaatgaaagagtgctattccaacctgctcgtgaatttttaccgatgatcgagaaggtggttaatattttagaggaaaaaacaaaatggatccctggggctatggtggagaacaacaagttttgtctgtccgtacattttcgacgtgttgatgagaagagatggcctgcattagctgaagtagtaaaatcagttcttattgattatccaaagctgaaactaacccaaggtagaaaggtacttgaaatccgccccacaatcaaatgggacaagggccaggcactcaattttttactaaaatcattaggatatgaaaattcggatgatgttgtgccggtgtatatcggggatgaccgtactgacgaagatgcgtttaaggttttacgtgaaaggggacaaggttttgggattcttgtctcaaaagtaccaaaggacaccaatgcctcttattctcttcaagacccttctcaggttaacaagtttctggaacgtttagtagaatggaagaggaagacagtgggagaagagtgaaagacatgcaacataattacacaaataacacctgagttttgagtagattattaatttatataaacaccctttttaaattagtagatgcctggagggtgtttcggccagaagtttttcttttaatctacatcgaaccgaaaattgtaaatttcgtgtaacgatttagaaatggaaaaatatattaataatttactcattcttatttg

SEQ ID NO: 106624 - protein, 398 aa, Arabidopsis thaliana
  peptide (1)..(398): Ceres Seq. ID no. 13620099
  misc_feature (145)..(378): Pfam Name: Trehalose-phosphatase Pfam Description: Trehalose-phosphatase
  misc_feature (25)..(398): Homolog of NCBI NO: 15218205 NR Description: trehalose-6-phosphate phosphatase (TPPB) thaliana] >gi|25354598|pir||H96809 protein hypothetical protein
  misc_feature (25)..(398): Homolog of NCBI NO: 25354595 NR Description: trehalose-phosphatase (EC 3.1.3.12) B [imported] -
  misc_feature (25)..(395): Homolog of NCBI NO: 18399940 NR Description: trehalose-6-phosphate phosphatase, putative
  misc_feature (25)..(395): Homolog of NCBI NO: 21554408 NR Description: trehalose-phosphatase, putative [Arabidopsis
  misc_feature (83)..(397): Homolog of NCBI NO: 15219843 NR Description: trehalose-6-phosphate phosphatase, putative
  misc_feature (25)..(395): Homolog of NCBI NO: 25354597 NR Description: probable trehalose-phosphatase [imported] -
  misc_feature (25)..(388): Homolog of NCBI NO: 15238360 NR Description: trehalose-6-phosphate phosphatase, putative
  misc_feature (240)..(397): Homolog of NCBI NO: 25511656 NR Description: F16L1.6 protein - Arabidopsis thaliana
  misc_feature (83)..(216): Homolog of NCBI NO: 25511656 NR Description: F16L1.6 protein - Arabidopsis thaliana
  misc_feature (27)..(392): Homolog of NCBI NO: 30683008 NR Description: trehalose-6-phosphate phosphatase, putative
SLFSSPSLSQHLSLSLSSLCLNENMTNQNVIVSDRKPILGLKTITVSVSNSPLFSNSFPTYFNFPRRKLLKLLEAADKNNLVVAPKITSMIDSMRDSSPTRLRSSSYDSVSDNDDKTSWIVRFPSALNMFDEIVNAAKGKQIVMFLDYDGTLSPIVEDPDKAFITHEMREVVKDVASNFPTAIVTGRSIEKVRSFVQVNEIYYAGSHGMDIEGPTNENSNGQSNERVLFQPAREFLPMIEKVVNILEEKTKWIPGAMVENNKFCLSVHFRRVDEKRWPALAEVVKSVLIDYPKLKLTQGRKVLEIRPTIKWDKGQALNFLLKSLGYENSDDVVPVYIGDDRTDEDAFKVLRERGQGFGILVSKVPKDTNASYSLQDPSQVNKFLERLVEWKRKTVGEE

SEQ ID NO: 106625 - protein, 374 aa, Arabidopsis thaliana
  peptide (1)..(374): Ceres Seq. ID no. 13620100
  misc_feature (121)..(354): Pfam Name: Trehalose-phosphatase Pfam Description: Trehalose-phosphatase
  misc_feature (1)..(374): Homolog of NCBI NO: 15218205 NR Description: trehalose-6-phosphate phosphatase (TPPB) thaliana] >gi|25354598|pir||H96809 protein hypothetical protein
  misc_feature (1)..(374): Homolog of NCBI NO: 25354595 NR Description: trehalose-phosphatase (EC 3.1.3.12) B [imported] -
  misc_feature (1)..(371): Homolog of NCBI NO: 18399940 NR Description: trehalose-6-phosphate phosphatase, putative
  misc_feature (1)..(371): Homolog of NCBI NO: 21554408 NR Description: trehalose-phosphatase, putative [Arabidopsis
  misc_feature (59)..(373): Homolog of NCBI NO: 15219843 NR Description: trehalose-6-phosphate phosphatase, putative
  misc_feature (1)..(371): Homolog of NCBI NO: 25354597 NR Description: probable trehalose-phosphatase [imported] -
  misc_feature (1)..(364): Homolog of NCBI NO: 15238360 NR Description: trehalose-6-phosphate phosphatase, putative
  misc_feature (216)..(373): Homolog of NCBI NO: 25511656 NR Description: F16L1.6 protein - Arabidopsis thaliana
  misc_feature (59)..(192): Homolog of NCBI NO: 25511656 NR Description: F16L1.6 protein - Arabidopsis thaliana
  misc_feature (3)..(368): Homolog of NCBI NO: 30683008 NR Description: trehalose-6-phosphate phosphatase, putative
MTNQNVIVSDRKPILGLKTITVSVSNSPLFSNSFPTYFNFPRRKLLKLLEAADKNNLVVAPKITSMIDSMRDSSPTRLRSSSYDSVSDNDDKTSWIVRFPSALNMFDEIVNAAKGKQIVMFLDYDGTLSPIVEDPDKAFITHEMREVVKDVASNFPTAIVTGRSIEKVRSFVQVNEIYYAGSHGMDIEGPTNENSNGQSNERVLFQPAREFLPMIEKVVNILEEKTKWIPGAMVENNKFCLSVHFRRVDEKRWPALAEVVKSVLIDYPKLKLTQGRKVLEIRPTIKWDKGQALNFLLKSLGYENSDDVVPVYIGDDRTDEDAFKVLRERGQGFGILVSKVPKDTNASYSLQDPSQVNKFLERLVEWKRKTVGEE

SEQ ID NO: 106626 - protein, 309 aa, Arabidopsis thaliana
  peptide (1)..(309): Ceres Seq. ID no. 13620101
  misc_feature (56)..(289): Pfam Name: Trehalose-phosphatase Pfam Description: Trehalose-phosphatase
  misc_feature (1)..(309): Homolog of NCBI NO: 15218205 NR Description: trehalose-6-phosphate phosphatase (TPPB) thaliana] >gi|25354598|pir||H96809 protein hypothetical protein
  misc_feature (1)..(309): Homolog of NCBI NO: 25354595 NR Description: trehalose-phosphatase (EC 3.1.3.12) B [imported] -
  misc_feature (1)..(306): Homolog of NCBI NO: 18399940 NR Description: trehalose-6-phosphate phosphatase, putative
  misc_feature (1)..(306): Homolog of NCBI NO: 21554408 NR Description: trehalose-phosphatase, putative [Arabidopsis
  misc_feature (1)..(308): Homolog of NCBI NO: 15219843 NR Description: trehalose-6-phosphate phosphatase, putative
  misc_feature (1)..(306): Homolog of NCBI NO: 25354597 NR Description: probable trehalose-phosphatase [imported] -
  misc_feature (1)..(299): Homolog of NCBI NO: 15238360 NR Description: trehalose-6-phosphate phosphatase, putative
  misc_feature (151)..(308): Homolog of NCBI NO: 25511656 NR Description: F16L1.6 protein - Arabidopsis thaliana
  misc_feature (1)..(127): Homolog of NCBI NO: 25511656 NR Description: F16L1.6 protein - Arabidopsis thaliana
  misc_feature (1)..(303): Homolog of NCBI NO: 30683008 NR Description: trehalose-6-phosphate phosphatase, putative
MIDSMRDSSPTRLRSSSYDSVSDNDDKTSWIVRFPSALNMFDEIVNAAKGKQIVMFLDYDGTLSPIVEDPDKAFITHEMREVVKDVASNFPTAIVTGRSIEKVRSFVQVNEIYYAGSHGMDIEGPTNENSNGQSNERVLFQPAREFLPMIEKVVNILEEKTKWIPGAMVENNKFCLSVHFRRVDEKRWPALAEVVKSVLIDYPKLKLTQGRKVLEIRPTIKWDKGQALNFLLKSLGYENSDDVVPVYIGDDRTDEDAFKVLRERGQGFGILVSKVPKDTNASYSLQDPSQVNKFLERLVEWKRKTVGEE

SEQ ID NO: 106627 - DNA, 2387 bp, Arabidopsis thaliana
  misc_feature (1)..(2387): Ceres Seq. ID no. 13620108
  misc_feature: MA Experiment ID: 20000327 Result: Up-regulated in Transcription
  misc_feature: MA Experiment 20000327 PARAMETER Experiment Name: At_42deg_Heat_Sub_P Parameter: Age (day) Value: 14
  misc_feature: MA Experiment 20000327 PARAMETER Experiment Name: At_42deg_Heat_Sub_P Parameter: Organism Value: A. thaliana
  misc_feature: MA Experiment 20000327 PARAMETER Experiment Name: At_42deg_Heat_Sub_P Parameter: Plant Line Value: WS
  misc_feature: MA Experiment 20000327 PARAMETER Experiment Name: At_42deg_Heat_Sub_P Parameter: Temperature (deg C) Value: 42 vs. 22
  misc_feature: MA Experiment 20000327 PARAMETER Experiment Name: At_42deg_Heat_Sub_P Parameter: Timepoint (hr) Value: 1
  misc_feature: MA Experiment 20000327 PARAMETER Experiment Name: At_42deg_Heat_Sub_P Parameter: Tissue Value: Aerial
  misc_feature: MA Experiment ID: 20000328 Result: Up-regulated in Transcription
  misc_feature: MA Experiment 20000328 PARAMETER Experiment Name: At_42deg_Heat_Sub_P Parameter: Age (day) Value: 14
  misc_feature: MA Experiment 20000328 PARAMETER Experiment Name: At_42deg_Heat_Sub_P Parameter: Organism Value: A. thaliana
  misc_feature: MA Experiment 20000328 PARAMETER Experiment Name: At_42deg_Heat_Sub_P Parameter: Plant Line Value: WS
  misc_feature: MA Experiment 20000328 PARAMETER Experiment Name: At_42deg_Heat_Sub_P Parameter: Temperature (deg C) Value: 42 vs. 22
  misc_feature: MA Experiment 20000328 PARAMETER Experiment Name: At_42deg_Heat_Sub_P Parameter: Timepoint (hr) Value: 6
  misc_feature: MA Experiment 20000328 PARAMETER Experiment Name: At_42deg_Heat_Sub_P Parameter: Tissue Value: Aerial
gcatcagtacttctctctgctctcaagataattttgttctctcaatttcattcttaaaccctagttcttcgattttttccgatctacgacaatggcggacgctgaaacctttgctttccaagctgagatcaaccagttgctttccctcatcatcaataccttttactctaacaaggagatcttcctccgtgaactcatcagtaactcttctgatgctttggacaagattagattcgagtccttgacggacaagagcaagctcgatggtcagcctgagctcttcattcacatcattcccgacaagactaacaacaccttgaccattattgatagtggtattggcatgaccaaggctgatttggtcaacaaccttggaacaattgcaagatctggaaccaaggaattcatggaagcactggctgctggagctgatgttagcatgattggtcagtttggtgttggtttctactctgcttacttggttgctgacaaggttgttgttactaccaagcacaatgacgatgagcagtacgtgtgggagtctcaggccgggggatctttcactgtgaccagagacacctctggggagactcttggtagaggaacaaagatggttctttacctcaaggaagaccagttggagtaccttgaggagcgaaggcttaaggatttggtgaagaagcactctgagttcatcagctacccaatctctctctggattgagaagaccattgagaaggagatctctgatgatgaagaggaggaagagaagaaggatgaggaaggcaaggttgaggaagttgatgaggagaaagaaaaggaggagaagaaaaagaagaagattaaggaggtttctcatgagtgggatttggtgaacaagcagaagcctatctggatgaggaagccagaggagatcaacaaggaggagtacgctgctttctacaagagtctcagcaatgattgggaggagcatttggctgtgaagcatttctctgttgaaggacagcttgagttcaaagctatcctctttgttcccaagagagctccttttgatctctttgacactaagaagaagcccaacaacatcaagctctatgtccgtcgtgtcttcatcatggacaactgtgaagacatcatccctgagtacctcggatttgtgaaaggtattgtcgactctgaagatcttcctctcaacatctcgagagagacattgcagcagaacaagatcctcaaggtcatccgcaagaaccttgtgaagaagtgccttgagctcttctttgagattgctgagaacaaggaagactacaacaagttctacgaggctttctctaagaacctgaagctcggtatccatgaggactcccaaaacagaaccaagattgctgagttgctccgttaccactcaaccaagagcggtgatgaattgactagtctcaaggactacgtgacaaggatgaaggaaggtcagaacgatatcttctacatcactggtgagagcaagaaggctgttgagaactctccattccttgagaagctcaagaagaaaggtattgaagttctctacatggttgatgcgattgatgagtacgctattggtcagcttaaggaattcgagggaaagaaacttgtttctgcaaccaaggaaggtctgaaactggatgagaccgaagatgaaaagaagaagaaagaagagctcaaggagaagtttgaaggactctgcaaagtgatcaaagacgttttgggtgacaaggtcgagaaggttattgtttctgaccgtgttgtggactcaccgtgctgtcttgtaaccggcgaatacggctggactgcaaacatggagaggatcatgaaagctcaagccttgagagacagcagcatggctggttacatgtcgagtaagaagacaatggagattaatccagagaactccatcatggatgagttgagaaagcgagctgacgcagacaagaacgacaagtctgtgaaggaccttgtgcttctcctctttgagaccgctcttctcacttctggtttcagccttgatgagccaaacactttcggaagcaggatccacaggatgctgaagcttggactgagcattgatgacgatgatgctgttgaagccgatgctgagatgcctccccttgaagacgatgctgatgccgaaggtagcaagatggaggaagtcgactaatttatcacacaaaagtcgactaaattattagcggtgttataagactatggttttctttttttcttttcgttaaaacttatgttattttggtgattatcttcacgaattttttctatggttttattgttgtgaagatatttctctgaactcggttttatgacaaagattctattatgctcaagagactgattcttac

SEQ ID NO: 106628 - protein, 699 aa, Arabidopsis thaliana
  peptide (1)..(699): Ceres Seq. ID no. 13620109
  misc_feature (184)..(699): Pfam Name: Hsp90 protein Pfam Description: Hsp90 protein
  misc_feature (211)..(699): Homolog of NCBI NO: 29145077 NR Description: Hspca protein [Mus musculus]
  misc_feature (3)..(280): Homolog of NCBI NO: 29145077 NR Description: Hspca protein [Mus musculus]
  misc_feature (1)..(699): Homolog of NCBI NO: 12005809 NR Description: 90-kDa heat shock protein HSP83 [Spodoptera
  misc_feature (4)..(697): Homolog of NCBI NO: 6755863 NR Description: tumor rejection antigen gp96; tumor rejection (gp96) 1 [Mus musculus] >gi|119362|sp|P08113|ENPL_MOUSE
  misc_feature (4)..(697): Homolog of NCBI NO: 14714615 NR Description: tumor rejection antigen gp96 [Mus musculus]
  misc_feature (4)..(699): Homolog of NCBI NO: 27807263 NR Description: tumor rejection antigen (gp96) 1 [Bos taurus]
  misc_feature (4)..(699): Homolog of NCBI NO: 4507677 NR Description: tumor rejection antigen (gp96) 1; Tumor rejection (gp96); glucose regulated protein, 94 kDa [Homo sapiens]
  misc_feature (4)..(699): Homolog of NCBI NO: 7441885 NR Description: protein kinase ppk98 (EC 2.7.1.-) precursor,
  misc_feature (4)..(699): Homolog of NCBI NO: 2239253 NR Description: gp96/GRP94 [Sus scrofa]
  misc_feature (4)..(699): Homolog of NCBI NO: 17865698 NR Description: Endoplasmin precursor (94 kDa glucose-regulated (GRP94) (GP96 homolog) (98 kDa protein kinase) (PPK 98) (ppk98)
MADAETFAFQAEINQLLSLIINTFYSNKEIFLRELISNSSDALDKIRFESLTDKSKLDGQPELFIHIIPDKTNNTLTIIDSGIGMTKADLVNNLGTIARSGTKEFMEALAAGADVSMIGQFGVGFYSAYLVADKVVVTTKHNDDEQYVWESQAGGSFTVTRDTSGETLGRGTKMVLYLKEDQLEYLEERRLKDLVKKHSEFISYPISLWIEKTIEKEISDDEEEEEKKDEEGKVEEVDEEKEKEEKKKKKIKEVSHEWDLVNKQKPIWMRKPEEINKEEYAAFYKSLSNDWEEHLAVKHFSVEGQLEFKAILFVPKRAPFDLFDTKKKPNNIKLYVRRVFIMDNCEDIIPEYLGFVKGIVDSEDLPLNISRETLQQNKILKVIRKNLVKKCLELFFEIAENKEDYNKFYEAFSKNLKLGIHEDSQNRTKIAELLRYHSTKSGDELTSLKDYVTRMKEGQNDIFYITGESKKAVENSPFLEKLKKKGIEVLYMVDAIDEYAIGQLKEFEGKKLVSATKEGLKLDETEDEKKKKEELKEKFEGLCKVIKDVLGDKVEKVIVSDRVVDSPCCLVTGEYGWTANMERIMKAQALRDSSMAGYMSSKKTMEINPENSIMDELRKRADADKNDKSVKDLVLLLFETALLTSGFSLDEPNTFGSRIHRMLKLGLSIDDDDAVEADAEMPPLEDDADAEGSKMEEVD

SEQ ID NO: 106629 - protein, 615 aa, Arabidopsis thaliana
  peptide (1)..(615): Ceres Seq. ID no. 13620110
  misc_feature (100)..(615): Pfam Name: Hsp90 protein Pfam Description: Hsp90 protein
  misc_feature (127)..(615): Homolog of NCBI NO: 29145077 NR Description: Hspca protein [Mus musculus]
  misc_feature (1)..(196): Homolog of NCBI NO: 29145077 NR Description: Hspca protein [Mus musculus]
  misc_feature (1)..(615): Homolog of NCBI NO: 12005809 NR Description: 90-kDa heat shock protein HSP83 [Spodoptera
  misc_feature (1)..(613): Homolog of NCBI NO: 6755863 NR Description: tumor rejection antigen gp96; tumor rejection (gp96) 1 [Mus musculus] >gi|119362|sp|P08113|ENPL_MOUSE
  misc_feature (1)..(613): Homolog of NCBI NO: 14714615 NR Description: tumor rejection antigen gp96 [Mus musculus]
  misc_feature (1)..(615): Homolog of NCBI NO: 27807263 NR Description: tumor rejection antigen (gp96) 1 [Bos taurus]
  misc_feature (1)..(615): Homolog of NCBI NO: 4507677 NR Description: tumor rejection antigen (gp96) 1; Tumor rejection (gp96); glucose regulated protein, 94 kDa [Homo sapiens]
  misc_feature (1)..(615): Homolog of NCBI NO: 7441885 NR Description: protein kinase ppk98 (EC 2.7.1.-) precursor,
  misc_feature (1)..(615): Homolog of NCBI NO: 2239253 NR Description: gp96/GRP94 [Sus scrofa]
  misc_feature (1)..(615): Homolog of NCBI NO: 17865698 NR Description: Endoplasmin precursor (94 kDa glucose-regulated (GRP94) (GP96 homolog) (98 kDa protein kinase) (PPK 98) (ppk98)
MTKADLVNNLGTIARSGTKEFMEALAAGADVSMIGQFGVGFYSAYLVADKVVVTTKHNDDEQYVWESQAGGSFTVTRDTSGETLGRGTKMVLYLKEDQLEYLEERRLKDLVKKHSEFISYPISLWIEKTIEKEISDDEEEEEKKDEEGKVEEVDEEKEKEEKKKKKIKEVSHEWDLVNKQKPIWMRKPEEINKEEYAAFYKSLSNDWEEHLAVKHFSVEGQLEFKAILFVPKRAPFDLFDTKKKPNNIKLYVRRVFIMDNCEDIIPEYLGFVKGIVDSEDLPLNISRETLQQNKILKVIRKNLVKKCLELFFEIAENKEDYNKFYEAFSKNLKLGIHEDSQNRTKIAELLRYHSTKSGDELTSLKDYVTRMKEGQNDIFYITGESKKAVENSPFLEKLKKKGIEVLYMVDAIDEYAIGQLKEFEGKKLVSATKEGLKLDETEDEKKKKEELKEKFEGLCKVIKDVLGDKVEKVIVSDRVVDSPCCLVTGEYGWTANMERIMKAQALRDSSMAGYMSSKKTMEINPENSIMDELRKRADADKNDKSVKDLVLLLFETALLTSGFSLDEPNTFGSRIHRMLKLGLSIDDDDAVEADAEMPPLEDDADAEGSKMEEVD

SEQ ID NO: 106630 - protein, 594 aa, Arabidopsis thaliana
  peptide (1)..(594): Ceres Seq. ID no. 13620111
  misc_feature (79)..(594): Pfam Name: Hsp90 protein Pfam Description: Hsp90 protein
  misc_feature (106)..(594): Homolog of NCBI NO: 29145077 NR Description: Hspca protein [Mus musculus]
  misc_feature (1)..(175): Homolog of NCBI NO: 29145077 NR Description: Hspca protein [Mus musculus]
  misc_feature (1)..(594): Homolog of NCBI NO: 12005809 NR Description: 90-kDa heat shock protein HSP83 [Spodoptera
  misc_feature (1)..(592): Homolog of NCBI NO: 6755863 NR Description: tumor rejection antigen gp96; tumor rejection (gp96) 1 [Mus musculus] >gi|119362|sp|P08113|ENPL_MOUSE
  misc_feature (1)..(592): Homolog of NCBI NO: 14714615 NR Description: tumor rejection antigen gp96 [Mus musculus]
  misc_feature (1)..(594): Homolog of NCBI NO: 27807263 NR Description: tumor rejection antigen (gp96) 1 [Bos taurus]
  misc_feature (1)..(594): Homolog of NCBI NO: 4507677 NR Description: tumor rejection antigen (gp96) 1; Tumor rejection (gp96); glucose regulated protein, 94 kDa [Homo sapiens]
  misc_feature (1)..(594): Homolog of NCBI NO: 7441885 NR Description: protein kinase ppk98 (EC 2.7.1.-) precursor,
  misc_feature (1)..(594): Homolog of NCBI NO: 2239253 NR Description: gp96/GRP94 [Sus scrofa]
  misc_feature (1)..(594): Homolog of NCBI NO: 17865698 NR Description: Endoplasmin precursor (94 kDa glucose-regulated (GRP94) (GP96 homolog) (98 kDa protein kinase) (PPK 98) (ppk98)
MEALAAGADVSMIGQFGVGFYSAYLVADKVVVTTKHNDDEQYVWESQAGGSFTVTRDTSGETLGRGTKMVLYLKEDQLEYLEERRLKDLVKKHSEFISYPISLWIEKTIEKEISDDEEEEEKKDEEGKVEEVDEEKEKEEKKKKKIKEVSHEWDLVNKQKPIWMRKPEEINKEEYAAFYKSLSNDWEEHLAVKHFSVEGQLEFKAILFVPKRAPFDLFDTKKKPNNIKLYVRRVFIMDNCEDIIPEYLGFVKGIVDSEDLPLNISRETLQQNKILKVIRKNLVKKCLELFFEIAENKEDYNKFYEAFSKNLKLGIHEDSQNRTKIAELLRYHSTKSGDELTSLKDYVTRMKEGQNDIFYITGESKKAVENSPFLEKLKKKGIEVLYMVDAIDEYAIGQLKEFEGKKLVSATKEGLKLDETEDEKKKKEELKEKFEGLCKVIKDVLGDKVEKVIVSDRVVDSPCCLVTGEYGWTANMERIMKAQALRDSSMAGYMSSKKTMEINPENSIMDELRKRADADKNDKSVKDLVLLLFETALLTSGFSLDEPNTFGSRIHRMLKLGLSIDDDDAVEADAEMPPLEDDADAEGSKMEEVD

SEQ ID NO: 106631 - DNA, 1112 bp, Arabidopsis thaliana
  misc_feature (1)..(1112): Ceres Seq. ID no. 13620120
  misc_feature: MA Experiment ID: 20000179 Result: Up-regulated in Transcription
  misc_feature: MA Experiment 20000179 PARAMETER Experiment Name: At_Germinating_Seeds_P Parameter: Age (hr) Value: 6 vs. 0
  misc_feature: MA Experiment 20000179 PARAMETER Experiment Name: At_Germinating_Seeds_P Parameter: Tissue Value: Germinating Seeds
  misc_feature: MA Experiment ID: 20000180 Result: Up-regulated in Transcription
  misc_feature: MA Experiment 20000180 PARAMETER Experiment Name: At_Germinating_Seeds_P Parameter: Age (hr) Value: 24 vs. 0
  misc_feature: MA Experiment 20000180 PARAMETER Experiment Name: At_Germinating_Seeds_P Parameter: Tissue Value: Germinating Seeds
  misc_feature: MA Experiment ID: 20000185 Result: Up-regulated in Transcription
  misc_feature: MA Experiment 20000185 PARAMETER Experiment Name: At_Roots__P Parameter: Age (day) Value: 7 vs. 21
  misc_feature: MA Experiment 20000185 PARAMETER Experiment Name: At_Roots__P Parameter: Organism Value: A. thaliana
  misc_feature: MA Experiment 20000185 PARAMETER Experiment Name: At_Roots__P Parameter: Tissue Value: Roots vs. Whole Plant
  misc_feature: MA Experiment ID: 20000234 Result: Up-regulated in Transcription
  misc_feature: MA Experiment 20000234 PARAMETER Experiment Name: At_Siliques_P Parameter: Age (day) Value: 21
  misc_feature: MA Experiment 20000234 PARAMETER Experiment Name: At_Siliques_P Parameter: Organism Value: A. thaliana
  misc_feature: MA Experiment 20000234 PARAMETER Experiment Name: At_Siliques_P Parameter: Plant Line Value: WS
  misc_feature: MA Experiment 20000234 PARAMETER Experiment Name: At_Siliques_P Parameter: Tissue Value: Less Than 5mm Siliques vs. Whole Plant
  misc_feature: MA Experiment ID: 20000264 Result: Up-regulated in Transcription
  misc_feature: MA Experiment 20000264 PARAMETER Experiment Name: At_Open_Flower_P Parameter: Age (day) Value: 21
  misc_feature: MA Experiment 20000264 PARAMETER Experiment Name: At_Open_Flower_P Parameter: Plant Line Value: WS
  misc_feature: MA Experiment 20000264 PARAMETER Experiment Name: At_Open_Flower_P Parameter: Tissue Value: Open Flower vs. Whole Plant
  misc_feature: MA Experiment ID: 20000265 Result: Up-regulated in Transcription
  misc_feature: MA Experiment 20000265 PARAMETER Experiment Name: At_Open_Flower_P Parameter: Age (day) Value: 21
  misc_feature: MA Experiment 20000265 PARAMETER Experiment Name: At_Open_Flower_P Parameter: Plant Line Value: WS
  misc_feature: MA Experiment 20000265 PARAMETER Experiment Name: At_Open_Flower_P Parameter: Tissue Value: Closed Flower vs. Whole Plant
  misc_feature: MA Experiment ID: 20000286 Result: Up-regulated in Transcription
  misc_feature: MA Experiment 20000286 PARAMETER Experiment Name: At_Open_Flower_P Parameter: Age (day) Value: 21
  misc_feature: MA Experiment 20000286 PARAMETER Experiment Name: At_Open_Flower_P Parameter: Plant Line Value: WS
  misc_feature: MA Experiment 20000286 PARAMETER Experiment Name: At_Open_Flower_P Parameter: Tissue Value: Half Open vs. Whole Plant
  misc_feature: MA Experiment ID: 20000437 Result: Down-regulated in Transcription
  misc_feature: MA Experiment 20000437 PARAMETER Experiment Name: At_Drought_P Parameter: Age (day) Value: 8
  misc_feature: MA Experiment 20000437 PARAMETER Experiment Name: At_Drought_P Parameter: Organism Value: A. thaliana
  misc_feature: MA Experiment 20000437 PARAMETER Experiment Name: At_Drought_P Parameter: Plant Line Value: WS
  misc_feature: MA Experiment 20000437 PARAMETER Experiment Name: At_Drought_P Parameter: Timepoint (hr) Value: 24
  misc_feature: MA Experiment 20000437 PARAMETER Experiment Name: At_Drought_P Parameter: Tissue Value: Whole Plant
  misc_feature: MA Experiment 20000437 PARAMETER Experiment Name: At_Drought_P Parameter: Treatment Value: Drought vs. No Drought
  misc_feature: MA Experiment ID: 20001450 Result: Down-regulated in Transcription
  misc_feature: MA Experiment 20001450 PARAMETER Experiment Name: At_Far-red-induction_P Parameter: Age (day) Value: 7
  misc_feature: MA Experiment 20001450 PARAMETER Experiment Name: At_Far-red-induction_P Parameter: Light Value: Far-red vs. White
  misc_feature: MA Experiment 20001450 PARAMETER Experiment Name: At_Far-red-induction_P Parameter: Organism Value: A. thaliana
  misc_feature: MA Experiment 20001450 PARAMETER Experiment Name: At_Far-red-induction_P Parameter: Plant Line Value: Columbia
  misc_feature: MA Experiment 20001450 PARAMETER Experiment Name: At_Far-red-induction_P Parameter: Timepoint (hr) Value: 8
  misc_feature: MA Experiment 20001450 PARAMETER Experiment Name: At_Far-red-induction_P Parameter: Tissue Value: Whole Plant
  misc_feature: MA Experiment ID: 20001451 Result: Down-regulated in Transcription
  misc_feature: MA Experiment 20001451 PARAMETER Experiment Name: At_Far-red-induction_P Parameter: Age (day) Value: 7
  misc_feature: MA Experiment 20001451 PARAMETER Experiment Name: At_Far-red-induction_P Parameter: Light Value: Far-red vs. White
  misc_feature: MA Experiment 20001451 PARAMETER Experiment Name: At_Far-red-induction_P Parameter: Organism Value: A. thaliana
  misc_feature: MA Experiment 20001451 PARAMETER Experiment Name: At_Far-red-induction_P Parameter: Plant Line Value: Columbia
  misc_feature: MA Experiment 20001451 PARAMETER Experiment Name: At_Far-red-induction_P Parameter: Timepoint (hr) Value: 24
  misc_feature: MA Experiment 20001451 PARAMETER Experiment Name: At_Far-red-induction_P Parameter: Tissue Value: Whole Plant
aaagagagcgataatcccaaggaagaaaccaaagaaaaaaaatggtgaagatcaaatcgaacttgaagcagcttaagctctccgttccagctcaagaatccccaatctcttccttcctgactgcgagtggaacatttcacgatggagattttcttctgaatcaaaaggggctaaggttgacgtcagatgagaagcaatcaaggcaatctgatagcaaggagcttgatttcgaaattactgctgaagacttagagactgtcaaagtcatcggaaaaggcagtggtggtgttgttcaattagttcgtcataaatgggttggcaaattctttgctatgaaggtcatacagatgaatatacaagaagaaatccgtaagcaaattgttcaggagcttaaaataaaccaagcatcatcacaatgtccacatgtagtagtttgctaccattctttctatcacaatggagccttttcgcttgtgcttgaatacatggaccgtggatctcttgcggatgtgattagacaagtcaagactattcttgaaccttaccttgctgttgtctgtaaacaggttttgctaggtcttgtgtacctacacaacgaaagacatgtcatacacagagacattaagccatcaaaccttcttgtaaaccataaaggggaagtgaaaatctcagattttggtgtaagtgcaagtcttgctagctccatgggacagagggacacatttgttggaacctacaactatatgtcgcctgagaggattagtggaagcacatatgactacagcagtgacatttggagtttggggatgtcagtgttagaatgtgcaataggaagatttccttatttagaatctgaagatcagcaaaacccgccaagcttttatgaactcttggcagcaatagtagagaatccaccaccaactgctccttctgatcaattctcacctgaattctgctcctttgtatcagcctgcatacaaaaagatcctccagcaagagcatcatctttggacctcttgagtcatccattcataaaaaagtttgaggacaaggatatcgatctcgggatacttgttggcactctggaaccacctgttaactaccttagataa

SEQ ID NO: 106632 - protein, 356 aa, Arabidopsis thaliana
  peptide (1)..(356): Ceres Seq. ID no. 13620121
  misc_feature (70)..(331): Pfam Name: Protein kinase domain Pfam Description: Protein kinase domain
  misc_feature (1)..(356): Homolog of NCBI NO: 15241264 NR Description: mitogen-activated protein kinase kinase (MAPKK), (MKK6) [Arabidopsis thaliana] >gi|10176761|dbj|BAB09875.1| kinase MEK1 homolog [Arabidopsis thaliana]
  misc_feature (2)..(356): Homolog of NCBI NO: 12718822 NR Description: NQK1 MAPKK [Nicotiana tabacum]
  misc_feature (2)..(356): Homolog of NCBI NO: 12331300 NR Description: MAP kinase [Nicotiana tabacum]
  misc_feature (2)..(353): Homolog of NCBI NO: 7434320 NR Description: protein kinase MEK1 (EC 2.7.1.-) - maize
  misc_feature (9)..(353): Homolog of NCBI NO: 11869988 NR Description: MAP kinase kinase 1 [Oryza sativa]
  misc_feature (9)..(353): Homolog of NCBI NO: 34914584 NR Description: Oryza sativa MAP kinase kinase 1 [Oryza sativa
  misc_feature (11)..(352): Homolog of NCBI NO: 9843771 NR Description: MAP kinase kinase [Lycopersicon esculentum]
  misc_feature (11)..(352): Homolog of NCBI NO: 7434316 NR Description: protein kinase MEK1 - tomato
  misc_feature (7)..(341): Homolog of NCBI NO: 37625027 NR Description: putative mitogen-activated protein kinase kinase
  misc_feature (5)..(341): Homolog of NCBI NO: 15528441 NR Description: MAP kinase kinase [Medicago sativa subsp. x varia]
MVKIKSNLKQLKLSVPAQESPISSFLTASGTFHDGDFLLNQKGLRLTSDEKQSRQSDSKELDFEITAEDLETVKVIGKGSGGVVQLVRHKWVGKFFAMKVIQMNIQEEIRKQIVQELKINQASSQCPHVVVCYHSFYHNGAFSLVLEYMDRGSLADVIRQVKTILEPYLAVVCKQVLLGLVYLHNERHVIHRDIKPSNLLVNHKGEVKISDFGVSASLASSMGQRDTFVGTYNYMSPERISGSTYDYSSDIWSLGMSVLECAIGRFPYLESEDQQNPPSFYELLAAIVENPPPTAPSDQFSPEFCSFVSACIQKDPPARASSLDLLSHPFIKKFEDKDIDLGILVGTLEPPVNYLR

SEQ ID NO: 106633 - protein, 259 aa, Arabidopsis thaliana
  peptide (1)..(259): Ceres Seq. ID no. 13620122
  misc_feature (1)..(234): Pfam Name: Protein kinase domain Pfam Description: Protein kinase domain
  misc_feature (1)..(259): Homolog of NCBI NO: 15241264 NR Description: mitogen-activated protein kinase kinase (MAPKK), (MKK6) [Arabidopsis thaliana] >gi|10176761|dbj|BAB09875.1| kinase MEK1 homolog [Arabidopsis thaliana]
  misc_feature (1)..(259): Homolog of NCBI NO: 12718822 NR Description: NQK1 MAPKK [Nicotiana tabacum]
  misc_feature (1)..(259): Homolog of NCBI NO: 12331300 NR Description: MAP kinase [Nicotiana tabacum]
  misc_feature (1)..(256): Homolog of NCBI NO: 7434320 NR Description: protein kinase MEK1 (EC 2.7.1.-) - maize
  misc_feature (1)..(256): Homolog of NCBI NO: 11869988 NR Description: MAP kinase kinase 1 [Oryza sativa]
  misc_feature (1)..(256): Homolog of NCBI NO: 34914584 NR Description: Oryza sativa MAP kinase kinase 1 [Oryza sativa
  misc_feature (1)..(255): Homolog of NCBI NO: 9843771 NR Description: MAP kinase kinase [Lycopersicon esculentum]
  misc_feature (1)..(255): Homolog of NCBI NO: 7434316 NR Description: protein kinase MEK1 - tomato
  misc_feature (1)..(244): Homolog of NCBI NO: 37625027 NR Description: putative mitogen-activated protein kinase kinase
  misc_feature (1)..(244): Homolog of NCBI NO: 15528441 NR Description: MAP kinase kinase [Medicago sativa subsp. x varia]
MKVIQMNIQEEIRKQIVQELKINQASSQCPHVVVCYHSFYHNGAFSLVLEYMDRGSLADVIRQVKTILEPYLAVVCKQVLLGLVYLHNERHVIHRDIKPSNLLVNHKGEVKISDFGVSASLASSMGQRDTFVGTYNYMSPERISGSTYDYSSDIWSLGMSVLECAIGRFPYLESEDQQNPPSFYELLAAIVENPPPTAPSDQFSPEFCSFVSACIQKDPPARASSLDLLSHPFIKKFEDKDIDLGILVGTLEPPVNYLR

SEQ ID NO: 106634 - protein, 254 aa, Arabidopsis thaliana
  peptide (1)..(254): Ceres Seq. ID no. 13620123
  misc_feature (1)..(229): Pfam Name: Protein kinase domain Pfam Description: Protein kinase domain
  misc_feature (1)..(254): Homolog of NCBI NO: 15241264 NR Description: mitogen-activated protein kinase kinase (MAPKK), (MKK6) [Arabidopsis thaliana] >gi|10176761|dbj|BAB09875.1| kinase MEK1 homolog [Arabidopsis thaliana]
  misc_feature (1)..(254): Homolog of NCBI NO: 12718822 NR Description: NQK1 MAPKK [Nicotiana tabacum]
  misc_feature (1)..(254): Homolog of NCBI NO: 12331300 NR Description: MAP kinase [Nicotiana tabacum]
  misc_feature (1)..(251): Homolog of NCBI NO: 7434320 NR Description: protein kinase MEK1 (EC 2.7.1.-) - maize
  misc_feature (1)..(251): Homolog of NCBI NO: 11869988 NR Description: MAP kinase kinase 1 [Oryza sativa]
  misc_feature (1)..(251): Homolog of NCBI NO: 34914584 NR Description: Oryza sativa MAP kinase kinase 1 [Oryza sativa
  misc_feature (1)..(250): Homolog of NCBI NO: 9843771 NR Description: MAP kinase kinase [Lycopersicon esculentum]
  misc_feature (1)..(250): Homolog of NCBI NO: 7434316 NR Description: protein kinase MEK1 - tomato
  misc_feature (1)..(239): Homolog of NCBI NO: 37625027 NR Description: putative mitogen-activated protein kinase kinase
  misc_feature (1)..(239): Homolog of NCBI NO: 15528441 NR Description: MAP kinase kinase [Medicago sativa subsp. x varia]
MNIQEEIRKQIVQELKINQASSQCPHVVVCYHSFYHNGAFSLVLEYMDRGSLADVIRQVKTILEPYLAVVCKQVLLGLVYLHNERHVIHRDIKPSNLLVNHKGEVKISDFGVSASLASSMGQRDTFVGTYNYMSPERISGSTYDYSSDIWSLGMSVLECAIGRFPYLESEDQQNPPSFYELLAAIVENPPPTAPSDQFSPEFCSFVSACIQKDPPARASSLDLLSHPFIKKFEDKDIDLGILVGTLEPPVNYLR

SEQ ID NO: 106635 - DNA, 1265 bp, Arabidopsis thaliana
  misc_feature (1)..(1265): Ceres Seq. ID no. 13620124
  misc_feature: MA Experiment ID: 20001248 Result: Up-regulated in Transcription
  misc_feature: MA Experiment 20001248 PARAMETER Experiment Name: At_Far-red-induction_P Parameter: Age (day) Value: 7
  misc_feature: MA Experiment 20001248 PARAMETER Experiment Name: At_Far-red-induction_P Parameter: Light Value: Far-red vs. White
  misc_feature: MA Experiment 20001248 PARAMETER Experiment Name: At_Far-red-induction_P Parameter: Organism Value: A. thaliana
  misc_feature: MA Experiment 20001248 PARAMETER Experiment Name: At_Far-red-induction_P Parameter: Plant Line Value: Columbia
  misc_feature: MA Experiment 20001248 PARAMETER Experiment Name: At_Far-red-induction_P Parameter: Timepoint (hr) Value: 4
  misc_feature: MA Experiment 20001248 PARAMETER Experiment Name: At_Far-red-induction_P Parameter: Tissue Value: Whole Plant
ggtgacaagagcagagagagtcgccatggacgcagcagattgctatctcgaaggaaacgccgacgccgtagaattctgtcctcacgagtcttacgcaaacttgctcgcagcttcgacttatacacttcaagaaggagattgtccctctcgatccgggtcagtgtatctatttgatgtcggagatgttgaagatgttggcttgaatcttatccagaaaattgacactgctggagttttcgatatccggtggagtcgtggtggcgatggaggagacgtggcgcttgctcaggctgatgctgatggatgcttgatagtttacaagatagatgagactgaaagtaaaggtactctgagagaagtctccgggaaaagaatcagctcatcaatgtgtctttgtttggattgggatccatcatcaacatcaatcgttgttggtttatcagatggctctgcttcagttgtttcattcacggattctaatctagaaacagttcaagaatggaaagggcatgactttgagctttggacggcgtcattcgatctcaacaatcctaatttggtctatactggatcagatgattgcaagttcagctgttgggatatcagagatagtccggctgacaatcgggtttttcagaattccaaagttcatacaatgggtgtttgctgtatttcatcaaacccaagtgatccttactctatattcaccggaagttatgatgaaaccttaagagtttgggacacgaggtctgtttcgagacctctgaacgaaacatcagtgtctttaggtggtggagtgtggagaatcaagcaccatccttctctgagcggtgttgtattggcggcttgtatgcataacggttttgctttagcgaaggttagtgatgggaaaggtgaagtgttggagagttataacaagcatcattctcttgcttatggagcagattggtacagagggaaagatcagaagcaaagcgttgtggcaacttgttcgttttatgatcggcttcttcgggtatggatgccgataactgatttttccacacgatgttcctaaacttaagaacacagctgttaaggtagattcatctgtgctccgacttgaattaggaaatttctttgagctctgatttcgaagggtcatgttgttgtacttcgttttccttatttcccggaatatttatttggttgaagttgtttcaagaaccatctgatatggttgaaacaacttgaaccccatacttaatgaaagtgaatttaataac

SEQ ID NO: 106636 - protein, 351 aa, Arabidopsis thaliana
  peptide (1)..(351): Ceres Seq. ID no. 13620125
  misc_feature (9)..(351): Homolog of NCBI NO: 15242588 NR Description: WD-40 repeat protein family [Arabidopsis >gi|9758301|dbj|BAB08844.1| gene_id:MJH22.7~unknown protein
  misc_feature (9)..(275): Homolog of NCBI NO: 26450621 NR Description: unknown protein [Arabidopsis thaliana]
  misc_feature (9)..(342): Homolog of NCBI NO: 32489522 NR Description: OSJNBa0043L24.13 [Oryza sativa (japonica
  misc_feature (17)..(339): Homolog of NCBI NO: 18858115 NR Description: CG3184-PA [Drosophila melanogaster]
  misc_feature (50)..(316): Homolog of NCBI NO: 24308452 NR Description: hypothetical protein BC017335 [Homo sapiens] Unknown (protein for MGC:29782) [Homo sapiens]
  misc_feature (23)..(316): Homolog of NCBI NO: 34853114 NR Description: similar to RIKEN cDNA 2810443J12 [Rattus
  misc_feature (44)..(316): Homolog of NCBI NO: 21313066 NR Description: RIKEN cDNA 2810443J12 [Mus musculus] unnamed protein product [Mus musculus]
  misc_feature (58)..(316): Homolog of NCBI NO: 31206245 NR Description: ENSANGP00000016926 [Anopheles gambiae]
  misc_feature (94)..(343): Homolog of NCBI NO: 19075894 NR Description: hypothetical protein [Schizosaccharomyces pombe]
  misc_feature (116)..(316): Homolog of NCBI NO: 26352908 NR Description: unnamed protein product [Mus musculus]
VTRAERVAMDAADCYLEGNADAVEFCPHESYANLLAASTYTLQEGDCPSRSGSVYLFDVGDVEDVGLNLIQKIDTAGVFDIRWSRGGDGGDVALAQADADGCLIVYKIDETESKGTLREVSGKRISSSMCLCLDWDPSSTSIVVGLSDGSASVVSFTDSNLETVQEWKGHDFELWTASFDLNNPNLVYTGSDDCKFSCWDIRDSPADNRVFQNSKVHTMGVCCISSNPSDPYSIFTGSYDETLRVWDTRSVSRPLNETSVSLGGGVWRIKHHPSLSGVVLAACMHNGFALAKVSDGKGEVLESYNKHHSLAYGADWYRGKDQKQSVVATCSFYDRLLRVWMPITDFSTRCS

SEQ ID NO: 106637 - protein, 343 aa, Arabidopsis thaliana
  peptide (1)..(343): Ceres Seq. ID no. 13620126
  misc_feature (1)..(343): Homolog of NCBI NO: 15242588 NR Description: WD-40 repeat protein family [Arabidopsis >gi|9758301|dbj|BAB08844.1| gene_id:MJH22.7~unknown protein
  misc_feature (1)..(267): Homolog of NCBI NO: 26450621 NR Description: unknown protein [Arabidopsis thaliana]
  misc_feature (1)..(334): Homolog of NCBI NO: 32489522 NR Description: OSJNBa0043L24.13 [Oryza sativa (japonica
  misc_feature (9)..(331): Homolog of NCBI NO: 18858115 NR Description: CG3184-PA [Drosophila melanogaster]
  misc_feature (42)..(308): Homolog of NCBI NO: 24308452 NR Description: hypothetical protein BC017335 [Homo sapiens] Unknown (protein for MGC:29782) [Homo sapiens]
  misc_feature (15)..(308): Homolog of NCBI NO: 34853114 NR Description: similar to RIKEN cDNA 2810443J12 [Rattus
  misc_feature (36)..(308): Homolog of NCBI NO: 21313066 NR Description: RIKEN cDNA 2810443J12 [Mus musculus] unnamed protein product [Mus musculus]
  misc_feature (50)..(308): Homolog of NCBI NO: 31206245 NR Description: ENSANGP00000016926 [Anopheles gambiae]
  misc_feature (86)..(335): Homolog of NCBI NO: 19075894 NR Description: hypothetical protein [Schizosaccharomyces pombe]
  misc_feature (108)..(308): Homolog of NCBI NO: 26352908 NR Description: unnamed protein product [Mus musculus]
MDAADCYLEGNADAVEFCPHESYANLLAASTYTLQEGDCPSRSGSVYLFDVGDVEDVGLNLIQKIDTAGVFDIRWSRGGDGGDVALAQADADGCLIVYKIDETESKGTLREVSGKRISSSMCLCLDWDPSSTSIVVGLSDGSASVVSFTDSNLETVQEWKGHDFELWTASFDLNNPNLVYTGSDDCKFSCWDIRDSPADNRVFQNSKVHTMGVCCISSNPSDPYSIFTGSYDETLRVWDTRSVSRPLNETSVSLGGGVWRIKHHPSLSGVVLAACMHNGFALAKVSDGKGEVLESYNKHHSLAYGADWYRGKDQKQSVVATCSFYDRLLRVWMPITDFSTRCS

SEQ ID NO: 106638 - protein, 223 aa, Arabidopsis thaliana
  peptide (1)..(223): Ceres Seq. ID no. 13620127
  misc_feature (1)..(223): Homolog of NCBI NO: 15242588 NR Description: WD-40 repeat protein family [Arabidopsis >gi|9758301|dbj|BAB08844.1| gene_id:MJH22.7~unknown protein
  misc_feature (1)..(147): Homolog of NCBI NO: 26450621 NR Description: unknown protein [Arabidopsis thaliana]
  misc_feature (1)..(214): Homolog of NCBI NO: 32489522 NR Description: OSJNBa0043L24.13 [Oryza sativa (japonica
  misc_feature (1)..(211): Homolog of NCBI NO: 18858115 NR Description: CG3184-PA [Drosophila melanogaster]
  misc_feature (1)..(188): Homolog of NCBI NO: 24308452 NR Description: hypothetical protein BC017335 [Homo sapiens] Unknown (protein for MGC:29782) [Homo sapiens]
  misc_feature (1)..(188): Homolog of NCBI NO: 34853114 NR Description: similar to RIKEN cDNA 2810443J12 [Rattus
  misc_feature (1)..(188): Homolog of NCBI NO: 21313066 NR Description: RIKEN cDNA 2810443J12 [Mus musculus] unnamed protein product [Mus musculus]
  misc_feature (1)..(188): Homolog of NCBI NO: 31206245 NR Description: ENSANGP00000016926 [Anopheles gambiae]
  misc_feature (1)..(215): Homolog of NCBI NO: 19075894 NR Description: hypothetical protein [Schizosaccharomyces pombe]
  misc_feature (1)..(188): Homolog of NCBI NO: 26352908 NR Description: unnamed protein product [Mus musculus]
MCLCLDWDPSSTSIVVGLSDGSASVVSFTDSNLETVQEWKGHDFELWTASFDLNNPNLVYTGSDDCKFSCWDIRDSPADNRVFQNSKVHTMGVCCISSNPSDPYSIFTGSYDETLRVWDTRSVSRPLNETSVSLGGGVWRIKHHPSLSGVVLAACMHNGFALAKVSDGKGEVLESYNKHHSLAYGADWYRGKDQKQSVVATCSFYDRLLRVWMPITDFSTRCS

SEQ ID NO: 106639 - DNA, 1184 bp, Arabidopsis thaliana
  misc_feature (1)..(1184): Ceres Seq. ID no. 13620131
  misc_feature: MA Experiment ID: 20000307 Result: Down-regulated in Transcription
  misc_feature: MA Experiment 20000307 PARAMETER Experiment Name: At_Germinating_Seeds_Sub_P Parameter: Age (hr) Value: 24 vs. 0
  misc_feature: MA Experiment 20000307 PARAMETER Experiment Name: At_Germinating_Seeds_Sub_P Parameter: Organism Value: A. thaliana
  misc_feature: MA Experiment 20000307 PARAMETER Experiment Name: At_Germinating_Seeds_Sub_P Parameter: Plant Line Value: WS
  misc_feature: MA Experiment 20000307 PARAMETER Experiment Name: At_Germinating_Seeds_Sub_P Parameter: Tissue Value: Germinating Seeds
  misc_feature: MA Experiment ID: 20000352 Result: Up-regulated in Transcription
  misc_feature: MA Experiment 20000352 PARAMETER Experiment Name: At_Drought_Sub_P Parameter: Age (day) Value: 7
  misc_feature: MA Experiment 20000352 PARAMETER Experiment Name: At_Drought_Sub_P Parameter: Organism Value: A. thaliana
  misc_feature: MA Experiment 20000352 PARAMETER Experiment Name: At_Drought_Sub_P Parameter: Plant Line Value: WS
  misc_feature: MA Experiment 20000352 PARAMETER Experiment Name: At_Drought_Sub_P Parameter: Timepoint (hr) Value: 6
  misc_feature: MA Experiment 20000352 PARAMETER Experiment Name: At_Drought_Sub_P Parameter: Tissue Value: Whole Plant
  misc_feature: MA Experiment 20000352 PARAMETER Experiment Name: At_Drought_Sub_P Parameter: Treatment Value: Drought vs. No Drought
  misc_feature: MA Experiment ID: 20000355 Result: Down-regulated in Transcription
  misc_feature: MA Experiment 20000355 PARAMETER Experiment Name: At_Siliques_Sub_P Parameter: Age (day) Value: 21
  misc_feature: MA Experiment 20000355 PARAMETER Experiment Name: At_Siliques_Sub_P Parameter: Organism Value: A. thaliana
  misc_feature: MA Experiment 20000355 PARAMETER Experiment Name: At_Siliques_Sub_P Parameter: Plant Line Value: WS
  misc_feature: MA Experiment 20000355 PARAMETER Experiment Name: At_Siliques_Sub_P Parameter: Tissue Value: Less Than 5mm Siliques vs. Whole Plant
attcttcaaagctcccactaaaacctattaagagagaaagatatatacagagagagatcatggacggtaggggaggttgttgcatagccagatatggtggttacggtggtcgctacggtctctccaaagcagatcgaatcatgcttcgttttcgtcccattgctcctaaaccggccagcgacggtggaagtgtctctctcaccgggaagagcggctccaccacaactacaagtggtggaagctccgatctctcaggtaaatctgggagaggaaagagaaagtatcaaaaagattgttccggtgggaactcccgaaggtgcaataagaagaagagagatctaagtggagacactgctactaccacggcggttacattgtctcttttaccagagacgcctgagaaacgagtttttccagatctgaatgcttttccggtggagaagcagaagcgaaacggtcctttatggctgagtttcaacggcggtggtgagattttaacgccgtacaaaacggcggagatatcacgaaggacggtggtggtttcgtcgtgtgtgacggttgagcgtgtgactgacgcttggatcgacggttatggattaggggagacaaatcaggagaggaagatgaatctagtggaagacacgtgtcctggttttatatcggacggtgtagggagagtcacgtggaccaatgaggcgtataagaagatggctagagaagatattaatattccgatggaggaaggtgtaccggaggatattagttacgataattttcacgtgaacgtacggttagtgatgaaggagaggccgatgctaacgtacccagctttcacatgcagagtgagattacagtacacgtgtcaagatcgagaaagaggatccgtcacggtgccttgtgacgtgtggagaatggacggcggtggttttgcgtggaggcttgacgttaaggcagctttgtgtctgtgacgttctttcattcgccaccgttggatttacaatggtgaaaatgatgaatggtcccgatcgtatcgtatcacacatggcccttcgtagaactaaaaatatagcaagtgataaactttggttatttaattttcaccttgaacatatgtttctgtgttttattttttagtttgctttcttctttagttagtattttgtttataaaatgctgttttctct

SEQ ID NO: 106640 - protein, 321 aa, Arabidopsis thaliana
  peptide (1)..(321): Ceres Seq. ID no. 13620132
  misc_feature (20)..(321): Homolog of NCBI NO: 15242729 NR Description: expressed protein [Arabidopsis thaliana] emb|CAB62340.1~gene_id:K9H21.5~similar to unknown protein thaliana] >gi|27754383|gb|AAO22640.1| unknown protein
  misc_feature (20)..(321): Homolog of NCBI NO: 18408645 NR Description: expressed protein [Arabidopsis thaliana]
  misc_feature (20)..(321): Homolog of NCBI NO: 21537225 NR Description: unknown [Arabidopsis thaliana]
  misc_feature (20)..(321): Homolog of NCBI NO: 15240662 NR Description: expressed protein [Arabidopsis thaliana] emb|CAB62340.1~gene_id:MXI22.7~similar to unknown protein thaliana] >gi|13878117|gb|AAK44136.1|AF370321_1 unknown protein
  misc_feature (44)..(321): Homolog of NCBI NO: 15232126 NR Description: expressed protein [Arabidopsis thaliana] emb|CAB62340.1~gene_id:K17E12.7~similar to unknown protein
  misc_feature (20)..(321): Homolog of NCBI NO: 15237494 NR Description: hypothetical protein [Arabidopsis thaliana] emb|CAB62340.1~gene_id:MHK7.2~similar to unknown protein
  misc_feature (73)..(321): Homolog of NCBI NO: 15237495 NR Description: hypothetical protein [Arabidopsis thaliana] emb|CAB62340.1~gene_id:MHK7.3~similar to unknown protein
SSKLPLKPIKRERYIQREIMDGRGGCCIARYGGYGGRYGLSKADRIMLRFRPIAPKPASDGGSVSLTGKSGSTTTTSGGSSDLSGKSGRGKRKYQKDCSGGNSRRCNKKKRDLSGDTATTTAVTLSLLPETPEKRVFPDLNAFPVEKQKRNGPLWLSFNGGGEILTPYKTAEISRRTVVVSSCVTVERVTDAWIDGYGLGETNQERKMNLVEDTCPGFISDGVGRVTWTNEAYKKMAREDINIPMEEGVPEDISYDNFHVNVRLVMKERPMLTYPAFTCRVRLQYTCQDRERGSVTVPCDVWRMDGGGFAWRLDVKAALCL

SEQ ID NO: 106641 - protein, 302 aa, Arabidopsis thaliana
  peptide (1)..(302): Ceres Seq. ID no. 13620133
  misc_feature (1)..(302): Homolog of NCBI NO: 15242729 NR Description: expressed protein [Arabidopsis thaliana] emb|CAB62340.1~gene_id:K9H21.5~similar to unknown protein thaliana] >gi|27754383|gb|AAO22640.1| unknown protein
  misc_feature (1)..(302): Homolog of NCBI NO: 18408645 NR Description: expressed protein [Arabidopsis thaliana]
  misc_feature (1)..(302): Homolog of NCBI NO: 21537225 NR Description: unknown [Arabidopsis thaliana]
  misc_feature (1)..(302): Homolog of NCBI NO: 15240662 NR Description: expressed protein [Arabidopsis thaliana] emb|CAB62340.1~gene_id:MXI22.7~similar to unknown protein thaliana] >gi|13878117|gb|AAK44136.1|AF370321_1 unknown protein
  misc_feature (25)..(302): Homolog of NCBI NO: 15232126 NR Description: expressed protein [Arabidopsis thaliana] emb|CAB62340.1~gene_id:K17E12.7~similar to unknown protein
  misc_feature (1)..(302): Homolog of NCBI NO: 15237494 NR Description: hypothetical protein [Arabidopsis thaliana] emb|CAB62340.1~gene_id:MHK7.2~similar to unknown protein
  misc_feature (54)..(302): Homolog of NCBI NO: 15237495 NR Description: hypothetical protein [Arabidopsis thaliana] emb|CAB62340.1~gene_id:MHK7.3~similar to unknown protein
MDGRGGCCIARYGGYGGRYGLSKADRIMLRFRPIAPKPASDGGSVSLTGKSGSTTTTSGGSSDLSGKSGRGKRKYQKDCSGGNSRRCNKKKRDLSGDTATTTAVTLSLLPETPEKRVFPDLNAFPVEKQKRNGPLWLSFNGGGEILTPYKTAEISRRTVVVSSCVTVERVTDAWIDGYGLGETNQERKMNLVEDTCPGFISDGVGRVTWTNEAYKKMAREDINIPMEEGVPEDISYDNFHVNVRLVMKERPMLTYPAFTCRVRLQYTCQDRERGSVTVPCDVWRMDGGGFAWRLDVKAALCL

SEQ ID NO: 106642 - protein, 275 aa, Arabidopsis thaliana
  peptide (1)..(275): Ceres Seq. ID no. 13620134
  misc_feature (1)..(275): Homolog of NCBI NO: 15242729 NR Description: expressed protein [Arabidopsis thaliana] emb|CAB62340.1~gene_id:K9H21.5~similar to unknown protein thaliana] >gi|27754383|gb|AAO22640.1| unknown protein
  misc_feature (1)..(275): Homolog of NCBI NO: 18408645 NR Description: expressed protein [Arabidopsis thaliana]
  misc_feature (1)..(275): Homolog of NCBI NO: 21537225 NR Description: unknown [Arabidopsis thaliana]
  misc_feature (1)..(275): Homolog of NCBI NO: 15240662 NR Description: expressed protein [Arabidopsis thaliana] emb|CAB62340.1~gene_id:MXI22.7~similar to unknown protein thaliana] >gi|13878117|gb|AAK44136.1|AF370321_1 unknown protein
  misc_feature (1)..(275): Homolog of NCBI NO: 15232126 NR Description: expressed protein [Arabidopsis thaliana] emb|CAB62340.1~gene_id:K17E12.7~similar to unknown protein
  misc_feature (1)..(275): Homolog of NCBI NO: 15237494 NR Description: hypothetical protein [Arabidopsis thaliana] emb|CAB62340.1~gene_id:MHK7.2~similar to unknown protein
  misc_feature (27)..(275): Homolog of NCBI NO: 15237495 NR Description: hypothetical protein [Arabidopsis thaliana] emb|CAB62340.1~gene_id:MHK7.3~similar to unknown protein
MLRFRPIAPKPASDGGSVSLTGKSGSTTTTSGGSSDLSGKSGRGKRKYQKDCSGGNSRRCNKKKRDLSGDTATTTAVTLSLLPETPEKRVFPDLNAFPVEKQKRNGPLWLSFNGGGEILTPYKTAEISRRTVVVSSCVTVERVTDAWIDGYGLGETNQERKMNLVEDTCPGFISDGVGRVTWTNEAYKKMAREDINIPMEEGVPEDISYDNFHVNVRLVMKERPMLTYPAFTCRVRLQYTCQDRERGSVTVPCDVWRMDGGGFAWRLDVKAALCL

SEQ ID NO: 106643 - DNA, 1135 bp, Arabidopsis thaliana
  misc_feature (1)..(1135): Ceres Seq. ID no. 13620135
  misc_feature: MA Experiment ID: 20000184 Result: Down-regulated in Transcription
  misc_feature: MA Experiment 20000184 PARAMETER Experiment Name: At_Shoots__P Parameter: Age (day) Value: 7
  misc_feature: MA Experiment 20000184 PARAMETER Experiment Name: At_Shoots__P Parameter: Tissue Value: Shoots vs. Whole Plant
  misc_feature: MA Experiment ID: 20000234 Result: Down-regulated in Transcription
  misc_feature: MA Experiment 20000234 PARAMETER Experiment Name: At_Siliques_P Parameter: Age (day) Value: 21
  misc_feature: MA Experiment 20000234 PARAMETER Experiment Name: At_Siliques_P Parameter: Organism Value: A. thaliana
  misc_feature: MA Experiment 20000234 PARAMETER Experiment Name: At_Siliques_P Parameter: Plant Line Value: WS
  misc_feature: MA Experiment 20000234 PARAMETER Experiment Name: At_Siliques_P Parameter: Tissue Value: Less Than 5mm Siliques vs. Whole Plant
  misc_feature: MA Experiment ID: 20000264 Result: Down-regulated in Transcription
  misc_feature: MA Experiment 20000264 PARAMETER Experiment Name: At_Open_Flower_P Parameter: Age (day) Value: 21
  misc_feature: MA Experiment 20000264 PARAMETER Experiment Name: At_Open_Flower_P Parameter: Plant Line Value: WS
  misc_feature: MA Experiment 20000264 PARAMETER Experiment Name: At_Open_Flower_P Parameter: Tissue Value: Open Flower vs. Whole Plant
  misc_feature: MA Experiment ID: 20000265 Result: Down-regulated in Transcription
  misc_feature: MA Experiment 20000265 PARAMETER Experiment Name: At_Open_Flower_P Parameter: Age (day) Value: 21
  misc_feature: MA Experiment 20000265 PARAMETER Experiment Name: At_Open_Flower_P Parameter: Plant Line Value: WS
  misc_feature: MA Experiment 20000265 PARAMETER Experiment Name: At_Open_Flower_P Parameter: Tissue Value: Closed Flower vs. Whole Plant
  misc_feature: MA Experiment ID: 20000286 Result: Down-regulated in Transcription
  misc_feature: MA Experiment 20000286 PARAMETER Experiment Name: At_Open_Flower_P Parameter: Age (day) Value: 21
  misc_feature: MA Experiment 20000286 PARAMETER Experiment Name: At_Open_Flower_P Parameter: Plant Line Value: WS
  misc_feature: MA Experiment 20000286 PARAMETER Experiment Name: At_Open_Flower_P Parameter: Tissue Value: Half Open vs. Whole Plant
  misc_feature: MA Experiment ID: 20000438 Result: Down-regulated in Transcription
  misc_feature: MA Experiment 20000438 PARAMETER Experiment Name: At_Shoots__P Parameter: Age (day) Value: 14
  misc_feature: MA Experiment 20000438 PARAMETER Experiment Name: At_Shoots__P Parameter: Tissue Value: Shoots vs. Whole Plant
  misc_feature: MA Experiment ID: 20000439 Result: Down-regulated in Transcription
  misc_feature: MA Experiment 20000439 PARAMETER Experiment Name: At_Roots__P Parameter: Age (day) Value: 14 vs. 21
  misc_feature: MA Experiment 20000439 PARAMETER Experiment Name: At_Roots__P Parameter: Organism Value: A. thaliana
  misc_feature: MA Experiment 20000439 PARAMETER Experiment Name: At_Roots__P Parameter: Tissue Value: Roots vs. Whole Plant
  misc_feature: MA Experiment ID: 20000794 Result: Down-regulated in Transcription
  misc_feature: MA Experiment 20000794 PARAMETER Experiment Name: At_Petals_P Parameter: Age (day) Value: 23-25 days
  misc_feature: MA Experiment 20000794 PARAMETER Experiment Name: At_Petals_P Parameter: Plant Line Value: WS
  misc_feature: MA Experiment 20000794 PARAMETER Experiment Name: At_Petals_P Parameter: Tissue Value: Petals vs. Whole plant
  misc_feature: MA Experiment ID: 20001504 Result: Up-regulated in Transcription
  misc_feature: MA Experiment 20001504 PARAMETER Experiment Name: At_Far-red-enriched_P Parameter: Age (day) Value: 10
  misc_feature: MA Experiment 20001504 PARAMETER Experiment Name: At_Far-red-enriched_P Parameter: Light Value: Far-red enriched vs. White
  misc_feature: MA Experiment 20001504 PARAMETER Experiment Name: At_Far-red-enriched_P Parameter: Organism Value: A. thaliana
  misc_feature: MA Experiment 20001504 PARAMETER Experiment Name: At_Far-red-enriched_P Parameter: Plant Line Value: Columbia
  misc_feature: MA Experiment 20001504 PARAMETER Experiment Name: At_Far-red-enriched_P Parameter: Timepoint (day) Value: 6
  misc_feature: MA Experiment 20001504 PARAMETER Experiment Name: At_Far-red-enriched_P Parameter: Tissue Value: Whole Plant
atggaagttgagagagatcaacacatttctccaccatctcttatggccaagacgatccctatcatcgatctaagcaatcttgacgaagagctagtggcacatgcggtggtgaaagggagtgaagagtggggcatttttcacgtggttaatcacggaatcccgatggatttgatacagcggttgaaggacgttggtacacagttcttcgagctcccggagacggagaagaaagccgtagcaaaacaagatggctccaaagacttcgaaggttacacgacgaatctcaagtatgtaaaaggtgaggtttggaccgagaatctttttcacagaatctggccaccgacgtgtatcaattttgattactggcccaagaatcctcctcaatacagggaagtgattgaggagtacacaaaggagactaagaagctatccgagaggattttagggtatttatcagagggattagggttaccaagtgaggccttgatacaaggtctcggtggggaatcgaccgagtatgtaatgaggatcaacaattatcctcctgacccgaaacctgatttgactctaggagtgccggagcacactgacatcattggaatcacaatcattatcaccaatgaagttccagggcttcagattttcaaggacgatcattggttagatgtccactacattccctcctctataaccgtcaacattggcgatcagataatggctgagcaatggaaagtacaagaatgtgttgcatagagcgatagtggataaggagaatcaaaggatgtcatggccggtttttgtggatgctaatcctgatgtggttatcggaccattgccggagctcattaccggcgataatccatcaaagttcaagcctattacttgcaaggactttaagtaccgtaggctcctcaaacttcctatcgagtgaactcaaatatattagttgagtcttgtgtgtttactacatatatattgtgatattgttatattttaagttaagggtgtgtaaaagaattgatatactactaaaacaatacctacactacatgcactcaaaatattcttaaaagtatttaagtgctatattaatattttgtattcaaatttcatcaaaatatttaaagaaaattac

SEQ ID NO: 106644 - protein, 250 aa, Arabidopsis thaliana
  peptide (1)..(250): Ceres Seq. ID no. 13620136
  misc_feature (171)..(239): Pfam Name: 2OG-Fe(II) oxygenase superfamily Pfam Description: 2OG-Fe(II) oxygenase superfamily
  misc_feature (1)..(239): Homolog of NCBI NO: 10177039 NR Description: flavonol synthase [Arabidopsis thaliana]
  misc_feature (1)..(250): Homolog of NCBI NO: 15242825 NR Description: flavonol synthase, putative [Arabidopsis thaliana]
  misc_feature (9)..(250): Homolog of NCBI NO: 27754528 NR Description: putative flavonol synthase [Arabidopsis thaliana]
  misc_feature (19)..(239): Homolog of NCBI NO: 15242339 NR Description: flavonol synthase 1 (FLS1) [Arabidopsis thaliana] Flavonol synthase 1 (FLS 1) >gi|1628622|gb|AAB17393.1| flavonol [Arabidopsis thaliana] >gi|9759358|dbj|BAB10013.1| flavonol
  misc_feature (1)..(239): Homolog of NCBI NO: 21554244 NR Description: flavonol synthase [Arabidopsis thaliana]
  misc_feature (1)..(239): Homolog of NCBI NO: 15242827 NR Description: flavonol synthase, putative [Arabidopsis >gi|10177040|dbj|BAB10452.1| flavonol synthase [Arabidopsis
  misc_feature (19)..(239): Homolog of NCBI NO: 6015164 NR Description: Flavonol synthase (FLS)
  misc_feature (16)..(239): Homolog of NCBI NO: 15242828 NR Description: flavonol synthase, putative [Arabidopsis thaliana]
  misc_feature (19)..(238): Homolog of NCBI NO: 14916564 NR Description: Flavonol synthase (FLS)
  misc_feature (16)..(238): Homolog of NCBI NO: 14916566 NR Description: Flavonol synthase (FLS) (CitFLS)
MEVERDQHISPPSLMAKTIPIIDLSNLDEELVAHAVVKGSEEWGIFHVVNHGIPMDLIQRLKDVGTQFFELPETEKKAVAKQDGSKDFEGYTTNLKYVKGEVWTENLFHRIWPPTCINFDYWPKNPPQYREVIEEYTKETKKLSERILGYLSEGLGLPSEALIQGLGGESTEYVMRINNYPPDPKPDLTLGVPEHTDIIGITIIITNEVPGLQIFKDDHWLDVHYIPSSITVNIGDQIMAEQWKVQECVA

SEQ ID NO: 106645 - protein, 236 aa, Arabidopsis thaliana
  peptide (1)..(236): Ceres Seq. ID no. 13620137
  misc_feature (157)..(225): Pfam Name: 2OG-Fe(II) oxygenase superfamily Pfam Description: 2OG-Fe(II) oxygenase superfamily
  misc_feature (1)..(225): Homolog of NCBI NO: 10177039 NR Description: flavonol synthase [Arabidopsis thaliana]
  misc_feature (1)..(236): Homolog of NCBI NO: 15242825 NR Description: flavonol synthase, putative [Arabidopsis thaliana]
  misc_feature (1)..(236): Homolog of NCBI NO: 27754528 NR Description: putative flavonol synthase [Arabidopsis thaliana]
  misc_feature (5)..(225): Homolog of NCBI NO: 15242339 NR Description: flavonol synthase 1 (FLS1) [Arabidopsis thaliana] Flavonol synthase 1 (FLS 1) >gi|1628622|gb|AAB17393.1| flavonol [Arabidopsis thaliana] >gi|9759358|dbj|BAB10013.1| flavonol
  misc_feature (1)..(225): Homolog of NCBI NO: 21554244 NR Description: flavonol synthase [Arabidopsis thaliana]
  misc_feature (1)..(225): Homolog of NCBI NO: 15242827 NR Description: flavonol synthase, putative [Arabidopsis >gi|10177040|dbj|BAB10452.1| flavonol synthase [Arabidopsis
  misc_feature (5)..(225): Homolog of NCBI NO: 6015164 NR Description: Flavonol synthase (FLS)
  misc_feature (2)..(225): Homolog of NCBI NO: 15242828 NR Description: flavonol synthase, putative [Arabidopsis thaliana]
  misc_feature (5)..(224): Homolog of NCBI NO: 14916564 NR Description: Flavonol synthase (FLS)
  misc_feature (2)..(224): Homolog of NCBI NO: 14916566 NR Description: Flavonol synthase (FLS) (CitFLS)
MAKTIPIIDLSNLDEELVAHAVVKGSEEWGIFHVVNHGIPMDLIQRLKDVGTQFFELPETEKKAVAKQDGSKDFEGYTTNLKYVKGEVWTENLFHRIWPPTCINFDYWPKNPPQYREVIEEYTKETKKLSERILGYLSEGLGLPSEALIQGLGGESTEYVMRINNYPPDPKPDLTLGVPEHTDIIGITIIITNEVPGLQIFKDDHWLDVHYIPSSITVNIGDQIMAEQWKVQECVA

SEQ ID NO: 106646 - protein, 196 aa, Arabidopsis thaliana
  peptide (1)..(196): Ceres Seq. ID no. 13620138
  misc_feature (117)..(185): Pfam Name: 2OG-Fe(II) oxygenase superfamily Pfam Description: 2OG-Fe(II) oxygenase superfamily
  misc_feature (1)..(185): Homolog of NCBI NO: 10177039 NR Description: flavonol synthase [Arabidopsis thaliana]
  misc_feature (1)..(196): Homolog of NCBI NO: 15242825 NR Description: flavonol synthase, putative [Arabidopsis thaliana]
  misc_feature (1)..(196): Homolog of NCBI NO: 27754528 NR Description: putative flavonol synthase [Arabidopsis thaliana]
  misc_feature (1)..(185): Homolog of NCBI NO: 15242339 NR Description: flavonol synthase 1 (FLS1) [Arabidopsis thaliana] Flavonol synthase 1 (FLS 1) >gi|1628622|gb|AAB17393.1| flavonol [Arabidopsis thaliana] >gi|9759358|dbj|BAB10013.1| flavonol
  misc_feature (1)..(185): Homolog of NCBI NO: 21554244 NR Description: flavonol synthase [Arabidopsis thaliana]
  misc_feature (1)..(185): Homolog of NCBI NO: 15242827 NR Description: flavonol synthase, putative [Arabidopsis >gi|10177040|dbj|BAB10452.1| flavonol synthase [Arabidopsis
  misc_feature (1)..(185): Homolog of NCBI NO: 6015164 NR Description: Flavonol synthase (FLS)
  misc_feature (1)..(185): Homolog of NCBI NO: 15242828 NR Description: flavonol synthase, putative [Arabidopsis thaliana]
  misc_feature (1)..(184): Homolog of NCBI NO: 14916564 NR Description: Flavonol synthase (FLS)
  misc_feature (1)..(184): Homolog of NCBI NO: 14916566 NR Description: Flavonol synthase (FLS) (CitFLS)
MDLIQRLKDVGTQFFELPETEKKAVAKQDGSKDFEGYTTNLKYVKGEVWTENLFHRIWPPTCINFDYWPKNPPQYREVIEEYTKETKKLSERILGYLSEGLGLPSEALIQGLGGESTEYVMRINNYPPDPKPDLTLGVPEHTDIIGITIIITNEVPGLQIFKDDHWLDVHYIPSSITVNIGDQIMAEQWKVQECVA

SEQ ID NO: 106647 - DNA, 2688 bp, Arabidopsis thaliana
  misc_feature (1)..(2688): Ceres Seq. ID no. 13620143
  misc_feature: MA Experiment ID: 108434 Result: Down-regulated in Transcription
  misc_feature: MA Experiment 108434 PARAMETER Experiment Name: At_Root_Tips_cDNA_P Parameter: Tissue Value: Root Tips
  misc_feature: MA Experiment ID: 108579 Result: Down-regulated in Transcription
  misc_feature: MA Experiment 108579 PARAMETER Experiment Name: At_4deg_Cold_cDNA_P Parameter: Temperature (deg C) Value: 4 vs. 22
  misc_feature: MA Experiment 108579 PARAMETER Experiment Name: At_4deg_Cold_cDNA_P Parameter: Timepoint (hr) Value: 6
  misc_feature: MA Experiment 108579 PARAMETER Experiment Name: At_4deg_Cold_cDNA_P Parameter: Tissue Value: Aerial
  misc_feature: MA Experiment ID: 20000184 Result: Down-regulated in Transcription
  misc_feature: MA Experiment 20000184 PARAMETER Experiment Name: At_Shoots__P Parameter: Age (day) Value: 7
  misc_feature: MA Experiment 20000184 PARAMETER Experiment Name: At_Shoots__P Parameter: Tissue Value: Shoots vs. Whole Plant
  misc_feature: MA Experiment ID: 20000495 Result: Up-regulated in Transcription
  misc_feature: MA Experiment 20000495 PARAMETER Experiment Name: At_Guard_Cells_P Parameter: Harvest Date Value: 8/2/2002
  misc_feature: MA Experiment 20000495 PARAMETER Experiment Name: At_Guard_Cells_P Parameter: Organism Value: A. thaliana
  misc_feature: MA Experiment 20000495 PARAMETER Experiment Name: At_Guard_Cells_P Parameter: Tissue Value: Guard Cells vs. Leaves
  misc_feature: MA Experiment ID: 20000794 Result: Up-regulated in Transcription
  misc_feature: MA Experiment 20000794 PARAMETER Experiment Name: At_Petals_P Parameter: Age (day) Value: 23-25 days
  misc_feature: MA Experiment 20000794 PARAMETER Experiment Name: At_Petals_P Parameter: Plant Line Value: WS
  misc_feature: MA Experiment 20000794 PARAMETER Experiment Name: At_Petals_P Parameter: Tissue Value: Petals vs. Whole plant
  misc_feature: MA Experiment ID: 20001757 Result: Down-regulated in Transcription
  misc_feature: MA Experiment 20001757 PARAMETER Experiment Name: At_50mM_NH4NO3_L-to-H_P Parameter: Timepoint (hr) Value: 6
  misc_feature: MA Experiment 20001757 PARAMETER Experiment Name: At_50mM_NH4NO3_L-to-H_P Parameter: Tissue Value: Leaf
  misc_feature: MA Experiment 20001757 PARAMETER Experiment Name: At_50mM_NH4NO3_L-to-H_P Parameter: Treatment Value: 50mM NH4NO3 vs 100mM Mannitol
  misc_feature: MA Experiment ID: 20001911 Result: Up-regulated in Transcription
  misc_feature: MA Experiment 20001911 PARAMETER Experiment Name: At_Drought_Reproduction_P Parameter: Age (day) Value: 40
  misc_feature: MA Experiment 20001911 PARAMETER Experiment Name: At_Drought_Reproduction_P Parameter: Organism Value: A. thaliana
  misc_feature: MA Experiment 20001911 PARAMETER Experiment Name: At_Drought_Reproduction_P Parameter: Plant Line Value: WS
  misc_feature: MA Experiment 20001911 PARAMETER Experiment Name: At_Drought_Reproduction_P Parameter: Timepoint (day) Value: 10
  misc_feature: MA Experiment 20001911 PARAMETER Experiment Name: At_Drought_Reproduction_P Parameter: Tissue Value: Flowers
  misc_feature: MA Experiment 20001911 PARAMETER Experiment Name: At_Drought_Reproduction_P Parameter: Treatment Value: Drought vs. No Drought
gacgaattttggttcgctgctgcataatttttacccatacatcttcctcatcttctctctccgtgttgactcttgaggcgatccaacaaacaacaacaacaacgccgcgattctcgagggaccaatccgttcagagagattaaagctgagctgagcttctccttataaaggaagatactgcttgttctacggaattttgagagatgcctcgggacttgtcaagatcgaggtcaccgtctccatcaccttcacgtcgtagaaagcactcgaggtctcccgtaaggcagaggcatagcaggaggagtagaagagacagaagcccttctccatactcatctcattcgtatagcaggtgatacccctagtgtttgttttttccgctattcgtttgccttagttatcattcgtttatacgaactgtaagaaacattggtggaacacggttatagatagacatgtaaagtttacagactcaagaattgcttttagtaaagttcctacttatagatatattttctacccttctctaaaagagagtgcaatgtctggatgctgctggctctgtatcgtaagcgtttttttgagtgatgctgcgtattggaaatatatcgtgtttatttggctgttgtgattaaatttgttgcaagagaatatgttttatgacctgagctttgtgatttttagaatgaaacctgtatattcggtaaagacataagttaagctgggataatagcactactgatagtctgatctagtttatattttaattgtatctgtagattattagttagaatcagttttaagagcgactatattatgttcttttaaatggagtttgttagcaatagtgatacaaaaccaccactattccttaggtaagataatatagtaatttgttgagaacatggctgagaagctaggaaaatgatacatgcgcttaccattataaaatagctcagtttcttcccgttcccacgggaggggaaatgagcagctgatggattgctcttaggtgttctttcattgatcccttgtctcgttagcttctcttcgtgtgataaaagttggagctgataattctttacagtgtatgaggtaactgcacatacttttgttttctttatgtgtaactgtgggctacctgatgcctagtcttcacgtgcgtggtacttcattagttccatctttttgcttactactttattttgggtaatgttcaggcgaaaaagtcgttctatttctcctaggcgccatcgaagtcgatctgttactcctaagagacgttctccaaccccaaaacgttacaaaagacaaaagagtaggagttcaactccatctcctgcaaaaagatctcccgccgcaacccttgagtcagccaaaaataggaatggagaaaaacttaaaagagaagaggaagaacgaaaaaggtaaatcaatacaaaattttgaagtaagatggatgttatggtgaaattaaggttttttgttctcaaatgttattttagtgtagtgtggaagtccttgattgttagtctcaaaagtgcgacaggttttatggtattctctcacaggctttgcttatggaagataagctatatttcgatttgtttatatttgatcctctggcacaaatgttcgtactatctcgatttgatgagttaccgtttgtcattacatggatcatgattgacttagagatgtaaatatgtccaaagcacaagaataatcttggtgaaggtttgcttgtgttatggtgacaaaaaagaaatttcttcacgaaatttaccattggtattgggaggagtgaaaatggaaacgatctcaacattttttacggatttgcaataaaattttggtcttttgctgttcaagattgaagacatcaggaaatgagaaagttcaggtgatattcaatattctgaacctgctgtggatgtcctctaatttttcactgtatttgctaccaggcgacagcgtgaagcagaactgaagctaatagaggaagaaactgtgaaacgggttgaagaagctattcgaaagaaggtcgaagaaagcttacagtctgagaaaatcaaaatggaaattctaacgctgttggaggaagggcgaaagagacttaatgaagaagtcgcggctcaacttgaggaggagaaagaggcttctcttattgaggctaaagaaaaagagggtgttatgcggtgtttgtcacaggaaagagagcaacaagagaaagaagagagggagagaatagcagaggagaacctaaagagagtggaagaagctcagagaaaagaagcaatggagaggcaaaggaaagaggaggaacggtatcgagagctagaggagctgcaacgacagaaagaagaagcgatgcgaaggaagaaagctgaagaggaagaagaacgtctcaaacagatgaaactgttgggtaaaaacaaatcacggcctaaattatcctttgccttaagctccaagtaaatgcgtgcatgcatgaagataaaaggattgatgtgatggatgatgatatgcatcttcttcctctcaaagatgctttatgattattgttattagtgcttcttgttggagcttaaactcttttatggcttttaattttttgtaattctatttttctcgttttgtaattttacgttaggttaatggtgatgaatgataatatagcaatgattc

SEQ ID NO: 106648 - protein, 133 aa, Arabidopsis thaliana; identical to SEQ ID NO: 29634
  peptide (1)..(133): Ceres Seq. ID no. 13620144
  misc_feature (1)..(123): Pfam Name: Caldesmon Pfam Description: Caldesmon
  misc_feature (1)..(133): Homolog of NCBI NO: 15220234 NR Description: F-box protein family [Arabidopsis thaliana]
  misc_feature (1)..(130): Homolog of NCBI NO: 15240607 NR Description: hypothetical protein [Arabidopsis thaliana]
  misc_feature (1)..(120): Homolog of NCBI NO: 37532486 NR Description: hypothetical protein [Oryza sativa (japonica group)] >gi|20043072|gb|AAM08880.1| Hypothetical protein [Oryza >gi|31430987|gb|AAP52832.1| hypothetical protein [Oryza sativa
  misc_feature (1)..(132): Homolog of NCBI NO: 38541231 NR Description: Unknown (protein for MGC:77695) [Danio rerio]
  misc_feature (1)..(132): Homolog of NCBI NO: 27881860 NR Description: Unknown (protein for MGC:55375) [Danio rerio]
  misc_feature (1)..(133): Homolog of NCBI NO: 8922259 NR Description: hypothetical protein FLJ10154 [Homo sapiens] unnamed protein product [Homo sapiens]
  misc_feature (1)..(133): Homolog of NCBI NO: 34879649 NR Description: similar to hypothetical protein FLJ10154 [Rattus
  misc_feature (1)..(132): Homolog of NCBI NO: 39795605 NR Description: Unknown (protein for MGC:76303) [Silurana
  misc_feature (1)..(130): Homolog of NCBI NO: 31234644 NR Description: ENSANGP00000022336 [Anopheles gambiae]
  misc_feature (1)..(132): Homolog of NCBI NO: 28278343 NR Description: Unknown (protein for MGC:55548) [Danio rerio]

SEQ ID NO: 106649 - protein, 94 aa, Arabidopsis thaliana; identical to SEQ ID NO: 29635
  peptide (1)..(94): Ceres Seq. ID no. 13620145
  misc_feature (1)..(84): Pfam Name: Caldesmon Pfam Description: Caldesmon
  misc_feature (1)..(94): Homolog of NCBI NO: 15220234 NR Description: F-box protein family [Arabidopsis thaliana]
  misc_feature (1)..(91): Homolog of NCBI NO: 15240607 NR Description: hypothetical protein [Arabidopsis thaliana]
  misc_feature (1)..(81): Homolog of NCBI NO: 37532486 NR Description: hypothetical protein [Oryza sativa (japonica group)] >gi|20043072|gb|AAM08880.1| Hypothetical protein [Oryza >gi|31430987|gb|AAP52832.1| hypothetical protein [Oryza sativa
  misc_feature (1)..(93): Homolog of NCBI NO: 38541231 NR Description: Unknown (protein for MGC:77695) [Danio rerio]
  misc_feature (1)..(93): Homolog of NCBI NO: 27881860 NR Description: Unknown (protein for MGC:55375) [Danio rerio]
  misc_feature (1)..(94): Homolog of NCBI NO: 8922259 NR Description: hypothetical protein FLJ10154 [Homo sapiens] unnamed protein product [Homo sapiens]
  misc_feature (1)..(94): Homolog of NCBI NO: 34879649 NR Description: similar to hypothetical protein FLJ10154 [Rattus
  misc_feature (1)..(93): Homolog of NCBI NO: 39795605 NR Description: Unknown (protein for MGC:76303) [Silurana
  misc_feature (1)..(91): Homolog of NCBI NO: 31234644 NR Description: ENSANGP00000022336 [Anopheles gambiae]
  misc_feature (1)..(93): Homolog of NCBI NO: 28278343 NR Description: Unknown (protein for MGC:55548) [Danio rerio]

SEQ ID NO: 106650 - protein, 76 aa, Arabidopsis thaliana; identical to SEQ ID NO: 29636
  peptide (1)..(76): Ceres Seq. ID no. 13620146

SEQ ID NO: 106651 - DNA, 1107 bp, Arabidopsis thaliana
  misc_feature (1)..(1107): Ceres Seq. ID no. 13620150
  misc_feature: MA Experiment ID: 108434 Result: Up-regulated in Transcription
  misc_feature: MA Experiment 108434 PARAMETER Experiment Name: At_Root_Tips_cDNA_P Parameter: Tissue Value: Root Tips
  misc_feature: MA Experiment ID: 108461 Result: Up-regulated in Transcription
  misc_feature: MA Experiment 108461 PARAMETER Experiment Name: At_Germinating_Seeds_cDNA_P Parameter: Age (day) Value: 1 vs. 0
  misc_feature: MA Experiment 108461 PARAMETER Experiment Name: At_Germinating_Seeds_cDNA_P Parameter: Tissue Value: Germinating Seeds
  misc_feature: MA Experiment ID: 108462 Result: Up-regulated in Transcription
  misc_feature: MA Experiment 108462 PARAMETER Experiment Name: At_Germinating_Seeds_cDNA_P Parameter: Age (day) Value: 2 vs. 0
  misc_feature: MA Experiment 108462 PARAMETER Experiment Name: At_Germinating_Seeds_cDNA_P Parameter: Tissue Value: Germinating Seeds
  misc_feature: MA Experiment ID: 108463 Result: Up-regulated in Transcription
  misc_feature: MA Experiment 108463 PARAMETER Experiment Name: At_Germinating_Seeds_cDNA_P Parameter: Age (day) Value: 3 vs. 0
  misc_feature: MA Experiment 108463 PARAMETER Experiment Name: At_Germinating_Seeds_cDNA_P Parameter: Tissue Value: Germinating Seeds
  misc_feature: MA Experiment ID: 108464 Result: Up-regulated in Transcription
  misc_feature: MA Experiment 108464 PARAMETER Experiment Name: At_Germinating_Seeds_cDNA_P Parameter: Age (day) Value: 4 vs. 0
  misc_feature: MA Experiment 108464 PARAMETER Experiment Name: At_Germinating_Seeds_cDNA_P Parameter: Tissue Value: Germinating Seeds
  misc_feature: MA Experiment ID: 108473 Result: Down-regulated in Transcription
  misc_feature: MA Experiment 108473 PARAMETER Experiment Name: At_Drought_Flowers_cDNA_P Parameter: Timepoint (hr) Value: 7 d
  misc_feature: MA Experiment 108473 PARAMETER Experiment Name: At_Drought_Flowers_cDNA_P Parameter: Tissue Value: Flower
  misc_feature: MA Experiment 108473 PARAMETER Experiment Name: At_Drought_Flowers_cDNA_P Parameter: Treatment Value: Drought vs. No Drought
  misc_feature: MA Experiment ID: 108474 Result: Down-regulated in Transcription
  misc_feature: MA Experiment 108474 PARAMETER Experiment Name: At_Drought_Flowers_cDNA_P Parameter: Timepoint (hr) Value: null
  misc_feature: MA Experiment 108474 PARAMETER Experiment Name: At_Drought_Flowers_cDNA_P Parameter: Treatment Value: Drought vs. No Drought
  misc_feature: MA Experiment ID: 108561 Result: Down-regulated in Transcription
  misc_feature: MA Experiment 108561 PARAMETER Experiment Name: At_100uM_ABA_cDNA_P Parameter: Timepoint (hr) Value: 6
  misc_feature: MA Experiment 108561 PARAMETER Experiment Name: At_100uM_ABA_cDNA_P Parameter: Tissue Value: Aerial
  misc_feature: MA Experiment 108561 PARAMETER Experiment Name: At_100uM_ABA_cDNA_P Parameter: Treatment Value: 100uM ABA vs. No Treatment
  misc_feature: MA Experiment ID: 108572 Result: Down-regulated in Transcription
  misc_feature: MA Experiment 108572 PARAMETER Experiment Name: At_Drought_cDNA_P Parameter: Timepoint (hr) Value: 1
  misc_feature: MA Experiment 108572 PARAMETER Experiment Name: At_Drought_cDNA_P Parameter: Tissue Value: Aerial
  misc_feature: MA Experiment 108572 PARAMETER Experiment Name: At_Drought_cDNA_P Parameter: Treatment Value: Drought vs. No Drought
  misc_feature: MA Experiment ID: 108573 Result: Down-regulated in Transcription
  misc_feature: MA Experiment 108573 PARAMETER Experiment Name: At_Drought_cDNA_P Parameter: Timepoint (hr) Value: 6
  misc_feature: MA Experiment 108573 PARAMETER Experiment Name: At_Drought_cDNA_P Parameter: Tissue Value: Aerial
  misc_feature: MA Experiment 108573 PARAMETER Experiment Name: At_Drought_cDNA_P Parameter: Treatment Value: Drought vs. No Drought
  misc_feature: MA Experiment ID: 108576 Result: Down-regulated in Transcription
  misc_feature: MA Experiment 108576 PARAMETER Experiment Name: At_42deg_Heat_cDNA_P Parameter: Temperature (deg C) Value: 42 vs. 22
  misc_feature: MA Experiment 108576 PARAMETER Experiment Name: At_42deg_Heat_cDNA_P Parameter: Timepoint (hr) Value: 1
  misc_feature: MA Experiment 108576 PARAMETER Experiment Name: At_42deg_Heat_cDNA_P Parameter: Tissue Value: Aerial
  misc_feature: MA Experiment ID: 108585 Result: Down-regulated in Transcription
  misc_feature: MA Experiment 108585 PARAMETER Experiment Name: At_5mM_NaNP_cDNA_P Parameter: Timepoint (hr) Value: 6
  misc_feature: MA Experiment 108585 PARAMETER Experiment Name: At_5mM_NaNP_cDNA_P Parameter: Tissue Value: Aerial
  misc_feature: MA Experiment 108585 PARAMETER Experiment Name: At_5mM_NaNP_cDNA_P Parameter: Treatment Value: null
  misc_feature: MA Experiment ID: 108594 Result: Down-regulated in Transcription
  misc_feature: MA Experiment 108594 PARAMETER Experiment Name: At_Ler-rhl_Root_cDNA_P Parameter: Plant Line Value: null
  misc_feature: MA Experiment ID: 108595 Result: Down-regulated in Transcription
  misc_feature: MA Experiment 108595 PARAMETER Experiment Name: At_Ler-pi_Ovule_cDNA_P Parameter: Plant Line Value: null
  misc_feature: MA Experiment ID: 108605 Result: Down-regulated in Transcription
  misc_feature: MA Experiment 108605 PARAMETER Experiment Name: At_100uM_ABA_cDNA_P Parameter: Timepoint (hr) Value: 6
  misc_feature: MA Experiment 108605 PARAMETER Experiment Name: At_100uM_ABA_cDNA_P Parameter: Tissue Value: Aerial
  misc_feature: MA Experiment 108605 PARAMETER Experiment Name: At_100uM_ABA_cDNA_P Parameter: Treatment Value: 100uM ABA vs. No Treatment
  misc_feature: MA Experiment ID: 108609 Result: Down-regulated in Transcription
  misc_feature: MA Experiment 108609 PARAMETER Experiment Name: At_100uM_ABA_cDNA_P Parameter: Timepoint (hr) Value: 24
  misc_feature: MA Experiment 108609 PARAMETER Experiment Name: At_100uM_ABA_cDNA_P Parameter: Tissue Value: Aerial
  misc_feature: MA Experiment 108609 PARAMETER Experiment Name: At_100uM_ABA_cDNA_P Parameter: Treatment Value: 100uM ABA vs. No Treatment
  misc_feature: MA Experiment ID: 108668 Result: Down-regulated in Transcription
  misc_feature: MA Experiment 108668 PARAMETER Experiment Name: At_2mM_SA_cDNA_P Parameter: Plant Line Value: WS
  misc_feature: MA Experiment 108668 PARAMETER Experiment Name: At_2mM_SA_cDNA_P Parameter: Timepoint (hr) Value: 6
  misc_feature: MA Experiment 108668 PARAMETER Experiment Name: At_2mM_SA_cDNA_P Parameter: Treatment Value: 2mM SA vs. No Treatment
  misc_feature: MA Experiment ID: 20000070 Result: Down-regulated in Transcription
  misc_feature: MA Experiment 20000070 PARAMETER Experiment Name: At_100uM_ABA_Mutants_cDNA_P Parameter: Plant Line Value: CS24
  misc_feature: MA Experiment 20000070 PARAMETER Experiment Name: At_100uM_ABA_Mutants_cDNA_P Parameter: Timepoint (hr) Value: 6
  misc_feature: MA Experiment 20000070 PARAMETER Experiment Name: At_100uM_ABA_Mutants_cDNA_P Parameter: Tissue Value: Aerial
  misc_feature: MA Experiment 20000070 PARAMETER Experiment Name: At_100uM_ABA_Mutants_cDNA_P Parameter: Treatment Value: 100uM ABA vs. No Treatment
  misc_feature: MA Experiment ID: 20000113 Result: Down-regulated in Transcription
  misc_feature: MA Experiment 20000113 PARAMETER Experiment Name: At_42deg_Heat_cDNA_P Parameter: Temperature (deg C) Value: 42 vs. 22
  misc_feature: MA Experiment 20000113 PARAMETER Experiment Name: At_42deg_Heat_cDNA_P Parameter: Timepoint (hr) Value: 8
  misc_feature: MA Experiment 20000113 PARAMETER Experiment Name: At_42deg_Heat_cDNA_P Parameter: Tissue Value: Aerial
  misc_feature: MA Experiment ID: 20000117 Result: Down-regulated in Transcription
  misc_feature: MA Experiment 20000117 PARAMETER Experiment Name: At_100uM_ABA_Mutants_cDNA_P Parameter: Plant Line Value: Columbia
  misc_feature: MA Experiment 20000117 PARAMETER Experiment Name: At_100uM_ABA_Mutants_cDNA_P Parameter: Timepoint (hr) Value: 6
  misc_feature: MA Experiment 20000117 PARAMETER Experiment Name: At_100uM_ABA_Mutants_cDNA_P Parameter: Tissue Value: Aerial
  misc_feature: MA Experiment 20000117 PARAMETER Experiment Name: At_100uM_ABA_Mutants_cDNA_P Parameter: Treatment Value: 100uM ABA vs. No Treatment
  misc_feature: MA Experiment ID: 20000169 Result: Down-regulated in Transcription
  misc_feature: MA Experiment 20000169 PARAMETER Experiment Name: At_100uM_ABA_P Parameter: Age (day) Value: 14
  misc_feature: MA Experiment 20000169 PARAMETER Experiment Name: At_100uM_ABA_P Parameter: Organism Value: A. thaliana
  misc_feature: MA Experiment 20000169 PARAMETER Experiment Name: At_100uM_ABA_P Parameter: Plant Line Value: WS
  misc_feature: MA Experiment 20000169 PARAMETER Experiment Name: At_100uM_ABA_P Parameter: Timepoint (hr) Value: 6
  misc_feature: MA Experiment 20000169 PARAMETER Experiment Name: At_100uM_ABA_P Parameter: Tissue Value: Aerial
  misc_feature: MA Experiment 20000169 PARAMETER Experiment Name: At_100uM_ABA_P Parameter: Treatment Value: 100uM ABA vs. No Treatment
  misc_feature: MA Experiment ID: 20000171 Result: Down-regulated in Transcription
  misc_feature: MA Experiment 20000171 PARAMETER Experiment Name: At_42deg_Heat_P Parameter: Age (day) Value: 14
  misc_feature: MA Experiment 20000171 PARAMETER Experiment Name: At_42deg_Heat_P Parameter: Organism Value: A. thaliana
  misc_feature: MA Experiment 20000171 PARAMETER Experiment Name: At_42deg_Heat_P Parameter: Plant Line Value: WS
  misc_feature: MA Experiment 20000171 PARAMETER Experiment Name: At_42deg_Heat_P Parameter: Temperature (deg C) Value: 42 vs. 22
  misc_feature: MA Experiment 20000171 PARAMETER Experiment Name: At_42deg_Heat_P Parameter: Timepoint (hr) Value: 1
  misc_feature: MA Experiment 20000171 PARAMETER Experiment Name: At_42deg_Heat_P Parameter: Tissue Value: Aerial
  misc_feature: MA Experiment ID: 20000173 Result: Down-regulated in Transcription
  misc_feature: MA Experiment 20000173 PARAMETER Experiment Name: At_42deg_Heat_P Parameter: Age (day) Value: 14
  misc_feature: MA Experiment 20000173 PARAMETER Experiment Name: At_42deg_Heat_P Parameter: Organism Value: A. thaliana
  misc_feature: MA Experiment 20000173 PARAMETER Experiment Name: At_42deg_Heat_P Parameter: Plant Line Value: WS
  misc_feature: MA Experiment 20000173 PARAMETER Experiment Name: At_42deg_Heat_P Parameter: Temperature (deg C) Value: 42 vs. 22
  misc_feature: MA Experiment 20000173 PARAMETER Experiment Name: At_42deg_Heat_P Parameter: Timepoint (hr) Value: 6
  misc_feature: MA Experiment 20000173 PARAMETER Experiment Name: At_42deg_Heat_P Parameter: Tissue Value: Aerial
  misc_feature: MA Experiment ID: 20000180 Result: Up-regulated in Transcription
  misc_feature: MA Experiment 20000180 PARAMETER Experiment Name: At_Germinating_Seeds_P Parameter: Age (hr) Value: 24 vs. 0
  misc_feature: MA Experiment 20000180 PARAMETER Experiment Name: At_Germinating_Seeds_P Parameter: Tissue Value: Germinating Seeds
  misc_feature: MA Experiment ID: 20000182 Result: Down-regulated in Transcription
  misc_feature: MA Experiment 20000182 PARAMETER Experiment Name: At_2mM_SA_P Parameter: Age (day) Value: 14
  misc_feature: MA Experiment 20000182 PARAMETER Experiment Name: At_2mM_SA_P Parameter: Organism Value: A. thaliana
  misc_feature: MA Experiment 20000182 PARAMETER Experiment Name: At_2mM_SA_P Parameter: Plant Line Value: WS
  misc_feature: MA Experiment 20000182 PARAMETER Experiment Name: At_2mM_SA_P Parameter: Timepoint (hr) Value: 6
  misc_feature: MA Experiment 20000182 PARAMETER Experiment Name: At_2mM_SA_P Parameter: Tissue Value: Aerial
  misc_feature: MA Experiment 20000182 PARAMETER Experiment Name: At_2mM_SA_P Parameter: Treatment Value: 2mM SA vs. No Treatment
  misc_feature: MA Experiment ID: 20000184 Result: Up-regulated in Transcription
  misc_feature: MA Experiment 20000184 PARAMETER Experiment Name: At_Shoots__P Parameter: Age (day) Value: 7
  misc_feature: MA Experiment 20000184 PARAMETER Experiment Name: At_Shoots__P Parameter: Tissue Value: Shoots vs. Whole Plant
  misc_feature: MA Experiment ID: 20000185 Result: Up-regulated in Transcription
  misc_feature: MA Experiment 20000185 PARAMETER Experiment Name: At_Roots__P Parameter: Age (day) Value: 7 vs. 21
  misc_feature: MA Experiment 20000185 PARAMETER Experiment Name: At_Roots__P Parameter: Organism Value: A. thaliana
  misc_feature: MA Experiment 20000185 PARAMETER Experiment Name: At_Roots__P Parameter: Tissue Value: Roots vs. Whole Plant
  misc_feature: MA Experiment ID: 20000224 Result: Down-regulated in Transcription
  misc_feature: MA Experiment ID: 20000227 Result: Up-regulated in Transcription
  misc_feature: MA Experiment 20000227 PARAMETER Experiment Name: At_Root-Tips-vs-Tops_P Parameter: Tissue Value: Root Tips vs. Root Tops
  misc_feature: MA Experiment ID: 20000234 Result: Up-regulated in Transcription
  misc_feature: MA Experiment 20000234 PARAMETER Experiment Name: At_Siliques_P Parameter: Age (day) Value: 21
  misc_feature: MA Experiment 20000234 PARAMETER Experiment Name: At_Siliques_P Parameter: Organism Value: A. thaliana
  misc_feature: MA Experiment 20000234 PARAMETER Experiment Name: At_Siliques_P Parameter: Plant Line Value: WS
  misc_feature: MA Experiment 20000234 PARAMETER Experiment Name: At_Siliques_P Parameter: Tissue Value: Less Than 5mm Siliques vs. Whole Plant
  misc_feature: MA Experiment ID: 20000437 Result: Down-regulated in Transcription
  misc_feature: MA Experiment 20000437 PARAMETER Experiment Name: At_Drought_P Parameter: Age (day) Value: 8
  misc_feature: MA Experiment 20000437 PARAMETER Experiment Name: At_Drought_P Parameter: Organism Value: A. thaliana
  misc_feature: MA Experiment 20000437 PARAMETER Experiment Name: At_Drought_P Parameter: Plant Line Value: WS
  misc_feature: MA Experiment 20000437 PARAMETER Experiment Name: At_Drought_P Parameter: Timepoint (hr) Value: 24
  misc_feature: MA Experiment 20000437 PARAMETER Experiment Name: At_Drought_P Parameter: Tissue Value: Whole Plant
  misc_feature: MA Experiment 20000437 PARAMETER Experiment Name: At_Drought_P Parameter: Treatment Value: Drought vs. No Drought
  misc_feature: MA Experiment ID: 20000438 Result: Up-regulated in Transcription
  misc_feature: MA Experiment 20000438 PARAMETER Experiment Name: At_Shoots__P Parameter: Age (day) Value: 14
  misc_feature: MA Experiment 20000438 PARAMETER Experiment Name: At_Shoots__P Parameter: Tissue Value: Shoots vs. Whole Plant
  misc_feature: MA Experiment ID: 20000439 Result: Up-regulated in Transcription
  misc_feature: MA Experiment 20000439 PARAMETER Experiment Name: At_Roots__P Parameter: Age (day) Value: 14 vs. 21
  misc_feature: MA Experiment 20000439 PARAMETER Experiment Name: At_Roots__P Parameter: Organism Value: A. thaliana
  misc_feature: MA Experiment 20000439 PARAMETER Experiment Name: At_Roots__P Parameter: Tissue Value: Roots vs. Whole Plant
  misc_feature: MA Experiment ID: 20000441 Result: Down-regulated in Transcription
  misc_feature: MA Experiment 20000441 PARAMETER Experiment Name: At_1uM_BR-BRZ__P Parameter: Tissue Value: Shoot Apices
  misc_feature: MA Experiment 20000441 PARAMETER Experiment Name: At_1uM_BR-BRZ__P Parameter: Treatment Value: 1uM BR vs. No Treatment
  misc_feature: MA Experiment ID: 20000453 Result: Down-regulated in Transcription
  misc_feature: MA Experiment 20000453 PARAMETER Experiment Name: At_100uM_ABA_P Parameter: Age (day) Value: 15
  misc_feature: MA Experiment 20000453 PARAMETER Experiment Name: At_100uM_ABA_P Parameter: Organism Value: A. thaliana
  misc_feature: MA Experiment 20000453 PARAMETER Experiment Name: At_100uM_ABA_P Parameter: Plant Line Value: WS
  misc_feature: MA Experiment 20000453 PARAMETER Experiment Name: At_100uM_ABA_P Parameter: Timepoint (hr) Value: 24
  misc_feature: MA Experiment 20000453 PARAMETER Experiment Name: At_100uM_ABA_P Parameter: Tissue Value: Aerial
  misc_feature: MA Experiment 20000453 PARAMETER Experiment Name: At_100uM_ABA_P Parameter: Treatment Value: 100uM ABA vs. No Treatment
  misc_feature: MA Experiment ID: 20000794 Result: Down-regulated in Transcription
  misc_feature: MA Experiment 20000794 PARAMETER Experiment Name: At_Petals_P Parameter: Age (day) Value: 23-25 days
  misc_feature: MA Experiment 20000794 PARAMETER Experiment Name: At_Petals_P Parameter: Plant Line Value: WS
  misc_feature: MA Experiment 20000794 PARAMETER Experiment Name: At_Petals_P Parameter: Tissue Value: Petals vs. Whole plant
  misc_feature: MA Experiment ID: 20001248 Result: Up-regulated in Transcription
  misc_feature: MA Experiment 20001248 PARAMETER Experiment Name: At_Far-red-induction_P Parameter: Age (day) Value: 7
  misc_feature: MA Experiment 20001248 PARAMETER Experiment Name: At_Far-red-induction_P Parameter: Light Value: Far-red vs. White
  misc_feature: MA Experiment 20001248 PARAMETER Experiment Name: At_Far-red-induction_P Parameter: Organism Value: A. thaliana
  misc_feature: MA Experiment 20001248 PARAMETER Experiment Name: At_Far-red-induction_P Parameter: Plant Line Value: Columbia
  misc_feature: MA Experiment 20001248 PARAMETER Experiment Name: At_Far-red-induction_P Parameter: Timepoint (hr) Value: 4
  misc_feature: MA Experiment 20001248 PARAMETER Experiment Name: At_Far-red-induction_P Parameter: Tissue Value: Whole Plant
  misc_feature: MA Experiment ID: 20001450 Result: Up-regulated in Transcription
  misc_feature: MA Experiment 20001450 PARAMETER Experiment Name: At_Far-red-induction_P Parameter: Age (day) Value: 7
  misc_feature: MA Experiment 20001450 PARAMETER Experiment Name: At_Far-red-induction_P Parameter: Light Value: Far-red vs. White
  misc_feature: MA Experiment 20001450 PARAMETER Experiment Name: At_Far-red-induction_P Parameter: Organism Value: A. thaliana
  misc_feature: MA Experiment 20001450 PARAMETER Experiment Name: At_Far-red-induction_P Parameter: Plant Line Value: Columbia
  misc_feature: MA Experiment 20001450 PARAMETER Experiment Name: At_Far-red-induction_P Parameter: Timepoint (hr) Value: 8
  misc_feature: MA Experiment 20001450 PARAMETER Experiment Name: At_Far-red-induction_P Parameter: Tissue Value: Whole Plant
  misc_feature: MA Experiment ID: 20001554 Result: Down-regulated in Transcription
  misc_feature: MA Experiment 20001554 PARAMETER Experiment Name: At_Drought_Soil_Dry_P Parameter: Age (day) Value: 21
  misc_feature: MA Experiment 20001554 PARAMETER Experiment Name: At_Drought_Soil_Dry_P Parameter: Organism Value: A. thaliana
  misc_feature: MA Experiment 20001554 PARAMETER Experiment Name: At_Drought_Soil_Dry_P Parameter: Plant Line Value: WS
  misc_feature: MA Experiment 20001554 PARAMETER Experiment Name: At_Drought_Soil_Dry_P Parameter: Post Timepoint (hr) Value: None
  misc_feature: MA Experiment 20001554 PARAMETER Experiment Name: At_Drought_Soil_Dry_P Parameter: Post-Treatment Value: None
  misc_feature: MA Experiment 20001554 PARAMETER Experiment Name: At_Drought_Soil_Dry_P Parameter: Timepoint (day) Value: 7
  misc_feature: MA Experiment 20001554 PARAMETER Experiment Name: At_Drought_Soil_Dry_P Parameter: Treatment Value: Drought vs. No Drought
  misc_feature: MA Experiment ID: 20001555 Result: Down-regulated in Transcription
  misc_feature: MA Experiment 20001555 PARAMETER Experiment Name: At_Drought_Soil_Dry_P Parameter: Age (day) Value: 24
  misc_feature: MA Experiment 20001555 PARAMETER Experiment Name: At_Drought_Soil_Dry_P Parameter: Organism Value: A. thaliana
  misc_feature: MA Experiment 20001555 PARAMETER Experiment Name: At_Drought_Soil_Dry_P Parameter: Plant Line Value: WS
  misc_feature: MA Experiment 20001555 PARAMETER Experiment Name: At_Drought_Soil_Dry_P Parameter: Post Timepoint (hr) Value: None
  misc_feature: MA Experiment 20001555 PARAMETER Experiment Name: At_Drought_Soil_Dry_P Parameter: Post-Treatment Value: None
  misc_feature: MA Experiment 20001555 PARAMETER Experiment Name: At_Drought_Soil_Dry_P Parameter: Timepoint (day) Value: 10
  misc_feature: MA Experiment 20001555 PARAMETER Experiment Name: At_Drought_Soil_Dry_P Parameter: Treatment Value: Drought vs. No Drought
  misc_feature: MA Experiment ID: 20001556 Result: Down-regulated in Transcription
  misc_feature: MA Experiment 20001556 PARAMETER Experiment Name: At_Drought_Soil_Dry_P Parameter: Age (day) Value: 26
  misc_feature: MA Experiment 20001556 PARAMETER Experiment Name: At_Drought_Soil_Dry_P Parameter: Organism Value: A. thaliana
  misc_feature: MA Experiment 20001556 PARAMETER Experiment Name: At_Drought_Soil_Dry_P Parameter: Plant Line Value: WS
  misc_feature: MA Experiment 20001556 PARAMETER Experiment Name: At_Drought_Soil_Dry_P Parameter: Post Timepoint (hr) Value: None
  misc_feature: MA Experiment 20001556 PARAMETER Experiment Name: At_Drought_Soil_Dry_P Parameter: Post-Treatment Value: None
  misc_feature: MA Experiment 20001556 PARAMETER Experiment Name: At_Drought_Soil_Dry_P Parameter: Timepoint (day) Value: 12
  misc_feature: MA Experiment 20001556 PARAMETER Experiment Name: At_Drought_Soil_Dry_P Parameter: Treatment Value: Drought vs. No Drought
  misc_feature: MA Experiment ID: 20001558 Result: Up-regulated in Transcription
  misc_feature: MA Experiment 20001558 PARAMETER Experiment Name: At_Drought_Soil_Dry_P Parameter: Age (day) Value: 27
  misc_feature: MA Experiment 20001558 PARAMETER Experiment Name: At_Drought_Soil_Dry_P Parameter: Organism Value: A. thaliana
  misc_feature: MA Experiment 20001558 PARAMETER Experiment Name: At_Drought_Soil_Dry_P Parameter: Plant Line Value: WS
  misc_feature: MA Experiment 20001558 PARAMETER Experiment Name: At_Drought_Soil_Dry_P Parameter: Post Timepoint (hr) Value: 6
  misc_feature: MA Experiment 20001558 PARAMETER Experiment Name: At_Drought_Soil_Dry_P Parameter: Post-Treatment Value: Re-Water vs. No Drought
  misc_feature: MA Experiment 20001558 PARAMETER Experiment Name: At_Drought_Soil_Dry_P Parameter: Timepoint (day) Value: 13
  misc_feature: MA Experiment 20001558 PARAMETER Experiment Name: At_Drought_Soil_Dry_P Parameter: Treatment Value: Drought vs. No Drought
  misc_feature: MA Experiment ID: 20001560 Result: Up-regulated in Transcription
  misc_feature: MA Experiment 20001560 PARAMETER Experiment Name: At_Drought_Soil_Dry_P Parameter: Age (day) Value: 28
  misc_feature: MA Experiment 20001560 PARAMETER Experiment Name: At_Drought_Soil_Dry_P Parameter: Organism Value: A. thaliana
  misc_feature: MA Experiment 20001560 PARAMETER Experiment Name: At_Drought_Soil_Dry_P Parameter: Plant Line Value: WS
  misc_feature: MA Experiment 20001560 PARAMETER Experiment Name: At_Drought_Soil_Dry_P Parameter: Post Timepoint (hr) Value: None
  misc_feature: MA Experiment 20001560 PARAMETER Experiment Name: At_Drought_Soil_Dry_P Parameter: Post-Treatment Value: None
  misc_feature: MA Experiment 20001560 PARAMETER Experiment Name: At_Drought_Soil_Dry_P Parameter: Timepoint (day) Value: 14
  misc_feature: MA Experiment 20001560 PARAMETER Experiment Name: At_Drought_Soil_Dry_P Parameter: Treatment Value: Drought vs. No Drought
  misc_feature: MA Experiment ID: 20001770 Result: Up-regulated in Transcription
  misc_feature: MA Experiment 20001770 PARAMETER Experiment Name: At_Far-red-enriched-adult_P Parameter: Age (day) Value: 28
  misc_feature: MA Experiment 20001770 PARAMETER Experiment Name: At_Far-red-enriched-adult_P Parameter: Light Value: Far-red enriched vs. White
  misc_feature: MA Experiment 20001770 PARAMETER Experiment Name: At_Far-red-enriched-adult_P Parameter: Organism Value: A. thaliana
  misc_feature: MA Experiment 20001770 PARAMETER Experiment Name: At_Far-red-enriched-adult_P Parameter: Plant Line Value: Columbia
  misc_feature: MA Experiment 20001770 PARAMETER Experiment Name: At_Far-red-enriched-adult_P Parameter: Timepoint (hr) Value: 8
  misc_feature: MA Experiment 20001770 PARAMETER Experiment Name: At_Far-red-enriched-adult_P Parameter: Tissue Value: Aerial
  misc_feature: MA Experiment ID: 20001906 Result: Down-regulated in Transcription
  misc_feature: MA Experiment 20001906 PARAMETER Experiment Name: At_Drought_Reproduction_P Parameter: Age (day) Value: 35
  misc_feature: MA Experiment 20001906 PARAMETER Experiment Name: At_Drought_Reproduction_P Parameter: Organism Value: A. thaliana
  misc_feature: MA Experiment 20001906 PARAMETER Experiment Name: At_Drought_Reproduction_P Parameter: Plant Line Value: WS
  misc_feature: MA Experiment 20001906 PARAMETER Experiment Name: At_Drought_Reproduction_P Parameter: Timepoint (day) Value: 5
  misc_feature: MA Experiment 20001906 PARAMETER Experiment Name: At_Drought_Reproduction_P Parameter: Tissue Value: Siliques
  misc_feature: MA Experiment 20001906 PARAMETER Experiment Name: At_Drought_Reproduction_P Parameter: Treatment Value: Drought vs. No Drought
  misc_feature: MA Experiment ID: 20001907 Result: Down-regulated in Transcription
  misc_feature: MA Experiment 20001907 PARAMETER Experiment Name: At_Drought_Reproduction_P Parameter: Age (day) Value: 37
  misc_feature: MA Experiment 20001907 PARAMETER Experiment Name: At_Drought_Reproduction_P Parameter: Organism Value: A. thaliana
  misc_feature: MA Experiment 20001907 PARAMETER Experiment Name: At_Drought_Reproduction_P Parameter: Plant Line Value: WS
  misc_feature: MA Experiment 20001907 PARAMETER Experiment Name: At_Drought_Reproduction_P Parameter: Timepoint (day) Value: 7
  misc_feature: MA Experiment 20001907 PARAMETER Experiment Name: At_Drought_Reproduction_P Parameter: Tissue Value: Siliques
  misc_feature: MA Experiment 20001907 PARAMETER Experiment Name: At_Drought_Reproduction_P Parameter: Treatment Value: Drought vs. No Drought
  misc_feature: MA Experiment ID: 20001910 Result: Down-regulated in Transcription
  misc_feature: MA Experiment 20001910 PARAMETER Experiment Name: At_Drought_Reproduction_P Parameter: Age (day) Value: 37
  misc_feature: MA Experiment 20001910 PARAMETER Experiment Name: At_Drought_Reproduction_P Parameter: Organism Value: A. thaliana
  misc_feature: MA Experiment 20001910 PARAMETER Experiment Name: At_Drought_Reproduction_P Parameter: Plant Line Value: WS
  misc_feature: MA Experiment 20001910 PARAMETER Experiment Name: At_Drought_Reproduction_P Parameter: Timepoint (day) Value: 7
  misc_feature: MA Experiment 20001910 PARAMETER Experiment Name: At_Drought_Reproduction_P Parameter: Tissue Value: Flowers
  misc_feature: MA Experiment 20001910 PARAMETER Experiment Name: At_Drought_Reproduction_P Parameter: Treatment Value: Drought vs. No Drought
gcattacctctctctctctctctcttcgaaatattcgaagtagagacaaccaatggagacggaaaggaggatcataacgagctgttctgccatgacggctctgttcttgttcatgacggctctaatggcgtcgtcctctatcgcagcaacaccgacacaatcgtttgaagataatttcaacattatgtggtctgaaaatcacttcacgacttccgatgatggagagatctggaatctttccttagataacgacaccggatgtggatttcagacaaagcacatgtatagattcggatggtttagtatgaagctaaagctcgtcggaggcgactccgccggcgtcgtcaccgcttactacatgtgttcggagaatggggcaggaccggagagagacgagatagatttcgaatttctagggaaccgaaccggacagccttacattattcagaccaatgtgtataagaacggaaccgggaatcgggagatgcgacattccctctggttcgacccgaccaaggattatcacacctactcaattctttggaataaccaccagcttgtgttcttcgtggatagggtaccaattcgagtatacaagaacagtgataaggtaccaaacaacgacttcttcccgaaccagaagccgatgtacttgttctccagcatttggaacgctgacgattgggctacacgtggtggtctggagaagactgactggaaaaaagctccattcgtctcttcttacaaggacttcgccgtcgaaggctgccgttggaaggatccattccctgcatgcgtctctaccacaacagagaattggtgggatcagtacgacgcgtggcatttgtccaagacacagaagatggattatgcgtgggtgcagcgtaatctcgtcgtatacgattattgcaaagacagtgagaggttccctactcttccttgggagtgttccattagcccttgggcttaaaatcaattttgttttgagtgtattaaagtggaaatggtttatgtaataattttactctcttttttttggcatttcttattttgttatggactatatcctctgtttatttatttaattaattatttatttagtcggct

SEQ ID NO: 106652 - protein, 305 aa, Arabidopsis thaliana; identical to SEQ ID NO: 27882
  peptide (1)..(305): Ceres Seq. ID no. 13620151
  misc_feature (38)..(224): Pfam Name: Glycosyl hydrolases family 16 Pfam Description: Glycosyl hydrolases family 16
  misc_feature (1)..(305): Homolog of NCBI NO: 18391291 NR Description: xyloglucan endotransglycosylase, putative
  misc_feature (14)..(305): Homolog of NCBI NO: 38605338 NR Description: Probable xyloglucan
  misc_feature (1)..(305): Homolog of NCBI NO: 25313538 NR Description: protein T23J18.21 [imported] - Arabidopsis >gi|6554196|gb|AAF16642.1|AC011661_20 T23J18.21 [Arabidopsis
  misc_feature (14)..(299): Homolog of NCBI NO: 27261026 NR Description: putative xyloglucan endotransglycosylase [Oryza
  misc_feature (17)..(299): Homolog of NCBI NO: 30841326 NR Description: xyloglucan endotransglycosylase [Gossypium
  misc_feature (27)..(299): Homolog of NCBI NO: 7447418 NR Description: probable endo-xyloglucan transferase - upland
  misc_feature (21)..(299): Homolog of NCBI NO: 5070246 NR Description: xyloglucan endo-transglycosylase-like protein
  misc_feature (7)..(300): Homolog of NCBI NO: 15235714 NR Description: xyloglucan endotransglycosylase, putative
  misc_feature (7)..(300): Homolog of NCBI NO: 21553421 NR Description: endo-xyloglucan transferase-like protein
  misc_feature (13)..(299): Homolog of NCBI NO: 1885310 NR Description: Endoxyloglucan transferase (EXT) [Hordeum vulgare

SEQ ID NO: 106653 - protein, 292 aa, Arabidopsis thaliana; identical to SEQ ID NO: 27883
  peptide (1)..(292): Ceres Seq. ID no. 13620152
  misc_feature (25)..(211): Pfam Name: Glycosyl hydrolases family 16 Pfam Description: Glycosyl hydrolases family 16
  misc_feature (1)..(292): Homolog of NCBI NO: 18391291 NR Description: xyloglucan endotransglycosylase, putative
  misc_feature (1)..(292): Homolog of NCBI NO: 38605338 NR Description: Probable xyloglucan
  misc_feature (1)..(292): Homolog of NCBI NO: 25313538 NR Description: protein T23J18.21 [imported] - Arabidopsis >gi|6554196|gb|AAF16642.1|AC011661_20 T23J18.21 [Arabidopsis
  misc_feature (1)..(286): Homolog of NCBI NO: 27261026 NR Description: putative xyloglucan endotransglycosylase [Oryza
  misc_feature (4)..(286): Homolog of NCBI NO: 30841326 NR Description: xyloglucan endotransglycosylase [Gossypium
  misc_feature (14)..(286): Homolog of NCBI NO: 7447418 NR Description: probable endo-xyloglucan transferase - upland
  misc_feature (8)..(286): Homolog of NCBI NO: 5070246 NR Description: xyloglucan endo-transglycosylase-like protein
  misc_feature (1)..(287): Homolog of NCBI NO: 15235714 NR Description: xyloglucan endotransglycosylase, putative
  misc_feature (1)..(287): Homolog of NCBI NO: 21553421 NR Description: endo-xyloglucan transferase-like protein
  misc_feature (1)..(286): Homolog of NCBI NO: 1885310 NR Description: Endoxyloglucan transferase (EXT) [Hordeum vulgare

SEQ ID NO: 106654 - protein, 285 aa, Arabidopsis thaliana; identical to SEQ ID NO: 27884
  peptide (1)..(285): Ceres Seq. ID no. 13620153
  misc_feature (18)..(204): Pfam Name: Glycosyl hydrolases family 16 Pfam Description: Glycosyl hydrolases family 16
  misc_feature (1)..(285): Homolog of NCBI NO: 18391291 NR Description: xyloglucan endotransglycosylase, putative
  misc_feature (1)..(285): Homolog of NCBI NO: 38605338 NR Description: Probable xyloglucan
  misc_feature (1)..(285): Homolog of NCBI NO: 25313538 NR Description: protein T23J18.21 [imported] - Arabidopsis >gi|6554196|gb|AAF16642.1|AC011661_20 T23J18.21 [Arabidopsis
  misc_feature (1)..(279): Homolog of NCBI NO: 27261026 NR Description: putative xyloglucan endotransglycosylase [Oryza
  misc_feature (1)..(279): Homolog of NCBI NO: 30841326 NR Description: xyloglucan endotransglycosylase [Gossypium
  misc_feature (7)..(279): Homolog of NCBI NO: 7447418 NR Description: probable endo-xyloglucan transferase - upland
  misc_feature (1)..(279): Homolog of NCBI NO: 5070246 NR Description: xyloglucan endo-transglycosylase-like protein
  misc_feature (1)..(280): Homolog of NCBI NO: 15235714 NR Description: xyloglucan endotransglycosylase, putative
  misc_feature (1)..(280): Homolog of NCBI NO: 21553421 NR Description: endo-xyloglucan transferase-like protein
  misc_feature (1)..(279): Homolog of NCBI NO: 1885310 NR Description: Endoxyloglucan transferase (EXT) [Hordeum vulgare

SEQ ID NO: 106655 - DNA, 1811 bp, Arabidopsis thaliana
  misc_feature (1)..(1811): Ceres Seq. ID no. 13620154
  misc_feature: MA Experiment ID: 108434 Result: Up-regulated in Transcription
  misc_feature: MA Experiment 108434 PARAMETER Experiment Name: At_Root_Tips_cDNA_P Parameter: Tissue Value: Root Tips
  misc_feature: MA Experiment ID: 108585 Result: Up-regulated in Transcription
  misc_feature: MA Experiment 108585 PARAMETER Experiment Name: At_5mM_NaNP_cDNA_P Parameter: Timepoint (hr) Value: 6
  misc_feature: MA Experiment 108585 PARAMETER Experiment Name: At_5mM_NaNP_cDNA_P Parameter: Tissue Value: Aerial
  misc_feature: MA Experiment 108585 PARAMETER Experiment Name: At_5mM_NaNP_cDNA_P Parameter: Treatment Value: null
  misc_feature: MA Experiment ID: 20000069 Result: Down-regulated in Transcription
  misc_feature: MA Experiment 20000069 PARAMETER Experiment Name: At_100uM_ABA_Mutants_cDNA_P Parameter: Plant Line Value: CS23
  misc_feature: MA Experiment 20000069 PARAMETER Experiment Name: At_100uM_ABA_Mutants_cDNA_P Parameter: Timepoint (hr) Value: 6
  misc_feature: MA Experiment 20000069 PARAMETER Experiment Name: At_100uM_ABA_Mutants_cDNA_P Parameter: Tissue Value: Aerial
  misc_feature: MA Experiment 20000069 PARAMETER Experiment Name: At_100uM_ABA_Mutants_cDNA_P Parameter: Treatment Value: 100uM ABA vs. No Treatment
  misc_feature: MA Experiment ID: 20000113 Result: Down-regulated in Transcription
  misc_feature: MA Experiment 20000113 PARAMETER Experiment Name: At_42deg_Heat_cDNA_P Parameter: Temperature (deg C) Value: 42 vs. 22
  misc_feature: MA Experiment 20000113 PARAMETER Experiment Name: At_42deg_Heat_cDNA_P Parameter: Timepoint (hr) Value: 8
  misc_feature: MA Experiment 20000113 PARAMETER Experiment Name: At_42deg_Heat_cDNA_P Parameter: Tissue Value: Aerial
  misc_feature: MA Experiment ID: 20000224 Result: Down-regulated in Transcription
gagagaaatcagcttcaagcttaagagagcttcgaaagcgaaagcgacgatttcttctccatcgtgagagcaaatctccagagccgttttctcttcttcttcttcctcctcgcgccgtctctgaaactccatcatcgtatcaatcaaattgcttcctcctccaaattgaaaaacaatggaattggattcggagaacaaattgttgaagacgggtttggttatagtggcgacacttgttatagccaaactcatcttctctttcttcacttctgattctaagaagaagcgtcttcctcctactcttaaagcttggcctccattggttggaagtcttatcaaattcttgaaaggacctattattatgcttagagaggaataccctaagcttggaagtgtgtttactgttaatcttgttcacaaaaagattacttttcttattggtcctgaagtctctgctcattttttcaaagcttctgaatctgatcttagtcagcaggaagtgtatcagttcaatgtccctacttttggtcctggagttgttttcgatgttgattattctgttcgtcaggagcagtttcggttcttcactgaggcacttagagttaacaagttgaagggttatgtggatatgatggttactgaagctgaggattacttctctaaatggggagagagtggtgaagttgatattaaggttgagctagagaggctcatcatcttgactgcaagtagatgtttactgggtcgagaagttcgtgatcagctttttgatgatgtctctgctttgttccatgaccttgacaatggaatgcttcccatcagtgttctcttcccatatctcccaattccagctcaccgccgtcgtgaccgtgcccgagaaaagctttcggagattttcgcaaaaatcattgggtcgagaaaacgctctggaaaaacagagaacgacatgctgcagtgtttcatcgaatcaaagtacaaagatggtagacagacaaccgaatctgaagtcactggtttgctcattgctgctctgtttgcaggacaacacacgagctctatcacttccacctggaccggtgcttatctgatgcgatacaaagagtacttctcagctgctcttgatgagcagaagaacctgattgcgaaacatggagacaagatcgatcatgatatcttatccgagatggatgttctctaccgctgcattaaggaagcgttgaggcttcaccctccactcatcatgttaatgagagcctcgcacagtgatttcagcgtgacagctcgggatggaaaaacttacgatatcccaaagggtcacatcgttgcaacctcccctgcatttgccaaccgcttaccgcacatcttcaaagaccccgacacctacgacccagaaagattctcccctggaagagaagaggacaaagccgcaggggcattctcgtacattgcattcggagggggaaggcacgggtgccttggagagccgtttgcttacctgcagatcaaagccatatggagtcatttgttgaggaacttcgagcttgagctagtttcaccgttccctgagattgactggaacgctatggtggttggagttaaaggcaatgtgatggtgcgttacaagaggcgccagctttcttaaagacaagtttaaggttattgcagctttggatttttctctctggtttctgctttgcttttgtccctctctggttttagttttgttgttgaataattcttctgtttttataaactgttgttactctttaattgacatttatttttaagcttcctaagtttgttggttctgc

SEQ ID NO: 106656 - protein, 488 aa, Arabidopsis thaliana; identical to SEQ ID NO: 39837
  peptide (1)..(488): Ceres Seq. ID no. 13620155
  misc_feature (1)..(488): Homolog of NCBI NO: 15221075 NR Description: obtusifoliol 14-demethylase (CYP51) [Arabidopsis
  misc_feature (1)..(488): Homolog of NCBI NO: 18000074 NR Description: obtusifoliol-14-demethylase [Nicotiana tabacum]
  misc_feature (1)..(488): Homolog of NCBI NO: 27461067 NR Description: obtusifoliol-14-demethylase [Nicotiana tabacum]
  misc_feature (6)..(487): Homolog of NCBI NO: 27542762 NR Description: cytochrome P450-like protein [Sorghum bicolor]
  misc_feature (6)..(487): Homolog of NCBI NO: 5921924 NR Description: Cytochrome P450 51 (CYPL1) (P450-L1A1)
  misc_feature (38)..(487): Homolog of NCBI NO: 6166036 NR Description: Cytochrome P450 51 (CYPL1) (P450-L1A1)
  misc_feature (65)..(487): Homolog of NCBI NO: 4586676 NR Description: sterol 14-demethylase [Oryza sativa (japonica
  misc_feature (9)..(488): Homolog of NCBI NO: 15227817 NR Description: obtusifoliol 14-alpha demethylase, putative
  misc_feature (179)..(487): Homolog of NCBI NO: 7489685 NR Description: probable obtusifoliol 14-alpha-demethylase CYP51
  misc_feature (1)..(485): Homolog of NCBI NO: 6978751 NR Description: cytochrome P450, subfamily 51; Cytochrom P450

SEQ ID NO: 106657 - protein, 426 aa, Arabidopsis thaliana; identical to SEQ ID NO: 39838
  peptide (1)..(426): Ceres Seq. ID no. 13620156
  misc_feature (1)..(426): Homolog of NCBI NO: 15221075 NR Description: obtusifoliol 14-demethylase (CYP51) [Arabidopsis
  misc_feature (1)..(426): Homolog of NCBI NO: 18000074 NR Description: obtusifoliol-14-demethylase [Nicotiana tabacum]
  misc_feature (1)..(426): Homolog of NCBI NO: 27461067 NR Description: obtusifoliol-14-demethylase [Nicotiana tabacum]
  misc_feature (1)..(425): Homolog of NCBI NO: 27542762 NR Description: cytochrome P450-like protein [Sorghum bicolor]
  misc_feature (1)..(425): Homolog of NCBI NO: 5921924 NR Description: Cytochrome P450 51 (CYPL1) (P450-L1A1)
  misc_feature (1)..(425): Homolog of NCBI NO: 6166036 NR Description: Cytochrome P450 51 (CYPL1) (P450-L1A1)
  misc_feature (3)..(425): Homolog of NCBI NO: 4586676 NR Description: sterol 14-demethylase [Oryza sativa (japonica
  misc_feature (1)..(426): Homolog of NCBI NO: 15227817 NR Description: obtusifoliol 14-alpha demethylase, putative
  misc_feature (117)..(425): Homolog of NCBI NO: 7489685 NR Description: probable obtusifoliol 14-alpha-demethylase CYP51
  misc_feature (1)..(423): Homolog of NCBI NO: 6978751 NR Description: cytochrome P450, subfamily 51; Cytochrom P450

SEQ ID NO: 106658 - protein, 337 aa, Arabidopsis thaliana; identical to SEQ ID NO: 39839
  peptide (1)..(337): Ceres Seq. ID no. 13620157
  misc_feature (1)..(337): Homolog of NCBI NO: 15221075 NR Description: obtusifoliol 14-demethylase (CYP51) [Arabidopsis
  misc_feature (1)..(337): Homolog of NCBI NO: 18000074 NR Description: obtusifoliol-14-demethylase [Nicotiana tabacum]
  misc_feature (1)..(337): Homolog of NCBI NO: 27461067 NR Description: obtusifoliol-14-demethylase [Nicotiana tabacum]
  misc_feature (1)..(336): Homolog of NCBI NO: 27542762 NR Description: cytochrome P450-like protein [Sorghum bicolor]
  misc_feature (1)..(336): Homolog of NCBI NO: 5921924 NR Description: Cytochrome P450 51 (CYPL1) (P450-L1A1)
  misc_feature (1)..(336): Homolog of NCBI NO: 6166036 NR Description: Cytochrome P450 51 (CYPL1) (P450-L1A1)
  misc_feature (1)..(336): Homolog of NCBI NO: 4586676 NR Description: sterol 14-demethylase [Oryza sativa (japonica
  misc_feature (1)..(337): Homolog of NCBI NO: 15227817 NR Description: obtusifoliol 14-alpha demethylase, putative
  misc_feature (28)..(336): Homolog of NCBI NO: 7489685 NR Description: probable obtusifoliol 14-alpha-demethylase CYP51
  misc_feature (1)..(334): Homolog of NCBI NO: 6978751 NR Description: cytochrome P450, subfamily 51; Cytochrom P450

SEQ ID NO: 106659 - DNA, 1096 bp, Arabidopsis thaliana
  misc_feature (1)..(1096): Ceres Seq. ID no. 13620158
  misc_feature: MA Experiment ID: 20000182 Result: Up-regulated in Transcription
  misc_feature: MA Experiment 20000182 PARAMETER Experiment Name: At_2mM_SA_P Parameter: Age (day) Value: 14
  misc_feature: MA Experiment 20000182 PARAMETER Experiment Name: At_2mM_SA_P Parameter: Organism Value: A. thaliana
  misc_feature: MA Experiment 20000182 PARAMETER Experiment Name: At_2mM_SA_P Parameter: Plant Line Value: WS
  misc_feature: MA Experiment 20000182 PARAMETER Experiment Name: At_2mM_SA_P Parameter: Timepoint (hr) Value: 6
  misc_feature: MA Experiment 20000182 PARAMETER Experiment Name: At_2mM_SA_P Parameter: Tissue Value: Aerial
  misc_feature: MA Experiment 20000182 PARAMETER Experiment Name: At_2mM_SA_P Parameter: Treatment Value: 2mM SA vs. No Treatment
cttagtattttccgacgaggaaagttcttcaaattcgctgttgaattttgtttctcggagaaattatcaaaaccctagacgatcacattatcgcttctgagatcaaagacgatgcagcaattactgttcgctgttgttctcttcgaggttgttgtgataatggcgctttccttcaagacgccgattaggaagctgttgattatgagcttggatcgttccaagcgtggtcgtggaccggtggtgattcagacggtttctgcgacggttattgtgcttctggtgacgagcgtgtacaatatgatggggatccagaagcgttggatcgaagatggtgtagtgaatcctacagatgaggttatcatggctaagcatctccttgaatcgactcttatgggtggttttctattccttgggctaatgatagacaggctgcatcattacatgagggagctacgcataagaaggaagaacatggaagttataaagaaggaaggagcattattggaaggtgttaaggccagaggtttagatgaagttaaaaacttgatggaagaaattacgtccttcggaaaaggcaagagcagctggactctgagcttgaggcaaggtctaaagaaatccgtaccgagaaaactagtgcggttgctctacagaagcaatctgaagggttccttattgagtttaaccggttgcttgaggaaaaccaggtgctgcgagaccaattgcacactgtggattcgaaactttcgcgttcaagcagcaaaaagaatacttgagagaccttattccaacacttgaaacttctttgcgattctgccgtctgaatatatatgtttcgagtttgatatcaggagcttgtggtttggtgttatcgcatcttgttaacatggaagatgattgggaaagatcagagaatacaaaacaagtataggtttgcttcttgtttaagtgtttagctaaggtagaaattaatcaattcttctgctataggaaactgtaactcgttgtaacttgttcatttcgcaacaaaaacttctcgaattggttcttatttccttccatatacgtatacagtcgctgcaagtgggttgtcatt

SEQ ID NO: 106660 - protein, 228 aa, Arabidopsis thaliana
  peptide (1)..(228): Ceres Seq. ID no. 13620159
  misc_feature (4)..(156): Pfam Name: B-cell receptor-associated protein 31-like Pfam Description: B-cell receptor-associated protein 31-like
  misc_feature (1)..(228): Homolog of NCBI NO: 30682503 NR Description: expressed protein [Arabidopsis thaliana]
  misc_feature (1)..(199): Homolog of NCBI NO: 22655198 NR Description: unknown protein [Arabidopsis thaliana]
  misc_feature (1)..(156): Homolog of NCBI NO: 9759015 NR Description: gene_id:K16E1.4~unknown protein [Arabidopsis
  misc_feature (1)..(156): Homolog of NCBI NO: 18422225 NR Description: expressed protein [Arabidopsis thaliana]
  misc_feature (1)..(156): Homolog of NCBI NO: 21553655 NR Description: unknown [Arabidopsis thaliana]
  misc_feature (1)..(154): Homolog of NCBI NO: 34897474 NR Description: unknown protein [Oryza sativa (japonica
  misc_feature (1)..(151): Homolog of NCBI NO: 15239667 NR Description: hypothetical protein [Arabidopsis thaliana] contains similarity to unknown
  misc_feature (1)..(150): Homolog of NCBI NO: 15231412 NR Description: expressed protein [Arabidopsis thaliana]
  misc_feature (1)..(128): Homolog of NCBI NO: 18402620 NR Description: expressed protein [Arabidopsis thaliana]
MQQLLFAVVLFEVVVIMALSFKTPIRKLLIMSLDRSKRGRGPVVIQTVSATVIVLLVTSVYNMMGIQKRWIEDGVVNPTDEVIMAKHLLESTLMGGFLFLGLMIDRLHHYMRELRIRRKNMEVIKKEGALLEGVKARGLDEVKNLMEEITSFGKGKSSWTLSLRQGLKKSVPRKLVRLLYRSNLKGSLLSLTGCLRKTRCCETNCTLWIRNFRVQAAKRILERPYSNT

SEQ ID NO: 106661 - protein, 212 aa, Arabidopsis thaliana
  peptide (1)..(212): Ceres Seq. ID no. 13620160
  misc_feature (1)..(140): Pfam Name: B-cell receptor-associated protein 31-like Pfam Description: B-cell receptor-associated protein 31-like
  misc_feature (1)..(212): Homolog of NCBI NO: 30682503 NR Description: expressed protein [Arabidopsis thaliana]
  misc_feature (1)..(183): Homolog of NCBI NO: 22655198 NR Description: unknown protein [Arabidopsis thaliana]
  misc_feature (1)..(140): Homolog of NCBI NO: 9759015 NR Description: gene_id:K16E1.4~unknown protein [Arabidopsis
  misc_feature (1)..(140): Homolog of NCBI NO: 18422225 NR Description: expressed protein [Arabidopsis thaliana]
  misc_feature (1)..(140): Homolog of NCBI NO: 21553655 NR Description: unknown [Arabidopsis thaliana]
  misc_feature (1)..(138): Homolog of NCBI NO: 34897474 NR Description: unknown protein [Oryza sativa (japonica
  misc_feature (1)..(135): Homolog of NCBI NO: 15239667 NR Description: hypothetical protein [Arabidopsis thaliana] contains similarity to unknown
  misc_feature (1)..(134): Homolog of NCBI NO: 15231412 NR Description: expressed protein [Arabidopsis thaliana]
  misc_feature (1)..(112): Homolog of NCBI NO: 18402620 NR Description: expressed protein [Arabidopsis thaliana]
MALSFKTPIRKLLIMSLDRSKRGRGPVVIQTVSATVIVLLVTSVYNMMGIQKRWIEDGVVNPTDEVIMAKHLLESTLMGGFLFLGLMIDRLHHYMRELRIRRKNMEVIKKEGALLEGVKARGLDEVKNLMEEITSFGKGKSSWTLSLRQGLKKSVPRKLVRLLYRSNLKGSLLSLTGCLRKTRCCETNCTLWIRNFRVQAAKRILERPYSNT

SEQ ID NO: 106662 - protein, 198 aa, Arabidopsis thaliana
  peptide (1)..(198): Ceres Seq. ID no. 13620161
  misc_feature (1)..(126): Pfam Name: B-cell receptor-associated protein 31-like Pfam Description: B-cell receptor-associated protein 31-like
  misc_feature (1)..(198): Homolog of NCBI NO: 30682503 NR Description: expressed protein [Arabidopsis thaliana]
  misc_feature (1)..(169): Homolog of NCBI NO: 22655198 NR Description: unknown protein [Arabidopsis thaliana]
  misc_feature (1)..(126): Homolog of NCBI NO: 9759015 NR Description: gene_id:K16E1.4~unknown protein [Arabidopsis
  misc_feature (1)..(126): Homolog of NCBI NO: 18422225 NR Description: expressed protein [Arabidopsis thaliana]
  misc_feature (1)..(126): Homolog of NCBI NO: 21553655 NR Description: unknown [Arabidopsis thaliana]
  misc_feature (1)..(124): Homolog of NCBI NO: 34897474 NR Description: unknown protein [Oryza sativa (japonica
  misc_feature (1)..(121): Homolog of NCBI NO: 15239667 NR Description: hypothetical protein [Arabidopsis thaliana] contains similarity to unknown
  misc_feature (1)..(120): Homolog of NCBI NO: 15231412 NR Description: expressed protein [Arabidopsis thaliana]
  misc_feature (1)..(98): Homolog of NCBI NO: 18402620 NR Description: expressed protein [Arabidopsis thaliana]
MSLDRSKRGRGPVVIQTVSATVIVLLVTSVYNMMGIQKRWIEDGVVNPTDEVIMAKHLLESTLMGGFLFLGLMIDRLHHYMRELRIRRKNMEVIKKEGALLEGVKARGLDEVKNLMEEITSFGKGKSSWTLSLRQGLKKSVPRKLVRLLYRSNLKGSLLSLTGCLRKTRCCETNCTLWIRNFRVQAAKRILERPYSNT

SEQ ID NO: 106663 - DNA, 1007 bp, Arabidopsis thaliana
  misc_feature (1)..(1007): Ceres Seq. ID no. 13620162
aaaccctttaattgaaaaaaaaaacaaattacttctctttccttcgatcatcgtcttcctctggttctcagatctttgaatcgagcagaagcaattttaaatctcctatcagtgaatttttattactggagaagtaataaggcaaagatggtgaaaatgacattgatagctcgtgttactgatgggttacctctagctgaggggctcgatgatggacgtgacttaccggattcagatatgtataaacaacaggtcaaagctttgtttaagaatctgtccagaggtcaaaatgacgcttcaagaatgtccgttgaaactggcccctatgttttccattacatcatagaaggacgtgtttgctacttgacaatgtgtgaccgctcttacccaaagaaactcgctttccaatacctggaagatctcaagaatgaatttgaacgtgtcaatgggcctaacattgaaacagctgctcggccttatgcctttattaaatttgatacattcatacagaaaaccaagaaactgtaccaagacactcgtacgcaacgaaacatcgccaagttgaatgatgaactctatgaggttcatcaaataatgacccggaatgtgcaagaagtcttaggtgttggtgaaaagctggaccaggtgagcgagatgtcgagccggttaacatctgaatctcgtatatatgctgataaggctaaagatttgaaccgtcaggctttgatccgaaaatgggcaccagtcgcaattgtgttcggtgtagtcttcctccttttctgggtcaagaacaagctatggtaaaaaaaaaaggaggaatctaaggctattttcgtaatttagcggacttctccagacatatgtcgacctcccctaccggactcaagtctcagattccggcacccaaaatatcttctttctttcaaagagaaactttgacacattttgtacttctgtagtatgcaaactttatgagactggtcatagtatcatccattatactcttt

SEQ ID NO: 106664 - protein, 218 aa, Arabidopsis thaliana; identical to SEQ ID NO: 25673
  peptide (1)..(218): Ceres Seq. ID no. 13620163
  misc_feature (1)..(218): Homolog of NCBI NO: 15221123 NR Description: vesicle transport protein SEC22, putative thaliana] >gi|27805717|sp|Q94AU2|SC22_ARATH 25.3 kDa vesicle protein (AtSEC22) >gi|15027877|gb|AAK76469.1| putative vesicle
  misc_feature (62)..(218): Homolog of NCBI NO: 25402691 NR Description: hypothetical protein [imported] - Arabidopsis >gi|3157951|gb|AAC17634.1| Contains similarity to vesicle protein gb|U91538 from Mus musculus. ESTs gb|F15494 and gb|F14097
  misc_feature (1)..(64): Homolog of NCBI NO: 25402691 NR Description: hypothetical protein [imported] - Arabidopsis >gi|3157951|gb|AAC17634.1| Contains similarity to vesicle protein gb|U91538 from Mus musculus. ESTs gb|F15494 and gb|F14097
  misc_feature (1)..(218): Homolog of NCBI NO: 28269424 NR Description: putative vesicle trafficking protein [Oryza
  misc_feature (1)..(218): Homolog of NCBI NO: 34904386 NR Description: unnamed protein product [Oryza sativa (japonica group)] >gi|8467999|dbj|BAA96600.1| unnamed protein product
  misc_feature (1)..(121): Homolog of NCBI NO: 34015230 NR Description: putative vesicle trafficking protein [Oryza
  misc_feature (1)..(121): Homolog of NCBI NO: 35215218 NR Description: putative vesicle trafficking protein [Oryza
  misc_feature (1)..(212): Homolog of NCBI NO: 4759086 NR Description: vesicle trafficking protein sec22b [Homo sapiens]
  misc_feature (1)..(212): Homolog of NCBI NO: 14290512 NR Description: SEC22 vesicle trafficking protein-like 1 [Mus
  misc_feature (1)..(212): Homolog of NCBI NO: 1927215 NR Description: ERS-24 [Cricetulus griseus]

SEQ ID NO: 106665 - protein, 215 aa, Arabidopsis thaliana; identical to SEQ ID NO: 25674
  peptide (1)..(215): Ceres Seq. ID no. 13620164
  misc_feature (1)..(215): Homolog of NCBI NO: 15221123 NR Description: vesicle transport protein SEC22, putative thaliana] >gi|27805717|sp|Q94AU2|SC22_ARATH 25.3 kDa vesicle protein (AtSEC22) >gi|15027877|gb|AAK76469.1| putative vesicle
  misc_feature (59)..(215): Homolog of NCBI NO: 25402691 NR Description: hypothetical protein [imported] - Arabidopsis >gi|3157951|gb|AAC17634.1| Contains similarity to vesicle protein gb|U91538 from Mus musculus. ESTs gb|F15494 and gb|F14097
  misc_feature (1)..(61): Homolog of NCBI NO: 25402691 NR Description: hypothetical protein [imported] - Arabidopsis >gi|3157951|gb|AAC17634.1| Contains similarity to vesicle protein gb|U91538 from Mus musculus. ESTs gb|F15494 and gb|F14097
  misc_feature (1)..(215): Homolog of NCBI NO: 28269424 NR Description: putative vesicle trafficking protein [Oryza
  misc_feature (1)..(215): Homolog of NCBI NO: 34904386 NR Description: unnamed protein product [Oryza sativa (japonica group)] >gi|8467999|dbj|BAA96600.1| unnamed protein product
  misc_feature (1)..(118): Homolog of NCBI NO: 34015230 NR Description: putative vesicle trafficking protein [Oryza
  misc_feature (1)..(118): Homolog of NCBI NO: 35215218 NR Description: putative vesicle trafficking protein [Oryza
  misc_feature (1)..(209): Homolog of NCBI NO: 4759086 NR Description: vesicle trafficking protein sec22b [Homo sapiens]
  misc_feature (1)..(209): Homolog of NCBI NO: 14290512 NR Description: SEC22 vesicle trafficking protein-like 1 [Mus
  misc_feature (1)..(209): Homolog of NCBI NO: 1927215 NR Description: ERS-24 [Cricetulus griseus]

SEQ ID NO: 106666 - protein, 188 aa, Arabidopsis thaliana; identical to SEQ ID NO: 25675
  peptide (1)..(188): Ceres Seq. ID no. 13620165
  misc_feature (1)..(188): Homolog of NCBI NO: 15221123 NR Description: vesicle transport protein SEC22, putative thaliana] >gi|27805717|sp|Q94AU2|SC22_ARATH 25.3 kDa vesicle protein (AtSEC22) >gi|15027877|gb|AAK76469.1| putative vesicle
  misc_feature (32)..(188): Homolog of NCBI NO: 25402691 NR Description: hypothetical protein [imported] - Arabidopsis >gi|3157951|gb|AAC17634.1| Contains similarity to vesicle protein gb|U91538 from Mus musculus. ESTs gb|F15494 and gb|F14097
  misc_feature (1)..(34): Homolog of NCBI NO: 25402691 NR Description: hypothetical protein [imported] - Arabidopsis >gi|3157951|gb|AAC17634.1| Contains similarity to vesicle protein gb|U91538 from Mus musculus. ESTs gb|F15494 and gb|F14097
  misc_feature (1)..(188): Homolog of NCBI NO: 28269424 NR Description: putative vesicle trafficking protein [Oryza
  misc_feature (1)..(188): Homolog of NCBI NO: 34904386 NR Description: unnamed protein product [Oryza sativa (japonica group)] >gi|8467999|dbj|BAA96600.1| unnamed protein product
  misc_feature (1)..(91): Homolog of NCBI NO: 34015230 NR Description: putative vesicle trafficking protein [Oryza
  misc_feature (1)..(91): Homolog of NCBI NO: 35215218 NR Description: putative vesicle trafficking protein [Oryza
  misc_feature (1)..(182): Homolog of NCBI NO: 4759086 NR Description: vesicle trafficking protein sec22b [Homo sapiens]
  misc_feature (1)..(182): Homolog of NCBI NO: 14290512 NR Description: SEC22 vesicle trafficking protein-like 1 [Mus
  misc_feature (1)..(182): Homolog of NCBI NO: 1927215 NR Description: ERS-24 [Cricetulus griseus]

SEQ ID NO: 106667 - DNA, 749 bp, Arabidopsis thaliana
  misc_feature (1)..(749): Ceres Seq. ID no. 13620169
  misc_feature: MA Experiment ID: 108434 Result: Up-regulated in Transcription
  misc_feature: MA Experiment 108434 PARAMETER Experiment Name: At_Root_Tips_cDNA_P Parameter: Tissue Value: Root Tips
  misc_feature: MA Experiment ID: 108577 Result: Down-regulated in Transcription
  misc_feature: MA Experiment 108577 PARAMETER Experiment Name: At_42deg_Heat_cDNA_P Parameter: Temperature (deg C) Value: 42 vs. 22
  misc_feature: MA Experiment 108577 PARAMETER Experiment Name: At_42deg_Heat_cDNA_P Parameter: Timepoint (hr) Value: 6
  misc_feature: MA Experiment 108577 PARAMETER Experiment Name: At_42deg_Heat_cDNA_P Parameter: Tissue Value: Aerial
  misc_feature: MA Experiment ID: 20000111 Result: Down-regulated in Transcription
  misc_feature: MA Experiment 20000111 PARAMETER Experiment Name: At_42deg_Heat_cDNA_P Parameter: Temperature (deg C) Value: 42 vs. 22
  misc_feature: MA Experiment 20000111 PARAMETER Experiment Name: At_42deg_Heat_cDNA_P Parameter: Timepoint (hr) Value: 6
  misc_feature: MA Experiment 20000111 PARAMETER Experiment Name: At_42deg_Heat_cDNA_P Parameter: Tissue Value: Aerial
  misc_feature: MA Experiment ID: 20000113 Result: Down-regulated in Transcription
  misc_feature: MA Experiment 20000113 PARAMETER Experiment Name: At_42deg_Heat_cDNA_P Parameter: Temperature (deg C) Value: 42 vs. 22
  misc_feature: MA Experiment 20000113 PARAMETER Experiment Name: At_42deg_Heat_cDNA_P Parameter: Timepoint (hr) Value: 8
  misc_feature: MA Experiment 20000113 PARAMETER Experiment Name: At_42deg_Heat_cDNA_P Parameter: Tissue Value: Aerial
  misc_feature: MA Experiment ID: 20000173 Result: Down-regulated in Transcription
  misc_feature: MA Experiment 20000173 PARAMETER Experiment Name: At_42deg_Heat_P Parameter: Age (day) Value: 14
  misc_feature: MA Experiment 20000173 PARAMETER Experiment Name: At_42deg_Heat_P Parameter: Organism Value: A. thaliana
  misc_feature: MA Experiment 20000173 PARAMETER Experiment Name: At_42deg_Heat_P Parameter: Plant Line Value: WS
  misc_feature: MA Experiment 20000173 PARAMETER Experiment Name: At_42deg_Heat_P Parameter: Temperature (deg C) Value: 42 vs. 22
  misc_feature: MA Experiment 20000173 PARAMETER Experiment Name: At_42deg_Heat_P Parameter: Timepoint (hr) Value: 6
  misc_feature: MA Experiment 20000173 PARAMETER Experiment Name: At_42deg_Heat_P Parameter: Tissue Value: Aerial
  misc_feature: MA Experiment ID: 20000180 Result: Up-regulated in Transcription
  misc_feature: MA Experiment 20000180 PARAMETER Experiment Name: At_Germinating_Seeds_P Parameter: Age (hr) Value: 24 vs. 0
  misc_feature: MA Experiment 20000180 PARAMETER Experiment Name: At_Germinating_Seeds_P Parameter: Tissue Value: Germinating Seeds
  misc_feature: MA Experiment ID: 20000224 Result: Down-regulated in Transcription
  misc_feature: MA Experiment ID: 20001911 Result: Down-regulated in Transcription
  misc_feature: MA Experiment 20001911 PARAMETER Experiment Name: At_Drought_Reproduction_P Parameter: Age (day) Value: 40
  misc_feature: MA Experiment 20001911 PARAMETER Experiment Name: At_Drought_Reproduction_P Parameter: Organism Value: A. thaliana
  misc_feature: MA Experiment 20001911 PARAMETER Experiment Name: At_Drought_Reproduction_P Parameter: Plant Line Value: WS
  misc_feature: MA Experiment 20001911 PARAMETER Experiment Name: At_Drought_Reproduction_P Parameter: Timepoint (day) Value: 10
  misc_feature: MA Experiment 20001911 PARAMETER Experiment Name: At_Drought_Reproduction_P Parameter: Tissue Value: Flowers
  misc_feature: MA Experiment 20001911 PARAMETER Experiment Name: At_Drought_Reproduction_P Parameter: Treatment Value: Drought vs. No Drought
gttaaaagttacaaacgcgactctctgatcctaaatttcgttgtacagagaagaagcaaaagagagaaacatctgacccggaatctgacctgaaaacccggaagaatcgaaaaatggggaaagatggtctgagcgacgatcaggtctcgtcgatgaaggaagccttcatgctcttcgacaccgatggcgacggcaaaatcgcaccgtcagagctcgggatcctcatgcgatctctcggcggaaacccgacccaagcccagctgaaatccataatcgcatccgagaatctctcttcaccgtttgatttcaacagattcctcgatctcatggcgaaacatctgaagacggaacctttcgatcgccagctccgtgacgcattcaaagtgctcgataaggaaggtaccgggttcgttgctgtggcggatctgaggcatattctgaccagtatcggagagaagctggagcctaatgagttcgatgagtggatcaaggaggtggatgttggatccgatggaaagatccggtatgaagatttcatagcaaggatggttgctaagtgagatctaatcttttatgttttgaaagttgaaatttttaagaagagattctttgtgtttttttcacttgtttgtttgatttcgagcgaatcctagctagggtttgttttatcattgtggaatttgcttactaactttgtcttcttcatgtttgttttcatttttaatggaaatgttgtctgtgtgattcct

SEQ ID NO: 106668 - protein, 148 aa, Arabidopsis thaliana; identical to SEQ ID NO: 24638
  peptide (1)..(148): Ceres Seq. ID no. 13620170
  misc_feature (120)..(148): Pfam Name: EF hand Pfam Description: EF hand
  misc_feature (1)..(148): Homolog of NCBI NO: 15221284 NR Description: calmodulin, putative [Arabidopsis thaliana] At1g12310/F5O11_2 [Arabidopsis thaliana]
  misc_feature (1)..(147): Homolog of NCBI NO: 25402719 NR Description: protein F5O11.4 [imported] - Arabidopsis thaliana
  misc_feature (1)..(148): Homolog of NCBI NO: 15221593 NR Description: calmodulin, putative [Arabidopsis thaliana] putative calmodulin protein [Arabidopsis thaliana]
  misc_feature (1)..(148): Homolog of NCBI NO: 6630454 NR Description: F23N19.18 [Arabidopsis thaliana]
  misc_feature (1)..(148): Homolog of NCBI NO: 28629126 NR Description: putative serine/threonine kinase [Vitis vinifera]
  misc_feature (1)..(148): Homolog of NCBI NO: 29367559 NR Description: putative serine/threonine kinase [Oryza sativa
  misc_feature (4)..(148): Homolog of NCBI NO: 4959168 NR Description: calmodulin mutant SYNCAM62 [synthetic construct]
  misc_feature (4)..(148): Homolog of NCBI NO: 4959636 NR Description: calmodulin mutant SYNCAM36 [synthetic construct]
  misc_feature (4)..(148): Homolog of NCBI NO: 4959645 NR Description: calmodulin mutant SYNCAM31 [synthetic construct]
  misc_feature (4)..(148): Homolog of NCBI NO: 4959618 NR Description: calmodulin mutant SYNCAM45 [synthetic construct]

SEQ ID NO: 106669 - protein, 135 aa, Arabidopsis thaliana; identical to SEQ ID NO: 24639
  peptide (1)..(135): Ceres Seq. ID no. 13620171
  misc_feature (107)..(135): Pfam Name: EF hand Pfam Description: EF hand
  misc_feature (1)..(135): Homolog of NCBI NO: 15221284 NR Description: calmodulin, putative [Arabidopsis thaliana] At1g12310/F5O11_2 [Arabidopsis thaliana]
  misc_feature (1)..(134): Homolog of NCBI NO: 25402719 NR Description: protein F5O11.4 [imported] - Arabidopsis thaliana
  misc_feature (1)..(135): Homolog of NCBI NO: 15221593 NR Description: calmodulin, putative [Arabidopsis thaliana] putative calmodulin protein [Arabidopsis thaliana]
  misc_feature (1)..(135): Homolog of NCBI NO: 6630454 NR Description: F23N19.18 [Arabidopsis thaliana]
  misc_feature (1)..(135): Homolog of NCBI NO: 28629126 NR Description: putative serine/threonine kinase [Vitis vinifera]
  misc_feature (1)..(135): Homolog of NCBI NO: 29367559 NR Description: putative serine/threonine kinase [Oryza sativa
  misc_feature (1)..(135): Homolog of NCBI NO: 4959168 NR Description: calmodulin mutant SYNCAM62 [synthetic construct]
  misc_feature (1)..(135): Homolog of NCBI NO: 4959636 NR Description: calmodulin mutant SYNCAM36 [synthetic construct]
  misc_feature (1)..(135): Homolog of NCBI NO: 4959645 NR Description: calmodulin mutant SYNCAM31 [synthetic construct]
  misc_feature (1)..(135): Homolog of NCBI NO: 4959618 NR Description: calmodulin mutant SYNCAM45 [synthetic construct]

SEQ ID NO: 106670 - protein, 130 aa, Arabidopsis thaliana; identical to SEQ ID NO: 24640
  peptide (1)..(130): Ceres Seq. ID no. 13620172
  misc_feature (102)..(130): Pfam Name: EF hand Pfam Description: EF hand
  misc_feature (1)..(130): Homolog of NCBI NO: 15221284 NR Description: calmodulin, putative [Arabidopsis thaliana] At1g12310/F5O11_2 [Arabidopsis thaliana]
  misc_feature (1)..(129): Homolog of NCBI NO: 25402719 NR Description: protein F5O11.4 [imported] - Arabidopsis thaliana
  misc_feature (1)..(130): Homolog of NCBI NO: 15221593 NR Description: calmodulin, putative [Arabidopsis thaliana] putative calmodulin protein [Arabidopsis thaliana]
  misc_feature (1)..(130): Homolog of NCBI NO: 6630454 NR Description: F23N19.18 [Arabidopsis thaliana]
  misc_feature (1)..(130): Homolog of NCBI NO: 28629126 NR Description: putative serine/threonine kinase [Vitis vinifera]
  misc_feature (1)..(130): Homolog of NCBI NO: 29367559 NR Description: putative serine/threonine kinase [Oryza sativa
  misc_feature (1)..(130): Homolog of NCBI NO: 4959168 NR Description: calmodulin mutant SYNCAM62 [synthetic construct]
  misc_feature (1)..(130): Homolog of NCBI NO: 4959645 NR Description: calmodulin mutant SYNCAM31 [synthetic construct]
  misc_feature (1)..(130): Homolog of NCBI NO: 4959636 NR Description: calmodulin mutant SYNCAM36 [synthetic construct]
  misc_feature (1)..(130): Homolog of NCBI NO: 4959618 NR Description: calmodulin mutant SYNCAM45 [synthetic construct]

SEQ ID NO: 106671 - DNA, 835 bp, Arabidopsis thaliana
  misc_feature (1)..(835): Ceres Seq. ID no. 13620173
  misc_feature: MA Experiment ID: 108433 Result: Down-regulated in Transcription
  misc_feature: MA Experiment 108433 PARAMETER Experiment Name: At_rhl_Mutant2_cDNA_P Parameter: Age (day) Value: 7
  misc_feature: MA Experiment 108433 PARAMETER Experiment Name: At_rhl_Mutant2_cDNA_P Parameter: Organism Value: A. thaliana
  misc_feature: MA Experiment 108433 PARAMETER Experiment Name: At_rhl_Mutant2_cDNA_P Parameter: Plant Line Value: rhl Mutant vs. wt landsburg
  misc_feature: MA Experiment 108433 PARAMETER Experiment Name: At_rhl_Mutant2_cDNA_P Parameter: Tissue Value: Roots
  misc_feature: MA Experiment ID: 108435 Result: Down-regulated in Transcription
  misc_feature: MA Experiment 108435 PARAMETER Experiment Name: At_stm_Mutants_cDNA_P Parameter: Plant Line Value: wt Landsburg vs stm
  misc_feature: MA Experiment 108435 PARAMETER Experiment Name: At_stm_Mutants_cDNA_P Parameter: Tissue Value: Shoot Apical Meristem Region
  misc_feature: MA Experiment ID: 108462 Result: Up-regulated in Transcription
  misc_feature: MA Experiment 108462 PARAMETER Experiment Name: At_Germinating_Seeds_cDNA_P Parameter: Age (day) Value: 2 vs. 0
  misc_feature: MA Experiment 108462 PARAMETER Experiment Name: At_Germinating_Seeds_cDNA_P Parameter: Tissue Value: Germinating Seeds
  misc_feature: MA Experiment ID: 108464 Result: Up-regulated in Transcription
  misc_feature: MA Experiment 108464 PARAMETER Experiment Name: At_Germinating_Seeds_cDNA_P Parameter: Age (day) Value: 4 vs. 0
  misc_feature: MA Experiment 108464 PARAMETER Experiment Name: At_Germinating_Seeds_cDNA_P Parameter: Tissue Value: Germinating Seeds
  misc_feature: MA Experiment ID: 108469 Result: Down-regulated in Transcription
  misc_feature: MA Experiment ID: 108488 Result: Up-regulated in Transcription
  misc_feature: MA Experiment ID: 20000069 Result: Up-regulated in Transcription
  misc_feature: MA Experiment 20000069 PARAMETER Experiment Name: At_100uM_ABA_Mutants_cDNA_P Parameter: Plant Line Value: CS23
  misc_feature: MA Experiment 20000069 PARAMETER Experiment Name: At_100uM_ABA_Mutants_cDNA_P Parameter: Timepoint (hr) Value: 6
  misc_feature: MA Experiment 20000069 PARAMETER Experiment Name: At_100uM_ABA_Mutants_cDNA_P Parameter: Tissue Value: Aerial
  misc_feature: MA Experiment 20000069 PARAMETER Experiment Name: At_100uM_ABA_Mutants_cDNA_P Parameter: Treatment Value: 100uM ABA vs. No Treatment
  misc_feature: MA Experiment ID: 20000070 Result: Up-regulated in Transcription
  misc_feature: MA Experiment 20000070 PARAMETER Experiment Name: At_100uM_ABA_Mutants_cDNA_P Parameter: Plant Line Value: CS24
  misc_feature: MA Experiment 20000070 PARAMETER Experiment Name: At_100uM_ABA_Mutants_cDNA_P Parameter: Timepoint (hr) Value: 6
  misc_feature: MA Experiment 20000070 PARAMETER Experiment Name: At_100uM_ABA_Mutants_cDNA_P Parameter: Tissue Value: Aerial
  misc_feature: MA Experiment 20000070 PARAMETER Experiment Name: At_100uM_ABA_Mutants_cDNA_P Parameter: Treatment Value: 100uM ABA vs. No Treatment
  misc_feature: MA Experiment ID: 20000072 Result: Up-regulated in Transcription
  misc_feature: MA Experiment 20000072 PARAMETER Experiment Name: At_100uM_ABA_Mutants_cDNA_P Parameter: Plant Line Value: CS8105
  misc_feature: MA Experiment 20000072 PARAMETER Experiment Name: At_100uM_ABA_Mutants_cDNA_P Parameter: Timepoint (hr) Value: 6
  misc_feature: MA Experiment 20000072 PARAMETER Experiment Name: At_100uM_ABA_Mutants_cDNA_P Parameter: Tissue Value: Aerial
  misc_feature: MA Experiment 20000072 PARAMETER Experiment Name: At_100uM_ABA_Mutants_cDNA_P Parameter: Treatment Value: 100uM ABA vs. No Treatment
  misc_feature: MA Experiment ID: 20000087 Result: Up-regulated in Transcription
  misc_feature: MA Experiment 20000087 PARAMETER Experiment Name: At_100uM_ABA_Mutants_cDNA_P Parameter: Plant Line Value: WS
  misc_feature: MA Experiment 20000087 PARAMETER Experiment Name: At_100uM_ABA_Mutants_cDNA_P Parameter: Timepoint (hr) Value: 6
  misc_feature: MA Experiment 20000087 PARAMETER Experiment Name: At_100uM_ABA_Mutants_cDNA_P Parameter: Tissue Value: Aerial
  misc_feature: MA Experiment 20000087 PARAMETER Experiment Name: At_100uM_ABA_Mutants_cDNA_P Parameter: Treatment Value: 100uM ABA vs. No Treatment
  misc_feature: MA Experiment ID: 20000088 Result: Up-regulated in Transcription
  misc_feature: MA Experiment 20000088 PARAMETER Experiment Name: At_100uM_ABA_Mutants_cDNA_P Parameter: Plant Line Value: Landsberg
  misc_feature: MA Experiment 20000088 PARAMETER Experiment Name: At_100uM_ABA_Mutants_cDNA_P Parameter: Timepoint (hr) Value: 6
  misc_feature: MA Experiment 20000088 PARAMETER Experiment Name: At_100uM_ABA_Mutants_cDNA_P Parameter: Tissue Value: Aerial
  misc_feature: MA Experiment 20000088 PARAMETER Experiment Name: At_100uM_ABA_Mutants_cDNA_P Parameter: Treatment Value: 100uM ABA vs. No Treatment
  misc_feature: MA Experiment ID: 20000093 Result: Down-regulated in Transcription
  misc_feature: MA Experiment 20000093 PARAMETER Experiment Name: At_42deg_Heat_cDNA_P Parameter: Temperature (deg C) Value: 42 vs. 22
  misc_feature: MA Experiment 20000093 PARAMETER Experiment Name: At_42deg_Heat_cDNA_P Parameter: Timepoint (hr) Value: 0.5
  misc_feature: MA Experiment 20000093 PARAMETER Experiment Name: At_42deg_Heat_cDNA_P Parameter: Tissue Value: Aerial
  misc_feature: MA Experiment ID: 20000112 Result: Down-regulated in Transcription
  misc_feature: MA Experiment 20000112 PARAMETER Experiment Name: At_42deg_Heat_cDNA_P Parameter: Temperature (deg C) Value: 42 vs. 22
  misc_feature: MA Experiment 20000112 PARAMETER Experiment Name: At_42deg_Heat_cDNA_P Parameter: Timepoint (hr) Value: 2
  misc_feature: MA Experiment 20000112 PARAMETER Experiment Name: At_42deg_Heat_cDNA_P Parameter: Tissue Value: Aerial
  misc_feature: MA Experiment ID: 20000144 Result: Down-regulated in Transcription
  misc_feature: MA Experiment 20000144 PARAMETER Experiment Name: At_42deg_Heat_cDNA_P Parameter: Temperature (deg C) Value: 42 vs. 22
  misc_feature: MA Experiment 20000144 PARAMETER Experiment Name: At_42deg_Heat_cDNA_P Parameter: Timepoint (hr) Value: 1
  misc_feature: MA Experiment 20000144 PARAMETER Experiment Name: At_42deg_Heat_cDNA_P Parameter: Tissue Value: Aerial
  misc_feature: MA Experiment ID: 20000171 Result: Down-regulated in Transcription
  misc_feature: MA Experiment 20000171 PARAMETER Experiment Name: At_42deg_Heat_P Parameter: Age (day) Value: 14
  misc_feature: MA Experiment 20000171 PARAMETER Experiment Name: At_42deg_Heat_P Parameter: Organism Value: A. thaliana
  misc_feature: MA Experiment 20000171 PARAMETER Experiment Name: At_42deg_Heat_P Parameter: Plant Line Value: WS
  misc_feature: MA Experiment 20000171 PARAMETER Experiment Name: At_42deg_Heat_P Parameter: Temperature (deg C) Value: 42 vs. 22
  misc_feature: MA Experiment 20000171 PARAMETER Experiment Name: At_42deg_Heat_P Parameter: Timepoint (hr) Value: 1
  misc_feature: MA Experiment 20000171 PARAMETER Experiment Name: At_42deg_Heat_P Parameter: Tissue Value: Aerial
  misc_feature: MA Experiment ID: 20000173 Result: Down-regulated in Transcription
  misc_feature: MA Experiment 20000173 PARAMETER Experiment Name: At_42deg_Heat_P Parameter: Age (day) Value: 14
  misc_feature: MA Experiment 20000173 PARAMETER Experiment Name: At_42deg_Heat_P Parameter: Organism Value: A. thaliana
  misc_feature: MA Experiment 20000173 PARAMETER Experiment Name: At_42deg_Heat_P Parameter: Plant Line Value: WS
  misc_feature: MA Experiment 20000173 PARAMETER Experiment Name: At_42deg_Heat_P Parameter: Temperature (deg C) Value: 42 vs. 22
  misc_feature: MA Experiment 20000173 PARAMETER Experiment Name: At_42deg_Heat_P Parameter: Timepoint (hr) Value: 6
  misc_feature: MA Experiment 20000173 PARAMETER Experiment Name: At_42deg_Heat_P Parameter: Tissue Value: Aerial
  misc_feature: MA Experiment ID: 20000179 Result: Up-regulated in Transcription
  misc_feature: MA Experiment 20000179 PARAMETER Experiment Name: At_Germinating_Seeds_P Parameter: Age (hr) Value: 6 vs. 0
  misc_feature: MA Experiment 20000179 PARAMETER Experiment Name: At_Germinating_Seeds_P Parameter: Tissue Value: Germinating Seeds
  misc_feature: MA Experiment ID: 20000180 Result: Up-regulated in Transcription
  misc_feature: MA Experiment 20000180 PARAMETER Experiment Name: At_Germinating_Seeds_P Parameter: Age (hr) Value: 24 vs. 0
  misc_feature: MA Experiment 20000180 PARAMETER Experiment Name: At_Germinating_Seeds_P Parameter: Tissue Value: Germinating Seeds
  misc_feature: MA Experiment ID: 20000182 Result: Down-regulated in Transcription
  misc_feature: MA Experiment 20000182 PARAMETER Experiment Name: At_2mM_SA_P Parameter: Age (day) Value: 14
  misc_feature: MA Experiment 20000182 PARAMETER Experiment Name: At_2mM_SA_P Parameter: Organism Value: A. thaliana
  misc_feature: MA Experiment 20000182 PARAMETER Experiment Name: At_2mM_SA_P Parameter: Plant Line Value: WS
  misc_feature: MA Experiment 20000182 PARAMETER Experiment Name: At_2mM_SA_P Parameter: Timepoint (hr) Value: 6
  misc_feature: MA Experiment 20000182 PARAMETER Experiment Name: At_2mM_SA_P Parameter: Tissue Value: Aerial
  misc_feature: MA Experiment 20000182 PARAMETER Experiment Name: At_2mM_SA_P Parameter: Treatment Value: 2mM SA vs. No Treatment
  misc_feature: MA Experiment ID: 20000184 Result: Up-regulated in Transcription
  misc_feature: MA Experiment 20000184 PARAMETER Experiment Name: At_Shoots__P Parameter: Age (day) Value: 7
  misc_feature: MA Experiment 20000184 PARAMETER Experiment Name: At_Shoots__P Parameter: Tissue Value: Shoots vs. Whole Plant
  misc_feature: MA Experiment ID: 20000224 Result: Down-regulated in Transcription
  misc_feature: MA Experiment ID: 20000227 Result: Up-regulated in Transcription
  misc_feature: MA Experiment 20000227 PARAMETER Experiment Name: At_Root-Tips-vs-Tops_P Parameter: Tissue Value: Root Tips vs. Root Tops
  misc_feature: MA Experiment ID: 20000438 Result: Up-regulated in Transcription
  misc_feature: MA Experiment 20000438 PARAMETER Experiment Name: At_Shoots__P Parameter: Age (day) Value: 14
  misc_feature: MA Experiment 20000438 PARAMETER Experiment Name: At_Shoots__P Parameter: Tissue Value: Shoots vs. Whole Plant
  misc_feature: MA Experiment ID: 20000439 Result: Down-regulated in Transcription
  misc_feature: MA Experiment 20000439 PARAMETER Experiment Name: At_Roots__P Parameter: Age (day) Value: 14 vs. 21
  misc_feature: MA Experiment 20000439 PARAMETER Experiment Name: At_Roots__P Parameter: Organism Value: A. thaliana
  misc_feature: MA Experiment 20000439 PARAMETER Experiment Name: At_Roots__P Parameter: Tissue Value: Roots vs. Whole Plant
  misc_feature: MA Experiment ID: 20000495 Result: Down-regulated in Transcription
  misc_feature: MA Experiment 20000495 PARAMETER Experiment Name: At_Guard_Cells_P Parameter: Harvest Date Value: 8/2/2002
  misc_feature: MA Experiment 20000495 PARAMETER Experiment Name: At_Guard_Cells_P Parameter: Organism Value: A. thaliana
  misc_feature: MA Experiment 20000495 PARAMETER Experiment Name: At_Guard_Cells_P Parameter: Tissue Value: Guard Cells vs. Leaves
  misc_feature: MA Experiment ID: 20000794 Result: Down-regulated in Transcription
  misc_feature: MA Experiment 20000794 PARAMETER Experiment Name: At_Petals_P Parameter: Age (day) Value: 23-25 days
  misc_feature: MA Experiment 20000794 PARAMETER Experiment Name: At_Petals_P Parameter: Plant Line Value: WS
  misc_feature: MA Experiment 20000794 PARAMETER Experiment Name: At_Petals_P Parameter: Tissue Value: Petals vs. Whole plant
  misc_feature: MA Experiment ID: 20001451 Result: Down-regulated in Transcription
  misc_feature: MA Experiment 20001451 PARAMETER Experiment Name: At_Far-red-induction_P Parameter: Age (day) Value: 7
  misc_feature: MA Experiment 20001451 PARAMETER Experiment Name: At_Far-red-induction_P Parameter: Light Value: Far-red vs. White
  misc_feature: MA Experiment 20001451 PARAMETER Experiment Name: At_Far-red-induction_P Parameter: Organism Value: A. thaliana
  misc_feature: MA Experiment 20001451 PARAMETER Experiment Name: At_Far-red-induction_P Parameter: Plant Line Value: Columbia
  misc_feature: MA Experiment 20001451 PARAMETER Experiment Name: At_Far-red-induction_P Parameter: Timepoint (hr) Value: 24
  misc_feature: MA Experiment 20001451 PARAMETER Experiment Name: At_Far-red-induction_P Parameter: Tissue Value: Whole Plant
  misc_feature: MA Experiment ID: 20001905 Result: Down-regulated in Transcription
  misc_feature: MA Experiment 20001905 PARAMETER Experiment Name: At_Drought_Reproduction_P Parameter: Age (day) Value: 40
  misc_feature: MA Experiment 20001905 PARAMETER Experiment Name: At_Drought_Reproduction_P Parameter: Organism Value: A. thaliana
  misc_feature: MA Experiment 20001905 PARAMETER Experiment Name: At_Drought_Reproduction_P Parameter: Plant Line Value: WS
  misc_feature: MA Experiment 20001905 PARAMETER Experiment Name: At_Drought_Reproduction_P Parameter: Timepoint (day) Value: 10
  misc_feature: MA Experiment 20001905 PARAMETER Experiment Name: At_Drought_Reproduction_P Parameter: Tissue Value: Rosettes
  misc_feature: MA Experiment 20001905 PARAMETER Experiment Name: At_Drought_Reproduction_P Parameter: Treatment Value: Drought vs. No Drought
atatatcttatggatcggacgctcttgggcttttcttgaaaccactataaaacctatctcaattctttcattttctccacacccaattcactcacaacctagctagctagtaaacagtattttctatataccaaaaatggcttcaagttccatagctcttttcttggctctcaatcttctctttttcacaacaatctccgcctgtggtagctgtactccgtgcggcggaggttgcccctctcccaagccaaagccaactcctaaaccaaccccaagccctagctctggctcgagcaagtgccctaaagacaccctcaagctcggtgtctgcgctaatgtgctcaacggcctcctggacttgacccttggcaagccaccggtcgagccatgctgcagcctcatccaaggactcgctgatgttgaggcagccgtttgtctctgcaccgctcttaaggctaacattcttggaatcaacttgaacctcccaatatctttaagtctactccttaatgtttgcagcaaacaacttcctcctggcttccaatgctaaaaaccatattgatatataatttaaatacacttatgtgtgtattaatttatcttcttgttttaaagagacagggtgattctctatactcttatattgtgtctttatatatcttgatctgtggtttcttctactctgcttgctctggtgttcattggggtgatccgtaagattcctgaagtttacagtttcattatttcctattatatatactcttaccattgggggtattgttgtattggtttgtattatgattctatgaattaataagaatttaacttttatgtt

SEQ ID NO: 106672 - protein, 137 aa, Arabidopsis thaliana; identical to SEQ ID NO: 20894
  peptide (1)..(137): Ceres Seq. ID no. 13620174
  misc_feature (55)..(137): Pfam Name: Protease inhibitor/seed storage/LTP family Pfam Description: Protease inhibitor/seed storage/LTP family
  misc_feature (1)..(137): Homolog of NCBI NO: 15221201 NR Description: protease inhibitor/seed storage/lipid transfer
  misc_feature (1)..(136): Homolog of NCBI NO: 13561927 NR Description: extensin-like protein [Brassica napus]
  misc_feature (3)..(137): Homolog of NCBI NO: 15221484 NR Description: protease inhibitor/seed storage/lipid transfer (LTP) family [Arabidopsis thaliana] >gi|25307714|pir||B96651
  misc_feature (4)..(137): Homolog of NCBI NO: 629597 NR Description: proline-rich protein - rape
  misc_feature (3)..(132): Homolog of NCBI NO: 21360370 NR Description: extensin-like protein [Citrus junos]
  misc_feature (2)..(137): Homolog of NCBI NO: 7484770 NR Description: extensin like protein - black poplar extensin like protein [Populus nigra] >gi|1199774|dbj|BAA11855.1|
  misc_feature (3)..(137): Homolog of NCBI NO: 10798758 NR Description: P-rich protein Nt-SubC29 [Nicotiana tabacum]

SEQ ID NO: 106673 - DNA, 1621 bp, Arabidopsis thaliana
  misc_feature (1)..(1621): Ceres Seq. ID no. 13620179
  misc_feature: MA Experiment ID: 20000173 Result: Up-regulated in Transcription
  misc_feature: MA Experiment 20000173 PARAMETER Experiment Name: At_42deg_Heat_P Parameter: Age (day) Value: 14
  misc_feature: MA Experiment 20000173 PARAMETER Experiment Name: At_42deg_Heat_P Parameter: Organism Value: A. thaliana
  misc_feature: MA Experiment 20000173 PARAMETER Experiment Name: At_42deg_Heat_P Parameter: Plant Line Value: WS
  misc_feature: MA Experiment 20000173 PARAMETER Experiment Name: At_42deg_Heat_P Parameter: Temperature (deg C) Value: 42 vs. 22
  misc_feature: MA Experiment 20000173 PARAMETER Experiment Name: At_42deg_Heat_P Parameter: Timepoint (hr) Value: 6
  misc_feature: MA Experiment 20000173 PARAMETER Experiment Name: At_42deg_Heat_P Parameter: Tissue Value: Aerial
  misc_feature: MA Experiment ID: 20000182 Result: Up-regulated in Transcription
  misc_feature: MA Experiment 20000182 PARAMETER Experiment Name: At_2mM_SA_P Parameter: Age (day) Value: 14
  misc_feature: MA Experiment 20000182 PARAMETER Experiment Name: At_2mM_SA_P Parameter: Organism Value: A. thaliana
  misc_feature: MA Experiment 20000182 PARAMETER Experiment Name: At_2mM_SA_P Parameter: Plant Line Value: WS
  misc_feature: MA Experiment 20000182 PARAMETER Experiment Name: At_2mM_SA_P Parameter: Timepoint (hr) Value: 6
  misc_feature: MA Experiment 20000182 PARAMETER Experiment Name: At_2mM_SA_P Parameter: Tissue Value: Aerial
  misc_feature: MA Experiment 20000182 PARAMETER Experiment Name: At_2mM_SA_P Parameter: Treatment Value: 2mM SA vs. No Treatment
  misc_feature: MA Experiment ID: 20000184 Result: Up-regulated in Transcription
  misc_feature: MA Experiment 20000184 PARAMETER Experiment Name: At_Shoots__P Parameter: Age (day) Value: 7
  misc_feature: MA Experiment 20000184 PARAMETER Experiment Name: At_Shoots__P Parameter: Tissue Value: Shoots vs. Whole Plant
  misc_feature: MA Experiment ID: 20000185 Result: Up-regulated in Transcription
  misc_feature: MA Experiment 20000185 PARAMETER Experiment Name: At_Roots__P Parameter: Age (day) Value: 7 vs. 21
  misc_feature: MA Experiment 20000185 PARAMETER Experiment Name: At_Roots__P Parameter: Organism Value: A. thaliana
  misc_feature: MA Experiment 20000185 PARAMETER Experiment Name: At_Roots__P Parameter: Tissue Value: Roots vs. Whole Plant
  misc_feature: MA Experiment ID: 20000227 Result: Down-regulated in Transcription
  misc_feature: MA Experiment 20000227 PARAMETER Experiment Name: At_Root-Tips-vs-Tops_P Parameter: Tissue Value: Root Tips vs. Root Tops
  misc_feature: MA Experiment ID: 20000269 Result: Down-regulated in Transcription
  misc_feature: MA Experiment 20000269 PARAMETER Experiment Name: At_1mM_KNO3_L-vs-H_Roots_P Parameter: Age (day) Value: 7,10,12
  misc_feature: MA Experiment 20000269 PARAMETER Experiment Name: At_1mM_KNO3_L-vs-H_Roots_P Parameter: Organism Value: A. thaliana
  misc_feature: MA Experiment 20000269 PARAMETER Experiment Name: At_1mM_KNO3_L-vs-H_Roots_P Parameter: Plant Line Value: WS
  misc_feature: MA Experiment 20000269 PARAMETER Experiment Name: At_1mM_KNO3_L-vs-H_Roots_P Parameter: Timepoint (day) Value: 7,10,12
  misc_feature: MA Experiment 20000269 PARAMETER Experiment Name: At_1mM_KNO3_L-vs-H_Roots_P Parameter: Tissue Value: Roots
  misc_feature: MA Experiment 20000269 PARAMETER Experiment Name: At_1mM_KNO3_L-vs-H_Roots_P Parameter: Treatment Value: 1mM KNO3 vs. 50mM KNO3
  misc_feature: MA Experiment ID: 20000437 Result: Down-regulated in Transcription
  misc_feature: MA Experiment 20000437 PARAMETER Experiment Name: At_Drought_P Parameter: Age (day) Value: 8
  misc_feature: MA Experiment 20000437 PARAMETER Experiment Name: At_Drought_P Parameter: Organism Value: A. thaliana
  misc_feature: MA Experiment 20000437 PARAMETER Experiment Name: At_Drought_P Parameter: Plant Line Value: WS
  misc_feature: MA Experiment 20000437 PARAMETER Experiment Name: At_Drought_P Parameter: Timepoint (hr) Value: 24
  misc_feature: MA Experiment 20000437 PARAMETER Experiment Name: At_Drought_P Parameter: Tissue Value: Whole Plant
  misc_feature: MA Experiment 20000437 PARAMETER Experiment Name: At_Drought_P Parameter: Treatment Value: Drought vs. No Drought
  misc_feature: MA Experiment ID: 20000438 Result: Up-regulated in Transcription
  misc_feature: MA Experiment 20000438 PARAMETER Experiment Name: At_Shoots__P Parameter: Age (day) Value: 14
  misc_feature: MA Experiment 20000438 PARAMETER Experiment Name: At_Shoots__P Parameter: Tissue Value: Shoots vs. Whole Plant
  misc_feature: MA Experiment ID: 20000439 Result: Up-regulated in Transcription
  misc_feature: MA Experiment 20000439 PARAMETER Experiment Name: At_Roots__P Parameter: Age (day) Value: 14 vs. 21
  misc_feature: MA Experiment 20000439 PARAMETER Experiment Name: At_Roots__P Parameter: Organism Value: A. thaliana
  misc_feature: MA Experiment 20000439 PARAMETER Experiment Name: At_Roots__P Parameter: Tissue Value: Roots vs. Whole Plant
  misc_feature: MA Experiment ID: 20000441 Result: Up-regulated in Transcription
  misc_feature: MA Experiment 20000441 PARAMETER Experiment Name: At_1uM_BR-BRZ__P Parameter: Tissue Value: Shoot Apices
  misc_feature: MA Experiment 20000441 PARAMETER Experiment Name: At_1uM_BR-BRZ__P Parameter: Treatment Value: 1uM BR vs. No Treatment
  misc_feature: MA Experiment ID: 20000443 Result: Up-regulated in Transcription
  misc_feature: MA Experiment 20000443 PARAMETER Experiment Name: At_1uM_BR-BRZ__P Parameter: Tissue Value: Shoot Apices
  misc_feature: MA Experiment 20000443 PARAMETER Experiment Name: At_1uM_BR-BRZ__P Parameter: Treatment Value: 1uM BRZ vs. No Treatment
  misc_feature: MA Experiment ID: 20000573 Result: Down-regulated in Transcription
  misc_feature: MA Experiment 20000573 PARAMETER Experiment Name: At_100uM_ABA_Mutants__P Parameter: Organism Value: A. thaliana
  misc_feature: MA Experiment 20000573 PARAMETER Experiment Name: At_100uM_ABA_Mutants__P Parameter: Plant Line Value: CS22 vs. Ler wt
  misc_feature: MA Experiment 20000573 PARAMETER Experiment Name: At_100uM_ABA_Mutants__P Parameter: Timepoint (hr) Value: N/A
  misc_feature: MA Experiment 20000573 PARAMETER Experiment Name: At_100uM_ABA_Mutants__P Parameter: Tissue Value: Whole Plant
  misc_feature: MA Experiment 20000573 PARAMETER Experiment Name: At_100uM_ABA_Mutants__P Parameter: Treatment Value: None
  misc_feature: MA Experiment ID: 20000794 Result: Up-regulated in Transcription
  misc_feature: MA Experiment 20000794 PARAMETER Experiment Name: At_Petals_P Parameter: Age (day) Value: 23-25 days
  misc_feature: MA Experiment 20000794 PARAMETER Experiment Name: At_Petals_P Parameter: Plant Line Value: WS
  misc_feature: MA Experiment 20000794 PARAMETER Experiment Name: At_Petals_P Parameter: Tissue Value: Petals vs. Whole plant
  misc_feature: MA Experiment ID: 20001248 Result: Down-regulated in Transcription
  misc_feature: MA Experiment 20001248 PARAMETER Experiment Name: At_Far-red-induction_P Parameter: Age (day) Value: 7
  misc_feature: MA Experiment 20001248 PARAMETER Experiment Name: At_Far-red-induction_P Parameter: Light Value: Far-red vs. White
  misc_feature: MA Experiment 20001248 PARAMETER Experiment Name: At_Far-red-induction_P Parameter: Organism Value: A. thaliana
  misc_feature: MA Experiment 20001248 PARAMETER Experiment Name: At_Far-red-induction_P Parameter: Plant Line Value: Columbia
  misc_feature: MA Experiment 20001248 PARAMETER Experiment Name: At_Far-red-induction_P Parameter: Timepoint (hr) Value: 4
  misc_feature: MA Experiment 20001248 PARAMETER Experiment Name: At_Far-red-induction_P Parameter: Tissue Value: Whole Plant
  misc_feature: MA Experiment ID: 20001557 Result: Down-regulated in Transcription
  misc_feature: MA Experiment 20001557 PARAMETER Experiment Name: At_Drought_Soil_Dry_P Parameter: Age (day) Value: 27
  misc_feature: MA Experiment 20001557 PARAMETER Experiment Name: At_Drought_Soil_Dry_P Parameter: Organism Value: A. thaliana
  misc_feature: MA Experiment 20001557 PARAMETER Experiment Name: At_Drought_Soil_Dry_P Parameter: Plant Line Value: WS
  misc_feature: MA Experiment 20001557 PARAMETER Experiment Name: At_Drought_Soil_Dry_P Parameter: Post Timepoint (hr) Value: 3
  misc_feature: MA Experiment 20001557 PARAMETER Experiment Name: At_Drought_Soil_Dry_P Parameter: Post-Treatment Value: Re-Water vs. No Drought
  misc_feature: MA Experiment 20001557 PARAMETER Experiment Name: At_Drought_Soil_Dry_P Parameter: Timepoint (day) Value: 13
  misc_feature: MA Experiment 20001557 PARAMETER Experiment Name: At_Drought_Soil_Dry_P Parameter: Treatment Value: Drought vs. No Drought
  misc_feature: MA Experiment ID: 20001559 Result: Down-regulated in Transcription
  misc_feature: MA Experiment 20001559 PARAMETER Experiment Name: At_Drought_Soil_Dry_P Parameter: Age (day) Value: 28
  misc_feature: MA Experiment 20001559 PARAMETER Experiment Name: At_Drought_Soil_Dry_P Parameter: Organism Value: A. thaliana
  misc_feature: MA Experiment 20001559 PARAMETER Experiment Name: At_Drought_Soil_Dry_P Parameter: Plant Line Value: WS
  misc_feature: MA Experiment 20001559 PARAMETER Experiment Name: At_Drought_Soil_Dry_P Parameter: Post Timepoint (hr) Value: 29
  misc_feature: MA Experiment 20001559 PARAMETER Experiment Name: At_Drought_Soil_Dry_P Parameter: Post-Treatment Value: Re-Water vs. No Drought
  misc_feature: MA Experiment 20001559 PARAMETER Experiment Name: At_Drought_Soil_Dry_P Parameter: Timepoint (day) Value: 14
  misc_feature: MA Experiment 20001559 PARAMETER Experiment Name: At_Drought_Soil_Dry_P Parameter: Treatment Value: Drought vs. No Drought
actccgatagaaacagagccaacaaaacaaaaacagaggaagaaaaacaaaaatgacgatcttgctctgtttcttcttagtttcacttcttactatcgtatcatcaatctttcttaaacagaataaaacctcaaaattcaatcttcccccaagcccttcaagccttccgatcattggaaacttacaccatctcgcaggattgcctcacagatgttttcataagctctctatcaaatacggacccttggtctttcttcgtctcgggtctgttccggttgttgtgatctcatcgagtgaagcagctgaagcagttctcaaaaccaatgacttggaatgttgcagccgaccaaagacggtggggagcggaaaactctcttacggtttcaaagacatcactttcgcaccatacggtatataagagaggaagaggtcgacttcgtggtcaagaaagtgtcagaatcagctttgaagcaatctcctgtggatttaagcaaaacctttttctccctcaccgctagtatcatttgtagagtcgccttaggacagaatttcaatgaaagcggctttgttatcgatcaagacaggatcgaagaacttgttaccgaatcagcagaagctctagggactttcactttctctgacttcttccctggtggacttggaagatttgtagattggttgtttcaacgacacaagaagatcaacaaagtctttaaggaacttgatgctttttatcagcatgtgattgatgatcacttgaagccagagggaagaaagaatcaagatattgtcaccttgattttggatatgatcgataaacaagaagattcagattctttcaaactcaacatggataatctcaaggcaattgtcatggatgtatttctcgcggggatagatacaagcgcggtaacaatgatttgggcgatgacagaacttattagaaaccctagagtgatgaagaaggctcaagaaagtattcgaaccactctgggtctcaagaaggaaagaatcactgaagaagatttaggcaaagttgagtatttgaaccacatactcaaggaaacttttaggttacacccggcacttccatttgtggtgccaagggaaacaatgtctcacatcaagatccaaggctatgatattccaccgaaaacacaaatccagcttaacgtgtggacgatcggacgtgaccctaagcgttggaatgaccctgaagaattcaaccctgaaaggtttgcaaatagctctgtagattttagaggacaacattttgacctattaccgtttggttctggtcgaaggatttgtcccggaatgccaatggcgattgctagtgtggaactagcattgatgaatttgctttattattttgattggagtatgcctgatgggactaaaggtgaagacattgatatggaagaagctggtaatatctctattgtcaagaaaatacctcttcaacttgtgcctgttcaacgttattgatgagcaataatataagctcgataacatggaaagtgtatgaagcaaaaaacataagattctttagattttgttgtgttatataagaaagaaatgttccaataataaatcaagaaagaataacttttgttcattt

SEQ ID NO: 106674 - protein, 384 aa, Arabidopsis thaliana
  peptide (1)..(384): Ceres Seq. ID no. 13620180
  misc_feature (17)..(384): Homolog of NCBI NO: 15222174 NR Description: cytochrome P450 family [Arabidopsis thaliana]
  misc_feature (1)..(384): Homolog of NCBI NO: 30683097 NR Description: cytochrome P450 family [Arabidopsis thaliana]
  misc_feature (17)..(384): Homolog of NCBI NO: 13878395 NR Description: CYTOCHROME P450 71B27
  misc_feature (71)..(384): Homolog of NCBI NO: 25282611 NR Description: F3F19 hypothetical protein - Arabidopsis thaliana Strong similarity to gb|D78605 cytochrome P450 monooxygenase from
  misc_feature (17)..(63): Homolog of NCBI NO: 25282611 NR Description: F3F19 hypothetical protein - Arabidopsis thaliana Strong similarity to gb|D78605 cytochrome P450 monooxygenase from
  misc_feature (11)..(382): Homolog of NCBI NO: 15231520 NR Description: cytochrome P450 71B19 [Arabidopsis thaliana] Cytochrome P450 71B19 >gi|11994436|dbj|BAB02438.1| cytochrome [Arabidopsis thaliana] >gi|26451925|dbj|BAC43055.1| putative
  misc_feature (11)..(382): Homolog of NCBI NO: 15231522 NR Description: cytochrome P450 71B20 [Arabidopsis thaliana] Cytochrome P450 71B20 >gi|11994437|dbj|BAB02439.1| cytochrome [Arabidopsis thaliana] >gi|15810463|gb|AAL07119.1| putative
  misc_feature (11)..(382): Homolog of NCBI NO: 21554748 NR Description: cytochrome P450, putative [Arabidopsis thaliana]
  misc_feature (11)..(382): Homolog of NCBI NO: 16226474 NR Description: AT3g26180/MTC11_8 [Arabidopsis thaliana]
  misc_feature (17)..(383): Homolog of NCBI NO: 15231526 NR Description: cytochrome P450 71B23 [Arabidopsis thaliana] Cytochrome P450 71B23 >gi|11994440|dbj|BAB02442.1| cytochrome
MLQPTKDGGERKTLLRFQRHHFRTIRYIREEEVDFVVKKVSESALKQSPVDLSKTFFSLTASIICRVALGQNFNESGFVIDQDRIEELVTESAEALGTFTFSDFFPGGLGRFVDWLFQRHKKINKVFKELDAFYQHVIDDHLKPEGRKNQDIVTLILDMIDKQEDSDSFKLNMDNLKAIVMDVFLAGIDTSAVTMIWAMTELIRNPRVMKKAQESIRTTLGLKKERITEEDLGKVEYLNHILKETFRLHPALPFVVPRETMSHIKIQGYDIPPKTQIQLNVWTIGRDPKRWNDPEEFNPERFANSSVDFRGQHFDLLPFGSGRRICPGMPMAIASVELALMNLLYYFDWSMPDGTKGEDIDMEEAGNISIVKKIPLQLVPVQRY

SEQ ID NO: 106675 - protein, 226 aa, Arabidopsis thaliana
  peptide (1)..(226): Ceres Seq. ID no. 13620181
  misc_feature (1)..(226): Homolog of NCBI NO: 15222174 NR Description: cytochrome P450 family [Arabidopsis thaliana]
  misc_feature (1)..(226): Homolog of NCBI NO: 30683097 NR Description: cytochrome P450 family [Arabidopsis thaliana]
  misc_feature (1)..(226): Homolog of NCBI NO: 13878395 NR Description: CYTOCHROME P450 71B27
  misc_feature (1)..(226): Homolog of NCBI NO: 25282611 NR Description: F3F19 hypothetical protein - Arabidopsis thaliana Strong similarity to gb|D78605 cytochrome P450 monooxygenase from
  misc_feature (1)..(224): Homolog of NCBI NO: 15231520 NR Description: cytochrome P450 71B19 [Arabidopsis thaliana] Cytochrome P450 71B19 >gi|11994436|dbj|BAB02438.1| cytochrome [Arabidopsis thaliana] >gi|26451925|dbj|BAC43055.1| putative
  misc_feature (1)..(224): Homolog of NCBI NO: 15231522 NR Description: cytochrome P450 71B20 [Arabidopsis thaliana] Cytochrome P450 71B20 >gi|11994437|dbj|BAB02439.1| cytochrome [Arabidopsis thaliana] >gi|15810463|gb|AAL07119.1| putative
  misc_feature (1)..(224): Homolog of NCBI NO: 21554748 NR Description: cytochrome P450, putative [Arabidopsis thaliana]
  misc_feature (1)..(224): Homolog of NCBI NO: 16226474 NR Description: AT3g26180/MTC11_8 [Arabidopsis thaliana]
  misc_feature (1)..(225): Homolog of NCBI NO: 15231526 NR Description: cytochrome P450 71B23 [Arabidopsis thaliana] Cytochrome P450 71B23 >gi|11994440|dbj|BAB02442.1| cytochrome
  misc_feature (1)..(224): Homolog of NCBI NO: 30696845 NR Description: cytochrome P450 71B10 [Arabidopsis thaliana]
MIDKQEDSDSFKLNMDNLKAIVMDVFLAGIDTSAVTMIWAMTELIRNPRVMKKAQESIRTTLGLKKERITEEDLGKVEYLNHILKETFRLHPALPFVVPRETMSHIKIQGYDIPPKTQIQLNVWTIGRDPKRWNDPEEFNPERFANSSVDFRGQHFDLLPFGSGRRICPGMPMAIASVELALMNLLYYFDWSMPDGTKGEDIDMEEAGNISIVKKIPLQLVPVQRY

SEQ ID NO: 106676 - protein, 212 aa, Arabidopsis thaliana
  peptide (1)..(212): Ceres Seq. ID no. 13620182
  misc_feature (1)..(212): Homolog of NCBI NO: 15222174 NR Description: cytochrome P450 family [Arabidopsis thaliana]
  misc_feature (1)..(212): Homolog of NCBI NO: 30683097 NR Description: cytochrome P450 family [Arabidopsis thaliana]
  misc_feature (1)..(212): Homolog of NCBI NO: 13878395 NR Description: CYTOCHROME P450 71B27
  misc_feature (1)..(212): Homolog of NCBI NO: 25282611 NR Description: F3F19 hypothetical protein - Arabidopsis thaliana Strong similarity to gb|D78605 cytochrome P450 monooxygenase from
  misc_feature (1)..(210): Homolog of NCBI NO: 15231520 NR Description: cytochrome P450 71B19 [Arabidopsis thaliana] Cytochrome P450 71B19 >gi|11994436|dbj|BAB02438.1| cytochrome [Arabidopsis thaliana] >gi|26451925|dbj|BAC43055.1| putative
  misc_feature (1)..(210): Homolog of NCBI NO: 15231522 NR Description: cytochrome P450 71B20 [Arabidopsis thaliana] Cytochrome P450 71B20 >gi|11994437|dbj|BAB02439.1| cytochrome [Arabidopsis thaliana] >gi|15810463|gb|AAL07119.1| putative
  misc_feature (1)..(210): Homolog of NCBI NO: 21554748 NR Description: cytochrome P450, putative [Arabidopsis thaliana]
  misc_feature (1)..(210): Homolog of NCBI NO: 16226474 NR Description: AT3g26180/MTC11_8 [Arabidopsis thaliana]
  misc_feature (1)..(211): Homolog of NCBI NO: 15231526 NR Description: cytochrome P450 71B23 [Arabidopsis thaliana] Cytochrome P450 71B23 >gi|11994440|dbj|BAB02442.1| cytochrome
  misc_feature (1)..(210): Homolog of NCBI NO: 30696845 NR Description: cytochrome P450 71B10 [Arabidopsis thaliana]
MDNLKAIVMDVFLAGIDTSAVTMIWAMTELIRNPRVMKKAQESIRTTLGLKKERITEEDLGKVEYLNHILKETFRLHPALPFVVPRETMSHIKIQGYDIPPKTQIQLNVWTIGRDPKRWNDPEEFNPERFANSSVDFRGQHFDLLPFGSGRRICPGMPMAIASVELALMNLLYYFDWSMPDGTKGEDIDMEEAGNISIVKKIPLQLVPVQRY

SEQ ID NO: 106677 - DNA, 4068 bp, Arabidopsis thaliana
  misc_feature (1)..(4068): Ceres Seq. ID no. 13620187
  misc_feature: MA Experiment ID: 20000180 Result: Up-regulated in Transcription
  misc_feature: MA Experiment 20000180 PARAMETER Experiment Name: At_Germinating_Seeds_P Parameter: Age (hr) Value: 24 vs. 0
  misc_feature: MA Experiment 20000180 PARAMETER Experiment Name: At_Germinating_Seeds_P Parameter: Tissue Value: Germinating Seeds
  misc_feature: MA Experiment ID: 20000185 Result: Up-regulated in Transcription
  misc_feature: MA Experiment 20000185 PARAMETER Experiment Name: At_Roots__P Parameter: Age (day) Value: 7 vs. 21
  misc_feature: MA Experiment 20000185 PARAMETER Experiment Name: At_Roots__P Parameter: Organism Value: A. thaliana
  misc_feature: MA Experiment 20000185 PARAMETER Experiment Name: At_Roots__P Parameter: Tissue Value: Roots vs. Whole Plant
  misc_feature: MA Experiment ID: 20000227 Result: Up-regulated in Transcription
  misc_feature: MA Experiment 20000227 PARAMETER Experiment Name: At_Root-Tips-vs-Tops_P Parameter: Tissue Value: Root Tips vs. Root Tops
  misc_feature: MA Experiment ID: 20000234 Result: Up-regulated in Transcription
  misc_feature: MA Experiment 20000234 PARAMETER Experiment Name: At_Siliques_P Parameter: Age (day) Value: 21
  misc_feature: MA Experiment 20000234 PARAMETER Experiment Name: At_Siliques_P Parameter: Organism Value: A. thaliana
  misc_feature: MA Experiment 20000234 PARAMETER Experiment Name: At_Siliques_P Parameter: Plant Line Value: WS
  misc_feature: MA Experiment 20000234 PARAMETER Experiment Name: At_Siliques_P Parameter: Tissue Value: Less Than 5mm Siliques vs. Whole Plant
  misc_feature: MA Experiment ID: 20000264 Result: Up-regulated in Transcription
  misc_feature: MA Experiment 20000264 PARAMETER Experiment Name: At_Open_Flower_P Parameter: Age (day) Value: 21
  misc_feature: MA Experiment 20000264 PARAMETER Experiment Name: At_Open_Flower_P Parameter: Plant Line Value: WS
  misc_feature: MA Experiment 20000264 PARAMETER Experiment Name: At_Open_Flower_P Parameter: Tissue Value: Open Flower vs. Whole Plant
  misc_feature: MA Experiment ID: 20000265 Result: Up-regulated in Transcription
  misc_feature: MA Experiment 20000265 PARAMETER Experiment Name: At_Open_Flower_P Parameter: Age (day) Value: 21
  misc_feature: MA Experiment 20000265 PARAMETER Experiment Name: At_Open_Flower_P Parameter: Plant Line Value: WS
  misc_feature: MA Experiment 20000265 PARAMETER Experiment Name: At_Open_Flower_P Parameter: Tissue Value: Closed Flower vs. Whole Plant
  misc_feature: MA Experiment ID: 20000286 Result: Up-regulated in Transcription
  misc_feature: MA Experiment 20000286 PARAMETER Experiment Name: At_Open_Flower_P Parameter: Age (day) Value: 21
  misc_feature: MA Experiment 20000286 PARAMETER Experiment Name: At_Open_Flower_P Parameter: Plant Line Value: WS
  misc_feature: MA Experiment 20000286 PARAMETER Experiment Name: At_Open_Flower_P Parameter: Tissue Value: Half Open vs. Whole Plant
  misc_feature: MA Experiment ID: 20000439 Result: Up-regulated in Transcription
  misc_feature: MA Experiment 20000439 PARAMETER Experiment Name: At_Roots__P Parameter: Age (day) Value: 14 vs. 21
  misc_feature: MA Experiment 20000439 PARAMETER Experiment Name: At_Roots__P Parameter: Organism Value: A. thaliana
  misc_feature: MA Experiment 20000439 PARAMETER Experiment Name: At_Roots__P Parameter: Tissue Value: Roots vs. Whole Plant
  misc_feature: MA Experiment ID: 20000495 Result: Up-regulated in Transcription
  misc_feature: MA Experiment 20000495 PARAMETER Experiment Name: At_Guard_Cells_P Parameter: Harvest Date Value: 8/2/2002
  misc_feature: MA Experiment 20000495 PARAMETER Experiment Name: At_Guard_Cells_P Parameter: Organism Value: A. thaliana
  misc_feature: MA Experiment 20000495 PARAMETER Experiment Name: At_Guard_Cells_P Parameter: Tissue Value: Guard Cells vs. Leaves
  misc_feature: MA Experiment ID: 20000794 Result: Up-regulated in Transcription
  misc_feature: MA Experiment 20000794 PARAMETER Experiment Name: At_Petals_P Parameter: Age (day) Value: 23-25 days
  misc_feature: MA Experiment 20000794 PARAMETER Experiment Name: At_Petals_P Parameter: Plant Line Value: WS
  misc_feature: MA Experiment 20000794 PARAMETER Experiment Name: At_Petals_P Parameter: Tissue Value: Petals vs. Whole plant
aatgagaagaggcaattaaaaatctcccgtgactctcgtctccccatctctctctctccctctgcccaaatttctggggcaaatttgttcatcagatctactacaatctctctttttcttcgggtatggagggccaacgaggcagtaattcttcgttgagctctggcaatggcaccgaagtcgccaccgacgtttcttcttgcttctatgttcccaatccctctggaaccgatttcgatgccgagtcgtcttctcttcctcctctctccccagctcctcaagtggcattgtcaattcctgcggagcttgccgccgccattcccctcatcgatcgcttccaggttgaagcttttctgcggctaatgcagaaacaaatccagtctgctgggaagcgtggcttcttctattccaaaaagtcctctggctccaatgtccgcgagcgcttcacatttgaggatatgctttgctttcaaaaggatccaatccccacatctctcctcaagattaacagcgatctcgtcagccgtgctaccaagttgtttcatctcatcttaaaatatatgggtgttgattcatctgatcgatctacgcctcccagtttagatgaacgcattgacctcgttggaaagctcttcaaaaaaactttgaagcgtgttgaactcagggacgaactttttgcccaaatctccaaacagactagacataatcctgacaggcaatacttgatcaaagcttgggaattgatgtacttatgtgcctcctctatgcctcctagcaaagatatcggtggatatctatctgagtatattcataatgtcgcacacgatgcaactattgaaccggatgctcaggttcttgctgttaacactttgaaagctttaaagcgctctatcaaagctggtcctaggcacaccacacctggtcgtgaagaaattgaagcccttttgaccggtagaaagctcacaaccattgtcttctttctcgatgaaacttttgaagaaatttcatatgacatggctaccacagtgtctgatgctgttgagctagctggaacaattaaactatcagctttctctagctttagtttgtttgaatgtcgtaaagttgtttcaagttctaaatcatctgatcccggaaatgaggaatatataggattggatgataacaagtatattggagatctcctcgcagaatttaaagctattaaagatcgaaataaaggagagatactacactgcaaactggtatttaaaaaaaaattattccgagagtctgatgaagctgtaacagatctgatgtttgtgcaactttcgtatgttcaactgcaacatgactatttgctaggaaactatcctgttgggagggacgatgctgcacagctttgtgccttgcaaattcttgttgggattgggtttgtcaatagtccagagtcatgcattgattggacatcacttcttgagcggtttttgccaagacaaatagcaataacccgagcaaagcgtgaatgggaattggatatccttgctcgctaccgttcaatggagaacgtgaccaaagatgatgcaagacaacaatttctacggatactgaaggcactgccatacgggaattcagttttttttagcgtacgcaagatagatgatccgatcggtcttttacctgggcgaatcattttgggtatcaacaaacgtggggttcacttttttcgaccggttcctaaagaatatctgcactctgctgaactacgtgacatcatgcaatttggcagcagtaacactgctgtctttttcaaaatgagagtcgctggtgttcttcacatatttcagttcgagacaaaacagggagaagaaatttgtgttgctttgcaaacacatataaatgatgtcatgttgcgtcgttactccaaagctcgatctgctgccaatagcttggttaatggagatatatcttgtagttctaagccgcaaaattttgaagtgtatgaaaaacgtttgcaagatttgtctaaggcttatgaagagtcccaaaagaagattgagaagttgatggatgaacaacaagagaaaaatcagcaagaagttactctgcgtgaagagttagaagctatacacaatggtttggagcttgaaaggagaaaattgttggaggttactttagaccgagataaacttaggtcattgtgtgacgagaagggaacaactattcaatccttgatgtctgaactgcgaggaatggaagcaaggttggcaaagtcgggcaacacaaaatcaagtaaagagacaaaatcagaattagccgaaatgaataatcagatattatacaagatccaaaaggagttagaagttcgaaataaggaattgcatgtcgcagttgataattcaaagaggttgttgagtgaaaacaagatattggagcaaaatctcaatattgaaaagaagaaaaaagaggaggttgaaattcatcaaaagagatatgaacaagaaaaaaaggtgttaaagcttcgagtttctgaacttgaaaataagcttgaagtacttgctcaagacttggatagtgctgagtctacgattgaaagtaagaattctgacatgctgctgttgcaaaataacttgaaagaacttgaggagttaagagaaatgaaagaggacattgacagaaaaaatgagcaaacagctgccattttgaaaatgcaaggagcccaacttgctgagctagaaatactttataaggaagaacaagttttaaggaaaagatactataataccatagaagatatgaaagggaagattagagtttattgtcgaataagacctctaaatgaaaaagagagttcagagagggaaaaacaaatgctgacaactgtggatgagtttactgttgaacatccatggaaagacgacaaaagaaagcaacacatatatgatcgcgtatttgacatgcgtgctagtcaagatgatatctttgaagacacaaagtatttggtacagtcggctgtagatgggtataacgtttgcatctttgcatatggtcaaactggttctggaaaaactttcactatatatgggcatgagagcaatcctggactcacacctcgagctacaaaggaactgttcaacatattaaagcgagatagcaagagattttcattttctctaaaggcatatatggtggaactttatcaagacacacttgtagaccttttgttaccaaaaagtgcaagacgcttgaaactagagattaaaaaagattcaaagggaatggtctttgtagagaatgtgacaactattcctatatcaactttggaggaactgcgaatgattcttgaacggggatcggaacgacgacatgtttctggaacaaatatgaatgaagaaagctcaagatctcacctcatattatcagttgttattgaaagtattgatcttcaaacccagtctgctgcgaggggcaagctgagttttgtggatcttgctggttctgagagagttaaaaagtcgggctcagctggttgtcaactcaaagaagctcaaagtatcaacaaatcactttctgcattaggtgatgttattggtgctttatcttctggcaaccagcatattccttataggaatcacaagctaacgatgttgatgagcgattcattgggcggcaatgccaagacgttaatgtttgttaatgtgtctccagccgaatcaaatttggacgagacgtacaattctcttctatatgcatcgagagtgagaacgatcgtgaatgatcccagcaaacatatatcatccaaagagatggtgcgattgaagaagttggtagcatactggaaagagcaagccggtaaaaaaggtgaggaagaagacttggtggatattgaggaagatcgtacacgaaaagatgaggcagatagttgaagaaagctgacatgaaattcgtctaggtgaaattgagactatagtatcactggttttcaccattctttttgtaggaagttcctgctttatagtagagtttctatcgaagagtagtcctatatgtctcaaactttctctcttttgatgagatcttcattacaag

SEQ ID NO: 106678 - protein, 1259 aa, Arabidopsis thaliana
  peptide (1)..(1259): Ceres Seq. ID no. 13620188
  misc_feature (311)..(498): Pfam Name: FERM domain (Band 4.1 family) Pfam Description: FERM domain (Band 4.1 family)
  misc_feature (630)..(1244): Homolog of NCBI NO: 6166459 NR Description: kinesin-C [Strongylocentrotus purpuratus]
  misc_feature (609)..(1212): Homolog of NCBI NO: 19923321 NR Description: kinesin family member C3 [Homo sapiens]
  misc_feature (593)..(1208): Homolog of NCBI NO: 1762638 NR Description: microtubule-based motor protein
  misc_feature (626)..(1221): Homolog of NCBI NO: 18416938 NR Description: kinesin-like protein B (katB) [Arabidopsis
  misc_feature (626)..(1221): Homolog of NCBI NO: 7446304 NR Description: kinesin-related protein katB - Arabidopsis
  misc_feature (707)..(1249): Homolog of NCBI NO: 15218418 NR Description: kinesin-related protein [Arabidopsis thaliana]
  misc_feature (603)..(1221): Homolog of NCBI NO: 10176794 NR Description: kinesin-like protein [Arabidopsis thaliana]
  misc_feature (620)..(1205): Homolog of NCBI NO: 19114370 NR Description: kinesin-like protein [Schizosaccharomyces pombe]
  misc_feature (722)..(1212): Homolog of NCBI NO: 14124976 NR Description: Similar to kinesin family member C3 [Homo sapiens]
  misc_feature (850)..(1208): Homolog of NCBI NO: 11245496 NR Description: C-terminal kinesin KIFC1 [Trypanosoma brucei]
MEGQRGSNSSLSSGNGTEVATDVSSCFYVPNPSGTDFDAESSSLPPLSPAPQVALSIPAELAAAIPLIDRFQVEAFLRLMQKQIQSAGKRGFFYSKKSSGSNVRERFTFEDMLCFQKDPIPTSLLKINSDLVSRATKLFHLILKYMGVDSSDRSTPPSLDERIDLVGKLFKKTLKRVELRDELFAQISKQTRHNPDRQYLIKAWELMYLCASSMPPSKDIGGYLSEYIHNVAHDATIEPDAQVLAVNTLKALKRSIKAGPRHTTPGREEIEALLTGRKLTTIVFFLDETFEEISYDMATTVSDAVELAGTIKLSAFSSFSLFECRKVVSSSKSSDPGNEEYIGLDDNKYIGDLLAEFKAIKDRNKGEILHCKLVFKKKLFRESDEAVTDLMFVQLSYVQLQHDYLLGNYPVGRDDAAQLCALQILVGIGFVNSPESCIDWTSLLERFLPRQIAITRAKREWELDILARYRSMENVTKDDARQQFLRILKALPYGNSVFFSVRKIDDPIGLLPGRIILGINKRGVHFFRPVPKEYLHSAELRDIMQFGSSNTAVFFKMRVAGVLHIFQFETKQGEEICVALQTHINDVMLRRYSKARSAANSLVNGDISCSSKPQNFEVYEKRLQDLSKAYEESQKKIEKLMDEQQEKNQQEVTLREELEAIHNGLELERRKLLEVTLDRDKLRSLCDEKGTTIQSLMSELRGMEARLAKSGNTKSSKETKSELAEMNNQILYKIQKELEVRNKELHVAVDNSKRLLSENKILEQNLNIEKKKKEEVEIHQKRYEQEKKVLKLRVSELENKLEVLAQDLDSAESTIESKNSDMLLLQNNLKELEELREMKEDIDRKNEQTAAILKMQGAQLAELEILYKEEQVLRKRYYNTIEDMKGKIRVYCRIRPLNEKESSEREKQMLTTVDEFTVEHPWKDDKRKQHIYDRVFDMRASQDDIFEDTKYLVQSAVDGYNVCIFAYGQTGSGKTFTIYGHESNPGLTPRATKELFNILKRDSKRFSFSLKAYMVELYQDTLVDLLLPKSARRLKLEIKKDSKGMVFVENVTTIPISTLEELRMILERGSERRHVSGTNMNEESSRSHLILSVVIESIDLQTQSAARGKLSFVDLAGSERVKKSGSAGCQLKEAQSINKSLSALGDVIGALSSGNQHIPYRNHKLTMLMSDSLGGNAKTLMFVNVSPAESNLDETYNSLLYASRVRTIVNDPSKHISSKEMVRLKKLVAYWKEQAGKKGEEEDLVDIEEDRTRKDEADS

SEQ ID NO: 106679 - protein, 1180 aa, Arabidopsis thaliana
  peptide (1)..(1180): Ceres Seq. ID no. 13620189
  misc_feature (232)..(419): Pfam Name: FERM domain (Band 4.1 family) Pfam Description: FERM domain (Band 4.1 family)
  misc_feature (551)..(1165): Homolog of NCBI NO: 6166459 NR Description: kinesin-C [Strongylocentrotus purpuratus]
  misc_feature (530)..(1133): Homolog of NCBI NO: 19923321 NR Description: kinesin family member C3 [Homo sapiens]
  misc_feature (514)..(1129): Homolog of NCBI NO: 1762638 NR Description: microtubule-based motor protein
  misc_feature (547)..(1142): Homolog of NCBI NO: 18416938 NR Description: kinesin-like protein B (katB) [Arabidopsis
  misc_feature (547)..(1142): Homolog of NCBI NO: 7446304 NR Description: kinesin-related protein katB - Arabidopsis
  misc_feature (628)..(1170): Homolog of NCBI NO: 15218418 NR Description: kinesin-related protein [Arabidopsis thaliana]
  misc_feature (524)..(1142): Homolog of NCBI NO: 10176794 NR Description: kinesin-like protein [Arabidopsis thaliana]
  misc_feature (541)..(1126): Homolog of NCBI NO: 19114370 NR Description: kinesin-like protein [Schizosaccharomyces pombe]
  misc_feature (643)..(1133): Homolog of NCBI NO: 14124976 NR Description: Similar to kinesin family member C3 [Homo sapiens]
  misc_feature (771)..(1129): Homolog of NCBI NO: 11245496 NR Description: C-terminal kinesin KIFC1 [Trypanosoma brucei]
MQKQIQSAGKRGFFYSKKSSGSNVRERFTFEDMLCFQKDPIPTSLLKINSDLVSRATKLFHLILKYMGVDSSDRSTPPSLDERIDLVGKLFKKTLKRVELRDELFAQISKQTRHNPDRQYLIKAWELMYLCASSMPPSKDIGGYLSEYIHNVAHDATIEPDAQVLAVNTLKALKRSIKAGPRHTTPGREEIEALLTGRKLTTIVFFLDETFEEISYDMATTVSDAVELAGTIKLSAFSSFSLFECRKVVSSSKSSDPGNEEYIGLDDNKYIGDLLAEFKAIKDRNKGEILHCKLVFKKKLFRESDEAVTDLMFVQLSYVQLQHDYLLGNYPVGRDDAAQLCALQILVGIGFVNSPESCIDWTSLLERFLPRQIAITRAKREWELDILARYRSMENVTKDDARQQFLRILKALPYGNSVFFSVRKIDDPIGLLPGRIILGINKRGVHFFRPVPKEYLHSAELRDIMQFGSSNTAVFFKMRVAGVLHIFQFETKQGEEICVALQTHINDVMLRRYSKARSAANSLVNGDISCSSKPQNFEVYEKRLQDLSKAYEESQKKIEKLMDEQQEKNQQEVTLREELEAIHNGLELERRKLLEVTLDRDKLRSLCDEKGTTIQSLMSELRGMEARLAKSGNTKSSKETKSELAEMNNQILYKIQKELEVRNKELHVAVDNSKRLLSENKILEQNLNIEKKKKEEVEIHQKRYEQEKKVLKLRVSELENKLEVLAQDLDSAESTIESKNSDMLLLQNNLKELEELREMKEDIDRKNEQTAAILKMQGAQLAELEILYKEEQVLRKRYYNTIEDMKGKIRVYCRIRPLNEKESSEREKQMLTTVDEFTVEHPWKDDKRKQHIYDRVFDMRASQDDIFEDTKYLVQSAVDGYNVCIFAYGQTGSGKTFTIYGHESNPGLTPRATKELFNILKRDSKRFSFSLKAYMVELYQDTLVDLLLPKSARRLKLEIKKDSKGMVFVENVTTIPISTLEELRMILERGSERRHVSGTNMNEESSRSHLILSVVIESIDLQTQSAARGKLSFVDLAGSERVKKSGSAGCQLKEAQSINKSLSALGDVIGALSSGNQHIPYRNHKLTMLMSDSLGGNAKTLMFVNVSPAESNLDETYNSLLYASRVRTIVNDPSKHISSKEMVRLKKLVAYWKEQAGKKGEEEDLVDIEEDRTRKDEADS

SEQ ID NO: 106680 - protein, 1148 aa, Arabidopsis thaliana
  peptide (1)..(1148): Ceres Seq. ID no. 13620190
  misc_feature (200)..(387): Pfam Name: FERM domain (Band 4.1 family) Pfam Description: FERM domain (Band 4.1 family)
  misc_feature (519)..(1133): Homolog of NCBI NO: 6166459 NR Description: kinesin-C [Strongylocentrotus purpuratus]
  misc_feature (498)..(1101): Homolog of NCBI NO: 19923321 NR Description: kinesin family member C3 [Homo sapiens]
  misc_feature (482)..(1097): Homolog of NCBI NO: 1762638 NR Description: microtubule-based motor protein
  misc_feature (515)..(1110): Homolog of NCBI NO: 18416938 NR Description: kinesin-like protein B (katB) [Arabidopsis
  misc_feature (515)..(1110): Homolog of NCBI NO: 7446304 NR Description: kinesin-related protein katB - Arabidopsis
  misc_feature (596)..(1138): Homolog of NCBI NO: 15218418 NR Description: kinesin-related protein [Arabidopsis thaliana]
  misc_feature (492)..(1110): Homolog of NCBI NO: 10176794 NR Description: kinesin-like protein [Arabidopsis thaliana]
  misc_feature (509)..(1094): Homolog of NCBI NO: 19114370 NR Description: kinesin-like protein [Schizosaccharomyces pombe]
  misc_feature (611)..(1101): Homolog of NCBI NO: 14124976 NR Description: Similar to kinesin family member C3 [Homo sapiens]
  misc_feature (739)..(1097): Homolog of NCBI NO: 11245496 NR Description: C-terminal kinesin KIFC1 [Trypanosoma brucei]
MLCFQKDPIPTSLLKINSDLVSRATKLFHLILKYMGVDSSDRSTPPSLDERIDLVGKLFKKTLKRVELRDELFAQISKQTRHNPDRQYLIKAWELMYLCASSMPPSKDIGGYLSEYIHNVAHDATIEPDAQVLAVNTLKALKRSIKAGPRHTTPGREEIEALLTGRKLTTIVFFLDETFEEISYDMATTVSDAVELAGTIKLSAFSSFSLFECRKVVSSSKSSDPGNEEYIGLDDNKYIGDLLAEFKAIKDRNKGEILHCKLVFKKKLFRESDEAVTDLMFVQLSYVQLQHDYLLGNYPVGRDDAAQLCALQILVGIGFVNSPESCIDWTSLLERFLPRQIAITRAKREWELDILARYRSMENVTKDDARQQFLRILKALPYGNSVFFSVRKIDDPIGLLPGRIILGINKRGVHFFRPVPKEYLHSAELRDIMQFGSSNTAVFFKMRVAGVLHIFQFETKQGEEICVALQTHINDVMLRRYSKARSAANSLVNGDISCSSKPQNFEVYEKRLQDLSKAYEESQKKIEKLMDEQQEKNQQEVTLREELEAIHNGLELERRKLLEVTLDRDKLRSLCDEKGTTIQSLMSELRGMEARLAKSGNTKSSKETKSELAEMNNQILYKIQKELEVRNKELHVAVDNSKRLLSENKILEQNLNIEKKKKEEVEIHQKRYEQEKKVLKLRVSELENKLEVLAQDLDSAESTIESKNSDMLLLQNNLKELEELREMKEDIDRKNEQTAAILKMQGAQLAELEILYKEEQVLRKRYYNTIEDMKGKIRVYCRIRPLNEKESSEREKQMLTTVDEFTVEHPWKDDKRKQHIYDRVFDMRASQDDIFEDTKYLVQSAVDGYNVCIFAYGQTGSGKTFTIYGHESNPGLTPRATKELFNILKRDSKRFSFSLKAYMVELYQDTLVDLLLPKSARRLKLEIKKDSKGMVFVENVTTIPISTLEELRMILERGSERRHVSGTNMNEESSRSHLILSVVIESIDLQTQSAARGKLSFVDLAGSERVKKSGSAGCQLKEAQSINKSLSALGDVIGALSSGNQHIPYRNHKLTMLMSDSLGGNAKTLMFVNVSPAESNLDETYNSLLYASRVRTIVNDPSKHISSKEMVRLKKLVAYWKEQAGKKGEEEDLVDIEEDRTRKDEADS

SEQ ID NO: 106681 - DNA, 932 bp, Arabidopsis thaliana
  misc_feature (1)..(932): Ceres Seq. ID no. 13620191
  misc_feature: MA Experiment ID: 20000307 Result: Down-regulated in Transcription
  misc_feature: MA Experiment 20000307 PARAMETER Experiment Name: At_Germinating_Seeds_Sub_P Parameter: Age (hr) Value: 24 vs. 0
  misc_feature: MA Experiment 20000307 PARAMETER Experiment Name: At_Germinating_Seeds_Sub_P Parameter: Organism Value: A. thaliana
  misc_feature: MA Experiment 20000307 PARAMETER Experiment Name: At_Germinating_Seeds_Sub_P Parameter: Plant Line Value: WS
  misc_feature: MA Experiment 20000307 PARAMETER Experiment Name: At_Germinating_Seeds_Sub_P Parameter: Tissue Value: Germinating Seeds
  misc_feature: MA Experiment ID: 20000314 Result: Up-regulated in Transcription
  misc_feature: MA Experiment 20000314 PARAMETER Experiment Name: At_14day_Shoots-Roots_Sub_P Parameter: Age (day) Value: 14
  misc_feature: MA Experiment 20000314 PARAMETER Experiment Name: At_14day_Shoots-Roots_Sub_P Parameter: Organism Value: A. thaliana
  misc_feature: MA Experiment 20000314 PARAMETER Experiment Name: At_14day_Shoots-Roots_Sub_P Parameter: Plant Line Value: WS
  misc_feature: MA Experiment 20000314 PARAMETER Experiment Name: At_14day_Shoots-Roots_Sub_P Parameter: Tissue Value: Roots vs. Whole Plant
  misc_feature: MA Experiment ID: 20000315 Result: Up-regulated in Transcription
  misc_feature: MA Experiment 20000315 PARAMETER Experiment Name: At_14day_Shoots-Roots_Sub_P Parameter: Age (day) Value: 14
  misc_feature: MA Experiment 20000315 PARAMETER Experiment Name: At_14day_Shoots-Roots_Sub_P Parameter: Organism Value: A. thaliana
  misc_feature: MA Experiment 20000315 PARAMETER Experiment Name: At_14day_Shoots-Roots_Sub_P Parameter: Plant Line Value: WS
  misc_feature: MA Experiment 20000315 PARAMETER Experiment Name: At_14day_Shoots-Roots_Sub_P Parameter: Tissue Value: Shoots vs. Whole Plant
  misc_feature: MA Experiment ID: 20000347 Result: Up-regulated in Transcription
  misc_feature: MA Experiment 20000347 PARAMETER Experiment Name: At_2mM_SA_Sub_P Parameter: Age (day) Value: 14
  misc_feature: MA Experiment 20000347 PARAMETER Experiment Name: At_2mM_SA_Sub_P Parameter: Organism Value: A. thaliana
  misc_feature: MA Experiment 20000347 PARAMETER Experiment Name: At_2mM_SA_Sub_P Parameter: Plant Line Value: WS
  misc_feature: MA Experiment 20000347 PARAMETER Experiment Name: At_2mM_SA_Sub_P Parameter: Timepoint (hr) Value: 6
  misc_feature: MA Experiment 20000347 PARAMETER Experiment Name: At_2mM_SA_Sub_P Parameter: Tissue Value: Aerial
  misc_feature: MA Experiment 20000347 PARAMETER Experiment Name: At_2mM_SA_Sub_P Parameter: Treatment Value: 2mM SA vs. No Treatment
cgcaaacaacataacatggcttccaccaaaatttccttagtctttttcctttgcctcgtaggtccttgtataggcgctggaaccacaagcgctgccgaatcagtcagtagcattgtgacacaaggtttctttaacaacattatcaaccaagccggtaatggctgcacgagaaaaagattcaacacccgcgactctttcattgacgctgctaataattttccaaactttgcaagttccgttacaagacgtgaaattgcaagcatgtttgctcatgtcactcacgagaccggacacttctgctacatagaagaaataaagaaaaggtcacgtggtaggtgcgacgagaacgtagagcagagaccatgtccatcacagagtaaaggtcactccggtcgtggtcatcagagtctcggtctcgaccttctacgccagcctgagcttgtgggtagcaacccaactgtagctttcaggaagggtttgtcgttttggattaatagcgtaaggccggtgctgaaccaaggatttggagccactataagagccatcaatgggatggaatgtaacggtgggaattcaggtgcggtcaaggcaaggattgggtactatagagactattgtagacagcttggtgtggatcctggtcataaccttagttgctaaaacgttttacaaacgcatacacgtgacgtgtcacgtgataatgcggaataagaagttacatttcaaacagggcaaggattcagaatcgcaagtacatgaattaacattctgtaactgttaattgtatcaagttgtgttaatatataagagctaggagaattggtctttcttatgtctagctagtaaccatctatgtttgtagctaggagctacttgttgtttctagttgtttgtctatctaagccaatcatacaaaatctatgcttattcac

SEQ ID NO: 106682 - protein, 219 aa, Arabidopsis thaliana
  peptide (1)..(219): Ceres Seq. ID no. 13620192
  misc_feature (38)..(219): Pfam Name: Chitinase class I Pfam Description: Chitinase class I
  misc_feature (6)..(213): Homolog of NCBI NO: 26452468 NR Description: putative endochitinase [Arabidopsis thaliana]
  misc_feature (6)..(219): Homolog of NCBI NO: 15232822 NR Description: glycosyl hydrolase family 19 (chitinase)
  misc_feature (18)..(219): Homolog of NCBI NO: 15224312 NR Description: glycosyl hydrolase family 19 (chitinase)
  misc_feature (18)..(219): Homolog of NCBI NO: 584929 NR Description: Basic endochitinase CHB4 precursor
  misc_feature (18)..(219): Homolog of NCBI NO: 15224310 NR Description: glycosyl hydrolase family 19 (chitinase)
  misc_feature (6)..(204): Homolog of NCBI NO: 33114229 NR Description: glycosyl hydrolase family 19 [Pringlea
  misc_feature (18)..(219): Homolog of NCBI NO: 33414046 NR Description: class IV chitinase [Galega orientalis]
  misc_feature (18)..(219): Homolog of NCBI NO: 15232509 NR Description: glycosyl hydrolase family 19 (class IV chitinase)
  misc_feature (25)..(219): Homolog of NCBI NO: 30793457 NR Description: chitinase [Oryza sativa (japonica cultivar-group)]
  misc_feature (18)..(219): Homolog of NCBI NO: 15213852 NR Description: chitinase-B [Sorghum halepense]
RKQHNMASTKISLVFFLCLVGPCIGAGTTSAAESVSSIVTQGFFNNIINQAGNGCTRKRFNTRDSFIDAANNFPNFASSVTRREIASMFAHVTHETGHFCYIEEIKKRSRGRCDENVEQRPCPSQSKGHSGRGHQSLGLDLLRQPELVGSNPTVAFRKGLSFWINSVRPVLNQGFGATIRAINGMECNGGNSGAVKARIGYYRDYCRQLGVDPGHNLSC

SEQ ID NO: 106683 - protein, 214 aa, Arabidopsis thaliana
  peptide (1)..(214): Ceres Seq. ID no. 13620193
  misc_feature (33)..(214): Pfam Name: Chitinase class I Pfam Description: Chitinase class I
  misc_feature (1)..(208): Homolog of NCBI NO: 26452468 NR Description: putative endochitinase [Arabidopsis thaliana]
  misc_feature (1)..(214): Homolog of NCBI NO: 15232822 NR Description: glycosyl hydrolase family 19 (chitinase)
  misc_feature (13)..(214): Homolog of NCBI NO: 15224312 NR Description: glycosyl hydrolase family 19 (chitinase)
  misc_feature (13)..(214): Homolog of NCBI NO: 584929 NR Description: Basic endochitinase CHB4 precursor
  misc_feature (13)..(214): Homolog of NCBI NO: 15224310 NR Description: glycosyl hydrolase family 19 (chitinase)
  misc_feature (1)..(199): Homolog of NCBI NO: 33114229 NR Description: glycosyl hydrolase family 19 [Pringlea
  misc_feature (13)..(214): Homolog of NCBI NO: 33414046 NR Description: class IV chitinase [Galega orientalis]
  misc_feature (13)..(214): Homolog of NCBI NO: 15232509 NR Description: glycosyl hydrolase family 19 (class IV chitinase)
  misc_feature (20)..(214): Homolog of NCBI NO: 30793457 NR Description: chitinase [Oryza sativa (japonica cultivar-group)]
  misc_feature (13)..(214): Homolog of NCBI NO: 15213852 NR Description: chitinase-B [Sorghum halepense]
MASTKISLVFFLCLVGPCIGAGTTSAAESVSSIVTQGFFNNIINQAGNGCTRKRFNTRDSFIDAANNFPNFASSVTRREIASMFAHVTHETGHFCYIEEIKKRSRGRCDENVEQRPCPSQSKGHSGRGHQSLGLDLLRQPELVGSNPTVAFRKGLSFWINSVRPVLNQGFGATIRAINGMECNGGNSGAVKARIGYYRDYCRQLGVDPGHNLSC

SEQ ID NO: 106684 - protein, 132 aa, Arabidopsis thaliana
  peptide (1)..(132): Ceres Seq. ID no. 13620194
  misc_feature (1)..(132): Pfam Name: Chitinase class I Pfam Description: Chitinase class I
  misc_feature (1)..(126): Homolog of NCBI NO: 26452468 NR Description: putative endochitinase [Arabidopsis thaliana]
  misc_feature (1)..(132): Homolog of NCBI NO: 15232822 NR Description: glycosyl hydrolase family 19 (chitinase)
  misc_feature (1)..(132): Homolog of NCBI NO: 15224312 NR Description: glycosyl hydrolase family 19 (chitinase)
  misc_feature (1)..(132): Homolog of NCBI NO: 584929 NR Description: Basic endochitinase CHB4 precursor
  misc_feature (1)..(132): Homolog of NCBI NO: 15224310 NR Description: glycosyl hydrolase family 19 (chitinase)
  misc_feature (1)..(117): Homolog of NCBI NO: 33114229 NR Description: glycosyl hydrolase family 19 [Pringlea
  misc_feature (1)..(132): Homolog of NCBI NO: 33414046 NR Description: class IV chitinase [Galega orientalis]
  misc_feature (1)..(132): Homolog of NCBI NO: 15232509 NR Description: glycosyl hydrolase family 19 (class IV chitinase)
  misc_feature (1)..(132): Homolog of NCBI NO: 30793457 NR Description: chitinase [Oryza sativa (japonica cultivar-group)]
  misc_feature (1)..(132): Homolog of NCBI NO: 15213852 NR Description: chitinase-B [Sorghum halepense]
MFAHVTHETGHFCYIEEIKKRSRGRCDENVEQRPCPSQSKGHSGRGHQSLGLDLLRQPELVGSNPTVAFRKGLSFWINSVRPVLNQGFGATIRAINGMECNGGNSGAVKARIGYYRDYCRQLGVDPGHNLSC

SEQ ID NO: 106685 - DNA, 3220 bp, Arabidopsis thaliana
  misc_feature (1)..(3220): Ceres Seq. ID no. 13620199
  misc_feature: MA Experiment ID: 20000315 Result: Down-regulated in Transcription
  misc_feature: MA Experiment 20000315 PARAMETER Experiment Name: At_14day_Shoots-Roots_Sub_P Parameter: Age (day) Value: 14
  misc_feature: MA Experiment 20000315 PARAMETER Experiment Name: At_14day_Shoots-Roots_Sub_P Parameter: Organism Value: A. thaliana
  misc_feature: MA Experiment 20000315 PARAMETER Experiment Name: At_14day_Shoots-Roots_Sub_P Parameter: Plant Line Value: WS
  misc_feature: MA Experiment 20000315 PARAMETER Experiment Name: At_14day_Shoots-Roots_Sub_P Parameter: Tissue Value: Shoots vs. Whole Plant
  misc_feature: MA Experiment ID: 20001807 Result: Down-regulated in Transcription
  misc_feature: MA Experiment 20001807 PARAMETER Experiment Name: At_50mM_NH4NO3_L-to-H_Sub_P Parameter: Timepoint (hr) Value: 6
  misc_feature: MA Experiment 20001807 PARAMETER Experiment Name: At_50mM_NH4NO3_L-to-H_Sub_P Parameter: Tissue Value: Leaf
  misc_feature: MA Experiment 20001807 PARAMETER Experiment Name: At_50mM_NH4NO3_L-to-H_Sub_P Parameter: Treatment Value: 50mM NH4NO3 vs 100mM Mannitol
gtgtctcataataaggtagtgccactactactatagcggttttatcatcttctacgcttcgatttcgtcgtcctcctcccaacaaagtttgttaggaaacgaatactcgaacagccatttcttctctatttctcgtgcgatgacgacgactgtggaggacaatcgcgaggtcctcgaggctgttttgaaagaagcggtcgatctggaaaatgtgccaattgaagaagtatttgagaatctgagatgtagcaaggaaggtctcactacacaagctgctgatgaaagacttgctctctttggccataacaaactcgaagagaaaaaggaaagcaaattccttaagtttttaggctttatgtggaaccctctttcctgggtgatggaagctgctgctattatggctattgcgcttgctaatggaggaggaaaacctcctgattggcaagactttgttggtattatcactctgcttgtgattaactccaccatcagtttcattgaggagaacaatgcaggaaacgctgcagctgctctcatggcccgtctagccccgaaagcaaaggttcttcgagatggaaggtggggtgagcaggatgctgcgattctcgttcccggtgatataatcagcatcaagcttggggatatcgtcccagctgatgcacgccttctcgagggtgatccccttaagatcgatcagtctgctcttactggtgaatctctaccagtaaccaaaagttctggagatggtgtctattccggttctacatgcaaacaaggagagatcgaagcagttgttatcgcaactggcgtccataccttttttggaaaggctgctcaccttgttgatacgacaaaccaaattggtcatttccaacaggttttaactgcaattgggaacttttgcatctgctctattgctgtggggatgctcattgagattgtcgtgatgtaccctattcaacaccgagcataccgccctgggattgataaccttcttgtgcttctcattggtggaattccaattgccatgcctacagttctgtctgtgaccatggcaattggctcccacagactatctcagcagggagctatcactaagagaatgacggcgattgaggaaatggctggcatggacgttctttgcagtgacaagacgggcactttgacattgaataaacttactgttgacaaaaatctgattgaagttttcatgaaaggagtggatgcagatactgttgtcctgatggcagctcgagcctccagactagagaaccaagatgctatagatgctgctatagtcgggatgctggcagatcctaaagatgcacgagctggtatccaggaggttcactttcttcctttcaatcctactgataagagaacggctctgacatatattgacaatgagggtaacacacatagagtgagcaaaggtgctcctgagcaaatcttaaatcttgcacacaataaatcagagattgagcggagagttcatgctgttattgataagttcgctgaaaggggtctgcgatctcttgctgtggcgtaccaggatgttcctgaagggaggaaggatagtgctggaggtccttggcaatttgtgggtctcatgcctctttttgatccgcctaggcatgacagtgctgagacgataagaagggctttaaatcttggtgtgagtgttaaaatgatcacaggggatcaactggctataggaaaagagactgggcgccgtttggggatgggaaccaacatgtacccctcatccgctttacttggacagaacaaggatgagtcgatagttgctttacctgtcgatgagctcatagagaaagctgatggctttgcggggttttctgcagagcataaatatgagatagtgaagcgattacaagccaggaaacatatatgtggaatgacgggtgatggtgtaaatgatgctcctgctcttaaaaaggctgacataggcattgcagttgctgatgccactgatgcagctcgtagcgcatcggatattgttcttactgaacctggtcttagcgttatcatcagtgctgttttgaccagtcgtgctatcttccagagaatgaaaaattatactatctacgcagtctccatcacaatccgtattgttctgggctttatgcttctggctctcatatggcagtttgacttcccacctttcatggtccttatcattgccattcttaatgatggtacgatcatgacaatatcaaaggacagggtgaaaccttcccctcttccagatagctggaagctttctgagatttttgctaccggtgttgtctttggcagttacatggccatgatgaccgttatatttttctgggtttcatacaaaaccgatttcttcccgagaacttttggagttgcgacacttgagaaaactgctcatgatgatttccgaaagcttgcctcagccatatacctgcaagtcagtattatcagtcaggcacttatctttgtgacccgatcgcgaagctggtcttttgtggaacgtcccgggatatttcttatgattgcctttatcctcgctcagttggtggctactctaattgcagtctatgcaaattggagctttgctgcgatagaaggaataggttggggatgggccggggtcatttggctctataacatcatattctacatcccccttgatttcatcaaattcttcatccgctacgctcttagtggcagagcctgggatcttgttatcgaacaaagggttgcgttcacaaggcaaaaagattttgggaaagaacaaagagagctgcaatgggctcacgcacaaagaacgctccatggtctacaagcaccagatactaagatgttcacagatcgaacccatgtcagtgaacttaaccaaatggctgaagaagccaagaggagagctgaaattgctaggttgcgtgaacttcacacgctcaagggccatgttgaatcagtggtgagactcaaaggactcgacatagaaaccattcaacaagcttacactgtctgagaaagtgagtgcaagctgatttcagttgggtcatgaaggttgtgtctgtagttaatacatacatattgcatataaatatcgaatcctcgtagccttcttttagcggtttgttatgttctgttctgttgtggtgatgaaagaagaaacagaaacttcgtacggaggttgaaattagcaacaaaaaacttattttacaat

SEQ ID NO: 106686 - protein, 960 aa, Arabidopsis thaliana
  peptide (1)..(960): Ceres Seq. ID no. 13620200
  misc_feature (331)..(617): Pfam Name: haloacid dehalogenase-like hydrolase Pfam Description: haloacid dehalogenase-like hydrolase
  misc_feature (1)..(895): Homolog of NCBI NO: 7436369 NR Description: H+-exporting ATPase (EC 3.6.3.6), plasma membrane
  misc_feature (17)..(854): Homolog of NCBI NO: 6691153 NR Description: plasma membrane H(+)-ATPase [Filobasidiella
  misc_feature (17)..(854): Homolog of NCBI NO: 3348073 NR Description: plasma membrane H(+)-ATPase 1 [Filobasidiella
  misc_feature (17)..(854): Homolog of NCBI NO: 2652922 NR Description: plasma membrane (H+) ATPase [Uromyces fabae]
  misc_feature (1)..(860): Homolog of NCBI NO: 1709664 NR Description: Probable plasma membrane ATPase (Proton pump)
  misc_feature (18)..(745): Homolog of NCBI NO: 1709666 NR Description: Plasma membrane ATPase (Proton pump)
  misc_feature (767)..(821): Homolog of NCBI NO: 1709666 NR Description: Plasma membrane ATPase (Proton pump)
  misc_feature (18)..(759): Homolog of NCBI NO: 1709665 NR Description: Plasma membrane ATPase (Proton pump)
  misc_feature (769)..(816): Homolog of NCBI NO: 1709665 NR Description: Plasma membrane ATPase (Proton pump)
  misc_feature (18)..(755): Homolog of NCBI NO: 16751320 NR Description: putative plasma membrane-type proton ATPase
MTTTVEDNREVLEAVLKEAVDLENVPIEEVFENLRCSKEGLTTQAADERLALFGHNKLEEKKESKFLKFLGFMWNPLSWVMEAAAIMAIALANGGGKPPDWQDFVGIITLLVINSTISFIEENNAGNAAAALMARLAPKAKVLRDGRWGEQDAAILVPGDIISIKLGDIVPADARLLEGDPLKIDQSALTGESLPVTKSSGDGVYSGSTCKQGEIEAVVIATGVHTFFGKAAHLVDTTNQIGHFQQVLTAIGNFCICSIAVGMLIEIVVMYPIQHRAYRPGIDNLLVLLIGGIPIAMPTVLSVTMAIGSHRLSQQGAITKRMTAIEEMAGMDVLCSDKTGTLTLNKLTVDKNLIEVFMKGVDADTVVLMAARASRLENQDAIDAAIVGMLADPKDARAGIQEVHFLPFNPTDKRTALTYIDNEGNTHRVSKGAPEQILNLAHNKSEIERRVHAVIDKFAERGLRSLAVAYQDVPEGRKDSAGGPWQFVGLMPLFDPPRHDSAETIRRALNLGVSVKMITGDQLAIGKETGRRLGMGTNMYPSSALLGQNKDESIVALPVDELIEKADGFAGFSAEHKYEIVKRLQARKHICGMTGDGVNDAPALKKADIGIAVADATDAARSASDIVLTEPGLSVIISAVLTSRAIFQRMKNYTIYAVSITIRIVLGFMLLALIWQFDFPPFMVLIIAILNDGTIMTISKDRVKPSPLPDSWKLSEIFATGVVFGSYMAMMTVIFFWVSYKTDFFPRTFGVATLEKTAHDDFRKLASAIYLQVSIISQALIFVTRSRSWSFVERPGIFLMIAFILAQLVATLIAVYANWSFAAIEGIGWGWAGVIWLYNIIFYIPLDFIKFFIRYALSGRAWDLVIEQRVAFTRQKDFGKEQRELQWAHAQRTLHGLQAPDTKMFTDRTHVSELNQMAEEAKRRAEIARLRELHTLKGHVESVVRLKGLDIETIQQAYTV

SEQ ID NO: 106687 - protein, 888 aa, Arabidopsis thaliana
  peptide (1)..(888): Ceres Seq. ID no. 13620201
  misc_feature (259)..(545): Pfam Name: haloacid dehalogenase-like hydrolase Pfam Description: haloacid dehalogenase-like hydrolase
  misc_feature (1)..(823): Homolog of NCBI NO: 7436369 NR Description: H+-exporting ATPase (EC 3.6.3.6), plasma membrane
  misc_feature (1)..(782): Homolog of NCBI NO: 6691153 NR Description: plasma membrane H(+)-ATPase [Filobasidiella
  misc_feature (1)..(782): Homolog of NCBI NO: 3348073 NR Description: plasma membrane H(+)-ATPase 1 [Filobasidiella
  misc_feature (1)..(782): Homolog of NCBI NO: 2652922 NR Description: plasma membrane (H+) ATPase [Uromyces fabae]
  misc_feature (1)..(788): Homolog of NCBI NO: 1709664 NR Description: Probable plasma membrane ATPase (Proton pump)
  misc_feature (1)..(673): Homolog of NCBI NO: 1709666 NR Description: Plasma membrane ATPase (Proton pump)
  misc_feature (695)..(749): Homolog of NCBI NO: 1709666 NR Description: Plasma membrane ATPase (Proton pump)
  misc_feature (1)..(687): Homolog of NCBI NO: 1709665 NR Description: Plasma membrane ATPase (Proton pump)
  misc_feature (697)..(744): Homolog of NCBI NO: 1709665 NR Description: Plasma membrane ATPase (Proton pump)
  misc_feature (1)..(683): Homolog of NCBI NO: 16751320 NR Description: putative plasma membrane-type proton ATPase
MWNPLSWVMEAAAIMAIALANGGGKPPDWQDFVGIITLLVINSTISFIEENNAGNAAAALMARLAPKAKVLRDGRWGEQDAAILVPGDIISIKLGDIVPADARLLEGDPLKIDQSALTGESLPVTKSSGDGVYSGSTCKQGEIEAVVIATGVHTFFGKAAHLVDTTNQIGHFQQVLTAIGNFCICSIAVGMLIEIVVMYPIQHRAYRPGIDNLLVLLIGGIPIAMPTVLSVTMAIGSHRLSQQGAITKRMTAIEEMAGMDVLCSDKTGTLTLNKLTVDKNLIEVFMKGVDADTVVLMAARASRLENQDAIDAAIVGMLADPKDARAGIQEVHFLPFNPTDKRTALTYIDNEGNTHRVSKGAPEQILNLAHNKSEIERRVHAVIDKFAERGLRSLAVAYQDVPEGRKDSAGGPWQFVGLMPLFDPPRHDSAETIRRALNLGVSVKMITGDQLAIGKETGRRLGMGTNMYPSSALLGQNKDESIVALPVDELIEKADGFAGFSAEHKYEIVKRLQARKHICGMTGDGVNDAPALKKADIGIAVADATDAARSASDIVLTEPGLSVIISAVLTSRAIFQRMKNYTIYAVSITIRIVLGFMLLALIWQFDFPPFMVLIIAILNDGTIMTISKDRVKPSPLPDSWKLSEIFATGVVFGSYMAMMTVIFFWVSYKTDFFPRTFGVATLEKTAHDDFRKLASAIYLQVSIISQALIFVTRSRSWSFVERPGIFLMIAFILAQLVATLIAVYANWSFAAIEGIGWGWAGVIWLYNIIFYIPLDFIKFFIRYALSGRAWDLVIEQRVAFTRQKDFGKEQRELQWAHAQRTLHGLQAPDTKMFTDRTHVSELNQMAEEAKRRAEIARLRELHTLKGHVESVVRLKGLDIETIQQAYTV

SEQ ID NO: 106688 - protein, 880 aa, Arabidopsis thaliana
  peptide (1)..(880): Ceres Seq. ID no. 13620202
  misc_feature (251)..(537): Pfam Name: haloacid dehalogenase-like hydrolase Pfam Description: haloacid dehalogenase-like hydrolase
  misc_feature (1)..(815): Homolog of NCBI NO: 7436369 NR Description: H+-exporting ATPase (EC 3.6.3.6), plasma membrane
  misc_feature (1)..(774): Homolog of NCBI NO: 6691153 NR Description: plasma membrane H(+)-ATPase [Filobasidiella
  misc_feature (1)..(774): Homolog of NCBI NO: 3348073 NR Description: plasma membrane H(+)-ATPase 1 [Filobasidiella
  misc_feature (1)..(774): Homolog of NCBI NO: 2652922 NR Description: plasma membrane (H+) ATPase [Uromyces fabae]
  misc_feature (1)..(780): Homolog of NCBI NO: 1709664 NR Description: Probable plasma membrane ATPase (Proton pump)
  misc_feature (1)..(665): Homolog of NCBI NO: 1709666 NR Description: Plasma membrane ATPase (Proton pump)
  misc_feature (687)..(741): Homolog of NCBI NO: 1709666 NR Description: Plasma membrane ATPase (Proton pump)
  misc_feature (1)..(679): Homolog of NCBI NO: 1709665 NR Description: Plasma membrane ATPase (Proton pump)
  misc_feature (689)..(736): Homolog of NCBI NO: 1709665 NR Description: Plasma membrane ATPase (Proton pump)
  misc_feature (1)..(675): Homolog of NCBI NO: 16751320 NR Description: putative plasma membrane-type proton ATPase
MEAAAIMAIALANGGGKPPDWQDFVGIITLLVINSTISFIEENNAGNAAAALMARLAPKAKVLRDGRWGEQDAAILVPGDIISIKLGDIVPADARLLEGDPLKIDQSALTGESLPVTKSSGDGVYSGSTCKQGEIEAVVIATGVHTFFGKAAHLVDTTNQIGHFQQVLTAIGNFCICSIAVGMLIEIVVMYPIQHRAYRPGIDNLLVLLIGGIPIAMPTVLSVTMAIGSHRLSQQGAITKRMTAIEEMAGMDVLCSDKTGTLTLNKLTVDKNLIEVFMKGVDADTVVLMAARASRLENQDAIDAAIVGMLADPKDARAGIQEVHFLPFNPTDKRTALTYIDNEGNTHRVSKGAPEQILNLAHNKSEIERRVHAVIDKFAERGLRSLAVAYQDVPEGRKDSAGGPWQFVGLMPLFDPPRHDSAETIRRALNLGVSVKMITGDQLAIGKETGRRLGMGTNMYPSSALLGQNKDESIVALPVDELIEKADGFAGFSAEHKYEIVKRLQARKHICGMTGDGVNDAPALKKADIGIAVADATDAARSASDIVLTEPGLSVIISAVLTSRAIFQRMKNYTIYAVSITIRIVLGFMLLALIWQFDFPPFMVLIIAILNDGTIMTISKDRVKPSPLPDSWKLSEIFATGVVFGSYMAMMTVIFFWVSYKTDFFPRTFGVATLEKTAHDDFRKLASAIYLQVSIISQALIFVTRSRSWSFVERPGIFLMIAFILAQLVATLIAVYANWSFAAIEGIGWGWAGVIWLYNIIFYIPLDFIKFFIRYALSGRAWDLVIEQRVAFTRQKDFGKEQRELQWAHAQRTLHGLQAPDTKMFTDRTHVSELNQMAEEAKRRAEIARLRELHTLKGHVESVVRLKGLDIETIQQAYTV

SEQ ID NO: 106689 - DNA, 1775 bp, Arabidopsis thaliana
  misc_feature (1)..(1775): Ceres Seq. ID no. 13620206
  misc_feature: MA Experiment ID: 20001451 Result: Up-regulated in Transcription
  misc_feature: MA Experiment 20001451 PARAMETER Experiment Name: At_Far-red-induction_P Parameter: Age (day) Value: 7
  misc_feature: MA Experiment 20001451 PARAMETER Experiment Name: At_Far-red-induction_P Parameter: Light Value: Far-red vs. White
  misc_feature: MA Experiment 20001451 PARAMETER Experiment Name: At_Far-red-induction_P Parameter: Organism Value: A. thaliana
  misc_feature: MA Experiment 20001451 PARAMETER Experiment Name: At_Far-red-induction_P Parameter: Plant Line Value: Columbia
  misc_feature: MA Experiment 20001451 PARAMETER Experiment Name: At_Far-red-induction_P Parameter: Timepoint (hr) Value: 24
  misc_feature: MA Experiment 20001451 PARAMETER Experiment Name: At_Far-red-induction_P Parameter: Tissue Value: Whole Plant
aatgtaatctaattttagaaaagaaaaatgaaaaagttgaacagaatcctgaaaatattgtaagaaattttctaaaccgaaaaaacaaaaagacaaaaaccaaaaaattgcgatctgaaccgagcacaaaaccgtaaaggtttcagctttaccaaaatttagaggagtgtgtaaatgttacggagaaggaggagccaaaaaattcaaattggcgctcaagtatcttgggaaattccccctctctctttttaggaaatccctccaaaatacaatatcaaattctcaatcgcagacatcgtttgcgtcaaccatgtcagatctatcgccagaaagattcaaacttgccgttacttctccttcttccataccggaatcttcttcggctttacaattacaccattcctatagtcgcaaacagaaatctctcggacttctttgtaccaatttcttagctttgtataatcgagaagggattgaaatggttgggcttgatgatgctgcctcgaaattaggagtggagagacgaagaatctatgatattgttaatgttctggagagtgttggggttttaacaagaagagcaaagaatcagtatacgtggaaagggttttccgcaattccaggagcattgaaggagctacaagaagagggggttaaggacacttttcatcgtttctatgtcaatgagaatgttaaaggatctgatgatgaggatgatgatgaagagtcttctcagcctcactctagtagccagactgatagttcaaaacctggttctcttccccaatcttcagatccctccaaaatagataaccgacgagagaaatctttaggattgcttactcagaactttatcaaactctttatttgctctgaagctattaggatcatctcccttgatgacgctgcaaaattactgcttggtgatgcccacaatacatcaataatgcgaactaaagtgaggcggctttatgatatagcaaatgtcttgtcgtcaatgaatctcatagagaagactcacaccttagattctaggaaaccagctttcaagtggttagggtacaatggtgagcctactttcacactgagcagcgatttgttgcaattggagtcaagaaaaagagctttcggaactgatattacaaacgtcaatgttaagagaagcaaatcatcatcttcgtcccaagaaaacgctacagagagaaggctaaagatgaaaaagcactcaacaccagagagttcttataacaaaagctttgatgttcatgaatcaagacatggatcaagaggaggttaccattttggaccttttgcaccaggcactggtacatatccaactgctggtttagaggataactctaggagagcttttgatgttgagaatctggattctgattaccgtccctcttaccaaaaccaagttttgaaagacctcttttcccattacatggatgcttggaagacatggttcagcgaagtcacccaggagaatccattacctaatacatcacaacaccgttagatcttctttttcttcttcttcttcttcttcttcttcttcttcttcttcttctcttacctgtgaacatcaatcatcattcgtgtagagagcttcaagagtcatttcttttgatcaatgtggtttagtttctccacacaattgtaactgcaagaatccgacattaattcacagatcgcataccctctttgctttctgaagtttactgtaggctgtaacttttgtatgttacatataagagcattcatctttcgcc

SEQ ID NO: 106690 - protein, 403 aa, Arabidopsis thaliana
  peptide (1)..(403): Ceres Seq. ID no. 13620207
  misc_feature (33)..(99): Pfam Name: Transcription factor E2F/dimerisation partner (TDP) Pfam Description: Transcription factor E2F/dimerisation partner
  misc_feature (1)..(403): Homolog of NCBI NO: 22331664 NR Description: DP-E2F-related protein 1 [Arabidopsis thaliana]
  misc_feature (1)..(377): Homolog of NCBI NO: 30692988 NR Description: DP-E2F-related protein 1 [Arabidopsis thaliana]
  misc_feature (57)..(377): Homolog of NCBI NO: 7487385 NR Description: hypothetical protein T24C20.40 - Arabidopsis >gi|5541722|emb|CAB51063.1| putative protein [Arabidopsis
  misc_feature (32)..(393): Homolog of NCBI NO: 15242176 NR Description: DP-E2F-related 2 [Arabidopsis thaliana]
  misc_feature (13)..(291): Homolog of NCBI NO: 6094551 NR Description: hypothetical protein [Arabidopsis thaliana]
  misc_feature (13)..(291): Homolog of NCBI NO: 22330789 NR Description: DP-E2F-related protein 3 [Arabidopsis thaliana]
  misc_feature (13)..(223): Homolog of NCBI NO: 19578317 NR Description: transcription factor E2Ff [Arabidopsis thaliana]
  misc_feature (159)..(390): Homolog of NCBI NO: 22330789 NR Description: DP-E2F-related protein 3 [Arabidopsis thaliana]
  misc_feature (33)..(354): Homolog of NCBI NO: 29741773 NR Description: similar to Transcription factor E2F dimerisation
  misc_feature (33)..(250): Homolog of NCBI NO: 26334515 NR Description: unnamed protein product [Mus musculus]
MSDLSPERFKLAVTSPSSIPESSSALQLHHSYSRKQKSLGLLCTNFLALYNREGIEMVGLDDAASKLGVERRRIYDIVNVLESVGVLTRRAKNQYTWKGFSAIPGALKELQEEGVKDTFHRFYVNENVKGSDDEDDDEESSQPHSSSQTDSSKPGSLPQSSDPSKIDNRREKSLGLLTQNFIKLFICSEAIRIISLDDAAKLLLGDAHNTSIMRTKVRRLYDIANVLSSMNLIEKTHTLDSRKPAFKWLGYNGEPTFTLSSDLLQLESRKRAFGTDITNVNVKRSKSSSSSQENATERRLKMKKHSTPESSYNKSFDVHESRHGSRGGYHFGPFAPGTGTYPTAGLEDNSRRAFDVENLDSDYRPSYQNQVLKDLFSHYMDAWKTWFSEVTQENPLPNTSQHR

SEQ ID NO: 106691 - protein, 347 aa, Arabidopsis thaliana
  peptide (1)..(347): Ceres Seq. ID no. 13620208
  misc_feature (1)..(347): Homolog of NCBI NO: 22331664 NR Description: DP-E2F-related protein 1 [Arabidopsis thaliana]
  misc_feature (1)..(321): Homolog of NCBI NO: 30692988 NR Description: DP-E2F-related protein 1 [Arabidopsis thaliana]
  misc_feature (1)..(321): Homolog of NCBI NO: 7487385 NR Description: hypothetical protein T24C20.40 - Arabidopsis >gi|5541722|emb|CAB51063.1| putative protein [Arabidopsis
  misc_feature (1)..(337): Homolog of NCBI NO: 15242176 NR Description: DP-E2F-related 2 [Arabidopsis thaliana]
  misc_feature (1)..(235): Homolog of NCBI NO: 6094551 NR Description: hypothetical protein [Arabidopsis thaliana]
  misc_feature (1)..(235): Homolog of NCBI NO: 22330789 NR Description: DP-E2F-related protein 3 [Arabidopsis thaliana]
  misc_feature (1)..(167): Homolog of NCBI NO: 19578317 NR Description: transcription factor E2Ff [Arabidopsis thaliana]
  misc_feature (103)..(334): Homolog of NCBI NO: 22330789 NR Description: DP-E2F-related protein 3 [Arabidopsis thaliana]
  misc_feature (1)..(298): Homolog of NCBI NO: 29741773 NR Description: similar to Transcription factor E2F dimerisation
  misc_feature (1)..(194): Homolog of NCBI NO: 26334515 NR Description: unnamed protein product [Mus musculus]
MVGLDDAASKLGVERRRIYDIVNVLESVGVLTRRAKNQYTWKGFSAIPGALKELQEEGVKDTFHRFYVNENVKGSDDEDDDEESSQPHSSSQTDSSKPGSLPQSSDPSKIDNRREKSLGLLTQNFIKLFICSEAIRIISLDDAAKLLLGDAHNTSIMRTKVRRLYDIANVLSSMNLIEKTHTLDSRKPAFKWLGYNGEPTFTLSSDLLQLESRKRAFGTDITNVNVKRSKSSSSSQENATERRLKMKKHSTPESSYNKSFDVHESRHGSRGGYHFGPFAPGTGTYPTAGLEDNSRRAFDVENLDSDYRPSYQNQVLKDLFSHYMDAWKTWFSEVTQENPLPNTSQHR

SEQ ID NO: 106692 - DNA, 1253 bp, Arabidopsis thaliana
  misc_feature (1)..(1253): Ceres Seq. ID no. 13620213
  misc_feature: MA Experiment ID: 108433 Result: Down-regulated in Transcription
  misc_feature: MA Experiment 108433 PARAMETER Experiment Name: At_rhl_Mutant2_cDNA_P Parameter: Age (day) Value: 7
  misc_feature: MA Experiment 108433 PARAMETER Experiment Name: At_rhl_Mutant2_cDNA_P Parameter: Organism Value: A. thaliana
  misc_feature: MA Experiment 108433 PARAMETER Experiment Name: At_rhl_Mutant2_cDNA_P Parameter: Plant Line Value: rhl Mutant vs. wt landsburg
  misc_feature: MA Experiment 108433 PARAMETER Experiment Name: At_rhl_Mutant2_cDNA_P Parameter: Tissue Value: Roots
  misc_feature: MA Experiment ID: 108461 Result: Up-regulated in Transcription
  misc_feature: MA Experiment 108461 PARAMETER Experiment Name: At_Germinating_Seeds_cDNA_P Parameter: Age (day) Value: 1 vs. 0
  misc_feature: MA Experiment 108461 PARAMETER Experiment Name: At_Germinating_Seeds_cDNA_P Parameter: Tissue Value: Germinating Seeds
  misc_feature: MA Experiment ID: 108462 Result: Up-regulated in Transcription
  misc_feature: MA Experiment 108462 PARAMETER Experiment Name: At_Germinating_Seeds_cDNA_P Parameter: Age (day) Value: 2 vs. 0
  misc_feature: MA Experiment 108462 PARAMETER Experiment Name: At_Germinating_Seeds_cDNA_P Parameter: Tissue Value: Germinating Seeds
  misc_feature: MA Experiment ID: 108463 Result: Up-regulated in Transcription
  misc_feature: MA Experiment 108463 PARAMETER Experiment Name: At_Germinating_Seeds_cDNA_P Parameter: Age (day) Value: 3 vs. 0
  misc_feature: MA Experiment 108463 PARAMETER Experiment Name: At_Germinating_Seeds_cDNA_P Parameter: Tissue Value: Germinating Seeds
  misc_feature: MA Experiment ID: 108473 Result: Down-regulated in Transcription
  misc_feature: MA Experiment 108473 PARAMETER Experiment Name: At_Drought_Flowers_cDNA_P Parameter: Timepoint (hr) Value: 7 d
  misc_feature: MA Experiment 108473 PARAMETER Experiment Name: At_Drought_Flowers_cDNA_P Parameter: Tissue Value: Flower
  misc_feature: MA Experiment 108473 PARAMETER Experiment Name: At_Drought_Flowers_cDNA_P Parameter: Treatment Value: Drought vs. No Drought
  misc_feature: MA Experiment ID: 108488 Result: Up-regulated in Transcription
  misc_feature: MA Experiment ID: 108501 Result: Down-regulated in Transcription
  misc_feature: MA Experiment 108501 PARAMETER Experiment Name: At_ap2_floral_buds_cDNA_P Parameter: Plant Line Value: ap2 (Ler.)
  misc_feature: MA Experiment 108501 PARAMETER Experiment Name: At_ap2_floral_buds_cDNA_P Parameter: Tissue Value: Closed Flower
  misc_feature: MA Experiment ID: 108574 Result: Up-regulated in Transcription
  misc_feature: MA Experiment 108574 PARAMETER Experiment Name: At_Wounding__cDNA_P Parameter: Timepoint (hr) Value: 1
  misc_feature: MA Experiment 108574 PARAMETER Experiment Name: At_Wounding__cDNA_P Parameter: Tissue Value: Aerial
  misc_feature: MA Experiment 108574 PARAMETER Experiment Name: At_Wounding__cDNA_P Parameter: Treatment Value: Wounding vs. No Wounding
  misc_feature: MA Experiment ID: 108579 Result: Up-regulated in Transcription
  misc_feature: MA Experiment 108579 PARAMETER Experiment Name: At_4deg_Cold_cDNA_P Parameter: Temperature (deg C) Value: 4 vs. 22
  misc_feature: MA Experiment 108579 PARAMETER Experiment Name: At_4deg_Cold_cDNA_P Parameter: Timepoint (hr) Value: 6
  misc_feature: MA Experiment 108579 PARAMETER Experiment Name: At_4deg_Cold_cDNA_P Parameter: Tissue Value: Aerial
  misc_feature: MA Experiment ID: 108595 Result: Down-regulated in Transcription
  misc_feature: MA Experiment 108595 PARAMETER Experiment Name: At_Ler-pi_Ovule_cDNA_P Parameter: Plant Line Value: null
  misc_feature: MA Experiment ID: 20000069 Result: Down-regulated in Transcription
  misc_feature: MA Experiment 20000069 PARAMETER Experiment Name: At_100uM_ABA_Mutants_cDNA_P Parameter: Plant Line Value: CS23
  misc_feature: MA Experiment 20000069 PARAMETER Experiment Name: At_100uM_ABA_Mutants_cDNA_P Parameter: Timepoint (hr) Value: 6
  misc_feature: MA Experiment 20000069 PARAMETER Experiment Name: At_100uM_ABA_Mutants_cDNA_P Parameter: Tissue Value: Aerial
  misc_feature: MA Experiment 20000069 PARAMETER Experiment Name: At_100uM_ABA_Mutants_cDNA_P Parameter: Treatment Value: 100uM ABA vs. No Treatment
  misc_feature: MA Experiment ID: 20000070 Result: Down-regulated in Transcription
  misc_feature: MA Experiment 20000070 PARAMETER Experiment Name: At_100uM_ABA_Mutants_cDNA_P Parameter: Plant Line Value: CS24
  misc_feature: MA Experiment 20000070 PARAMETER Experiment Name: At_100uM_ABA_Mutants_cDNA_P Parameter: Timepoint (hr) Value: 6
  misc_feature: MA Experiment 20000070 PARAMETER Experiment Name: At_100uM_ABA_Mutants_cDNA_P Parameter: Tissue Value: Aerial
  misc_feature: MA Experiment 20000070 PARAMETER Experiment Name: At_100uM_ABA_Mutants_cDNA_P Parameter: Treatment Value: 100uM ABA vs. No Treatment
  misc_feature: MA Experiment ID: 20000086 Result: Down-regulated in Transcription
  misc_feature: MA Experiment 20000086 PARAMETER Experiment Name: At_100uM_ABA_Mutants_cDNA_P Parameter: Plant Line Value: CS22
  misc_feature: MA Experiment 20000086 PARAMETER Experiment Name: At_100uM_ABA_Mutants_cDNA_P Parameter: Timepoint (hr) Value: 6
  misc_feature: MA Experiment 20000086 PARAMETER Experiment Name: At_100uM_ABA_Mutants_cDNA_P Parameter: Tissue Value: Aerial
  misc_feature: MA Experiment 20000086 PARAMETER Experiment Name: At_100uM_ABA_Mutants_cDNA_P Parameter: Treatment Value: 100uM ABA vs. No Treatment
  misc_feature: MA Experiment ID: 20000087 Result: Down-regulated in Transcription
  misc_feature: MA Experiment 20000087 PARAMETER Experiment Name: At_100uM_ABA_Mutants_cDNA_P Parameter: Plant Line Value: WS
  misc_feature: MA Experiment 20000087 PARAMETER Experiment Name: At_100uM_ABA_Mutants_cDNA_P Parameter: Timepoint (hr) Value: 6
  misc_feature: MA Experiment 20000087 PARAMETER Experiment Name: At_100uM_ABA_Mutants_cDNA_P Parameter: Tissue Value: Aerial
  misc_feature: MA Experiment 20000087 PARAMETER Experiment Name: At_100uM_ABA_Mutants_cDNA_P Parameter: Treatment Value: 100uM ABA vs. No Treatment
  misc_feature: MA Experiment ID: 20000088 Result: Down-regulated in Transcription
  misc_feature: MA Experiment 20000088 PARAMETER Experiment Name: At_100uM_ABA_Mutants_cDNA_P Parameter: Plant Line Value: Landsberg
  misc_feature: MA Experiment 20000088 PARAMETER Experiment Name: At_100uM_ABA_Mutants_cDNA_P Parameter: Timepoint (hr) Value: 6
  misc_feature: MA Experiment 20000088 PARAMETER Experiment Name: At_100uM_ABA_Mutants_cDNA_P Parameter: Tissue Value: Aerial
  misc_feature: MA Experiment 20000088 PARAMETER Experiment Name: At_100uM_ABA_Mutants_cDNA_P Parameter: Treatment Value: 100uM ABA vs. No Treatment
  misc_feature: MA Experiment ID: 20000089 Result: Down-regulated in Transcription
  misc_feature: MA Experiment ID: 20000090 Result: Down-regulated in Transcription
  misc_feature: MA Experiment ID: 20000111 Result: Up-regulated in Transcription
  misc_feature: MA Experiment 20000111 PARAMETER Experiment Name: At_42deg_Heat_cDNA_P Parameter: Temperature (deg C) Value: 42 vs. 22
  misc_feature: MA Experiment 20000111 PARAMETER Experiment Name: At_42deg_Heat_cDNA_P Parameter: Timepoint (hr) Value: 6
  misc_feature: MA Experiment 20000111 PARAMETER Experiment Name: At_42deg_Heat_cDNA_P Parameter: Tissue Value: Aerial
  misc_feature: MA Experiment ID: 20000113 Result: Up-regulated in Transcription
  misc_feature: MA Experiment 20000113 PARAMETER Experiment Name: At_42deg_Heat_cDNA_P Parameter: Temperature (deg C) Value: 42 vs. 22
  misc_feature: MA Experiment 20000113 PARAMETER Experiment Name: At_42deg_Heat_cDNA_P Parameter: Timepoint (hr) Value: 8
  misc_feature: MA Experiment 20000113 PARAMETER Experiment Name: At_42deg_Heat_cDNA_P Parameter: Tissue Value: Aerial
  misc_feature: MA Experiment ID: 20000117 Result: Down-regulated in Transcription
  misc_feature: MA Experiment 20000117 PARAMETER Experiment Name: At_100uM_ABA_Mutants_cDNA_P Parameter: Plant Line Value: Columbia
  misc_feature: MA Experiment 20000117 PARAMETER Experiment Name: At_100uM_ABA_Mutants_cDNA_P Parameter: Timepoint (hr) Value: 6
  misc_feature: MA Experiment 20000117 PARAMETER Experiment Name: At_100uM_ABA_Mutants_cDNA_P Parameter: Tissue Value: Aerial
  misc_feature: MA Experiment 20000117 PARAMETER Experiment Name: At_100uM_ABA_Mutants_cDNA_P Parameter: Treatment Value: 100uM ABA vs. No Treatment
  misc_feature: MA Experiment ID: 20000179 Result: Up-regulated in Transcription
  misc_feature: MA Experiment 20000179 PARAMETER Experiment Name: At_Germinating_Seeds_P Parameter: Age (hr) Value: 6 vs. 0
  misc_feature: MA Experiment 20000179 PARAMETER Experiment Name: At_Germinating_Seeds_P Parameter: Tissue Value: Germinating Seeds
  misc_feature: MA Experiment ID: 20000180 Result: Up-regulated in Transcription
  misc_feature: MA Experiment 20000180 PARAMETER Experiment Name: At_Germinating_Seeds_P Parameter: Age (hr) Value: 24 vs. 0
  misc_feature: MA Experiment 20000180 PARAMETER Experiment Name: At_Germinating_Seeds_P Parameter: Tissue Value: Germinating Seeds
  misc_feature: MA Experiment ID: 20000184 Result: Up-regulated in Transcription
  misc_feature: MA Experiment 20000184 PARAMETER Experiment Name: At_Shoots__P Parameter: Age (day) Value: 7
  misc_feature: MA Experiment 20000184 PARAMETER Experiment Name: At_Shoots__P Parameter: Tissue Value: Shoots vs. Whole Plant
  misc_feature: MA Experiment ID: 20000185 Result: Down-regulated in Transcription
  misc_feature: MA Experiment 20000185 PARAMETER Experiment Name: At_Roots__P Parameter: Age (day) Value: 7 vs. 21
  misc_feature: MA Experiment 20000185 PARAMETER Experiment Name: At_Roots__P Parameter: Organism Value: A. thaliana
  misc_feature: MA Experiment 20000185 PARAMETER Experiment Name: At_Roots__P Parameter: Tissue Value: Roots vs. Whole Plant
  misc_feature: MA Experiment ID: 20000224 Result: Up-regulated in Transcription
  misc_feature: MA Experiment ID: 20000234 Result: Up-regulated in Transcription
  misc_feature: MA Experiment 20000234 PARAMETER Experiment Name: At_Siliques_P Parameter: Age (day) Value: 21
  misc_feature: MA Experiment 20000234 PARAMETER Experiment Name: At_Siliques_P Parameter: Organism Value: A. thaliana
  misc_feature: MA Experiment 20000234 PARAMETER Experiment Name: At_Siliques_P Parameter: Plant Line Value: WS
  misc_feature: MA Experiment 20000234 PARAMETER Experiment Name: At_Siliques_P Parameter: Tissue Value: Less Than 5mm Siliques vs. Whole Plant
  misc_feature: MA Experiment ID: 20000235 Result: Up-regulated in Transcription
  misc_feature: MA Experiment 20000235 PARAMETER Experiment Name: At_Siliques_P Parameter: Age (day) Value: 21
  misc_feature: MA Experiment 20000235 PARAMETER Experiment Name: At_Siliques_P Parameter: Organism Value: A. thaliana
  misc_feature: MA Experiment 20000235 PARAMETER Experiment Name: At_Siliques_P Parameter: Plant Line Value: WS
  misc_feature: MA Experiment 20000235 PARAMETER Experiment Name: At_Siliques_P Parameter: Tissue Value: 5-10mm Siliques vs. Whole Plant
  misc_feature: MA Experiment ID: 20000265 Result: Up-regulated in Transcription
  misc_feature: MA Experiment 20000265 PARAMETER Experiment Name: At_Open_Flower_P Parameter: Age (day) Value: 21
  misc_feature: MA Experiment 20000265 PARAMETER Experiment Name: At_Open_Flower_P Parameter: Plant Line Value: WS
  misc_feature: MA Experiment 20000265 PARAMETER Experiment Name: At_Open_Flower_P Parameter: Tissue Value: Closed Flower vs. Whole Plant
  misc_feature: MA Experiment ID: 20000267 Result: Up-regulated in Transcription
  misc_feature: MA Experiment 20000267 PARAMETER Experiment Name: At_Drought_P Parameter: Age (day) Value: 7
  misc_feature: MA Experiment 20000267 PARAMETER Experiment Name: At_Drought_P Parameter: Organism Value: A. thaliana
  misc_feature: MA Experiment 20000267 PARAMETER Experiment Name: At_Drought_P Parameter: Plant Line Value: WS
  misc_feature: MA Experiment 20000267 PARAMETER Experiment Name: At_Drought_P Parameter: Timepoint (hr) Value: 6
  misc_feature: MA Experiment 20000267 PARAMETER Experiment Name: At_Drought_P Parameter: Tissue Value: Whole Plant
  misc_feature: MA Experiment 20000267 PARAMETER Experiment Name: At_Drought_P Parameter: Treatment Value: Drought vs. No Drought
  misc_feature: MA Experiment ID: 20000268 Result: Up-regulated in Transcription
  misc_feature: MA Experiment 20000268 PARAMETER Experiment Name: At_100mM_NaCl__P Parameter: Age (day) Value: 14
  misc_feature: MA Experiment 20000268 PARAMETER Experiment Name: At_100mM_NaCl__P Parameter: Organism Value: A. thaliana
  misc_feature: MA Experiment 20000268 PARAMETER Experiment Name: At_100mM_NaCl__P Parameter: Plant Line Value: WS
  misc_feature: MA Experiment 20000268 PARAMETER Experiment Name: At_100mM_NaCl__P Parameter: Timepoint (hr) Value: 6
  misc_feature: MA Experiment 20000268 PARAMETER Experiment Name: At_100mM_NaCl__P Parameter: Tissue Value: Whole Plant
  misc_feature: MA Experiment 20000268 PARAMETER Experiment Name: At_100mM_NaCl__P Parameter: Treatment Value: 100mM NaCl vs. No Treatment
  misc_feature: MA Experiment ID: 20000286 Result: Up-regulated in Transcription
  misc_feature: MA Experiment 20000286 PARAMETER Experiment Name: At_Open_Flower_P Parameter: Age (day) Value: 21
  misc_feature: MA Experiment 20000286 PARAMETER Experiment Name: At_Open_Flower_P Parameter: Plant Line Value: WS
  misc_feature: MA Experiment 20000286 PARAMETER Experiment Name: At_Open_Flower_P Parameter: Tissue Value: Half Open vs. Whole Plant
  misc_feature: MA Experiment ID: 20000436 Result: Up-regulated in Transcription
  misc_feature: MA Experiment 20000436 PARAMETER Experiment Name: At_Drought_P Parameter: Age (day) Value: 7
  misc_feature: MA Experiment 20000436 PARAMETER Experiment Name: At_Drought_P Parameter: Organism Value: A. thaliana
  misc_feature: MA Experiment 20000436 PARAMETER Experiment Name: At_Drought_P Parameter: Plant Line Value: WS
  misc_feature: MA Experiment 20000436 PARAMETER Experiment Name: At_Drought_P Parameter: Timepoint (hr) Value: 12
  misc_feature: MA Experiment 20000436 PARAMETER Experiment Name: At_Drought_P Parameter: Tissue Value: Whole Plant
  misc_feature: MA Experiment 20000436 PARAMETER Experiment Name: At_Drought_P Parameter: Treatment Value: Drought vs. No Drought
  misc_feature: MA Experiment ID: 20000438 Result: Up-regulated in Transcription
  misc_feature: MA Experiment 20000438 PARAMETER Experiment Name: At_Shoots__P Parameter: Age (day) Value: 14
  misc_feature: MA Experiment 20000438 PARAMETER Experiment Name: At_Shoots__P Parameter: Tissue Value: Shoots vs. Whole Plant
  misc_feature: MA Experiment ID: 20000439 Result: Down-regulated in Transcription
  misc_feature: MA Experiment 20000439 PARAMETER Experiment Name: At_Roots__P Parameter: Age (day) Value: 14 vs. 21
  misc_feature: MA Experiment 20000439 PARAMETER Experiment Name: At_Roots__P Parameter: Organism Value: A. thaliana
  misc_feature: MA Experiment 20000439 PARAMETER Experiment Name: At_Roots__P Parameter: Tissue Value: Roots vs. Whole Plant
  misc_feature: MA Experiment ID: 20000527 Result: Up-regulated in Transcription
  misc_feature: MA Experiment 20000527 PARAMETER Experiment Name: At_10percent_PEG_P Parameter: Age (day) Value: 20
  misc_feature: MA Experiment 20000527 PARAMETER Experiment Name: At_10percent_PEG_P Parameter: Organism Value: A. thaliana
  misc_feature: MA Experiment 20000527 PARAMETER Experiment Name: At_10percent_PEG_P Parameter: Plant Line Value: WS
  misc_feature: MA Experiment 20000527 PARAMETER Experiment Name: At_10percent_PEG_P Parameter: Timepoint (day) Value: 20
  misc_feature: MA Experiment 20000527 PARAMETER Experiment Name: At_10percent_PEG_P Parameter: Tissue Value: Whole Plant
  misc_feature: MA Experiment 20000527 PARAMETER Experiment Name: At_10percent_PEG_P Parameter: Treatment Value: 10percent PEG vs. No Treatment
  misc_feature: MA Experiment ID: 20000573 Result: Down-regulated in Transcription
  misc_feature: MA Experiment 20000573 PARAMETER Experiment Name: At_100uM_ABA_Mutants__P Parameter: Organism Value: A. thaliana
  misc_feature: MA Experiment 20000573 PARAMETER Experiment Name: At_100uM_ABA_Mutants__P Parameter: Plant Line Value: CS22 vs. Ler wt
  misc_feature: MA Experiment 20000573 PARAMETER Experiment Name: At_100uM_ABA_Mutants__P Parameter: Timepoint (hr) Value: N/A
  misc_feature: MA Experiment 20000573 PARAMETER Experiment Name: At_100uM_ABA_Mutants__P Parameter: Tissue Value: Whole Plant
  misc_feature: MA Experiment 20000573 PARAMETER Experiment Name: At_100uM_ABA_Mutants__P Parameter: Treatment Value: None
  misc_feature: MA Experiment ID: 20000574 Result: Down-regulated in Transcription
  misc_feature: MA Experiment 20000574 PARAMETER Experiment Name: At_100uM_ABA_Mutants__P Parameter: Organism Value: A. thaliana
  misc_feature: MA Experiment 20000574 PARAMETER Experiment Name: At_100uM_ABA_Mutants__P Parameter: Plant Line Value: CS23 vs. Ler wt
  misc_feature: MA Experiment 20000574 PARAMETER Experiment Name: At_100uM_ABA_Mutants__P Parameter: Timepoint (hr) Value: N/A
  misc_feature: MA Experiment 20000574 PARAMETER Experiment Name: At_100uM_ABA_Mutants__P Parameter: Tissue Value: Whole Plant
  misc_feature: MA Experiment 20000574 PARAMETER Experiment Name: At_100uM_ABA_Mutants__P Parameter: Treatment Value: None
  misc_feature: MA Experiment ID: 20001248 Result: Down-regulated in Transcription
  misc_feature: MA Experiment 20001248 PARAMETER Experiment Name: At_Far-red-induction_P Parameter: Age (day) Value: 7
  misc_feature: MA Experiment 20001248 PARAMETER Experiment Name: At_Far-red-induction_P Parameter: Light Value: Far-red vs. White
  misc_feature: MA Experiment 20001248 PARAMETER Experiment Name: At_Far-red-induction_P Parameter: Organism Value: A. thaliana
  misc_feature: MA Experiment 20001248 PARAMETER Experiment Name: At_Far-red-induction_P Parameter: Plant Line Value: Columbia
  misc_feature: MA Experiment 20001248 PARAMETER Experiment Name: At_Far-red-induction_P Parameter: Timepoint (hr) Value: 4
  misc_feature: MA Experiment 20001248 PARAMETER Experiment Name: At_Far-red-induction_P Parameter: Tissue Value: Whole Plant
  misc_feature: MA Experiment ID: 20001450 Result: Down-regulated in Transcription
  misc_feature: MA Experiment 20001450 PARAMETER Experiment Name: At_Far-red-induction_P Parameter: Age (day) Value: 7
  misc_feature: MA Experiment 20001450 PARAMETER Experiment Name: At_Far-red-induction_P Parameter: Light Value: Far-red vs. White
  misc_feature: MA Experiment 20001450 PARAMETER Experiment Name: At_Far-red-induction_P Parameter: Organism Value: A. thaliana
  misc_feature: MA Experiment 20001450 PARAMETER Experiment Name: At_Far-red-induction_P Parameter: Plant Line Value: Columbia
  misc_feature: MA Experiment 20001450 PARAMETER Experiment Name: At_Far-red-induction_P Parameter: Timepoint (hr) Value: 8
  misc_feature: MA Experiment 20001450 PARAMETER Experiment Name: At_Far-red-induction_P Parameter: Tissue Value: Whole Plant
  misc_feature: MA Experiment ID: 20001558 Result: Up-regulated in Transcription
  misc_feature: MA Experiment 20001558 PARAMETER Experiment Name: At_Drought_Soil_Dry_P Parameter: Age (day) Value: 27
  misc_feature: MA Experiment 20001558 PARAMETER Experiment Name: At_Drought_Soil_Dry_P Parameter: Organism Value: A. thaliana
  misc_feature: MA Experiment 20001558 PARAMETER Experiment Name: At_Drought_Soil_Dry_P Parameter: Plant Line Value: WS
  misc_feature: MA Experiment 20001558 PARAMETER Experiment Name: At_Drought_Soil_Dry_P Parameter: Post Timepoint (hr) Value: 6
  misc_feature: MA Experiment 20001558 PARAMETER Experiment Name: At_Drought_Soil_Dry_P Parameter: Post-Treatment Value: Re-Water vs. No Drought
  misc_feature: MA Experiment 20001558 PARAMETER Experiment Name: At_Drought_Soil_Dry_P Parameter: Timepoint (day) Value: 13
  misc_feature: MA Experiment 20001558 PARAMETER Experiment Name: At_Drought_Soil_Dry_P Parameter: Treatment Value: Drought vs. No Drought
  misc_feature: MA Experiment ID: 20001911 Result: Down-regulated in Transcription
  misc_feature: MA Experiment 20001911 PARAMETER Experiment Name: At_Drought_Reproduction_P Parameter: Age (day) Value: 40
  misc_feature: MA Experiment 20001911 PARAMETER Experiment Name: At_Drought_Reproduction_P Parameter: Organism Value: A. thaliana
  misc_feature: MA Experiment 20001911 PARAMETER Experiment Name: At_Drought_Reproduction_P Parameter: Plant Line Value: WS
  misc_feature: MA Experiment 20001911 PARAMETER Experiment Name: At_Drought_Reproduction_P Parameter: Timepoint (day) Value: 10
  misc_feature: MA Experiment 20001911 PARAMETER Experiment Name: At_Drought_Reproduction_P Parameter: Tissue Value: Flowers
  misc_feature: MA Experiment 20001911 PARAMETER Experiment Name: At_Drought_Reproduction_P Parameter: Treatment Value: Drought vs. No Drought
acaaccattttcattagaagctcaaatttcaaatctcacttccttatcacaatgtcttcctctatctctcccctcctcacaaccgccatctccgtcgcaatcctcctcttctccaccatctccacagcggcgacaattccaaacatccaccgtccattcaacaaaatctacgccttcggagattctttcaccgacaccggaaactcacgctccggcgaaggaccagccggattcggacacttgtcaagtcctccatacggcatgactttcttccgacgaccaacaaaccgttactccgacggtcgtctaaccatcgacttcgtggcagagtcaatgaatttaccgtttctgccaccgtatctcagcctcaaaaccactaacgctaacggcacagcaacggatactcacggcgttaatttcgctgtctctggatcaacggtgattaaacacgcgtttttcgtcaagaacaatctgtcgcttgatatgactcctcagtctatagaaacagagcttgcttggtttgagaagtacttggagacacttggaacgaatcagaaggtttcgttgtttaaagattctctcttttggattggagaaattggagtgaatgattatgcgtatacccttggatctactgtgtcaagtgacaccattagagaacttagtatctcaacttttacaaggtttttggagacattgttgaacaaaggtgtgaaatatatgttggtgcaaggacatccagcaactggatgcttaacgttagcaatgtcgttggccgcagaagatgatcgggacagtctaggatgtgtgcagagtgccaataaccaaagttacactcacaatcttgcccttcaatccaaacttaaacaacttaggatcaagtatccgagtgccacaatagtctacgcagattactggaacgcgtaccgtgcggtgattaaacaccctagcaagtacggtatcaccgagaagttcaaggcgtgttgtggaattggagagccgtacaacttccaagtgttccaaacgtgtgggacggatgcagctacagtgtgtaaggacccgaatcaatacatcaattgggacggagtccacttgaccgaggctatgtataaggttatggccgatatgttccttgacggcactttcactcgtcctagatttagtgacttgttgatcaagaaactaaactatttatgaatgaattgttttactgattttttatataagatttaatggttttggagttttttttt

SEQ ID NO: 106693 - protein, 398 aa, Arabidopsis thaliana
  peptide (1)..(398): Ceres Seq. ID no. 13620214
  misc_feature (56)..(377): Pfam Name: GDSL-like Lipase/Acylhydrolase Pfam Description: GDSL-like Lipase/Acylhydrolase
  misc_feature (18)..(398): Homolog of NCBI NO: 15228381 NR Description: GDSL-motif lipase/hydrolase protein [Arabidopsis
  misc_feature (30)..(387): Homolog of NCBI NO: 15218753 NR Description: lipase, putative [Arabidopsis thaliana]
  misc_feature (53)..(386): Homolog of NCBI NO: 34903978 NR Description: unnamed protein product [Oryza sativa (japonica group)] >gi|7523500|dbj|BAA94228.1| unnamed protein product
  misc_feature (18)..(387): Homolog of NCBI NO: 15218751 NR Description: lipase, putative [Arabidopsis thaliana]
  misc_feature (18)..(385): Homolog of NCBI NO: 34903994 NR Description: unnamed protein product [Oryza sativa (japonica group)] >gi|7523492|dbj|BAA94220.1| unnamed protein product
  misc_feature (31)..(387): Homolog of NCBI NO: 21593234 NR Description: lipase, putative [Arabidopsis thaliana]
  misc_feature (18)..(387): Homolog of NCBI NO: 18396873 NR Description: lipase, putative [Arabidopsis thaliana] unknown protein [Arabidopsis thaliana]
  misc_feature (31)..(387): Homolog of NCBI NO: 10764858 NR Description: F1K23.17 [Arabidopsis thaliana]
  misc_feature (31)..(387): Homolog of NCBI NO: 15218731 NR Description: lipase, putative [Arabidopsis thaliana] At1g28600/F1K23_6 [Arabidopsis thaliana]
  misc_feature (23)..(387): Homolog of NCBI NO: 15218725 NR Description: lipase, putative [Arabidopsis thaliana]
TTIFIRSSNFKSHFLITMSSSISPLLTTAISVAILLFSTISTAATIPNIHRPFNKIYAFGDSFTDTGNSRSGEGPAGFGHLSSPPYGMTFFRRPTNRYSDGRLTIDFVAESMNLPFLPPYLSLKTTNANGTATDTHGVNFAVSGSTVIKHAFFVKNNLSLDMTPQSIETELAWFEKYLETLGTNQKVSLFKDSLFWIGEIGVNDYAYTLGSTVSSDTIRELSISTFTRFLETLLNKGVKYMLVQGHPATGCLTLAMSLAAEDDRDSLGCVQSANNQSYTHNLALQSKLKQLRIKYPSATIVYADYWNAYRAVIKHPSKYGITEKFKACCGIGEPYNFQVFQTCGTDAATVCKDPNQYINWDGVHLTEAMYKVMADMFLDGTFTRPRFSDLLIKKLNYL

SEQ ID NO: 106694 - protein, 381 aa, Arabidopsis thaliana
  peptide (1)..(381): Ceres Seq. ID no. 13620215
  misc_feature (39)..(360): Pfam Name: GDSL-like Lipase/Acylhydrolase Pfam Description: GDSL-like Lipase/Acylhydrolase
  misc_feature (1)..(381): Homolog of NCBI NO: 15228381 NR Description: GDSL-motif lipase/hydrolase protein [Arabidopsis
  misc_feature (13)..(370): Homolog of NCBI NO: 15218753 NR Description: lipase, putative [Arabidopsis thaliana]
  misc_feature (36)..(369): Homolog of NCBI NO: 34903978 NR Description: unnamed protein product [Oryza sativa (japonica group)] >gi|7523500|dbj|BAA94228.1| unnamed protein product
  misc_feature (1)..(370): Homolog of NCBI NO: 15218751 NR Description: lipase, putative [Arabidopsis thaliana]
  misc_feature (1)..(368): Homolog of NCBI NO: 34903994 NR Description: unnamed protein product [Oryza sativa (japonica group)] >gi|7523492|dbj|BAA94220.1| unnamed protein product
  misc_feature (14)..(370): Homolog of NCBI NO: 21593234 NR Description: lipase, putative [Arabidopsis thaliana]
  misc_feature (1)..(370): Homolog of NCBI NO: 18396873 NR Description: lipase, putative [Arabidopsis thaliana] unknown protein [Arabidopsis thaliana]
  misc_feature (14)..(370): Homolog of NCBI NO: 10764858 NR Description: F1K23.17 [Arabidopsis thaliana]
  misc_feature (14)..(370): Homolog of NCBI NO: 15218731 NR Description: lipase, putative [Arabidopsis thaliana] At1g28600/F1K23_6 [Arabidopsis thaliana]
  misc_feature (6)..(370): Homolog of NCBI NO: 15218725 NR Description: lipase, putative [Arabidopsis thaliana]
MSSSISPLLTTAISVAILLFSTISTAATIPNIHRPFNKIYAFGDSFTDTGNSRSGEGPAGFGHLSSPPYGMTFFRRPTNRYSDGRLTIDFVAESMNLPFLPPYLSLKTTNANGTATDTHGVNFAVSGSTVIKHAFFVKNNLSLDMTPQSIETELAWFEKYLETLGTNQKVSLFKDSLFWIGEIGVNDYAYTLGSTVSSDTIRELSISTFTRFLETLLNKGVKYMLVQGHPATGCLTLAMSLAAEDDRDSLGCVQSANNQSYTHNLALQSKLKQLRIKYPSATIVYADYWNAYRAVIKHPSKYGITEKFKACCGIGEPYNFQVFQTCGTDAATVCKDPNQYINWDGVHLTEAMYKVMADMFLDGTFTRPRFSDLLIKKLNYL

SEQ ID NO: 106695 - protein, 311 aa, Arabidopsis thaliana
  peptide (1)..(311): Ceres Seq. ID no. 13620216
  misc_feature (1)..(290): Pfam Name: GDSL-like Lipase/Acylhydrolase Pfam Description: GDSL-like Lipase/Acylhydrolase
  misc_feature (1)..(311): Homolog of NCBI NO: 15228381 NR Description: GDSL-motif lipase/hydrolase protein [Arabidopsis
  misc_feature (1)..(300): Homolog of NCBI NO: 15218753 NR Description: lipase, putative [Arabidopsis thaliana]
  misc_feature (1)..(299): Homolog of NCBI NO: 34903978 NR Description: unnamed protein product [Oryza sativa (japonica group)] >gi|7523500|dbj|BAA94228.1| unnamed protein product
  misc_feature (1)..(300): Homolog of NCBI NO: 15218751 NR Description: lipase, putative [Arabidopsis thaliana]
  misc_feature (1)..(298): Homolog of NCBI NO: 34903994 NR Description: unnamed protein product [Oryza sativa (japonica group)] >gi|7523492|dbj|BAA94220.1| unnamed protein product
  misc_feature (1)..(300): Homolog of NCBI NO: 21593234 NR Description: lipase, putative [Arabidopsis thaliana]
  misc_feature (1)..(300): Homolog of NCBI NO: 18396873 NR Description: lipase, putative [Arabidopsis thaliana] unknown protein [Arabidopsis thaliana]
  misc_feature (1)..(300): Homolog of NCBI NO: 10764858 NR Description: F1K23.17 [Arabidopsis thaliana]
  misc_feature (1)..(300): Homolog of NCBI NO: 15218731 NR Description: lipase, putative [Arabidopsis thaliana] At1g28600/F1K23_6 [Arabidopsis thaliana]
  misc_feature (1)..(300): Homolog of NCBI NO: 15218725 NR Description: lipase, putative [Arabidopsis thaliana]
MTFFRRPTNRYSDGRLTIDFVAESMNLPFLPPYLSLKTTNANGTATDTHGVNFAVSGSTVIKHAFFVKNNLSLDMTPQSIETELAWFEKYLETLGTNQKVSLFKDSLFWIGEIGVNDYAYTLGSTVSSDTIRELSISTFTRFLETLLNKGVKYMLVQGHPATGCLTLAMSLAAEDDRDSLGCVQSANNQSYTHNLALQSKLKQLRIKYPSATIVYADYWNAYRAVIKHPSKYGITEKFKACCGIGEPYNFQVFQTCGTDAATVCKDPNQYINWDGVHLTEAMYKVMADMFLDGTFTRPRFSDLLIKKLNYL

SEQ ID NO: 106696 - DNA, 1031 bp, Arabidopsis thaliana
  misc_feature (1)..(1031): Ceres Seq. ID no. 13620217
  misc_feature: MA Experiment ID: 20000173 Result: Down-regulated in Transcription
  misc_feature: MA Experiment 20000173 PARAMETER Experiment Name: At_42deg_Heat_P Parameter: Age (day) Value: 14
  misc_feature: MA Experiment 20000173 PARAMETER Experiment Name: At_42deg_Heat_P Parameter: Organism Value: A. thaliana
  misc_feature: MA Experiment 20000173 PARAMETER Experiment Name: At_42deg_Heat_P Parameter: Plant Line Value: WS
  misc_feature: MA Experiment 20000173 PARAMETER Experiment Name: At_42deg_Heat_P Parameter: Temperature (deg C) Value: 42 vs. 22
  misc_feature: MA Experiment 20000173 PARAMETER Experiment Name: At_42deg_Heat_P Parameter: Timepoint (hr) Value: 6
  misc_feature: MA Experiment 20000173 PARAMETER Experiment Name: At_42deg_Heat_P Parameter: Tissue Value: Aerial
  misc_feature: MA Experiment ID: 20000214 Result: Down-regulated in Transcription
  misc_feature: MA Experiment 20000214 PARAMETER Experiment Name: At_4deg_Cold_P Parameter: Timepoint (hr) Value: 6
  misc_feature: MA Experiment ID: 20000227 Result: Down-regulated in Transcription
  misc_feature: MA Experiment 20000227 PARAMETER Experiment Name: At_Root-Tips-vs-Tops_P Parameter: Tissue Value: Root Tips vs. Root Tops
  misc_feature: MA Experiment ID: 20000234 Result: Down-regulated in Transcription
  misc_feature: MA Experiment 20000234 PARAMETER Experiment Name: At_Siliques_P Parameter: Age (day) Value: 21
  misc_feature: MA Experiment 20000234 PARAMETER Experiment Name: At_Siliques_P Parameter: Organism Value: A. thaliana
  misc_feature: MA Experiment 20000234 PARAMETER Experiment Name: At_Siliques_P Parameter: Plant Line Value: WS
  misc_feature: MA Experiment 20000234 PARAMETER Experiment Name: At_Siliques_P Parameter: Tissue Value: Less Than 5mm Siliques vs. Whole Plant
  misc_feature: MA Experiment ID: 20000264 Result: Down-regulated in Transcription
  misc_feature: MA Experiment 20000264 PARAMETER Experiment Name: At_Open_Flower_P Parameter: Age (day) Value: 21
  misc_feature: MA Experiment 20000264 PARAMETER Experiment Name: At_Open_Flower_P Parameter: Plant Line Value: WS
  misc_feature: MA Experiment 20000264 PARAMETER Experiment Name: At_Open_Flower_P Parameter: Tissue Value: Open Flower vs. Whole Plant
  misc_feature: MA Experiment ID: 20000439 Result: Down-regulated in Transcription
  misc_feature: MA Experiment 20000439 PARAMETER Experiment Name: At_Roots__P Parameter: Age (day) Value: 14 vs. 21
  misc_feature: MA Experiment 20000439 PARAMETER Experiment Name: At_Roots__P Parameter: Organism Value: A. thaliana
  misc_feature: MA Experiment 20000439 PARAMETER Experiment Name: At_Roots__P Parameter: Tissue Value: Roots vs. Whole Plant
  misc_feature: MA Experiment ID: 20000441 Result: Up-regulated in Transcription
  misc_feature: MA Experiment 20000441 PARAMETER Experiment Name: At_1uM_BR-BRZ__P Parameter: Tissue Value: Shoot Apices
  misc_feature: MA Experiment 20000441 PARAMETER Experiment Name: At_1uM_BR-BRZ__P Parameter: Treatment Value: 1uM BR vs. No Treatment
  misc_feature: MA Experiment ID: 20000576 Result: Down-regulated in Transcription
  misc_feature: MA Experiment 20000576 PARAMETER Experiment Name: At_100uM_ABA_Mutants__P Parameter: Organism Value: A. thaliana
  misc_feature: MA Experiment 20000576 PARAMETER Experiment Name: At_100uM_ABA_Mutants__P Parameter: Plant Line Value: CS23
  misc_feature: MA Experiment 20000576 PARAMETER Experiment Name: At_100uM_ABA_Mutants__P Parameter: Timepoint (hr) Value: 6
  misc_feature: MA Experiment 20000576 PARAMETER Experiment Name: At_100uM_ABA_Mutants__P Parameter: Tissue Value: Whole Plant
  misc_feature: MA Experiment 20000576 PARAMETER Experiment Name: At_100uM_ABA_Mutants__P Parameter: Treatment Value: 1uM ABA vs. No Treatment
  misc_feature: MA Experiment ID: 20000606 Result: Up-regulated in Transcription
  misc_feature: MA Experiment 20000606 PARAMETER Experiment Name: At_CS8548_Mutant_P Parameter: Age (day) Value: 14
  misc_feature: MA Experiment 20000606 PARAMETER Experiment Name: At_CS8548_Mutant_P Parameter: Plant Line Value: CS8548 vs. wt
  misc_feature: MA Experiment 20000606 PARAMETER Experiment Name: At_CS8548_Mutant_P Parameter: Tissue Value: Whole Plant
  misc_feature: MA Experiment ID: 20000794 Result: Down-regulated in Transcription
  misc_feature: MA Experiment 20000794 PARAMETER Experiment Name: At_Petals_P Parameter: Age (day) Value: 23-25 days
  misc_feature: MA Experiment 20000794 PARAMETER Experiment Name: At_Petals_P Parameter: Plant Line Value: WS
  misc_feature: MA Experiment 20000794 PARAMETER Experiment Name: At_Petals_P Parameter: Tissue Value: Petals vs. Whole plant
  misc_feature: MA Experiment ID: 20001248 Result: Up-regulated in Transcription
  misc_feature: MA Experiment 20001248 PARAMETER Experiment Name: At_Far-red-induction_P Parameter: Age (day) Value: 7
  misc_feature: MA Experiment 20001248 PARAMETER Experiment Name: At_Far-red-induction_P Parameter: Light Value: Far-red vs. White
  misc_feature: MA Experiment 20001248 PARAMETER Experiment Name: At_Far-red-induction_P Parameter: Organism Value: A. thaliana
  misc_feature: MA Experiment 20001248 PARAMETER Experiment Name: At_Far-red-induction_P Parameter: Plant Line Value: Columbia
  misc_feature: MA Experiment 20001248 PARAMETER Experiment Name: At_Far-red-induction_P Parameter: Timepoint (hr) Value: 4
  misc_feature: MA Experiment 20001248 PARAMETER Experiment Name: At_Far-red-induction_P Parameter: Tissue Value: Whole Plant
  misc_feature: MA Experiment ID: 20001450 Result: Up-regulated in Transcription
  misc_feature: MA Experiment 20001450 PARAMETER Experiment Name: At_Far-red-induction_P Parameter: Age (day) Value: 7
  misc_feature: MA Experiment 20001450 PARAMETER Experiment Name: At_Far-red-induction_P Parameter: Light Value: Far-red vs. White
  misc_feature: MA Experiment 20001450 PARAMETER Experiment Name: At_Far-red-induction_P Parameter: Organism Value: A. thaliana
  misc_feature: MA Experiment 20001450 PARAMETER Experiment Name: At_Far-red-induction_P Parameter: Plant Line Value: Columbia
  misc_feature: MA Experiment 20001450 PARAMETER Experiment Name: At_Far-red-induction_P Parameter: Timepoint (hr) Value: 8
  misc_feature: MA Experiment 20001450 PARAMETER Experiment Name: At_Far-red-induction_P Parameter: Tissue Value: Whole Plant
  misc_feature: MA Experiment ID: 20001451 Result: Up-regulated in Transcription
  misc_feature: MA Experiment 20001451 PARAMETER Experiment Name: At_Far-red-induction_P Parameter: Age (day) Value: 7
  misc_feature: MA Experiment 20001451 PARAMETER Experiment Name: At_Far-red-induction_P Parameter: Light Value: Far-red vs. White
  misc_feature: MA Experiment 20001451 PARAMETER Experiment Name: At_Far-red-induction_P Parameter: Organism Value: A. thaliana
  misc_feature: MA Experiment 20001451 PARAMETER Experiment Name: At_Far-red-induction_P Parameter: Plant Line Value: Columbia
  misc_feature: MA Experiment 20001451 PARAMETER Experiment Name: At_Far-red-induction_P Parameter: Timepoint (hr) Value: 24
  misc_feature: MA Experiment 20001451 PARAMETER Experiment Name: At_Far-red-induction_P Parameter: Tissue Value: Whole Plant
  misc_feature: MA Experiment ID: 20001554 Result: Down-regulated in Transcription
  misc_feature: MA Experiment 20001554 PARAMETER Experiment Name: At_Drought_Soil_Dry_P Parameter: Age (day) Value: 21
  misc_feature: MA Experiment 20001554 PARAMETER Experiment Name: At_Drought_Soil_Dry_P Parameter: Organism Value: A. thaliana
  misc_feature: MA Experiment 20001554 PARAMETER Experiment Name: At_Drought_Soil_Dry_P Parameter: Plant Line Value: WS
  misc_feature: MA Experiment 20001554 PARAMETER Experiment Name: At_Drought_Soil_Dry_P Parameter: Post Timepoint (hr) Value: None
  misc_feature: MA Experiment 20001554 PARAMETER Experiment Name: At_Drought_Soil_Dry_P Parameter: Post-Treatment Value: None
  misc_feature: MA Experiment 20001554 PARAMETER Experiment Name: At_Drought_Soil_Dry_P Parameter: Timepoint (day) Value: 7
  misc_feature: MA Experiment 20001554 PARAMETER Experiment Name: At_Drought_Soil_Dry_P Parameter: Treatment Value: Drought vs. No Drought
  misc_feature: MA Experiment ID: 20001555 Result: Down-regulated in Transcription
  misc_feature: MA Experiment 20001555 PARAMETER Experiment Name: At_Drought_Soil_Dry_P Parameter: Age (day) Value: 24
  misc_feature: MA Experiment 20001555 PARAMETER Experiment Name: At_Drought_Soil_Dry_P Parameter: Organism Value: A. thaliana
  misc_feature: MA Experiment 20001555 PARAMETER Experiment Name: At_Drought_Soil_Dry_P Parameter: Plant Line Value: WS
  misc_feature: MA Experiment 20001555 PARAMETER Experiment Name: At_Drought_Soil_Dry_P Parameter: Post Timepoint (hr) Value: None
  misc_feature: MA Experiment 20001555 PARAMETER Experiment Name: At_Drought_Soil_Dry_P Parameter: Post-Treatment Value: None
  misc_feature: MA Experiment 20001555 PARAMETER Experiment Name: At_Drought_Soil_Dry_P Parameter: Timepoint (day) Value: 10
  misc_feature: MA Experiment 20001555 PARAMETER Experiment Name: At_Drought_Soil_Dry_P Parameter: Treatment Value: Drought vs. No Drought
  misc_feature: MA Experiment ID: 20001556 Result: Down-regulated in Transcription
  misc_feature: MA Experiment 20001556 PARAMETER Experiment Name: At_Drought_Soil_Dry_P Parameter: Age (day) Value: 26
  misc_feature: MA Experiment 20001556 PARAMETER Experiment Name: At_Drought_Soil_Dry_P Parameter: Organism Value: A. thaliana
  misc_feature: MA Experiment 20001556 PARAMETER Experiment Name: At_Drought_Soil_Dry_P Parameter: Plant Line Value: WS
  misc_feature: MA Experiment 20001556 PARAMETER Experiment Name: At_Drought_Soil_Dry_P Parameter: Post Timepoint (hr) Value: None
  misc_feature: MA Experiment 20001556 PARAMETER Experiment Name: At_Drought_Soil_Dry_P Parameter: Post-Treatment Value: None
  misc_feature: MA Experiment 20001556 PARAMETER Experiment Name: At_Drought_Soil_Dry_P Parameter: Timepoint (day) Value: 12
  misc_feature: MA Experiment 20001556 PARAMETER Experiment Name: At_Drought_Soil_Dry_P Parameter: Treatment Value: Drought vs. No Drought
  misc_feature: MA Experiment ID: 20001557 Result: Down-regulated in Transcription
  misc_feature: MA Experiment 20001557 PARAMETER Experiment Name: At_Drought_Soil_Dry_P Parameter: Age (day) Value: 27
  misc_feature: MA Experiment 20001557 PARAMETER Experiment Name: At_Drought_Soil_Dry_P Parameter: Organism Value: A. thaliana
  misc_feature: MA Experiment 20001557 PARAMETER Experiment Name: At_Drought_Soil_Dry_P Parameter: Plant Line Value: WS
  misc_feature: MA Experiment 20001557 PARAMETER Experiment Name: At_Drought_Soil_Dry_P Parameter: Post Timepoint (hr) Value: 3
  misc_feature: MA Experiment 20001557 PARAMETER Experiment Name: At_Drought_Soil_Dry_P Parameter: Post-Treatment Value: Re-Water vs. No Drought
  misc_feature: MA Experiment 20001557 PARAMETER Experiment Name: At_Drought_Soil_Dry_P Parameter: Timepoint (day) Value: 13
  misc_feature: MA Experiment 20001557 PARAMETER Experiment Name: At_Drought_Soil_Dry_P Parameter: Treatment Value: Drought vs. No Drought
  misc_feature: MA Experiment ID: 20001558 Result: Down-regulated in Transcription
  misc_feature: MA Experiment 20001558 PARAMETER Experiment Name: At_Drought_Soil_Dry_P Parameter: Age (day) Value: 27
  misc_feature: MA Experiment 20001558 PARAMETER Experiment Name: At_Drought_Soil_Dry_P Parameter: Organism Value: A. thaliana
  misc_feature: MA Experiment 20001558 PARAMETER Experiment Name: At_Drought_Soil_Dry_P Parameter: Plant Line Value: WS
  misc_feature: MA Experiment 20001558 PARAMETER Experiment Name: At_Drought_Soil_Dry_P Parameter: Post Timepoint (hr) Value: 6
  misc_feature: MA Experiment 20001558 PARAMETER Experiment Name: At_Drought_Soil_Dry_P Parameter: Post-Treatment Value: Re-Water vs. No Drought
  misc_feature: MA Experiment 20001558 PARAMETER Experiment Name: At_Drought_Soil_Dry_P Parameter: Timepoint (day) Value: 13
  misc_feature: MA Experiment 20001558 PARAMETER Experiment Name: At_Drought_Soil_Dry_P Parameter: Treatment Value: Drought vs. No Drought
  misc_feature: MA Experiment ID: 20001904 Result: Down-regulated in Transcription
  misc_feature: MA Experiment 20001904 PARAMETER Experiment Name: At_Drought_Reproduction_P Parameter: Age (day) Value: 37
  misc_feature: MA Experiment 20001904 PARAMETER Experiment Name: At_Drought_Reproduction_P Parameter: Organism Value: A. thaliana
  misc_feature: MA Experiment 20001904 PARAMETER Experiment Name: At_Drought_Reproduction_P Parameter: Plant Line Value: WS
  misc_feature: MA Experiment 20001904 PARAMETER Experiment Name: At_Drought_Reproduction_P Parameter: Timepoint (day) Value: 7
  misc_feature: MA Experiment 20001904 PARAMETER Experiment Name: At_Drought_Reproduction_P Parameter: Tissue Value: Rosettes
  misc_feature: MA Experiment 20001904 PARAMETER Experiment Name: At_Drought_Reproduction_P Parameter: Treatment Value: Drought vs. No Drought
  misc_feature: MA Experiment ID: 20001905 Result: Down-regulated in Transcription
  misc_feature: MA Experiment 20001905 PARAMETER Experiment Name: At_Drought_Reproduction_P Parameter: Age (day) Value: 40
  misc_feature: MA Experiment 20001905 PARAMETER Experiment Name: At_Drought_Reproduction_P Parameter: Organism Value: A. thaliana
  misc_feature: MA Experiment 20001905 PARAMETER Experiment Name: At_Drought_Reproduction_P Parameter: Plant Line Value: WS
  misc_feature: MA Experiment 20001905 PARAMETER Experiment Name: At_Drought_Reproduction_P Parameter: Timepoint (day) Value: 10
  misc_feature: MA Experiment 20001905 PARAMETER Experiment Name: At_Drought_Reproduction_P Parameter: Tissue Value: Rosettes
  misc_feature: MA Experiment 20001905 PARAMETER Experiment Name: At_Drought_Reproduction_P Parameter: Treatment Value: Drought vs. No Drought
  misc_feature: MA Experiment ID: 20001906 Result: Down-regulated in Transcription
  misc_feature: MA Experiment 20001906 PARAMETER Experiment Name: At_Drought_Reproduction_P Parameter: Age (day) Value: 35
  misc_feature: MA Experiment 20001906 PARAMETER Experiment Name: At_Drought_Reproduction_P Parameter: Organism Value: A. thaliana
  misc_feature: MA Experiment 20001906 PARAMETER Experiment Name: At_Drought_Reproduction_P Parameter: Plant Line Value: WS
  misc_feature: MA Experiment 20001906 PARAMETER Experiment Name: At_Drought_Reproduction_P Parameter: Timepoint (day) Value: 5
  misc_feature: MA Experiment 20001906 PARAMETER Experiment Name: At_Drought_Reproduction_P Parameter: Tissue Value: Siliques
  misc_feature: MA Experiment 20001906 PARAMETER Experiment Name: At_Drought_Reproduction_P Parameter: Treatment Value: Drought vs. No Drought
atggcaaaagtctctgggaggagcaagaaaacaatcgttgacgatgaaatcagcgataaaacagcgtctgcgtctgagtctgcgtccattgccttaacatccaaacgcaaacgtaagtcgccgcctcgaaacgctcctcttcaacgcagctccccttacagaggcgtcacaagatggactgggagatacgaagcgcatttgtgggataagaacagctggaacgatacacagaccaagaaaggacgtcaaggggcttacgacgaagaagaagcagcagcacgtgcctacgacttagcagcattgaagtactggggacgagacacactcttgaacttccctttgccgagttatgacgaagacgtcaaagaaatggaaggccaatccaaggaagagtatattggatcattgagaagaaaaagtagtggattttctcgcggtgtatcaaaatacagaggcgttgcaaggcatcaccataatgggagatgggaagctagaattggaagggtgtttggtaataaatatctatatcttggaacatacgccacgcaagaagaagcagcaatcgcctacgacatcgcggcaatagagtaccgtggacttaacgccgttaccaatttcgacgtcagccgttatctaaaccctaacgccgccgcggataaagccgattccgattctaagcccattcgaagccctagtcgcgagcccgaatcgtcggatgataacaaatctccgaaatcagaggaagtaatcgaaccatctacatcgccggaagtgattccaactcgccggagcttccccgacgatatccagacgtattttgggtgtcaagattccggcaagttagcgactgaggaagacgtaatattcgattgtttcaattcttatataaatcctggcttctataacgagtttgattatggaccttaatcgtattttctacaagttttgttttgattatctacncaatacatcaaatattatttcttagtgatgatgataacattctatcttaaagctctcaaaaatttctt

SEQ ID NO: 106697 - protein, 308 aa, Arabidopsis thaliana
  peptide (1)..(308): Ceres Seq. ID no. 13620218
  misc_feature (50)..(118): Pfam Name: AP2 domain Pfam Description: AP2 domain
  misc_feature (1)..(308): Homolog of NCBI NO: 15219975 NR Description: ovule development protein, putative [Arabidopsis
  misc_feature (1)..(308): Homolog of NCBI NO: 34221733 NR Description: putative AP2 domain transcription factor
  misc_feature (1)..(180): Homolog of NCBI NO: 26449695 NR Description: unknown protein [Arabidopsis thaliana]
  misc_feature (1)..(248): Homolog of NCBI NO: 25518475 NR Description: hypothetical protein T24D18.16 - Arabidopsis >gi|6587812|gb|AAF18503.1|AC010924_16 Similar to gb|U44028 factor CKC from Arabidopsis thaliana and contains two PF|00847
  misc_feature (1)..(248): Homolog of NCBI NO: 18394319 NR Description: ovule development protein, putative [Arabidopsis >gi|15028185|gb|AAK76589.1| unknown protein [Arabidopsis >gi|22136940|gb|AAM91814.1| unknown protein [Arabidopsis
  misc_feature (48)..(258): Homolog of NCBI NO: 28201307 NR Description: putative ovule development protein antitegumenta
  misc_feature (1)..(250): Homolog of NCBI NO: 15223777 NR Description: ovule development protein, putative [Arabidopsis
  misc_feature (1)..(250): Homolog of NCBI NO: 25405447 NR Description: hypothetical protein F11M15.6 [imported] - thaliana >gi|4836931|gb|AAD30633.1|AC006085_6 Hypothetical
  misc_feature (48)..(233): Homolog of NCBI NO: 15237965 NR Description: ovule development protein, putative [Arabidopsis
  misc_feature (33)..(211): Homolog of NCBI NO: 20330778 NR Description: Putative ovule development protein antitegumenta
MAKVSGRSKKTIVDDEISDKTASASESASIALTSKRKRKSPPRNAPLQRSSPYRGVTRWTGRYEAHLWDKNSWNDTQTKKGRQGAYDEEEAAARAYDLAALKYWGRDTLLNFPLPSYDEDVKEMEGQSKEEYIGSLRRKSSGFSRGVSKYRGVARHHHNGRWEARIGRVFGNKYLYLGTYATQEEAAIAYDIAAIEYRGLNAVTNFDVSRYLNPNAAADKADSDSKPIRSPSREPESSDDNKSPKSEEVIEPSTSPEVIPTRRSFPDDIQTYFGCQDSGKLATEEDVIFDCFNSYINPGFYNEFDYGP

SEQ ID NO: 106698 - protein, 185 aa, Arabidopsis thaliana; identical to SEQ ID NO: 88970
  peptide (1)..(185): Ceres Seq. ID no. 13620219
  misc_feature (1)..(185): Homolog of NCBI NO: 15219975 NR Description: ovule development protein, putative [Arabidopsis
  misc_feature (1)..(185): Homolog of NCBI NO: 34221733 NR Description: putative AP2 domain transcription factor
  misc_feature (1)..(57): Homolog of NCBI NO: 26449695 NR Description: unknown protein [Arabidopsis thaliana]
  misc_feature (1)..(125): Homolog of NCBI NO: 25518475 NR Description: hypothetical protein T24D18.16 - Arabidopsis >gi|6587812|gb|AAF18503.1|AC010924_16 Similar to gb|U44028 factor CKC from Arabidopsis thaliana and contains two PF|00847
  misc_feature (1)..(125): Homolog of NCBI NO: 18394319 NR Description: ovule development protein, putative [Arabidopsis >gi|15028185|gb|AAK76589.1| unknown protein [Arabidopsis >gi|22136940|gb|AAM91814.1| unknown protein [Arabidopsis
  misc_feature (1)..(135): Homolog of NCBI NO: 28201307 NR Description: putative ovule development protein antitegumenta
  misc_feature (1)..(127): Homolog of NCBI NO: 15223777 NR Description: ovule development protein, putative [Arabidopsis
  misc_feature (1)..(127): Homolog of NCBI NO: 25405447 NR Description: hypothetical protein F11M15.6 [imported] - thaliana >gi|4836931|gb|AAD30633.1|AC006085_6 Hypothetical
  misc_feature (1)..(110): Homolog of NCBI NO: 15237965 NR Description: ovule development protein, putative [Arabidopsis
  misc_feature (1)..(88): Homolog of NCBI NO: 20330778 NR Description: Putative ovule development protein antitegumenta

SEQ ID NO: 106699 - DNA, 3146 bp, Arabidopsis thaliana
  misc_feature (1)..(3146): Ceres Seq. ID no. 13620220
  misc_feature: MA Experiment ID: 20000306 Result: Up-regulated in Transcription
  misc_feature: MA Experiment 20000306 PARAMETER Experiment Name: At_Germinating_Seeds_Sub_P Parameter: Age (hr) Value: 6 vs. 0
  misc_feature: MA Experiment 20000306 PARAMETER Experiment Name: At_Germinating_Seeds_Sub_P Parameter: Organism Value: A. thaliana
  misc_feature: MA Experiment 20000306 PARAMETER Experiment Name: At_Germinating_Seeds_Sub_P Parameter: Plant Line Value: WS
  misc_feature: MA Experiment 20000306 PARAMETER Experiment Name: At_Germinating_Seeds_Sub_P Parameter: Tissue Value: Germinating Seeds
  misc_feature: MA Experiment ID: 20000307 Result: Up-regulated in Transcription
  misc_feature: MA Experiment 20000307 PARAMETER Experiment Name: At_Germinating_Seeds_Sub_P Parameter: Age (hr) Value: 24 vs. 0
  misc_feature: MA Experiment 20000307 PARAMETER Experiment Name: At_Germinating_Seeds_Sub_P Parameter: Organism Value: A. thaliana
  misc_feature: MA Experiment 20000307 PARAMETER Experiment Name: At_Germinating_Seeds_Sub_P Parameter: Plant Line Value: WS
  misc_feature: MA Experiment 20000307 PARAMETER Experiment Name: At_Germinating_Seeds_Sub_P Parameter: Tissue Value: Germinating Seeds
gcactggaagtgggatcaccaccactgcgcttcttcttcttcgtcatctctgatcccccctgcgatcaggggccatttccgtcgataatccgatctccggttcagacattcgtttggacttgcaaagatgccactgagactcgaaatcaagcgtaagtttgctcaaagatcagaaagagtcaaatctgtagatctccatccaacagagccatggatcctggcaagtttgtattccggaactctgtgcatctggaattaccagacccagacaatggtaaaatctttcgacgtgactgaattgcctgttcggtcagcaaagttcattgcacggaagcagtgggttgtagctggagctgatgacatgtttattcgtgtctacaactacaacactatggataagatcaaagtatttgaggctcatgctgattacattcgctgtgttgctgttcatcccacgcttccctatgtcttatcatcatctgatgatatgctcatcaagctctgggactgggaaaagggttggctttgcactcaaattttcgaaggccattcccattatgttatgcaagtcactttcaaccccaaagacaccaatacttttgctagtgcatcccttgaccgtaccataaaaatatggaatcttggctctccggatccaaattttactttggatgcacatctcaaaggggtaaactgtgtagactactttactggtggggataaaccatacctaatcactggttctgatgatcatactgctaaggtgtgggattaccaaacaaagagttgcgttcagactctcgaaggtcatacacacaatgtttctgcagtatcttttcatccagagctacctataattattacaggatccgaggatggaactgttcgcatatggcacgccaccacttacaggcttgagaatacattgaactatggccttgagagggtttgggctattggacacattaaaggttcacgccgggttgtaattggttatgacgaaggatccataatggtgaaacttggccgtgaaataccagtggctagtatggataacagcggaaaaattatttgggctaaacacaatgagatacatactgtaaacatcaagagtgtgggcgcagatgaggtcactgatggtgagagacttcctttggccgttaaagagctagggacctgcgatctttatcctcaaagcttgaagcacaaccctaatggtaggtttgtggtagtttgtggagatggtgagtatattatctacactgccttggcgtggcgaaataggtcatttggctctgcgctagaatttgtttggtcatctgatggggagcatgctgtcagggaaagctcgacaaagatcaagatcttcagcaagaatttccaggaaaagaagactgtgagacccaccttctcagcagagcacatttttggtgggacgttattgacaatgtgctcaagtgattttatatgcttctatgattgggcggaatgtaggttgattaggcgaatagatgttactgtcaaaaatctttattgggcggacagtggtgatctagttgcaattgccagtgatacatcattctacatccttaagttcaatcgtgacattgtttcctcttattttgatggcggtaaacaaattgatgaggaaggcattgaggacgcatttgagcttctcaatgaaaccaatgaacgtgttcggactggcttatgggttggggattgttttatctataccaactcttcttggaggcttaattactgtgttggtggtgaggtaactacaatgtatcatctggaccgtcctatgtacttgttgggttatctcgctaatcaaagcagggtttatttgattgacaaagagttcaatgttattggatacactttacttttaagtttgattgagtacaagactcttgtgatgcgtggagatttggaacaggctaatgaagtcttaccttcaattcctaaggagcaccataatagcgtggcacactttttggagtcacgtggcatgacagaagatgctctagaagtagcaactgatcctgactacagatttgagttggccatacagctcggtagattggctgtcgcaaaggacattgctgtagaggcacaaaatgaatctaaatggaagcaacttggagaattagctatgtcaagtgggaagctggatatggctgaggaatgcatgaggcatgctatggatttgagtggtctgctgctgctttattcttcattgggagatgcagatggaatgatgaagctggcagcacttgcaaaagagcaaggaaagaacaatgtcgcttttctttgcttgttcatgttgggtcaagtagaagactgcctgcatctgttggtggaaagtaatcgaatacctgaagccgctctgatggcgagatcgtaccttccaagcaaggtctccgaaatagtggcattgtggagaaacgatttgaccaagataagtccaaaggctgctgaatctctggctgatcccgaagagtatcccaatctctttgaggagtggcaagtcgccctgtcccttgaaaatagagctgcagagacgaggggcgtccatcctcctgctggggattattgtagtcatgcagacagagatcatacaactttagtggatgcttttagaattatgcaaatagaggaagagggtcgacttgagcaaggggatgttctcgacgaggttggggaagagggggaagatggagaggaagaggaggaggaggatcgtcaggaagagagtagtgatgggagacagcagaatgtggaagaagaggctgttgtggtggacgctgactctacggatggtgctgtgctagttaatggtaacgagtctgaagaacagtgggttctaacaccgccacaagagtagggttggtgaagagtgaagacatacacagatagatattttcttggctttgaaacttgatacattcagcagagaaatgaggcagcacagagagagattagtttccattgttaaaaaaactgatctattgatagcttccgctttgtgcttttaatacagatacatattaaaaaaaaagggggttttgggactcttatgtagctttaacttatgagagatttcacctgtagaatatctgttttgaactgagatttcaccc

SEQ ID NO: 106700 - protein, 920 aa, Arabidopsis thaliana; identical to SEQ ID NO: 105909
  peptide (1)..(920): Ceres Seq. ID no. 13620221
  misc_feature (319)..(778): Pfam Name: Coatomer WD associated region Pfam Description: Coatomer WD associated region
  misc_feature (1)..(824): Homolog of NCBI NO: 4758032 NR Description: coatomer protein complex, subunit beta 2 (beta
  misc_feature (1)..(824): Homolog of NCBI NO: 486784 NR Description: Golgi-associated particle 102K chain - human
  misc_feature (1)..(824): Homolog of NCBI NO: 27805865 NR Description: coatomer protein complex, subunit beta 2 (beta
  misc_feature (1)..(824): Homolog of NCBI NO: 27697187 NR Description: Similar to coatomer protein complex, subunit beta
  misc_feature (2)..(798): Homolog of NCBI NO: 31228182 NR Description: ENSANGP00000010744 [Anopheles gambiae]
  misc_feature (1)..(821): Homolog of NCBI NO: 24584107 NR Description: beta'-coatomer protein CG6699-PA [Drosophila
  misc_feature (1)..(821): Homolog of NCBI NO: 3204159 NR Description: coatomer, beta-prime subunit [Drosophila
  misc_feature (1)..(821): Homolog of NCBI NO: 17540286 NR Description: Coatomer (111.1 kD) [Caenorhabditis elegans]
  misc_feature (1)..(821): Homolog of NCBI NO: 3287963 NR Description: PROBABLE COATOMER BETA' SUBUNIT (BETA'-COAT
  misc_feature (1)..(871): Homolog of NCBI NO: 32414251 NR Description: hypothetical protein [Neurospora crassa]

SEQ ID NO: 106701 - protein, 872 aa, Arabidopsis thaliana; identical to SEQ ID NO: 105910
  peptide (1)..(872): Ceres Seq. ID no. 13620222
  misc_feature (271)..(730): Pfam Name: Coatomer WD associated region Pfam Description: Coatomer WD associated region
  misc_feature (1)..(776): Homolog of NCBI NO: 4758032 NR Description: coatomer protein complex, subunit beta 2 (beta
  misc_feature (1)..(776): Homolog of NCBI NO: 486784 NR Description: Golgi-associated particle 102K chain - human
  misc_feature (1)..(776): Homolog of NCBI NO: 27805865 NR Description: coatomer protein complex, subunit beta 2 (beta
  misc_feature (1)..(776): Homolog of NCBI NO: 27697187 NR Description: Similar to coatomer protein complex, subunit beta
  misc_feature (1)..(750): Homolog of NCBI NO: 31228182 NR Description: ENSANGP00000010744 [Anopheles gambiae]
  misc_feature (1)..(773): Homolog of NCBI NO: 24584107 NR Description: beta'-coatomer protein CG6699-PA [Drosophila
  misc_feature (1)..(773): Homolog of NCBI NO: 3204159 NR Description: coatomer, beta-prime subunit [Drosophila
  misc_feature (1)..(773): Homolog of NCBI NO: 17540286 NR Description: Coatomer (111.1 kD) [Caenorhabditis elegans]
  misc_feature (1)..(773): Homolog of NCBI NO: 3287963 NR Description: PROBABLE COATOMER BETA' SUBUNIT (BETA'-COAT
  misc_feature (1)..(823): Homolog of NCBI NO: 32414251 NR Description: hypothetical protein [Neurospora crassa]

SEQ ID NO: 106702 - protein, 842 aa, Arabidopsis thaliana; identical to SEQ ID NO: 105911
  peptide (1)..(842): Ceres Seq. ID no. 13620223
  misc_feature (241)..(700): Pfam Name: Coatomer WD associated region Pfam Description: Coatomer WD associated region
  misc_feature (1)..(746): Homolog of NCBI NO: 4758032 NR Description: coatomer protein complex, subunit beta 2 (beta
  misc_feature (1)..(746): Homolog of NCBI NO: 486784 NR Description: Golgi-associated particle 102K chain - human
  misc_feature (1)..(746): Homolog of NCBI NO: 27805865 NR Description: coatomer protein complex, subunit beta 2 (beta
  misc_feature (1)..(746): Homolog of NCBI NO: 27697187 NR Description: Similar to coatomer protein complex, subunit beta
  misc_feature (1)..(720): Homolog of NCBI NO: 31228182 NR Description: ENSANGP00000010744 [Anopheles gambiae]
  misc_feature (1)..(743): Homolog of NCBI NO: 24584107 NR Description: beta'-coatomer protein CG6699-PA [Drosophila
  misc_feature (1)..(743): Homolog of NCBI NO: 3204159 NR Description: coatomer, beta-prime subunit [Drosophila
  misc_feature (1)..(743): Homolog of NCBI NO: 17540286 NR Description: Coatomer (111.1 kD) [Caenorhabditis elegans]
  misc_feature (1)..(743): Homolog of NCBI NO: 3287963 NR Description: PROBABLE COATOMER BETA' SUBUNIT (BETA'-COAT
  misc_feature (1)..(793): Homolog of NCBI NO: 32414251 NR Description: hypothetical protein [Neurospora crassa]

SEQ ID NO: 106703 - DNA, 1587 bp, Arabidopsis thaliana
  misc_feature (1)..(1587): Ceres Seq. ID no. 13620224
  misc_feature: MA Experiment ID: 20000180 Result: Up-regulated in Transcription
  misc_feature: MA Experiment 20000180 PARAMETER Experiment Name: At_Germinating_Seeds_P Parameter: Age (hr) Value: 24 vs. 0
  misc_feature: MA Experiment 20000180 PARAMETER Experiment Name: At_Germinating_Seeds_P Parameter: Tissue Value: Germinating Seeds
  misc_feature: MA Experiment ID: 20000184 Result: Up-regulated in Transcription
  misc_feature: MA Experiment 20000184 PARAMETER Experiment Name: At_Shoots__P Parameter: Age (day) Value: 7
  misc_feature: MA Experiment 20000184 PARAMETER Experiment Name: At_Shoots__P Parameter: Tissue Value: Shoots vs. Whole Plant
  misc_feature: MA Experiment ID: 20000437 Result: Down-regulated in Transcription
  misc_feature: MA Experiment 20000437 PARAMETER Experiment Name: At_Drought_P Parameter: Age (day) Value: 8
  misc_feature: MA Experiment 20000437 PARAMETER Experiment Name: At_Drought_P Parameter: Organism Value: A. thaliana
  misc_feature: MA Experiment 20000437 PARAMETER Experiment Name: At_Drought_P Parameter: Plant Line Value: WS
  misc_feature: MA Experiment 20000437 PARAMETER Experiment Name: At_Drought_P Parameter: Timepoint (hr) Value: 24
  misc_feature: MA Experiment 20000437 PARAMETER Experiment Name: At_Drought_P Parameter: Tissue Value: Whole Plant
  misc_feature: MA Experiment 20000437 PARAMETER Experiment Name: At_Drought_P Parameter: Treatment Value: Drought vs. No Drought
  misc_feature: MA Experiment ID: 20000438 Result: Up-regulated in Transcription
  misc_feature: MA Experiment 20000438 PARAMETER Experiment Name: At_Shoots__P Parameter: Age (day) Value: 14
  misc_feature: MA Experiment 20000438 PARAMETER Experiment Name: At_Shoots__P Parameter: Tissue Value: Shoots vs. Whole Plant
  misc_feature: MA Experiment ID: 20000495 Result: Up-regulated in Transcription
  misc_feature: MA Experiment 20000495 PARAMETER Experiment Name: At_Guard_Cells_P Parameter: Harvest Date Value: 8/2/2002
  misc_feature: MA Experiment 20000495 PARAMETER Experiment Name: At_Guard_Cells_P Parameter: Organism Value: A. thaliana
  misc_feature: MA Experiment 20000495 PARAMETER Experiment Name: At_Guard_Cells_P Parameter: Tissue Value: Guard Cells vs. Leaves
  misc_feature: MA Experiment ID: 20000573 Result: Up-regulated in Transcription
  misc_feature: MA Experiment 20000573 PARAMETER Experiment Name: At_100uM_ABA_Mutants__P Parameter: Organism Value: A. thaliana
  misc_feature: MA Experiment 20000573 PARAMETER Experiment Name: At_100uM_ABA_Mutants__P Parameter: Plant Line Value: CS22 vs. Ler wt
  misc_feature: MA Experiment 20000573 PARAMETER Experiment Name: At_100uM_ABA_Mutants__P Parameter: Timepoint (hr) Value: N/A
  misc_feature: MA Experiment 20000573 PARAMETER Experiment Name: At_100uM_ABA_Mutants__P Parameter: Tissue Value: Whole Plant
  misc_feature: MA Experiment 20000573 PARAMETER Experiment Name: At_100uM_ABA_Mutants__P Parameter: Treatment Value: None
gcattcacacaacaacaacaactaagaaatggcacgatatgaattcttccgccaaatattcattgtcttgtctatagtttctccgttggtcagatctttcactgtgatcacctccgactcgacggccccatctgctctgatcgacggcccacaaactggattcacgatgaccaatgacggcgctcgcacggagcctgacgagcaagacgccgtctacgacattatgcgtgcgaccggcaacgactgggctgccgcgattccagacgtttgccgagggagatggcacgggatcgagtgtatgccggaccaggataacgtctaccacgtggtctctctgtcgttcggagcgctctcagacgacacggcgtttccgacttgtgatccacaacgctcttacgtctctgagtccctcacgaggctcaaacacctcaaagccttgttcttctaccgatgtttaggccgcgccccacagcgcataccggcgtttctgggacgcctcggctcgagtctgcaaacgctggttctgagggagaatggttttttgggacctatccctgacgaattgggcaatctcaccaatttgaaagttcttgatttgcataaaaatcacctcaacggctccattcccttgtcgttcaaccggttctccggtttaagatcgcttgatttgagtggtaaccggttgactggttccattcccggttttgttcttccggcgctgagcgttctggatttgaaccagaatcttttaaccggaccggttccacccacactcacaagctgtggatcgttgatcaaaatcgatcttagccgaaacagagtcactggtcctatcccagaatcgattaaccggctcaaccaattagtgcttttggatttgagctataaccggttatcaggtccattcccgtcttctctccaaggcctaaactctcttcaagctttaatgctcaaaggcaacacaaaattctcaacaacgattcctgaaaacgcgttcaaagggctcaagaacttgatgattcttgttctctcgaatacgaacatccagggctcgataccgaaatcattgactcggttaaacagtcttcgggtccttcacctagagggcaataatctgaccggagagattcctttggagttccgggacgtgaagcatctaagcgagctgaggctcaacgataacagtctgacaggaccagtaccgttcgagagagacacagtgtggaggatgaggagaaagctgaggctgtataacaatgctggtttgtgtgttaaccgggacagtgacttggatgatgcattcggttcaaaatctggttcaactgtaagattgtgtgatgcagaaacgtcgagaccagctccttccggtacggtccagcacctatctagagaagaagacggtgctttgccggacggagctacggacgtgtcaagcacttccaagtctttggggttctcctatctttctgcattctttcttgtattccctaatttcatttttatgctaatatctagttagaggagggatgataaaactgctgtaaatacttcccgagtttaataatgttagttagatgccttttctcc

SEQ ID NO: 106704 - protein, 496 aa, Arabidopsis thaliana
  peptide (1)..(496): Ceres Seq. ID no. 13620225
  misc_feature (302)..(327): Pfam Name: Leucine Rich Repeat Pfam Description: Leucine Rich Repeat
  misc_feature (1)..(496): Homolog of NCBI NO: 15220050 NR Description: leucine rich repeat protein family [Arabidopsis >gi|22096215|sp|Q9SSD1|TMM_ARATH TOO MANY MOUTHS protein
  misc_feature (1)..(496): Homolog of NCBI NO: 26452151 NR Description: GPI-anchored protein [Arabidopsis thaliana]
  misc_feature (12)..(475): Homolog of NCBI NO: 34912808 NR Description: P0501G01.13 [Oryza sativa (japonica
  misc_feature (52)..(459): Homolog of NCBI NO: 15228004 NR Description: leucine rich repeat protein family [Arabidopsis
  misc_feature (46)..(418): Homolog of NCBI NO: 18409119 NR Description: leucine rich repeat protein family [Arabidopsis
  misc_feature (52)..(433): Homolog of NCBI NO: 34894182 NR Description: P0439B06.12 [Oryza sativa (japonica
  misc_feature (48)..(414): Homolog of NCBI NO: 15230865 NR Description: leucine rich repeat protein family [Arabidopsis
  misc_feature (55)..(420): Homolog of NCBI NO: 7487680 NR Description: hypothetical protein T5F17.10 - Arabidopsis
  misc_feature (55)..(420): Homolog of NCBI NO: 15236148 NR Description: leucine rich repeat protein family (fragment)
  misc_feature (55)..(414): Homolog of NCBI NO: 11994758 NR Description: contains similarity to elicitor-inducible
MARYEFFRQIFIVLSIVSPLVRSFTVITSDSTAPSALIDGPQTGFTMTNDGARTEPDEQDAVYDIMRATGNDWAAAIPDVCRGRWHGIECMPDQDNVYHVVSLSFGALSDDTAFPTCDPQRSYVSESLTRLKHLKALFFYRCLGRAPQRIPAFLGRLGSSLQTLVLRENGFLGPIPDELGNLTNLKVLDLHKNHLNGSIPLSFNRFSGLRSLDLSGNRLTGSIPGFVLPALSVLDLNQNLLTGPVPPTLTSCGSLIKIDLSRNRVTGPIPESINRLNQLVLLDLSYNRLSGPFPSSLQGLNSLQALMLKGNTKFSTTIPENAFKGLKNLMILVLSNTNIQGSIPKSLTRLNSLRVLHLEGNNLTGEIPLEFRDVKHLSELRLNDNSLTGPVPFERDTVWRMRRKLRLYNNAGLCVNRDSDLDDAFGSKSGSTVRLCDAETSRPAPSGTVQHLSREEDGALPDGATDVSSTSKSLGFSYLSAFFLVFPNFIFMLISS

SEQ ID NO: 106705 - protein, 450 aa, Arabidopsis thaliana
  peptide (1)..(450): Ceres Seq. ID no. 13620226
  misc_feature (256)..(281): Pfam Name: Leucine Rich Repeat Pfam Description: Leucine Rich Repeat
  misc_feature (1)..(450): Homolog of NCBI NO: 15220050 NR Description: leucine rich repeat protein family [Arabidopsis >gi|22096215|sp|Q9SSD1|TMM_ARATH TOO MANY MOUTHS protein
  misc_feature (1)..(450): Homolog of NCBI NO: 26452151 NR Description: GPI-anchored protein [Arabidopsis thaliana]
  misc_feature (1)..(429): Homolog of NCBI NO: 34912808 NR Description: P0501G01.13 [Oryza sativa (japonica
  misc_feature (6)..(413): Homolog of NCBI NO: 15228004 NR Description: leucine rich repeat protein family [Arabidopsis
  misc_feature (1)..(372): Homolog of NCBI NO: 18409119 NR Description: leucine rich repeat protein family [Arabidopsis
  misc_feature (6)..(387): Homolog of NCBI NO: 34894182 NR Description: P0439B06.12 [Oryza sativa (japonica
  misc_feature (2)..(368): Homolog of NCBI NO: 15230865 NR Description: leucine rich repeat protein family [Arabidopsis
  misc_feature (9)..(374): Homolog of NCBI NO: 7487680 NR Description: hypothetical protein T5F17.10 - Arabidopsis
  misc_feature (9)..(374): Homolog of NCBI NO: 15236148 NR Description: leucine rich repeat protein family (fragment)
  misc_feature (9)..(368): Homolog of NCBI NO: 11994758 NR Description: contains similarity to elicitor-inducible
MTNDGARTEPDEQDAVYDIMRATGNDWAAAIPDVCRGRWHGIECMPDQDNVYHVVSLSFGALSDDTAFPTCDPQRSYVSESLTRLKHLKALFFYRCLGRAPQRIPAFLGRLGSSLQTLVLRENGFLGPIPDELGNLTNLKVLDLHKNHLNGSIPLSFNRFSGLRSLDLSGNRLTGSIPGFVLPALSVLDLNQNLLTGPVPPTLTSCGSLIKIDLSRNRVTGPIPESINRLNQLVLLDLSYNRLSGPFPSSLQGLNSLQALMLKGNTKFSTTIPENAFKGLKNLMILVLSNTNIQGSIPKSLTRLNSLRVLHLEGNNLTGEIPLEFRDVKHLSELRLNDNSLTGPVPFERDTVWRMRRKLRLYNNAGLCVNRDSDLDDAFGSKSGSTVRLCDAETSRPAPSGTVQHLSREEDGALPDGATDVSSTSKSLGFSYLSAFFLVFPNFIFMLISS

SEQ ID NO: 106706 - protein, 431 aa, Arabidopsis thaliana
  peptide (1)..(431): Ceres Seq. ID no. 13620227
  misc_feature (237)..(262): Pfam Name: Leucine Rich Repeat Pfam Description: Leucine Rich Repeat
  misc_feature (1)..(431): Homolog of NCBI NO: 15220050 NR Description: leucine rich repeat protein family [Arabidopsis >gi|22096215|sp|Q9SSD1|TMM_ARATH TOO MANY MOUTHS protein
  misc_feature (1)..(431): Homolog of NCBI NO: 26452151 NR Description: GPI-anchored protein [Arabidopsis thaliana]
  misc_feature (1)..(410): Homolog of NCBI NO: 34912808 NR Description: P0501G01.13 [Oryza sativa (japonica
  misc_feature (1)..(394): Homolog of NCBI NO: 15228004 NR Description: leucine rich repeat protein family [Arabidopsis
  misc_feature (1)..(353): Homolog of NCBI NO: 18409119 NR Description: leucine rich repeat protein family [Arabidopsis
  misc_feature (1)..(368): Homolog of NCBI NO: 34894182 NR Description: P0439B06.12 [Oryza sativa (japonica
  misc_feature (1)..(349): Homolog of NCBI NO: 15230865 NR Description: leucine rich repeat protein family [Arabidopsis
  misc_feature (1)..(355): Homolog of NCBI NO: 7487680 NR Description: hypothetical protein T5F17.10 - Arabidopsis
  misc_feature (1)..(355): Homolog of NCBI NO: 15236148 NR Description: leucine rich repeat protein family (fragment)
  misc_feature (1)..(349): Homolog of NCBI NO: 11994758 NR Description: contains similarity to elicitor-inducible
MRATGNDWAAAIPDVCRGRWHGIECMPDQDNVYHVVSLSFGALSDDTAFPTCDPQRSYVSESLTRLKHLKALFFYRCLGRAPQRIPAFLGRLGSSLQTLVLRENGFLGPIPDELGNLTNLKVLDLHKNHLNGSIPLSFNRFSGLRSLDLSGNRLTGSIPGFVLPALSVLDLNQNLLTGPVPPTLTSCGSLIKIDLSRNRVTGPIPESINRLNQLVLLDLSYNRLSGPFPSSLQGLNSLQALMLKGNTKFSTTIPENAFKGLKNLMILVLSNTNIQGSIPKSLTRLNSLRVLHLEGNNLTGEIPLEFRDVKHLSELRLNDNSLTGPVPFERDTVWRMRRKLRLYNNAGLCVNRDSDLDDAFGSKSGSTVRLCDAETSRPAPSGTVQHLSREEDGALPDGATDVSSTSKSLGFSYLSAFFLVFPNFIFMLISS

SEQ ID NO: 106707 - DNA, 945 bp, Arabidopsis thaliana
  misc_feature (1)..(945): Ceres Seq. ID no. 13620228
  misc_feature: MA Experiment ID: 20000182 Result: Up-regulated in Transcription
  misc_feature: MA Experiment 20000182 PARAMETER Experiment Name: At_2mM_SA_P Parameter: Age (day) Value: 14
  misc_feature: MA Experiment 20000182 PARAMETER Experiment Name: At_2mM_SA_P Parameter: Organism Value: A. thaliana
  misc_feature: MA Experiment 20000182 PARAMETER Experiment Name: At_2mM_SA_P Parameter: Plant Line Value: WS
  misc_feature: MA Experiment 20000182 PARAMETER Experiment Name: At_2mM_SA_P Parameter: Timepoint (hr) Value: 6
  misc_feature: MA Experiment 20000182 PARAMETER Experiment Name: At_2mM_SA_P Parameter: Tissue Value: Aerial
  misc_feature: MA Experiment 20000182 PARAMETER Experiment Name: At_2mM_SA_P Parameter: Treatment Value: 2mM SA vs. No Treatment
  misc_feature: MA Experiment ID: 20000184 Result: Down-regulated in Transcription
  misc_feature: MA Experiment 20000184 PARAMETER Experiment Name: At_Shoots__P Parameter: Age (day) Value: 7
  misc_feature: MA Experiment 20000184 PARAMETER Experiment Name: At_Shoots__P Parameter: Tissue Value: Shoots vs. Whole Plant
  misc_feature: MA Experiment ID: 20000185 Result: Down-regulated in Transcription
  misc_feature: MA Experiment 20000185 PARAMETER Experiment Name: At_Roots__P Parameter: Age (day) Value: 7 vs. 21
  misc_feature: MA Experiment 20000185 PARAMETER Experiment Name: At_Roots__P Parameter: Organism Value: A. thaliana
  misc_feature: MA Experiment 20000185 PARAMETER Experiment Name: At_Roots__P Parameter: Tissue Value: Roots vs. Whole Plant
  misc_feature: MA Experiment ID: 20000211 Result: Up-regulated in Transcription
  misc_feature: MA Experiment 20000211 PARAMETER Experiment Name: At_0.001percent_MeJA__P Parameter: Age (day) Value: 14
  misc_feature: MA Experiment 20000211 PARAMETER Experiment Name: At_0.001percent_MeJA__P Parameter: Organism Value: A. thaliana
  misc_feature: MA Experiment 20000211 PARAMETER Experiment Name: At_0.001percent_MeJA__P Parameter: Plant Line Value: WS
  misc_feature: MA Experiment 20000211 PARAMETER Experiment Name: At_0.001percent_MeJA__P Parameter: Timepoint (hr) Value: 1
  misc_feature: MA Experiment 20000211 PARAMETER Experiment Name: At_0.001percent_MeJA__P Parameter: Tissue Value: Aerial
  misc_feature: MA Experiment 20000211 PARAMETER Experiment Name: At_0.001percent_MeJA__P Parameter: Treatment Value: 0.001percent MeJA vs. No Treatment
  misc_feature: MA Experiment ID: 20000234 Result: Down-regulated in Transcription
  misc_feature: MA Experiment 20000234 PARAMETER Experiment Name: At_Siliques_P Parameter: Age (day) Value: 21
  misc_feature: MA Experiment 20000234 PARAMETER Experiment Name: At_Siliques_P Parameter: Organism Value: A. thaliana
  misc_feature: MA Experiment 20000234 PARAMETER Experiment Name: At_Siliques_P Parameter: Plant Line Value: WS
  misc_feature: MA Experiment 20000234 PARAMETER Experiment Name: At_Siliques_P Parameter: Tissue Value: Less Than 5mm Siliques vs. Whole Plant
  misc_feature: MA Experiment ID: 20000235 Result: Down-regulated in Transcription
  misc_feature: MA Experiment 20000235 PARAMETER Experiment Name: At_Siliques_P Parameter: Age (day) Value: 21
  misc_feature: MA Experiment 20000235 PARAMETER Experiment Name: At_Siliques_P Parameter: Organism Value: A. thaliana
  misc_feature: MA Experiment 20000235 PARAMETER Experiment Name: At_Siliques_P Parameter: Plant Line Value: WS
  misc_feature: MA Experiment 20000235 PARAMETER Experiment Name: At_Siliques_P Parameter: Tissue Value: 5-10mm Siliques vs. Whole Plant
  misc_feature: MA Experiment ID: 20000264 Result: Down-regulated in Transcription
  misc_feature: MA Experiment 20000264 PARAMETER Experiment Name: At_Open_Flower_P Parameter: Age (day) Value: 21
  misc_feature: MA Experiment 20000264 PARAMETER Experiment Name: At_Open_Flower_P Parameter: Plant Line Value: WS
  misc_feature: MA Experiment 20000264 PARAMETER Experiment Name: At_Open_Flower_P Parameter: Tissue Value: Open Flower vs. Whole Plant
  misc_feature: MA Experiment ID: 20000265 Result: Down-regulated in Transcription
  misc_feature: MA Experiment 20000265 PARAMETER Experiment Name: At_Open_Flower_P Parameter: Age (day) Value: 21
  misc_feature: MA Experiment 20000265 PARAMETER Experiment Name: At_Open_Flower_P Parameter: Plant Line Value: WS
  misc_feature: MA Experiment 20000265 PARAMETER Experiment Name: At_Open_Flower_P Parameter: Tissue Value: Closed Flower vs. Whole Plant
  misc_feature: MA Experiment ID: 20000267 Result: Up-regulated in Transcription
  misc_feature: MA Experiment 20000267 PARAMETER Experiment Name: At_Drought_P Parameter: Age (day) Value: 7
  misc_feature: MA Experiment 20000267 PARAMETER Experiment Name: At_Drought_P Parameter: Organism Value: A. thaliana
  misc_feature: MA Experiment 20000267 PARAMETER Experiment Name: At_Drought_P Parameter: Plant Line Value: WS
  misc_feature: MA Experiment 20000267 PARAMETER Experiment Name: At_Drought_P Parameter: Timepoint (hr) Value: 6
  misc_feature: MA Experiment 20000267 PARAMETER Experiment Name: At_Drought_P Parameter: Tissue Value: Whole Plant
  misc_feature: MA Experiment 20000267 PARAMETER Experiment Name: At_Drought_P Parameter: Treatment Value: Drought vs. No Drought
  misc_feature: MA Experiment ID: 20000436 Result: Up-regulated in Transcription
  misc_feature: MA Experiment 20000436 PARAMETER Experiment Name: At_Drought_P Parameter: Age (day) Value: 7
  misc_feature: MA Experiment 20000436 PARAMETER Experiment Name: At_Drought_P Parameter: Organism Value: A. thaliana
  misc_feature: MA Experiment 20000436 PARAMETER Experiment Name: At_Drought_P Parameter: Plant Line Value: WS
  misc_feature: MA Experiment 20000436 PARAMETER Experiment Name: At_Drought_P Parameter: Timepoint (hr) Value: 12
  misc_feature: MA Experiment 20000436 PARAMETER Experiment Name: At_Drought_P Parameter: Tissue Value: Whole Plant
  misc_feature: MA Experiment 20000436 PARAMETER Experiment Name: At_Drought_P Parameter: Treatment Value: Drought vs. No Drought
  misc_feature: MA Experiment ID: 20000437 Result: Up-regulated in Transcription
  misc_feature: MA Experiment 20000437 PARAMETER Experiment Name: At_Drought_P Parameter: Age (day) Value: 8
  misc_feature: MA Experiment 20000437 PARAMETER Experiment Name: At_Drought_P Parameter: Organism Value: A. thaliana
  misc_feature: MA Experiment 20000437 PARAMETER Experiment Name: At_Drought_P Parameter: Plant Line Value: WS
  misc_feature: MA Experiment 20000437 PARAMETER Experiment Name: At_Drought_P Parameter: Timepoint (hr) Value: 24
  misc_feature: MA Experiment 20000437 PARAMETER Experiment Name: At_Drought_P Parameter: Tissue Value: Whole Plant
  misc_feature: MA Experiment 20000437 PARAMETER Experiment Name: At_Drought_P Parameter: Treatment Value: Drought vs. No Drought
  misc_feature: MA Experiment ID: 20000438 Result: Down-regulated in Transcription
  misc_feature: MA Experiment 20000438 PARAMETER Experiment Name: At_Shoots__P Parameter: Age (day) Value: 14
  misc_feature: MA Experiment 20000438 PARAMETER Experiment Name: At_Shoots__P Parameter: Tissue Value: Shoots vs. Whole Plant
  misc_feature: MA Experiment ID: 20000439 Result: Down-regulated in Transcription
  misc_feature: MA Experiment 20000439 PARAMETER Experiment Name: At_Roots__P Parameter: Age (day) Value: 14 vs. 21
  misc_feature: MA Experiment 20000439 PARAMETER Experiment Name: At_Roots__P Parameter: Organism Value: A. thaliana
  misc_feature: MA Experiment 20000439 PARAMETER Experiment Name: At_Roots__P Parameter: Tissue Value: Roots vs. Whole Plant
  misc_feature: MA Experiment ID: 20000453 Result: Up-regulated in Transcription
  misc_feature: MA Experiment 20000453 PARAMETER Experiment Name: At_100uM_ABA_P Parameter: Age (day) Value: 15
  misc_feature: MA Experiment 20000453 PARAMETER Experiment Name: At_100uM_ABA_P Parameter: Organism Value: A. thaliana
  misc_feature: MA Experiment 20000453 PARAMETER Experiment Name: At_100uM_ABA_P Parameter: Plant Line Value: WS
  misc_feature: MA Experiment 20000453 PARAMETER Experiment Name: At_100uM_ABA_P Parameter: Timepoint (hr) Value: 24
  misc_feature: MA Experiment 20000453 PARAMETER Experiment Name: At_100uM_ABA_P Parameter: Tissue Value: Aerial
  misc_feature: MA Experiment 20000453 PARAMETER Experiment Name: At_100uM_ABA_P Parameter: Treatment Value: 100uM ABA vs. No Treatment
  misc_feature: MA Experiment ID: 20000496 Result: Down-regulated in Transcription
  misc_feature: MA Experiment 20000496 PARAMETER Experiment Name: At_Guard_Cells_P Parameter: Harvest Date Value: 7/19/2002
  misc_feature: MA Experiment 20000496 PARAMETER Experiment Name: At_Guard_Cells_P Parameter: Organism Value: Canola
  misc_feature: MA Experiment 20000496 PARAMETER Experiment Name: At_Guard_Cells_P Parameter: Tissue Value: Guard Cells vs. Leaves
  misc_feature: MA Experiment ID: 20000527 Result: Down-regulated in Transcription
  misc_feature: MA Experiment 20000527 PARAMETER Experiment Name: At_10percent_PEG_P Parameter: Age (day) Value: 20
  misc_feature: MA Experiment 20000527 PARAMETER Experiment Name: At_10percent_PEG_P Parameter: Organism Value: A. thaliana
  misc_feature: MA Experiment 20000527 PARAMETER Experiment Name: At_10percent_PEG_P Parameter: Plant Line Value: WS
  misc_feature: MA Experiment 20000527 PARAMETER Experiment Name: At_10percent_PEG_P Parameter: Timepoint (day) Value: 20
  misc_feature: MA Experiment 20000527 PARAMETER Experiment Name: At_10percent_PEG_P Parameter: Tissue Value: Whole Plant
  misc_feature: MA Experiment 20000527 PARAMETER Experiment Name: At_10percent_PEG_P Parameter: Treatment Value: 10percent PEG vs. No Treatment
  misc_feature: MA Experiment ID: 20001450 Result: Up-regulated in Transcription
  misc_feature: MA Experiment 20001450 PARAMETER Experiment Name: At_Far-red-induction_P Parameter: Age (day) Value: 7
  misc_feature: MA Experiment 20001450 PARAMETER Experiment Name: At_Far-red-induction_P Parameter: Light Value: Far-red vs. White
  misc_feature: MA Experiment 20001450 PARAMETER Experiment Name: At_Far-red-induction_P Parameter: Organism Value: A. thaliana
  misc_feature: MA Experiment 20001450 PARAMETER Experiment Name: At_Far-red-induction_P Parameter: Plant Line Value: Columbia
  misc_feature: MA Experiment 20001450 PARAMETER Experiment Name: At_Far-red-induction_P Parameter: Timepoint (hr) Value: 8
  misc_feature: MA Experiment 20001450 PARAMETER Experiment Name: At_Far-red-induction_P Parameter: Tissue Value: Whole Plant
  misc_feature: MA Experiment ID: 20001451 Result: Up-regulated in Transcription
  misc_feature: MA Experiment 20001451 PARAMETER Experiment Name: At_Far-red-induction_P Parameter: Age (day) Value: 7
  misc_feature: MA Experiment 20001451 PARAMETER Experiment Name: At_Far-red-induction_P Parameter: Light Value: Far-red vs. White
  misc_feature: MA Experiment 20001451 PARAMETER Experiment Name: At_Far-red-induction_P Parameter: Organism Value: A. thaliana
  misc_feature: MA Experiment 20001451 PARAMETER Experiment Name: At_Far-red-induction_P Parameter: Plant Line Value: Columbia
  misc_feature: MA Experiment 20001451 PARAMETER Experiment Name: At_Far-red-induction_P Parameter: Timepoint (hr) Value: 24
  misc_feature: MA Experiment 20001451 PARAMETER Experiment Name: At_Far-red-induction_P Parameter: Tissue Value: Whole Plant
  misc_feature: MA Experiment ID: 20001504 Result: Up-regulated in Transcription
  misc_feature: MA Experiment 20001504 PARAMETER Experiment Name: At_Far-red-enriched_P Parameter: Age (day) Value: 10
  misc_feature: MA Experiment 20001504 PARAMETER Experiment Name: At_Far-red-enriched_P Parameter: Light Value: Far-red enriched vs. White
  misc_feature: MA Experiment 20001504 PARAMETER Experiment Name: At_Far-red-enriched_P Parameter: Organism Value: A. thaliana
  misc_feature: MA Experiment 20001504 PARAMETER Experiment Name: At_Far-red-enriched_P Parameter: Plant Line Value: Columbia
  misc_feature: MA Experiment 20001504 PARAMETER Experiment Name: At_Far-red-enriched_P Parameter: Timepoint (day) Value: 6
  misc_feature: MA Experiment 20001504 PARAMETER Experiment Name: At_Far-red-enriched_P Parameter: Tissue Value: Whole Plant
  misc_feature: MA Experiment ID: 20001771 Result: Up-regulated in Transcription
  misc_feature: MA Experiment 20001771 PARAMETER Experiment Name: At_Far-red-enriched-adult_P Parameter: Age (day) Value: 28
  misc_feature: MA Experiment 20001771 PARAMETER Experiment Name: At_Far-red-enriched-adult_P Parameter: Light Value: Far-red enriched vs. White
  misc_feature: MA Experiment 20001771 PARAMETER Experiment Name: At_Far-red-enriched-adult_P Parameter: Organism Value: A. thaliana
  misc_feature: MA Experiment 20001771 PARAMETER Experiment Name: At_Far-red-enriched-adult_P Parameter: Plant Line Value: Columbia
  misc_feature: MA Experiment 20001771 PARAMETER Experiment Name: At_Far-red-enriched-adult_P Parameter: Timepoint (hr) Value: 16
  misc_feature: MA Experiment 20001771 PARAMETER Experiment Name: At_Far-red-enriched-adult_P Parameter: Tissue Value: Aerial
  misc_feature: MA Experiment ID: 20001906 Result: Down-regulated in Transcription
  misc_feature: MA Experiment 20001906 PARAMETER Experiment Name: At_Drought_Reproduction_P Parameter: Age (day) Value: 35
  misc_feature: MA Experiment 20001906 PARAMETER Experiment Name: At_Drought_Reproduction_P Parameter: Organism Value: A. thaliana
  misc_feature: MA Experiment 20001906 PARAMETER Experiment Name: At_Drought_Reproduction_P Parameter: Plant Line Value: WS
  misc_feature: MA Experiment 20001906 PARAMETER Experiment Name: At_Drought_Reproduction_P Parameter: Timepoint (day) Value: 5
  misc_feature: MA Experiment 20001906 PARAMETER Experiment Name: At_Drought_Reproduction_P Parameter: Tissue Value: Siliques
  misc_feature: MA Experiment 20001906 PARAMETER Experiment Name: At_Drought_Reproduction_P Parameter: Treatment Value: Drought vs. No Drought
  misc_feature: MA Experiment ID: 20001911 Result: Down-regulated in Transcription
  misc_feature: MA Experiment 20001911 PARAMETER Experiment Name: At_Drought_Reproduction_P Parameter: Age (day) Value: 40
  misc_feature: MA Experiment 20001911 PARAMETER Experiment Name: At_Drought_Reproduction_P Parameter: Organism Value: A. thaliana
  misc_feature: MA Experiment 20001911 PARAMETER Experiment Name: At_Drought_Reproduction_P Parameter: Plant Line Value: WS
  misc_feature: MA Experiment 20001911 PARAMETER Experiment Name: At_Drought_Reproduction_P Parameter: Timepoint (day) Value: 10
  misc_feature: MA Experiment 20001911 PARAMETER Experiment Name: At_Drought_Reproduction_P Parameter: Tissue Value: Flowers
  misc_feature: MA Experiment 20001911 PARAMETER Experiment Name: At_Drought_Reproduction_P Parameter: Treatment Value: Drought vs. No Drought
ttcactttcctctcaaatctccaataagtaaactctctcatcgaaagcttaaaagcatcatcaccacaagaaagaaaagaaaagagtagaatcgaacatgaaggggggtttgcttgtggacgatgaatttatacacggagaagaaaggagcctgactgttcggaaaacatctctgtttttcgccggcgatggtttcacagtttacgactgcaagggaagtttggtgtttcgggttgactcttacggtggtcccaacacccgcgacaccgacgaggttgtcctcatggacgctcacggccgttgtctcctcaccctccgacgaaagaggccgagtttgcgacggagatgggaggggtatctcggggagagatcggacggccagaaaccgatcttcggggtaaggagatcttcgataatcgggaggaacagtgtgacggtggaggtgtacggggactaccagtgcagcgagtacctgatagaaggtagtttcggggcaaggaactgcacggtggtggaggcggagacgaggcggaaggtggcggagataaggcgcaaagtggatgcgtcaacgaacgtgatgcttgggaaagacgttttctcgttgaacgtgaagcccggttttgatggagcctttgcaatgggattggttcttgtgcttgatcaaatctacggcgacgatctccttgaggttggtgaggaacaggtgcacccttccgcagaagatctctgatttgatttttcaccctttttttgtttttgttttcttcttttttggtgggacgcaaacaaaatcgagtggaaaaataataattattgtgagtttgtgtcggtttgaaaggaaacgatttggacaaattatttctcgtcattcccatgggctgttgtaatctggtttgaatttcttactcagttacagctgtttgatttgaaagaaaaaaagggttt

SEQ ID NO: 106708 - protein, 210 aa, Arabidopsis thaliana
  peptide (1)..(210): Ceres Seq. ID no. 13620229
  misc_feature (4)..(186): Pfam Name: Protein of unknown function (DUF567) Pfam Description: Protein of unknown function (DUF567)
  misc_feature (1)..(210): Homolog of NCBI NO: 15220064 NR Description: expressed protein [Arabidopsis thaliana]
  misc_feature (5)..(209): Homolog of NCBI NO: 18400907 NR Description: expressed protein [Arabidopsis thaliana] gb|AAD55470.1~gene_id:MSJ11.21~similar to unknown protein thaliana] >gi|17380788|gb|AAL36224.1| unknown protein
  misc_feature (5)..(209): Homolog of NCBI NO: 21554362 NR Description: unknown [Arabidopsis thaliana]
  misc_feature (6)..(150): Homolog of NCBI NO: 34909922 NR Description: P0665A11.21 [Oryza sativa (japonica
  misc_feature (19)..(191): Homolog of NCBI NO: 15224921 NR Description: expressed protein [Arabidopsis thaliana]
  misc_feature (15)..(192): Homolog of NCBI NO: 34909256 NR Description: B1148D12.16 [Oryza sativa (japonica
  misc_feature (19)..(191): Homolog of NCBI NO: 27542769 NR Description: hypothetical protein-like protein [Sorghum
  misc_feature (12)..(191): Homolog of NCBI NO: 15238123 NR Description: hypothetical protein [Arabidopsis thaliana] gb|AAC67354.1~gene_id:MBK23.11~similar to unknown protein
  misc_feature (19)..(191): Homolog of NCBI NO: 27542765 NR Description: hypothetical protein-like protein [Sorghum
  misc_feature (3)..(194): Homolog of NCBI NO: 30679390 NR Description: expressed protein [Arabidopsis thaliana]
MKGGLLVDDEFIHGEERSLTVRKTSLFFAGDGFTVYDCKGSLVFRVDSYGGPNTRDTDEVVLMDAHGRCLLTLRRKRPSLRRRWEGYLGERSDGQKPIFGVRRSSIIGRNSVTVEVYGDYQCSEYLIEGSFGARNCTVVEAETRRKVAEIRRKVDASTNVMLGKDVFSLNVKPGFDGAFAMGLVLVLDQIYGDDLLEVGEEQVHPSAEDL

SEQ ID NO: 106709 - protein, 148 aa, Arabidopsis thaliana
  peptide (1)..(148): Ceres Seq. ID no. 13620230
  misc_feature (1)..(124): Pfam Name: Protein of unknown function (DUF567) Pfam Description: Protein of unknown function (DUF567)
  misc_feature (1)..(148): Homolog of NCBI NO: 15220064 NR Description: expressed protein [Arabidopsis thaliana]
  misc_feature (1)..(147): Homolog of NCBI NO: 18400907 NR Description: expressed protein [Arabidopsis thaliana] gb|AAD55470.1~gene_id:MSJ11.21~similar to unknown protein thaliana] >gi|17380788|gb|AAL36224.1| unknown protein
  misc_feature (1)..(147): Homolog of NCBI NO: 21554362 NR Description: unknown [Arabidopsis thaliana]
  misc_feature (1)..(88): Homolog of NCBI NO: 34909922 NR Description: P0665A11.21 [Oryza sativa (japonica
  misc_feature (1)..(129): Homolog of NCBI NO: 15224921 NR Description: expressed protein [Arabidopsis thaliana]
  misc_feature (1)..(130): Homolog of NCBI NO: 34909256 NR Description: B1148D12.16 [Oryza sativa (japonica
  misc_feature (1)..(129): Homolog of NCBI NO: 27542769 NR Description: hypothetical protein-like protein [Sorghum
  misc_feature (1)..(129): Homolog of NCBI NO: 15238123 NR Description: hypothetical protein [Arabidopsis thaliana] gb|AAC67354.1~gene_id:MBK23.11~similar to unknown protein
  misc_feature (1)..(129): Homolog of NCBI NO: 27542765 NR Description: hypothetical protein-like protein [Sorghum
  misc_feature (1)..(132): Homolog of NCBI NO: 30679390 NR Description: expressed protein [Arabidopsis thaliana]
MDAHGRCLLTLRRKRPSLRRRWEGYLGERSDGQKPIFGVRRSSIIGRNSVTVEVYGDYQCSEYLIEGSFGARNCTVVEAETRRKVAEIRRKVDASTNVMLGKDVFSLNVKPGFDGAFAMGLVLVLDQIYGDDLLEVGEEQVHPSAEDL

SEQ ID NO: 106710 - DNA, 1220 bp, Arabidopsis thaliana
  misc_feature (1)..(1220): Ceres Seq. ID no. 13620255
  misc_feature: MA Experiment ID: 20000306 Result: Down-regulated in Transcription
  misc_feature: MA Experiment 20000306 PARAMETER Experiment Name: At_Germinating_Seeds_Sub_P Parameter: Age (hr) Value: 6 vs. 0
  misc_feature: MA Experiment 20000306 PARAMETER Experiment Name: At_Germinating_Seeds_Sub_P Parameter: Organism Value: A. thaliana
  misc_feature: MA Experiment 20000306 PARAMETER Experiment Name: At_Germinating_Seeds_Sub_P Parameter: Plant Line Value: WS
  misc_feature: MA Experiment 20000306 PARAMETER Experiment Name: At_Germinating_Seeds_Sub_P Parameter: Tissue Value: Germinating Seeds
  misc_feature: MA Experiment ID: 20000307 Result: Down-regulated in Transcription
  misc_feature: MA Experiment 20000307 PARAMETER Experiment Name: At_Germinating_Seeds_Sub_P Parameter: Age (hr) Value: 24 vs. 0
  misc_feature: MA Experiment 20000307 PARAMETER Experiment Name: At_Germinating_Seeds_Sub_P Parameter: Organism Value: A. thaliana
  misc_feature: MA Experiment 20000307 PARAMETER Experiment Name: At_Germinating_Seeds_Sub_P Parameter: Plant Line Value: WS
  misc_feature: MA Experiment 20000307 PARAMETER Experiment Name: At_Germinating_Seeds_Sub_P Parameter: Tissue Value: Germinating Seeds
atgtaaaatgaacacaaacagaaagaagatgaaagtccatattggaggatatgtgttgatacttgccttgacggtttctgttatattacagcagcctgagttggtcactggacaagctagagttcctgctatgtttgtacttggagactcattggtcgatgctggtaacaacaactttctacaaactgtagctcgagccaatttcctcccttatggcatcgacatgaactaccagcctactggcagatttagcaacggcctgactttcattgatctgctagctcggttgttagaaattccatcaccccctcccttcgcggatccaaccacatcaggcaatagaatcctccaaggagttaactacgcgtctgcagctgctggcatcctcgatgtatcaggctacaactatggtggaagattcagcctgaaccagcaaatggtgaatctagagacgacactaagccaactgcgaacgatgatgagtccccaaaactttacggattacttagcaaggtcgcttgtggttctcgtttttggaagcaatgactatatcaacaactaccttatgcctaatctctacgattccagcataagattcagaccacctgactttgccaatctacttctcagtcaatacgctcgccagcttctgactctttacagcctaggtctaagaaaaatatttatacctggagtagcaccactaggctgcataccaaaccaacgagccagaggtatctcgccacctgatagatgtgttgacagcgtgaatcagattctaggcacatttaaccaagggctaaagtcacttgttgatcagctgaaccagcgatcacctggagccatctatgtatacggcaacacctatagcgcaattggtgacatcttaaacaacccagctgcttacggatttagcgtagtagacagggcttgttgcgggattgggaggaaccaaggacaaattacatgtctgccgttgcagactccttgtcccaacagaaatcagtatgtcttttgggatgcattccatcctactcagactgctaactccattctggctagacgagctttctatggtccaccttccgacgcatatcctgtcaatgtccaacagatgacactccttcactagtatattttggttttcgtgtttctttgaagttgtatgttataatgattgaacctatctatctatgagtatcgagtatcaagttgaaacc

SEQ ID NO: 106711 - protein, 376 aa, Arabidopsis thaliana
  peptide (1)..(376): Ceres Seq. ID no. 13620256
  misc_feature (44)..(356): Pfam Name: GDSL-like Lipase/Acylhydrolase Pfam Description: GDSL-like Lipase/Acylhydrolase
  misc_feature (3)..(376): Homolog of NCBI NO: 15224005 NR Description: GDSL-motif lipase/hydrolase protein [Arabidopsis
  misc_feature (39)..(375): Homolog of NCBI NO: 15241626 NR Description: GDSL-motif lipase/hydrolase protein [Arabidopsis
  misc_feature (14)..(376): Homolog of NCBI NO: 18409881 NR Description: GDSL-motif lipase/hydrolase protein [Arabidopsis
  misc_feature (18)..(375): Homolog of NCBI NO: 15220514 NR Description: GDSL-motif lipase/hydrolase protein [Arabidopsis
  misc_feature (18)..(375): Homolog of NCBI NO: 21592417 NR Description: lipase/hydrolase, putative [Arabidopsis thaliana]
  misc_feature (27)..(375): Homolog of NCBI NO: 18417760 NR Description: GDSL-motif lipase/hydrolase protein [Arabidopsis
  misc_feature (27)..(375): Homolog of NCBI NO: 11280578 NR Description: hypothetical protein F14F8_100 - Arabidopsis >gi|9755617|emb|CAC01771.1| putative protein [Arabidopsis
  misc_feature (17)..(375): Homolog of NCBI NO: 18398991 NR Description: GDSL-motif lipase/hydrolase protein [Arabidopsis >gi|20466732|gb|AAM20683.1| unknown protein [Arabidopsis >gi|23198228|gb|AAN15641.1| unknown protein [Arabidopsis
  misc_feature (20)..(375): Homolog of NCBI NO: 15242458 NR Description: GDSL-motif lipase/hydrolase protein [Arabidopsis
  misc_feature (20)..(375): Homolog of NCBI NO: 21553940 NR Description: GDSL-motif lipase/hydrolase-like protein
CKMNTNRKKMKVHIGGYVLILALTVSVILQQPELVTGQARVPAMFVLGDSLVDAGNNNFLQTVARANFLPYGIDMNYQPTGRFSNGLTFIDLLARLLEIPSPPPFADPTTSGNRILQGVNYASAAAGILDVSGYNYGGRFSLNQQMVNLETTLSQLRTMMSPQNFTDYLARSLVVLVFGSNDYINNYLMPNLYDSSIRFRPPDFANLLLSQYARQLLTLYSLGLRKIFIPGVAPLGCIPNQRARGISPPDRCVDSVNQILGTFNQGLKSLVDQLNQRSPGAIYVYGNTYSAIGDILNNPAAYGFSVVDRACCGIGRNQGQITCLPLQTPCPNRNQYVFWDAFHPTQTANSILARRAFYGPPSDAYPVNVQQMTLLH

SEQ ID NO: 106712 - protein, 374 aa, Arabidopsis thaliana
  peptide (1)..(374): Ceres Seq. ID no. 13620257
  misc_feature (42)..(354): Pfam Name: GDSL-like Lipase/Acylhydrolase Pfam Description: GDSL-like Lipase/Acylhydrolase
  misc_feature (1)..(374): Homolog of NCBI NO: 15224005 NR Description: GDSL-motif lipase/hydrolase protein [Arabidopsis
  misc_feature (37)..(373): Homolog of NCBI NO: 15241626 NR Description: GDSL-motif lipase/hydrolase protein [Arabidopsis
  misc_feature (12)..(374): Homolog of NCBI NO: 18409881 NR Description: GDSL-motif lipase/hydrolase protein [Arabidopsis
  misc_feature (16)..(373): Homolog of NCBI NO: 15220514 NR Description: GDSL-motif lipase/hydrolase protein [Arabidopsis
  misc_feature (16)..(373): Homolog of NCBI NO: 21592417 NR Description: lipase/hydrolase, putative [Arabidopsis thaliana]
  misc_feature (25)..(373): Homolog of NCBI NO: 18417760 NR Description: GDSL-motif lipase/hydrolase protein [Arabidopsis
  misc_feature (25)..(373): Homolog of NCBI NO: 11280578 NR Description: hypothetical protein F14F8_100 - Arabidopsis >gi|9755617|emb|CAC01771.1| putative protein [Arabidopsis
  misc_feature (15)..(373): Homolog of NCBI NO: 18398991 NR Description: GDSL-motif lipase/hydrolase protein [Arabidopsis >gi|20466732|gb|AAM20683.1| unknown protein [Arabidopsis >gi|23198228|gb|AAN15641.1| unknown protein [Arabidopsis
  misc_feature (18)..(373): Homolog of NCBI NO: 15242458 NR Description: GDSL-motif lipase/hydrolase protein [Arabidopsis
  misc_feature (18)..(373): Homolog of NCBI NO: 21553940 NR Description: GDSL-motif lipase/hydrolase-like protein
MNTNRKKMKVHIGGYVLILALTVSVILQQPELVTGQARVPAMFVLGDSLVDAGNNNFLQTVARANFLPYGIDMNYQPTGRFSNGLTFIDLLARLLEIPSPPPFADPTTSGNRILQGVNYASAAAGILDVSGYNYGGRFSLNQQMVNLETTLSQLRTMMSPQNFTDYLARSLVVLVFGSNDYINNYLMPNLYDSSIRFRPPDFANLLLSQYARQLLTLYSLGLRKIFIPGVAPLGCIPNQRARGISPPDRCVDSVNQILGTFNQGLKSLVDQLNQRSPGAIYVYGNTYSAIGDILNNPAAYGFSVVDRACCGIGRNQGQITCLPLQTPCPNRNQYVFWDAFHPTQTANSILARRAFYGPPSDAYPVNVQQMTLLH

SEQ ID NO: 106713 - protein, 367 aa, Arabidopsis thaliana
  peptide (1)..(367): Ceres Seq. ID no. 13620258
  misc_feature (35)..(347): Pfam Name: GDSL-like Lipase/Acylhydrolase Pfam Description: GDSL-like Lipase/Acylhydrolase
  misc_feature (1)..(367): Homolog of NCBI NO: 15224005 NR Description: GDSL-motif lipase/hydrolase protein [Arabidopsis
  misc_feature (30)..(366): Homolog of NCBI NO: 15241626 NR Description: GDSL-motif lipase/hydrolase protein [Arabidopsis
  misc_feature (5)..(367): Homolog of NCBI NO: 18409881 NR Description: GDSL-motif lipase/hydrolase protein [Arabidopsis
  misc_feature (9)..(366): Homolog of NCBI NO: 15220514 NR Description: GDSL-motif lipase/hydrolase protein [Arabidopsis
  misc_feature (9)..(366): Homolog of NCBI NO: 21592417 NR Description: lipase/hydrolase, putative [Arabidopsis thaliana]
  misc_feature (18)..(366): Homolog of NCBI NO: 18417760 NR Description: GDSL-motif lipase/hydrolase protein [Arabidopsis
  misc_feature (18)..(366): Homolog of NCBI NO: 11280578 NR Description: hypothetical protein F14F8_100 - Arabidopsis >gi|9755617|emb|CAC01771.1| putative protein [Arabidopsis
  misc_feature (8)..(366): Homolog of NCBI NO: 18398991 NR Description: GDSL-motif lipase/hydrolase protein [Arabidopsis >gi|20466732|gb|AAM20683.1| unknown protein [Arabidopsis >gi|23198228|gb|AAN15641.1| unknown protein [Arabidopsis
  misc_feature (11)..(366): Homolog of NCBI NO: 15242458 NR Description: GDSL-motif lipase/hydrolase protein [Arabidopsis
  misc_feature (11)..(366): Homolog of NCBI NO: 21553940 NR Description: GDSL-motif lipase/hydrolase-like protein
MKVHIGGYVLILALTVSVILQQPELVTGQARVPAMFVLGDSLVDAGNNNFLQTVARANFLPYGIDMNYQPTGRFSNGLTFIDLLARLLEIPSPPPFADPTTSGNRILQGVNYASAAAGILDVSGYNYGGRFSLNQQMVNLETTLSQLRTMMSPQNFTDYLARSLVVLVFGSNDYINNYLMPNLYDSSIRFRPPDFANLLLSQYARQLLTLYSLGLRKIFIPGVAPLGCIPNQRARGISPPDRCVDSVNQILGTFNQGLKSLVDQLNQRSPGAIYVYGNTYSAIGDILNNPAAYGFSVVDRACCGIGRNQGQITCLPLQTPCPNRNQYVFWDAFHPTQTANSILARRAFYGPPSDAYPVNVQQMTLLH

SEQ ID NO: 106714 - DNA, 2851 bp, Arabidopsis thaliana
  misc_feature (1)..(2851): Ceres Seq. ID no. 13620267
  misc_feature: MA Experiment ID: 108573 Result: Up-regulated in Transcription
  misc_feature: MA Experiment 108573 PARAMETER Experiment Name: At_Drought_cDNA_P Parameter: Timepoint (hr) Value: 6
  misc_feature: MA Experiment 108573 PARAMETER Experiment Name: At_Drought_cDNA_P Parameter: Tissue Value: Aerial
  misc_feature: MA Experiment 108573 PARAMETER Experiment Name: At_Drought_cDNA_P Parameter: Treatment Value: Drought vs. No Drought
  misc_feature: MA Experiment ID: 20000111 Result: Down-regulated in Transcription
  misc_feature: MA Experiment 20000111 PARAMETER Experiment Name: At_42deg_Heat_cDNA_P Parameter: Temperature (deg C) Value: 42 vs. 22
  misc_feature: MA Experiment 20000111 PARAMETER Experiment Name: At_42deg_Heat_cDNA_P Parameter: Timepoint (hr) Value: 6
  misc_feature: MA Experiment 20000111 PARAMETER Experiment Name: At_42deg_Heat_cDNA_P Parameter: Tissue Value: Aerial
  misc_feature: MA Experiment ID: 20000113 Result: Down-regulated in Transcription
  misc_feature: MA Experiment 20000113 PARAMETER Experiment Name: At_42deg_Heat_cDNA_P Parameter: Temperature (deg C) Value: 42 vs. 22
  misc_feature: MA Experiment 20000113 PARAMETER Experiment Name: At_42deg_Heat_cDNA_P Parameter: Timepoint (hr) Value: 8
  misc_feature: MA Experiment 20000113 PARAMETER Experiment Name: At_42deg_Heat_cDNA_P Parameter: Tissue Value: Aerial
  misc_feature: MA Experiment ID: 20000173 Result: Down-regulated in Transcription
  misc_feature: MA Experiment 20000173 PARAMETER Experiment Name: At_42deg_Heat_P Parameter: Age (day) Value: 14
  misc_feature: MA Experiment 20000173 PARAMETER Experiment Name: At_42deg_Heat_P Parameter: Organism Value: A. thaliana
  misc_feature: MA Experiment 20000173 PARAMETER Experiment Name: At_42deg_Heat_P Parameter: Plant Line Value: WS
  misc_feature: MA Experiment 20000173 PARAMETER Experiment Name: At_42deg_Heat_P Parameter: Temperature (deg C) Value: 42 vs. 22
  misc_feature: MA Experiment 20000173 PARAMETER Experiment Name: At_42deg_Heat_P Parameter: Timepoint (hr) Value: 6
  misc_feature: MA Experiment 20000173 PARAMETER Experiment Name: At_42deg_Heat_P Parameter: Tissue Value: Aerial
  misc_feature: MA Experiment ID: 20000184 Result: Down-regulated in Transcription
  misc_feature: MA Experiment 20000184 PARAMETER Experiment Name: At_Shoots__P Parameter: Age (day) Value: 7
  misc_feature: MA Experiment 20000184 PARAMETER Experiment Name: At_Shoots__P Parameter: Tissue Value: Shoots vs. Whole Plant
aaaaccggcgagacggaaaatttcagcgtttccgaactttccattagagtcgcgagacgatagatgagactcgttccagaaatttaatcgttgcttctcttcccagctgatctgcgtccaacatcactgtttccaggatcttcagaatcagcgaaggaagaagataagaggacgacgaagtaattgaagttggagaatcgcacatttggctctcgatatttgctcaatgacttcttattcgaggtagccttcaatttaggatcggagttcgtaaataaggtgatttagcgaagatgatggtcgaagatcttggtgtggaagcgaaggaagcggctgtgcgagaagtggcgaagctcttacccttacctgaacttttgcagtctatttcttcaatcaaggccgattacatcgctcgtcaacaggcaaatgatgcacagctcagtactatggttgctgagcaggttgaacaagctcaagctgggttagagtcactttcatcatctgagaaaaccatttatgaactgcgggataatttcatttctatcgacaagctttgtcaggaatgtcaaactttgattgacaatcatgaccaaataaagctgctgagtaacgccaggaataatctaaacaaaactctaaaggatgtagaaggtatgatgtcaatttctgttgaagctgctgcggctagggattctttgagtgatgataaagaaatcgttaacacttatgagagattaacagcacttgatggtaaacgaagatttgcattagcagctgctggagaggaggttgggaggctgagggagtattttgaagatgttgatagaacatgggaaacattcgagaagacactatggggtcatgtttccaactattacaaactttctaaagaaagtccgcaaacactggttcgtgctttgagggttgttgagatgcaagaaattctagaccaacagcttgctgaagaagcagcagaggctgagggagaaggtgcgatggcatctgtagcaaatcctcgaaggcctggcaagaaatctactacaacgtcagcgtcgtcaaagggtcttgctcaacagaaattaaaagtccaagggaaaggctacaaggacaaatgctacgagcaaattcggaaggcggttgaagatcgattcaacaggcttttgacgcttgtctttgaagatctaaaagcagctttggaagaagctagaatgattggagaggaacttggagatatttatgactatgtggctccttgttttcctccaagatacgagatatttcagcttatggtgaacctgtataccgagagattcatacaaatgctcagattgctcagtgacagagcaaacgatctgacaaatatagagattttaaaggtgactggttgggtggtagagtaccaagaaaacttgattgcacttggtgttgatgattcactagctcaagtgtgttctgagagcggttcaatggatcctctaatgaatgcatatgttgaaagaatgcaagctacaacgaagaaatggtacatgaatatcctagaggcggataaggtgcaaccacctaaaaaaactgaggaaggaaaattatatacaccggctgctgtagatttattcagaatacttggagagcaagtgcaaattgtcagagataacagcacggatgttatgttgtacaggattgctttagctattattcaggttatgattgatttccaagcagctgaaaagaagagagttgatgaacctgcatctgatattggtctggaacctctatgcgctatgataaacaacaaccttcgctgctacgaccttgccatggagttaagtaatagcactttagaagctcttccacaaaattatgcagagcaggtgaattttgaagacacttgcaaaggtttcttggaggtggctaaggaagcagtgcatcaaacagttcgcgttatctttgaggatccaggagttcaggaattacttgtcaagctttaccagaaagaatggtgcgagggacaggttaccgagtacctcgtggcaactttcggtgattatttcacagatgtgaaaatgtatgtcgaagaaagatcatttagaagatttgtcgaagcatgtttggaagaaacagtcgttgtctatgttgaccatctcctaactcagaaaaactacatcaaggaagaaactattgaacggatgaggctagatgaagaggttctcatggatttctttagggagtatataagtgcatctaaagtggagagcagaatcagaataatgagcgatctgagagaacttgcatctgcagagagtctagatgcatttacactcgtgtactcgaatattctagagcaccagcctgactgcccggccgaggtcgtagagaagcttgttagtctgcgtgaaggcataccacggaaggacacaaaagaggtggtacaagagtgcaaagagatatatgagaacacactggtagatggtaatcctccaaagacaggatttgtattcccgagagtcaagtgcttaactgcttccaaaggatctatgtggcgaaaactcacttaatctgtaaaacagcgttcagcgtttgcgtccgtaactgcttttctagttgagatgatgttctttctccaaattatggcgtttgcgtccatgtcttctttttctttgcatggtatctttcctctgtaaattctgtgttttctcttgttttgttctttttcttacctttattcctggatttgaaagttgaaacgctcggtggccacttgcactaggatattatcccgttgtatttaggaggcgtatttttttgtcgcaaattttaattctactgtttcatttaattttgataaaatcttctt

SEQ ID NO: 106715 - protein, 752 aa, Arabidopsis thaliana; identical to SEQ ID NO: 30478
  peptide (1)..(752): Ceres Seq. ID no. 13620268
  misc_feature (11)..(483): Homolog of NCBI NO: 40744733 NR Description: hypothetical protein AN1988.2 [Aspergillus
  misc_feature (18)..(492): Homolog of NCBI NO: 25466279 NR Description: related to protein transport protein SEC6
  misc_feature (18)..(492): Homolog of NCBI NO: 32403972 NR Description: hypothetical protein [Neurospora crassa] related to protein transport protein SEC6 [Neurospora crassa]
  misc_feature (268)..(718): Homolog of NCBI NO: 19074839 NR Description: hypothetical protein [Encephalitozoon cuniculi]
  misc_feature (6)..(466): Homolog of NCBI NO: 25149395 NR Description: Putative cytoplasmic protein, with a coiled coil of eukaryotic origin (90.7 kD) [Caenorhabditis elegans] Proable exocyst complex component Sec6
  misc_feature (6)..(466): Homolog of NCBI NO: 39596858 NR Description: Hypothetical protein CBG02377 [Caenorhabditis
  misc_feature (6)..(447): Homolog of NCBI NO: 7498734 NR Description: hypothetical protein F09E5.6 - Caenorhabditis
  misc_feature (1)..(220): Homolog of NCBI NO: 19922552 NR Description: CG5341-PA [Drosophila melanogaster] Exocyst complex component Sec6 >gi|16184243|gb|AAL13778.1|

SEQ ID NO: 106716 - protein, 751 aa, Arabidopsis thaliana; identical to SEQ ID NO: 30479
  peptide (1)..(751): Ceres Seq. ID no. 13620269
  misc_feature (10)..(482): Homolog of NCBI NO: 40744733 NR Description: hypothetical protein AN1988.2 [Aspergillus
  misc_feature (17)..(491): Homolog of NCBI NO: 25466279 NR Description: related to protein transport protein SEC6
  misc_feature (17)..(491): Homolog of NCBI NO: 32403972 NR Description: hypothetical protein [Neurospora crassa] related to protein transport protein SEC6 [Neurospora crassa]
  misc_feature (267)..(717): Homolog of NCBI NO: 19074839 NR Description: hypothetical protein [Encephalitozoon cuniculi]
  misc_feature (5)..(465): Homolog of NCBI NO: 25149395 NR Description: Putative cytoplasmic protein, with a coiled coil of eukaryotic origin (90.7 kD) [Caenorhabditis elegans] Proable exocyst complex component Sec6
  misc_feature (5)..(465): Homolog of NCBI NO: 39596858 NR Description: Hypothetical protein CBG02377 [Caenorhabditis
  misc_feature (5)..(446): Homolog of NCBI NO: 7498734 NR Description: hypothetical protein F09E5.6 - Caenorhabditis
  misc_feature (1)..(219): Homolog of NCBI NO: 19922552 NR Description: CG5341-PA [Drosophila melanogaster] Exocyst complex component Sec6 >gi|16184243|gb|AAL13778.1|

SEQ ID NO: 106717 - protein, 701 aa, Arabidopsis thaliana; identical to SEQ ID NO: 30480
  peptide (1)..(701): Ceres Seq. ID no. 13620270
  misc_feature (1)..(432): Homolog of NCBI NO: 40744733 NR Description: hypothetical protein AN1988.2 [Aspergillus
  misc_feature (1)..(441): Homolog of NCBI NO: 25466279 NR Description: related to protein transport protein SEC6
  misc_feature (1)..(441): Homolog of NCBI NO: 32403972 NR Description: hypothetical protein [Neurospora crassa] related to protein transport protein SEC6 [Neurospora crassa]
  misc_feature (217)..(667): Homolog of NCBI NO: 19074839 NR Description: hypothetical protein [Encephalitozoon cuniculi]
  misc_feature (1)..(415): Homolog of NCBI NO: 25149395 NR Description: Putative cytoplasmic protein, with a coiled coil of eukaryotic origin (90.7 kD) [Caenorhabditis elegans] Proable exocyst complex component Sec6
  misc_feature (1)..(415): Homolog of NCBI NO: 39596858 NR Description: Hypothetical protein CBG02377 [Caenorhabditis
  misc_feature (1)..(396): Homolog of NCBI NO: 7498734 NR Description: hypothetical protein F09E5.6 - Caenorhabditis
  misc_feature (1)..(169): Homolog of NCBI NO: 19922552 NR Description: CG5341-PA [Drosophila melanogaster] Exocyst complex component Sec6 >gi|16184243|gb|AAL13778.1|

SEQ ID NO: 106718 - DNA, 1801 bp, Arabidopsis thaliana
  misc_feature (1)..(1801): Ceres Seq. ID no. 13620271
  misc_feature: MA Experiment ID: 20000306 Result: Up-regulated in Transcription
  misc_feature: MA Experiment 20000306 PARAMETER Experiment Name: At_Germinating_Seeds_Sub_P Parameter: Age (hr) Value: 6 vs. 0
  misc_feature: MA Experiment 20000306 PARAMETER Experiment Name: At_Germinating_Seeds_Sub_P Parameter: Organism Value: A. thaliana
  misc_feature: MA Experiment 20000306 PARAMETER Experiment Name: At_Germinating_Seeds_Sub_P Parameter: Plant Line Value: WS
  misc_feature: MA Experiment 20000306 PARAMETER Experiment Name: At_Germinating_Seeds_Sub_P Parameter: Tissue Value: Germinating Seeds
  misc_feature: MA Experiment ID: 20000307 Result: Up-regulated in Transcription
  misc_feature: MA Experiment 20000307 PARAMETER Experiment Name: At_Germinating_Seeds_Sub_P Parameter: Age (hr) Value: 24 vs. 0
  misc_feature: MA Experiment 20000307 PARAMETER Experiment Name: At_Germinating_Seeds_Sub_P Parameter: Organism Value: A. thaliana
  misc_feature: MA Experiment 20000307 PARAMETER Experiment Name: At_Germinating_Seeds_Sub_P Parameter: Plant Line Value: WS
  misc_feature: MA Experiment 20000307 PARAMETER Experiment Name: At_Germinating_Seeds_Sub_P Parameter: Tissue Value: Germinating Seeds
  misc_feature: MA Experiment ID: 20000315 Result: Up-regulated in Transcription
  misc_feature: MA Experiment 20000315 PARAMETER Experiment Name: At_14day_Shoots-Roots_Sub_P Parameter: Age (day) Value: 14
  misc_feature: MA Experiment 20000315 PARAMETER Experiment Name: At_14day_Shoots-Roots_Sub_P Parameter: Organism Value: A. thaliana
  misc_feature: MA Experiment 20000315 PARAMETER Experiment Name: At_14day_Shoots-Roots_Sub_P Parameter: Plant Line Value: WS
  misc_feature: MA Experiment 20000315 PARAMETER Experiment Name: At_14day_Shoots-Roots_Sub_P Parameter: Tissue Value: Shoots vs. Whole Plant
  misc_feature: MA Experiment ID: 20000347 Result: Up-regulated in Transcription
  misc_feature: MA Experiment 20000347 PARAMETER Experiment Name: At_2mM_SA_Sub_P Parameter: Age (day) Value: 14
  misc_feature: MA Experiment 20000347 PARAMETER Experiment Name: At_2mM_SA_Sub_P Parameter: Organism Value: A. thaliana
  misc_feature: MA Experiment 20000347 PARAMETER Experiment Name: At_2mM_SA_Sub_P Parameter: Plant Line Value: WS
  misc_feature: MA Experiment 20000347 PARAMETER Experiment Name: At_2mM_SA_Sub_P Parameter: Timepoint (hr) Value: 6
  misc_feature: MA Experiment 20000347 PARAMETER Experiment Name: At_2mM_SA_Sub_P Parameter: Tissue Value: Aerial
  misc_feature: MA Experiment 20000347 PARAMETER Experiment Name: At_2mM_SA_Sub_P Parameter: Treatment Value: 2mM SA vs. No Treatment
  misc_feature: MA Experiment ID: 20000355 Result: Up-regulated in Transcription
  misc_feature: MA Experiment 20000355 PARAMETER Experiment Name: At_Siliques_Sub_P Parameter: Age (day) Value: 21
  misc_feature: MA Experiment 20000355 PARAMETER Experiment Name: At_Siliques_Sub_P Parameter: Organism Value: A. thaliana
  misc_feature: MA Experiment 20000355 PARAMETER Experiment Name: At_Siliques_Sub_P Parameter: Plant Line Value: WS
  misc_feature: MA Experiment 20000355 PARAMETER Experiment Name: At_Siliques_Sub_P Parameter: Tissue Value: Less Than 5mm Siliques vs. Whole Plant
ctttcacaacaaaaaaactcttttctttttgtctgctcgtttttcttttcataatgggagccttggaagcagaaagagccgccaacaatgctacggcgttagagacacagtcgtcaccggaagatctcggtcaaccatctcctctgcgtaagatcatctccgtcgcttcaatcgccgccggtgtacagttcgggtgggccttacagctttctcttctgactccttacatacaactcctcgggatccctcacaaatggtcgtcttacatgtggctttgtggtcctatctccggcatgattgttcaaccgatcgtcggttaccacagtgaccgatgcgagtccagattcggtcgccgtcgtcctttcattgccgccggagtcgcactcgtagccgtctcggttttccttatcggattcgcggcggatatgggacatagttttggagataaactcgagaacaaggtaaggactcgagccattataatcttcctaaccgggttttggttcctcgacgtggctaacaacaccttacaaggaccatgccgtgctttcttagccgatttagccgccggagacgctaaaaaaacgcgagtcgcaaacgcgtgtttctccttctttatggcggttggaaacgttttgggttacgctgctggatcttacactaaccttcacaaaatgtttcctttcacaatgacaaaagcttgcgacatctattgtgcgaatctcaagacttgtttcttcttatccatcactctcctccttatcgtcacattctcgtctctatggtacgttaaagacaaacaatggtctccacctcaaggagacaaggaggagaaaacatcaagtctttttttctttggagaaatctttggagctgttagacacatgaaacgtcccatggtgatgcttctaattgtcacggtcattaattggatcgcttggtttccatttattttgtatgataccgattggatgggtcgtgaagtgtacggtggaaactcagatggagatgaacgatcgaagaaactttacgaccaaggagttcaggctggtgcattgggattgatgtttaattctatacttcttggtttcgtgtcacttggtgttgaatcgattggtcggaaaatgggaggagctaaacgactttggggatgtgtgaatttcatactcgccataggtttggccatgacggttcttgttactaaatcggctgagcatcaccgggaaatcgccggtcctttagccggaccgagcagtggtattaaagccggagtatttagtctctttaccgttcttggtatcccattggccattacttacagtattccatttgcactagcgtccattttctcaaccaattccggtgccggccaaggactttcattaggcgttttaaatatagcgatttgtataccacaaatgatagtatcattctcaagtggaccattggacgctcaattcggcggtggaaacctaccttcatttgtggtcggagcaattgccgcggcggttagtggagtcttagcgttaaccgttttaccttcaccgcctccggacgcaccagccatgtcaggggctatgggattccattagttaactagtttttacatatatatgaatttccatctaatacagtattgttgtgcaaaagtgaaacccccaaaaaatggataaagtgagaaaaataaaccttggtcgtctgtcttttactgttctttagttttttttttttttttacttttgttattgatgttagtcaatttgttttcgttttgtttggacgttaataaattctgtgtttg

SEQ ID NO: 106719 - protein, 529 aa, Arabidopsis thaliana
  peptide (1)..(529): Ceres Seq. ID no. 13620272
  misc_feature (51)..(489): Pfam Name: Sugar (and other) transporter Pfam Description: Sugar (and other) transporter
  misc_feature (18)..(529): Homolog of NCBI NO: 15217602 NR Description: sucrose transporter (sucrose-proton symporter) thaliana] >gi|25344713|pir||F96741 probable sucrose transport
  misc_feature (18)..(526): Homolog of NCBI NO: 12057172 NR Description: sucrose trasporter [Arabidopsis thaliana]
  misc_feature (18)..(529): Homolog of NCBI NO: 15217601 NR Description: sucrose transporter SUC1 (sucrose-proton
  misc_feature (18)..(529): Homolog of NCBI NO: 18091779 NR Description: sucrose transporter SUC1 [Brassica oleracea]
  misc_feature (24)..(529): Homolog of NCBI NO: 15219938 NR Description: sucrose transporter SUC2 (sucrose-proton
  misc_feature (24)..(529): Homolog of NCBI NO: 481131 NR Description: sucrose transport protein SUC2 - Arabidopsis
  misc_feature (24)..(529): Homolog of NCBI NO: 20147213 NR Description: At1g22710/T22J18_12 [Arabidopsis thaliana]
  misc_feature (24)..(529): Homolog of NCBI NO: 18091781 NR Description: sucrose transporter SUC2 [Brassica oleracea]
  misc_feature (25)..(513): Homolog of NCBI NO: 15225986 NR Description: sucrose transporter (sucrose-proton symporter),
  misc_feature (18)..(513): Homolog of NCBI NO: 15239921 NR Description: sucrose transporter (sucrose-proton symporter) [Arabidopsis thaliana] >gi|10178200|dbj|BAB11624.1| sucrose
FTTKKLFSFCLLVFLFIMGALEAERAANNATALETQSSPEDLGQPSPLRKIISVASIAAGVQFGWALQLSLLTPYIQLLGIPHKWSSYMWLCGPISGMIVQPIVGYHSDRCESRFGRRRPFIAAGVALVAVSVFLIGFAADMGHSFGDKLENKVRTRAIIIFLTGFWFLDVANNTLQGPCRAFLADLAAGDAKKTRVANACFSFFMAVGNVLGYAAGSYTNLHKMFPFTMTKACDIYCANLKTCFFLSITLLLIVTFSSLWYVKDKQWSPPQGDKEEKTSSLFFFGEIFGAVRHMKRPMVMLLIVTVINWIAWFPFILYDTDWMGREVYGGNSDGDERSKKLYDQGVQAGALGLMFNSILLGFVSLGVESIGRKMGGAKRLWGCVNFILAIGLAMTVLVTKSAEHHREIAGPLAGPSSGIKAGVFSLFTVLGIPLAITYSIPFALASIFSTNSGAGQGLSLGVLNIAICIPQMIVSFSSGPLDAQFGGGNLPSFVVGAIAAAVSGVLALTVLPSPPPDAPAMSGAMGFH

SEQ ID NO: 106720 - protein, 512 aa, Arabidopsis thaliana
  peptide (1)..(512): Ceres Seq. ID no. 13620273
  misc_feature (34)..(472): Pfam Name: Sugar (and other) transporter Pfam Description: Sugar (and other) transporter
  misc_feature (1)..(512): Homolog of NCBI NO: 15217602 NR Description: sucrose transporter (sucrose-proton symporter) thaliana] >gi|25344713|pir||F96741 probable sucrose transport
  misc_feature (1)..(509): Homolog of NCBI NO: 12057172 NR Description: sucrose trasporter [Arabidopsis thaliana]
  misc_feature (1)..(512): Homolog of NCBI NO: 15217601 NR Description: sucrose transporter SUC1 (sucrose-proton
  misc_feature (1)..(512): Homolog of NCBI NO: 18091779 NR Description: sucrose transporter SUC1 [Brassica oleracea]
  misc_feature (7)..(512): Homolog of NCBI NO: 15219938 NR Description: sucrose transporter SUC2 (sucrose-proton
  misc_feature (7)..(512): Homolog of NCBI NO: 481131 NR Description: sucrose transport protein SUC2 - Arabidopsis
  misc_feature (7)..(512): Homolog of NCBI NO: 20147213 NR Description: At1g22710/T22J18_12 [Arabidopsis thaliana]
  misc_feature (7)..(512): Homolog of NCBI NO: 18091781 NR Description: sucrose transporter SUC2 [Brassica oleracea]
  misc_feature (8)..(496): Homolog of NCBI NO: 15225986 NR Description: sucrose transporter (sucrose-proton symporter),
  misc_feature (1)..(496): Homolog of NCBI NO: 15239921 NR Description: sucrose transporter (sucrose-proton symporter) [Arabidopsis thaliana] >gi|10178200|dbj|BAB11624.1| sucrose
MGALEAERAANNATALETQSSPEDLGQPSPLRKIISVASIAAGVQFGWALQLSLLTPYIQLLGIPHKWSSYMWLCGPISGMIVQPIVGYHSDRCESRFGRRRPFIAAGVALVAVSVFLIGFAADMGHSFGDKLENKVRTRAIIIFLTGFWFLDVANNTLQGPCRAFLADLAAGDAKKTRVANACFSFFMAVGNVLGYAAGSYTNLHKMFPFTMTKACDIYCANLKTCFFLSITLLLIVTFSSLWYVKDKQWSPPQGDKEEKTSSLFFFGEIFGAVRHMKRPMVMLLIVTVINWIAWFPFILYDTDWMGREVYGGNSDGDERSKKLYDQGVQAGALGLMFNSILLGFVSLGVESIGRKMGGAKRLWGCVNFILAIGLAMTVLVTKSAEHHREIAGPLAGPSSGIKAGVFSLFTVLGIPLAITYSIPFALASIFSTNSGAGQGLSLGVLNIAICIPQMIVSFSSGPLDAQFGGGNLPSFVVGAIAAAVSGVLALTVLPSPPPDAPAMSGAMGFH

SEQ ID NO: 106721 - protein, 441 aa, Arabidopsis thaliana
  peptide (1)..(441): Ceres Seq. ID no. 13620274
  misc_feature (1)..(401): Pfam Name: Sugar (and other) transporter Pfam Description: Sugar (and other) transporter
  misc_feature (1)..(441): Homolog of NCBI NO: 15217602 NR Description: sucrose transporter (sucrose-proton symporter) thaliana] >gi|25344713|pir||F96741 probable sucrose transport
  misc_feature (1)..(438): Homolog of NCBI NO: 12057172 NR Description: sucrose trasporter [Arabidopsis thaliana]
  misc_feature (1)..(441): Homolog of NCBI NO: 15217601 NR Description: sucrose transporter SUC1 (sucrose-proton
  misc_feature (1)..(441): Homolog of NCBI NO: 18091779 NR Description: sucrose transporter SUC1 [Brassica oleracea]
  misc_feature (1)..(441): Homolog of NCBI NO: 15219938 NR Description: sucrose transporter SUC2 (sucrose-proton
  misc_feature (1)..(441): Homolog of NCBI NO: 481131 NR Description: sucrose transport protein SUC2 - Arabidopsis
  misc_feature (1)..(441): Homolog of NCBI NO: 20147213 NR Description: At1g22710/T22J18_12 [Arabidopsis thaliana]
  misc_feature (1)..(441): Homolog of NCBI NO: 18091781 NR Description: sucrose transporter SUC2 [Brassica oleracea]
  misc_feature (1)..(425): Homolog of NCBI NO: 15225986 NR Description: sucrose transporter (sucrose-proton symporter),
  misc_feature (1)..(425): Homolog of NCBI NO: 15239921 NR Description: sucrose transporter (sucrose-proton symporter) [Arabidopsis thaliana] >gi|10178200|dbj|BAB11624.1| sucrose
MWLCGPISGMIVQPIVGYHSDRCESRFGRRRPFIAAGVALVAVSVFLIGFAADMGHSFGDKLENKVRTRAIIIFLTGFWFLDVANNTLQGPCRAFLADLAAGDAKKTRVANACFSFFMAVGNVLGYAAGSYTNLHKMFPFTMTKACDIYCANLKTCFFLSITLLLIVTFSSLWYVKDKQWSPPQGDKEEKTSSLFFFGEIFGAVRHMKRPMVMLLIVTVINWIAWFPFILYDTDWMGREVYGGNSDGDERSKKLYDQGVQAGALGLMFNSILLGFVSLGVESIGRKMGGAKRLWGCVNFILAIGLAMTVLVTKSAEHHREIAGPLAGPSSGIKAGVFSLFTVLGIPLAITYSIPFALASIFSTNSGAGQGLSLGVLNIAICIPQMIVSFSSGPLDAQFGGGNLPSFVVGAIAAAVSGVLALTVLPSPPPDAPAMSGAMGFH

SEQ ID NO: 106722 - DNA, 1649 bp, Arabidopsis thaliana
  misc_feature (1)..(1649): Ceres Seq. ID no. 13620283
  misc_feature: MA Experiment ID: 20000234 Result: Up-regulated in Transcription
  misc_feature: MA Experiment 20000234 PARAMETER Experiment Name: At_Siliques_P Parameter: Age (day) Value: 21
  misc_feature: MA Experiment 20000234 PARAMETER Experiment Name: At_Siliques_P Parameter: Organism Value: A. thaliana
  misc_feature: MA Experiment 20000234 PARAMETER Experiment Name: At_Siliques_P Parameter: Plant Line Value: WS
  misc_feature: MA Experiment 20000234 PARAMETER Experiment Name: At_Siliques_P Parameter: Tissue Value: Less Than 5mm Siliques vs. Whole Plant
  misc_feature: MA Experiment ID: 20000235 Result: Up-regulated in Transcription
  misc_feature: MA Experiment 20000235 PARAMETER Experiment Name: At_Siliques_P Parameter: Age (day) Value: 21
  misc_feature: MA Experiment 20000235 PARAMETER Experiment Name: At_Siliques_P Parameter: Organism Value: A. thaliana
  misc_feature: MA Experiment 20000235 PARAMETER Experiment Name: At_Siliques_P Parameter: Plant Line Value: WS
  misc_feature: MA Experiment 20000235 PARAMETER Experiment Name: At_Siliques_P Parameter: Tissue Value: 5-10mm Siliques vs. Whole Plant
  misc_feature: MA Experiment ID: 20000264 Result: Up-regulated in Transcription
  misc_feature: MA Experiment 20000264 PARAMETER Experiment Name: At_Open_Flower_P Parameter: Age (day) Value: 21
  misc_feature: MA Experiment 20000264 PARAMETER Experiment Name: At_Open_Flower_P Parameter: Plant Line Value: WS
  misc_feature: MA Experiment 20000264 PARAMETER Experiment Name: At_Open_Flower_P Parameter: Tissue Value: Open Flower vs. Whole Plant
  misc_feature: MA Experiment ID: 20000265 Result: Up-regulated in Transcription
  misc_feature: MA Experiment 20000265 PARAMETER Experiment Name: At_Open_Flower_P Parameter: Age (day) Value: 21
  misc_feature: MA Experiment 20000265 PARAMETER Experiment Name: At_Open_Flower_P Parameter: Plant Line Value: WS
  misc_feature: MA Experiment 20000265 PARAMETER Experiment Name: At_Open_Flower_P Parameter: Tissue Value: Closed Flower vs. Whole Plant
  misc_feature: MA Experiment ID: 20000286 Result: Up-regulated in Transcription
  misc_feature: MA Experiment 20000286 PARAMETER Experiment Name: At_Open_Flower_P Parameter: Age (day) Value: 21
  misc_feature: MA Experiment 20000286 PARAMETER Experiment Name: At_Open_Flower_P Parameter: Plant Line Value: WS
  misc_feature: MA Experiment 20000286 PARAMETER Experiment Name: At_Open_Flower_P Parameter: Tissue Value: Half Open vs. Whole Plant
  misc_feature: MA Experiment ID: 20000438 Result: Down-regulated in Transcription
  misc_feature: MA Experiment 20000438 PARAMETER Experiment Name: At_Shoots__P Parameter: Age (day) Value: 14
  misc_feature: MA Experiment 20000438 PARAMETER Experiment Name: At_Shoots__P Parameter: Tissue Value: Shoots vs. Whole Plant
  misc_feature: MA Experiment ID: 20000441 Result: Down-regulated in Transcription
  misc_feature: MA Experiment 20000441 PARAMETER Experiment Name: At_1uM_BR-BRZ__P Parameter: Tissue Value: Shoot Apices
  misc_feature: MA Experiment 20000441 PARAMETER Experiment Name: At_1uM_BR-BRZ__P Parameter: Treatment Value: 1uM BR vs. No Treatment
  misc_feature: MA Experiment ID: 20000443 Result: Down-regulated in Transcription
  misc_feature: MA Experiment 20000443 PARAMETER Experiment Name: At_1uM_BR-BRZ__P Parameter: Tissue Value: Shoot Apices
  misc_feature: MA Experiment 20000443 PARAMETER Experiment Name: At_1uM_BR-BRZ__P Parameter: Treatment Value: 1uM BRZ vs. No Treatment
  misc_feature: MA Experiment ID: 20001910 Result: Down-regulated in Transcription
  misc_feature: MA Experiment 20001910 PARAMETER Experiment Name: At_Drought_Reproduction_P Parameter: Age (day) Value: 37
  misc_feature: MA Experiment 20001910 PARAMETER Experiment Name: At_Drought_Reproduction_P Parameter: Organism Value: A. thaliana
  misc_feature: MA Experiment 20001910 PARAMETER Experiment Name: At_Drought_Reproduction_P Parameter: Plant Line Value: WS
  misc_feature: MA Experiment 20001910 PARAMETER Experiment Name: At_Drought_Reproduction_P Parameter: Timepoint (day) Value: 7
  misc_feature: MA Experiment 20001910 PARAMETER Experiment Name: At_Drought_Reproduction_P Parameter: Tissue Value: Flowers
  misc_feature: MA Experiment 20001910 PARAMETER Experiment Name: At_Drought_Reproduction_P Parameter: Treatment Value: Drought vs. No Drought
gtaaaataataccataaaactagaaattggaaagagagagagatatggcaatagaaaggcaagtgacggaagcagaggagccagtaagtccatttgcacgcttgtttagcttgccgggtctcgatgtcttcaacattgtaaccattggatgcaaaaccgaaggcaatgcctcaaccatcgtcgaaggcataaagaacacattgatcaaccatccacgcttctctagcatactggtgactggtcatggtgagcacaaaggaaaagctagatggattccaacgaaaataaacgtagaagagcatgtcattgttccggatatagatcccaacattgagaatcctgatgagtttcttgaagattatacatcaaacatggctctttctccaatggatatgtccaaacctttatgggagtttcatttattgaaacttaaaacatcacatgcggaagctgtgaccgtggctaggttccatcattctttgggcgacggaatgtctcttatgtctcttttactcgcttgtactcggaaaacatgtgatcccgaggcattccccacttttgtggctccgaagaaaaacaaagcgaagaacgtttgtttttctttggtagcttggttatggttcatagtaagacttatgttccacacttgtgttgaagtcatcaagtctatagtttttatatgtcgtgcgagtgacacctcagctcatataatgggaaaaccaggagctacacttagcgctaataagttcattcatcgaatcattagtttagatgatgtcaaaatggtgaagaacgccatgaatatgactgtaaatgatgttctttttgggatggtacaagctggtctttctcgatatttgaaccaaagatatgatcttgaaacatcttcaaagtcaagaaaaaatctacacaatatcggtcttcatggtgttgttttctttaatctaaggccaaatagaaatattgaggatttggctaaaatgatggcaaaaggttcaaagtgtagatggggaaactcaataggttatgttctgattcctttggggatgaagccacaggatgatgtatttgaatatgttcgacaagccaaaactatcatggatggtaaaaaacattccctcgaacctctattttcttatggattgctcaaagtaacaatggaggttttcggattaaggggactcaagactcttgtgaagagaatatttggtagcacaacaatgatattctcaaatgtggttggtccagacgaagaaattagcttttttggccatcgaatagcttacattgctgcaagtacctttggtgtcccacaggcactcaatatctgtattcaaagctatgtggacaaacttataatcaacattggggttgatgtagacgtgattccagaccctcatcacctttgtgatctcatcattgaagctctccgcatgatgaattctgctgctccaaaaaaggtttttcatgcttcaaaggtttaaacgaaatgtttggcgtacaaaagaattgagcatggaattattttcaataccttgcctcctaccatctctttaatttttattggtctacgaccatctcatgatatatgagtttatcatctttctatgtactacactattactgtgtgagataatgagtttcggttc

SEQ ID NO: 106723 - protein, 479 aa, Arabidopsis thaliana
  peptide (1)..(479): Ceres Seq. ID no. 13620284
  misc_feature (9)..(288): Pfam Name: Condensation domain Pfam Description: Condensation domain
  misc_feature (1)..(479): Homolog of NCBI NO: 15218351 NR Description: expressed protein [Arabidopsis thaliana]
  misc_feature (1)..(479): Homolog of NCBI NO: 30687731 NR Description: hypothetical protein [Arabidopsis thaliana]
  misc_feature (1)..(479): Homolog of NCBI NO: 30696326 NR Description: expressed protein [Arabidopsis thaliana]
  misc_feature (1)..(479): Homolog of NCBI NO: 26451548 NR Description: unknown protein [Arabidopsis thaliana]
  misc_feature (1)..(479): Homolog of NCBI NO: 9759186 NR Description: emb|CAB66399.1~gene_id:K19E1.19~strong similarity
  misc_feature (1)..(479): Homolog of NCBI NO: 9758716 NR Description: emb|CAB66398.1~gene_id:MNJ8.9~strong similarity
  misc_feature (1)..(479): Homolog of NCBI NO: 18421632 NR Description: expressed protein [Arabidopsis thaliana]
  misc_feature (1)..(472): Homolog of NCBI NO: 15229102 NR Description: expressed protein [Arabidopsis thaliana]
  misc_feature (9)..(472): Homolog of NCBI NO: 15242259 NR Description: hypothetical protein [Arabidopsis thaliana] emb|CAB66399.1~gene_id:MQJ16.3~strong similarity to unknown
  misc_feature (11)..(468): Homolog of NCBI NO: 18416859 NR Description: expressed protein [Arabidopsis thaliana] putative protein [Arabidopsis thaliana] unknown protein [Arabidopsis thaliana]
MAIERQVTEAEEPVSPFARLFSLPGLDVFNIVTIGCKTEGNASTIVEGIKNTLINHPRFSSILVTGHGEHKGKARWIPTKINVEEHVIVPDIDPNIENPDEFLEDYTSNMALSPMDMSKPLWEFHLLKLKTSHAEAVTVARFHHSLGDGMSLMSLLLACTRKTCDPEAFPTFVAPKKNKAKNVCFSLVAWLWFIVRLMFHTCVEVIKSIVFICRASDTSAHIMGKPGATLSANKFIHRIISLDDVKMVKNAMNMTVNDVLFGMVQAGLSRYLNQRYDLETSSKSRKNLHNIGLHGVVFFNLRPNRNIEDLAKMMAKGSKCRWGNSIGYVLIPLGMKPQDDVFEYVRQAKTIMDGKKHSLEPLFSYGLLKVTMEVFGLRGLKTLVKRIFGSTTMIFSNVVGPDEEISFFGHRIAYIAASTFGVPQALNICIQSYVDKLIINIGVDVDVIPDPHHLCDLIIEALRMMNSAAPKKVFHASKV

SEQ ID NO: 106724 - protein, 370 aa, Arabidopsis thaliana
  peptide (1)..(370): Ceres Seq. ID no. 13620285
  misc_feature (1)..(179): Pfam Name: Condensation domain Pfam Description: Condensation domain
  misc_feature (1)..(370): Homolog of NCBI NO: 15218351 NR Description: expressed protein [Arabidopsis thaliana]
  misc_feature (1)..(370): Homolog of NCBI NO: 30687731 NR Description: hypothetical protein [Arabidopsis thaliana]
  misc_feature (1)..(370): Homolog of NCBI NO: 30696326 NR Description: expressed protein [Arabidopsis thaliana]
  misc_feature (1)..(370): Homolog of NCBI NO: 26451548 NR Description: unknown protein [Arabidopsis thaliana]
  misc_feature (1)..(370): Homolog of NCBI NO: 9759186 NR Description: emb|CAB66399.1~gene_id:K19E1.19~strong similarity
  misc_feature (1)..(370): Homolog of NCBI NO: 9758716 NR Description: emb|CAB66398.1~gene_id:MNJ8.9~strong similarity
  misc_feature (1)..(370): Homolog of NCBI NO: 18421632 NR Description: expressed protein [Arabidopsis thaliana]
  misc_feature (1)..(363): Homolog of NCBI NO: 15229102 NR Description: expressed protein [Arabidopsis thaliana]
  misc_feature (1)..(363): Homolog of NCBI NO: 15242259 NR Description: hypothetical protein [Arabidopsis thaliana] emb|CAB66399.1~gene_id:MQJ16.3~strong similarity to unknown
  misc_feature (1)..(359): Homolog of NCBI NO: 18416859 NR Description: expressed protein [Arabidopsis thaliana] putative protein [Arabidopsis thaliana] unknown protein [Arabidopsis thaliana]
MALSPMDMSKPLWEFHLLKLKTSHAEAVTVARFHHSLGDGMSLMSLLLACTRKTCDPEAFPTFVAPKKNKAKNVCFSLVAWLWFIVRLMFHTCVEVIKSIVFICRASDTSAHIMGKPGATLSANKFIHRIISLDDVKMVKNAMNMTVNDVLFGMVQAGLSRYLNQRYDLETSSKSRKNLHNIGLHGVVFFNLRPNRNIEDLAKMMAKGSKCRWGNSIGYVLIPLGMKPQDDVFEYVRQAKTIMDGKKHSLEPLFSYGLLKVTMEVFGLRGLKTLVKRIFGSTTMIFSNVVGPDEEISFFGHRIAYIAASTFGVPQALNICIQSYVDKLIINIGVDVDVIPDPHHLCDLIIEALRMMNSAAPKKVFHASKV

SEQ ID NO: 106725 - protein, 365 aa, Arabidopsis thaliana
  peptide (1)..(365): Ceres Seq. ID no. 13620286
  misc_feature (1)..(174): Pfam Name: Condensation domain Pfam Description: Condensation domain
  misc_feature (1)..(365): Homolog of NCBI NO: 15218351 NR Description: expressed protein [Arabidopsis thaliana]
  misc_feature (1)..(365): Homolog of NCBI NO: 30687731 NR Description: hypothetical protein [Arabidopsis thaliana]
  misc_feature (1)..(365): Homolog of NCBI NO: 30696326 NR Description: expressed protein [Arabidopsis thaliana]
  misc_feature (1)..(365): Homolog of NCBI NO: 26451548 NR Description: unknown protein [Arabidopsis thaliana]
  misc_feature (1)..(365): Homolog of NCBI NO: 9759186 NR Description: emb|CAB66399.1~gene_id:K19E1.19~strong similarity
  misc_feature (1)..(365): Homolog of NCBI NO: 9758716 NR Description: emb|CAB66398.1~gene_id:MNJ8.9~strong similarity
  misc_feature (1)..(365): Homolog of NCBI NO: 18421632 NR Description: expressed protein [Arabidopsis thaliana]
  misc_feature (1)..(358): Homolog of NCBI NO: 15229102 NR Description: expressed protein [Arabidopsis thaliana]
  misc_feature (1)..(358): Homolog of NCBI NO: 15242259 NR Description: hypothetical protein [Arabidopsis thaliana] emb|CAB66399.1~gene_id:MQJ16.3~strong similarity to unknown
  misc_feature (1)..(354): Homolog of NCBI NO: 18416859 NR Description: expressed protein [Arabidopsis thaliana] putative protein [Arabidopsis thaliana] unknown protein [Arabidopsis thaliana]
MDMSKPLWEFHLLKLKTSHAEAVTVARFHHSLGDGMSLMSLLLACTRKTCDPEAFPTFVAPKKNKAKNVCFSLVAWLWFIVRLMFHTCVEVIKSIVFICRASDTSAHIMGKPGATLSANKFIHRIISLDDVKMVKNAMNMTVNDVLFGMVQAGLSRYLNQRYDLETSSKSRKNLHNIGLHGVVFFNLRPNRNIEDLAKMMAKGSKCRWGNSIGYVLIPLGMKPQDDVFEYVRQAKTIMDGKKHSLEPLFSYGLLKVTMEVFGLRGLKTLVKRIFGSTTMIFSNVVGPDEEISFFGHRIAYIAASTFGVPQALNICIQSYVDKLIINIGVDVDVIPDPHHLCDLIIEALRMMNSAAPKKVFHASKV

SEQ ID NO: 106726 - DNA, 1440 bp, Arabidopsis thaliana
  misc_feature (1)..(1440): Ceres Seq. ID no. 13620294
  misc_feature: MA Experiment ID: 20000171 Result: Up-regulated in Transcription
  misc_feature: MA Experiment 20000171 PARAMETER Experiment Name: At_42deg_Heat_P Parameter: Age (day) Value: 14
  misc_feature: MA Experiment 20000171 PARAMETER Experiment Name: At_42deg_Heat_P Parameter: Organism Value: A. thaliana
  misc_feature: MA Experiment 20000171 PARAMETER Experiment Name: At_42deg_Heat_P Parameter: Plant Line Value: WS
  misc_feature: MA Experiment 20000171 PARAMETER Experiment Name: At_42deg_Heat_P Parameter: Temperature (deg C) Value: 42 vs. 22
  misc_feature: MA Experiment 20000171 PARAMETER Experiment Name: At_42deg_Heat_P Parameter: Timepoint (hr) Value: 1
  misc_feature: MA Experiment 20000171 PARAMETER Experiment Name: At_42deg_Heat_P Parameter: Tissue Value: Aerial
  misc_feature: MA Experiment ID: 20000173 Result: Up-regulated in Transcription
  misc_feature: MA Experiment 20000173 PARAMETER Experiment Name: At_42deg_Heat_P Parameter: Age (day) Value: 14
  misc_feature: MA Experiment 20000173 PARAMETER Experiment Name: At_42deg_Heat_P Parameter: Organism Value: A. thaliana
  misc_feature: MA Experiment 20000173 PARAMETER Experiment Name: At_42deg_Heat_P Parameter: Plant Line Value: WS
  misc_feature: MA Experiment 20000173 PARAMETER Experiment Name: At_42deg_Heat_P Parameter: Temperature (deg C) Value: 42 vs. 22
  misc_feature: MA Experiment 20000173 PARAMETER Experiment Name: At_42deg_Heat_P Parameter: Timepoint (hr) Value: 6
  misc_feature: MA Experiment 20000173 PARAMETER Experiment Name: At_42deg_Heat_P Parameter: Tissue Value: Aerial
  misc_feature: MA Experiment ID: 20000184 Result: Up-regulated in Transcription
  misc_feature: MA Experiment 20000184 PARAMETER Experiment Name: At_Shoots__P Parameter: Age (day) Value: 7
  misc_feature: MA Experiment 20000184 PARAMETER Experiment Name: At_Shoots__P Parameter: Tissue Value: Shoots vs. Whole Plant
  misc_feature: MA Experiment ID: 20000437 Result: Up-regulated in Transcription
  misc_feature: MA Experiment 20000437 PARAMETER Experiment Name: At_Drought_P Parameter: Age (day) Value: 8
  misc_feature: MA Experiment 20000437 PARAMETER Experiment Name: At_Drought_P Parameter: Organism Value: A. thaliana
  misc_feature: MA Experiment 20000437 PARAMETER Experiment Name: At_Drought_P Parameter: Plant Line Value: WS
  misc_feature: MA Experiment 20000437 PARAMETER Experiment Name: At_Drought_P Parameter: Timepoint (hr) Value: 24
  misc_feature: MA Experiment 20000437 PARAMETER Experiment Name: At_Drought_P Parameter: Tissue Value: Whole Plant
  misc_feature: MA Experiment 20000437 PARAMETER Experiment Name: At_Drought_P Parameter: Treatment Value: Drought vs. No Drought
  misc_feature: MA Experiment ID: 20000443 Result: Up-regulated in Transcription
  misc_feature: MA Experiment 20000443 PARAMETER Experiment Name: At_1uM_BR-BRZ__P Parameter: Tissue Value: Shoot Apices
  misc_feature: MA Experiment 20000443 PARAMETER Experiment Name: At_1uM_BR-BRZ__P Parameter: Treatment Value: 1uM BRZ vs. No Treatment
  misc_feature: MA Experiment ID: 20001248 Result: Down-regulated in Transcription
  misc_feature: MA Experiment 20001248 PARAMETER Experiment Name: At_Far-red-induction_P Parameter: Age (day) Value: 7
  misc_feature: MA Experiment 20001248 PARAMETER Experiment Name: At_Far-red-induction_P Parameter: Light Value: Far-red vs. White
  misc_feature: MA Experiment 20001248 PARAMETER Experiment Name: At_Far-red-induction_P Parameter: Organism Value: A. thaliana
  misc_feature: MA Experiment 20001248 PARAMETER Experiment Name: At_Far-red-induction_P Parameter: Plant Line Value: Columbia
  misc_feature: MA Experiment 20001248 PARAMETER Experiment Name: At_Far-red-induction_P Parameter: Timepoint (hr) Value: 4
  misc_feature: MA Experiment 20001248 PARAMETER Experiment Name: At_Far-red-induction_P Parameter: Tissue Value: Whole Plant
  misc_feature: MA Experiment ID: 20001554 Result: Up-regulated in Transcription
  misc_feature: MA Experiment 20001554 PARAMETER Experiment Name: At_Drought_Soil_Dry_P Parameter: Age (day) Value: 21
  misc_feature: MA Experiment 20001554 PARAMETER Experiment Name: At_Drought_Soil_Dry_P Parameter: Organism Value: A. thaliana
  misc_feature: MA Experiment 20001554 PARAMETER Experiment Name: At_Drought_Soil_Dry_P Parameter: Plant Line Value: WS
  misc_feature: MA Experiment 20001554 PARAMETER Experiment Name: At_Drought_Soil_Dry_P Parameter: Post Timepoint (hr) Value: None
  misc_feature: MA Experiment 20001554 PARAMETER Experiment Name: At_Drought_Soil_Dry_P Parameter: Post-Treatment Value: None
  misc_feature: MA Experiment 20001554 PARAMETER Experiment Name: At_Drought_Soil_Dry_P Parameter: Timepoint (day) Value: 7
  misc_feature: MA Experiment 20001554 PARAMETER Experiment Name: At_Drought_Soil_Dry_P Parameter: Treatment Value: Drought vs. No Drought
  misc_feature: MA Experiment ID: 20001555 Result: Up-regulated in Transcription
  misc_feature: MA Experiment 20001555 PARAMETER Experiment Name: At_Drought_Soil_Dry_P Parameter: Age (day) Value: 24
  misc_feature: MA Experiment 20001555 PARAMETER Experiment Name: At_Drought_Soil_Dry_P Parameter: Organism Value: A. thaliana
  misc_feature: MA Experiment 20001555 PARAMETER Experiment Name: At_Drought_Soil_Dry_P Parameter: Plant Line Value: WS
  misc_feature: MA Experiment 20001555 PARAMETER Experiment Name: At_Drought_Soil_Dry_P Parameter: Post Timepoint (hr) Value: None
  misc_feature: MA Experiment 20001555 PARAMETER Experiment Name: At_Drought_Soil_Dry_P Parameter: Post-Treatment Value: None
  misc_feature: MA Experiment 20001555 PARAMETER Experiment Name: At_Drought_Soil_Dry_P Parameter: Timepoint (day) Value: 10
  misc_feature: MA Experiment 20001555 PARAMETER Experiment Name: At_Drought_Soil_Dry_P Parameter: Treatment Value: Drought vs. No Drought
  misc_feature: MA Experiment ID: 20001556 Result: Up-regulated in Transcription
  misc_feature: MA Experiment 20001556 PARAMETER Experiment Name: At_Drought_Soil_Dry_P Parameter: Age (day) Value: 26
  misc_feature: MA Experiment 20001556 PARAMETER Experiment Name: At_Drought_Soil_Dry_P Parameter: Organism Value: A. thaliana
  misc_feature: MA Experiment 20001556 PARAMETER Experiment Name: At_Drought_Soil_Dry_P Parameter: Plant Line Value: WS
  misc_feature: MA Experiment 20001556 PARAMETER Experiment Name: At_Drought_Soil_Dry_P Parameter: Post Timepoint (hr) Value: None
  misc_feature: MA Experiment 20001556 PARAMETER Experiment Name: At_Drought_Soil_Dry_P Parameter: Post-Treatment Value: None
  misc_feature: MA Experiment 20001556 PARAMETER Experiment Name: At_Drought_Soil_Dry_P Parameter: Timepoint (day) Value: 12
  misc_feature: MA Experiment 20001556 PARAMETER Experiment Name: At_Drought_Soil_Dry_P Parameter: Treatment Value: Drought vs. No Drought
aaaagcttcgatcttttaatgttgtttgatcggtagacaatcgatgccaaagtgtgaagatacctcagtccttacctatctccagaaattgcagtagtagattctgaaagaaaatgggaattgtggaaaggataaaagagatcgaagccgagatggctcggacgcagaagaacaaagctacagagtatcatcttggtcagctcaaggcaaaaattgcaaagctcagaacacaactcttagagcctccaaaaggctctagtggaggtggggatggttttgaagttacaaagtatgggcatggacgtgttgcacttataggatttccaagtgttggaaagtctacgcttttgacaatgttaactggcacacattctgaagcagcctcatatgaatttacaacacttacatgcatccctggagttattcactacaatgacaccaaaatccagttgcttgatcttcctgggattattgaaggtgcttcagaaggaaagggacgagggaggcaggttattgctgttgcaaagtcttcagaccttgtgttgatggttcttgatgcctcaaaaagtgaaggccacaggcaaatactgactaaggagcttgaagcagttggtctgcgtctgaacaaaagacctccacagatatactttaagaagaagaagactggtgggatttctttcaacactacaacccccttgactcgcattgatgagaagctctgttatcaaattctgcatgaatacaagattcacaatgctgaggttctatttcgtgaagatgctacggtggatgactttattgatgtcgttgaaggcaatcgcaaatacatcaaatgtgtatatgtctacaacaaaatagatgttgttggaatcgatgacgttgataggctggcacggcagccaaattctattgttattagctgcaacctaaagctaaacttagacagactacttgcaagaatgtgggacgaaatgggacttgtgagagtttactcaaagcctcaaagccagcaaccagatttcgatgaaccctttgtcctctcagctgatagaggtggctgcacagttgaagatttctgtaaccaagtccacagaactctggtgaaggatatgaagtatgcactagtttggggcacaagcgctaggcactaccctcaacactgtggtctttttcatcatcttgaggatgaagatgttgttcaaattgtcaagaaaaaggtgagagaagaagggggaaggggacggttcaagtcacactcgaacgcacctgctagaattgcagaccgagagaagaaagctccactaaagcaataaaacagttactcatcctgagttatcccaagtaatacagatctcatgtgtattagaactatgtaatagttgttgctcaccaattctactgtaaattctgttcttagtctataaaaaggcattggcatcc

SEQ ID NO: 106727 - protein, 399 aa, Arabidopsis thaliana
  peptide (1)..(399): Ceres Seq. ID no. 13620295
  misc_feature (1)..(267): Pfam Name: GTP1/OBG family Pfam Description: GTP1/OBG family
  misc_feature (1)..(399): Homolog of NCBI NO: 15218561 NR Description: GTP-binding protein -related [Arabidopsis
  misc_feature (1)..(399): Homolog of NCBI NO: 15220113 NR Description: developmentally regulated GTP-binding protein thaliana] >gi|9665129|gb|AAF97313.1|AC007843_16 GTP binding
  misc_feature (1)..(399): Homolog of NCBI NO: 2058456 NR Description: GTP-binding protein [Arabidopsis thaliana] developmentally regulated GTP binding protein [Arabidopsis
  misc_feature (1)..(399): Homolog of NCBI NO: 13877991 NR Description: putative developmentally regulated GTP-binding
  misc_feature (1)..(399): Homolog of NCBI NO: 8778457 NR Description: F1L3.17 [Arabidopsis thaliana]
  misc_feature (1)..(399): Homolog of NCBI NO: 7441590 NR Description: GTP binding protein - garden pea
  misc_feature (1)..(367): Homolog of NCBI NO: 34221970 NR Description: developmentally regulated GTP-binding protein
  misc_feature (1)..(367): Homolog of NCBI NO: 21356473 NR Description: CG6195-PA [Drosophila melanogaster]
  misc_feature (1)..(367): Homolog of NCBI NO: 4557537 NR Description: developmentally regulated GTP binding protein 2
  misc_feature (1)..(367): Homolog of NCBI NO: 12653443 NR Description: developmentally regulated GTP-binding protein 2 sapiens] >gi|30582791|gb|AAP35622.1| developmentally regulated
MGIVERIKEIEAEMARTQKNKATEYHLGQLKAKIAKLRTQLLEPPKGSSGGGDGFEVTKYGHGRVALIGFPSVGKSTLLTMLTGTHSEAASYEFTTLTCIPGVIHYNDTKIQLLDLPGIIEGASEGKGRGRQVIAVAKSSDLVLMVLDASKSEGHRQILTKELEAVGLRLNKRPPQIYFKKKKTGGISFNTTTPLTRIDEKLCYQILHEYKIHNAEVLFREDATVDDFIDVVEGNRKYIKCVYVYNKIDVVGIDDVDRLARQPNSIVISCNLKLNLDRLLARMWDEMGLVRVYSKPQSQQPDFDEPFVLSADRGGCTVEDFCNQVHRTLVKDMKYALVWGTSARHYPQHCGLFHHLEDEDVVQIVKKKVREEGGRGRFKSHSNAPARIADREKKAPLKQ

SEQ ID NO: 106728 - protein, 386 aa, Arabidopsis thaliana
  peptide (1)..(386): Ceres Seq. ID no. 13620296
  misc_feature (1)..(254): Pfam Name: GTP1/OBG family Pfam Description: GTP1/OBG family
  misc_feature (1)..(386): Homolog of NCBI NO: 15218561 NR Description: GTP-binding protein -related [Arabidopsis
  misc_feature (1)..(386): Homolog of NCBI NO: 15220113 NR Description: developmentally regulated GTP-binding protein thaliana] >gi|9665129|gb|AAF97313.1|AC007843_16 GTP binding
  misc_feature (1)..(386): Homolog of NCBI NO: 2058456 NR Description: GTP-binding protein [Arabidopsis thaliana] developmentally regulated GTP binding protein [Arabidopsis
  misc_feature (1)..(386): Homolog of NCBI NO: 13877991 NR Description: putative developmentally regulated GTP-binding
  misc_feature (1)..(386): Homolog of NCBI NO: 8778457 NR Description: F1L3.17 [Arabidopsis thaliana]
  misc_feature (1)..(386): Homolog of NCBI NO: 7441590 NR Description: GTP binding protein - garden pea
  misc_feature (1)..(354): Homolog of NCBI NO: 34221970 NR Description: developmentally regulated GTP-binding protein
  misc_feature (1)..(354): Homolog of NCBI NO: 21356473 NR Description: CG6195-PA [Drosophila melanogaster]
  misc_feature (1)..(354): Homolog of NCBI NO: 4557537 NR Description: developmentally regulated GTP binding protein 2
  misc_feature (1)..(354): Homolog of NCBI NO: 12653443 NR Description: developmentally regulated GTP-binding protein 2 sapiens] >gi|30582791|gb|AAP35622.1| developmentally regulated
MARTQKNKATEYHLGQLKAKIAKLRTQLLEPPKGSSGGGDGFEVTKYGHGRVALIGFPSVGKSTLLTMLTGTHSEAASYEFTTLTCIPGVIHYNDTKIQLLDLPGIIEGASEGKGRGRQVIAVAKSSDLVLMVLDASKSEGHRQILTKELEAVGLRLNKRPPQIYFKKKKTGGISFNTTTPLTRIDEKLCYQILHEYKIHNAEVLFREDATVDDFIDVVEGNRKYIKCVYVYNKIDVVGIDDVDRLARQPNSIVISCNLKLNLDRLLARMWDEMGLVRVYSKPQSQQPDFDEPFVLSADRGGCTVEDFCNQVHRTLVKDMKYALVWGTSARHYPQHCGLFHHLEDEDVVQIVKKKVREEGGRGRFKSHSNAPARIADREKKAPLKQ

SEQ ID NO: 106729 - protein, 319 aa, Arabidopsis thaliana
  peptide (1)..(319): Ceres Seq. ID no. 13620297
  misc_feature (1)..(187): Pfam Name: GTP1/OBG family Pfam Description: GTP1/OBG family
  misc_feature (1)..(319): Homolog of NCBI NO: 15218561 NR Description: GTP-binding protein -related [Arabidopsis
  misc_feature (1)..(319): Homolog of NCBI NO: 15220113 NR Description: developmentally regulated GTP-binding protein thaliana] >gi|9665129|gb|AAF97313.1|AC007843_16 GTP binding
  misc_feature (1)..(319): Homolog of NCBI NO: 2058456 NR Description: GTP-binding protein [Arabidopsis thaliana] developmentally regulated GTP binding protein [Arabidopsis
  misc_feature (1)..(319): Homolog of NCBI NO: 13877991 NR Description: putative developmentally regulated GTP-binding
  misc_feature (1)..(319): Homolog of NCBI NO: 8778457 NR Description: F1L3.17 [Arabidopsis thaliana]
  misc_feature (1)..(319): Homolog of NCBI NO: 7441590 NR Description: GTP binding protein - garden pea
  misc_feature (1)..(287): Homolog of NCBI NO: 34221970 NR Description: developmentally regulated GTP-binding protein
  misc_feature (1)..(287): Homolog of NCBI NO: 21356473 NR Description: CG6195-PA [Drosophila melanogaster]
  misc_feature (1)..(287): Homolog of NCBI NO: 4557537 NR Description: developmentally regulated GTP binding protein 2
  misc_feature (1)..(287): Homolog of NCBI NO: 12653443 NR Description: developmentally regulated GTP-binding protein 2 sapiens] >gi|30582791|gb|AAP35622.1| developmentally regulated
MLTGTHSEAASYEFTTLTCIPGVIHYNDTKIQLLDLPGIIEGASEGKGRGRQVIAVAKSSDLVLMVLDASKSEGHRQILTKELEAVGLRLNKRPPQIYFKKKKTGGISFNTTTPLTRIDEKLCYQILHEYKIHNAEVLFREDATVDDFIDVVEGNRKYIKCVYVYNKIDVVGIDDVDRLARQPNSIVISCNLKLNLDRLLARMWDEMGLVRVYSKPQSQQPDFDEPFVLSADRGGCTVEDFCNQVHRTLVKDMKYALVWGTSARHYPQHCGLFHHLEDEDVVQIVKKKVREEGGRGRFKSHSNAPARIADREKKAPLKQ

SEQ ID NO: 106730 - DNA, 1756 bp, Arabidopsis thaliana
  misc_feature (1)..(1756): Ceres Seq. ID no. 13620306
  misc_feature: MA Experiment ID: 20000306 Result: Up-regulated in Transcription
  misc_feature: MA Experiment 20000306 PARAMETER Experiment Name: At_Germinating_Seeds_Sub_P Parameter: Age (hr) Value: 6 vs. 0
  misc_feature: MA Experiment 20000306 PARAMETER Experiment Name: At_Germinating_Seeds_Sub_P Parameter: Organism Value: A. thaliana
  misc_feature: MA Experiment 20000306 PARAMETER Experiment Name: At_Germinating_Seeds_Sub_P Parameter: Plant Line Value: WS
  misc_feature: MA Experiment 20000306 PARAMETER Experiment Name: At_Germinating_Seeds_Sub_P Parameter: Tissue Value: Germinating Seeds
  misc_feature: MA Experiment ID: 20000328 Result: Up-regulated in Transcription
  misc_feature: MA Experiment 20000328 PARAMETER Experiment Name: At_42deg_Heat_Sub_P Parameter: Age (day) Value: 14
  misc_feature: MA Experiment 20000328 PARAMETER Experiment Name: At_42deg_Heat_Sub_P Parameter: Organism Value: A. thaliana
  misc_feature: MA Experiment 20000328 PARAMETER Experiment Name: At_42deg_Heat_Sub_P Parameter: Plant Line Value: WS
  misc_feature: MA Experiment 20000328 PARAMETER Experiment Name: At_42deg_Heat_Sub_P Parameter: Temperature (deg C) Value: 42 vs. 22
  misc_feature: MA Experiment 20000328 PARAMETER Experiment Name: At_42deg_Heat_Sub_P Parameter: Timepoint (hr) Value: 6
  misc_feature: MA Experiment 20000328 PARAMETER Experiment Name: At_42deg_Heat_Sub_P Parameter: Tissue Value: Aerial
  misc_feature: MA Experiment ID: 20000329 Result: Down-regulated in Transcription
  misc_feature: MA Experiment 20000329 PARAMETER Experiment Name: At_4deg_Cold_Sub_P Parameter: Age (day) Value: 14
  misc_feature: MA Experiment 20000329 PARAMETER Experiment Name: At_4deg_Cold_Sub_P Parameter: Organism Value: A. thaliana
  misc_feature: MA Experiment 20000329 PARAMETER Experiment Name: At_4deg_Cold_Sub_P Parameter: Plant Line Value: WS
  misc_feature: MA Experiment 20000329 PARAMETER Experiment Name: At_4deg_Cold_Sub_P Parameter: Temperature (deg C) Value: 4 vs. 22
  misc_feature: MA Experiment 20000329 PARAMETER Experiment Name: At_4deg_Cold_Sub_P Parameter: Timepoint (hr) Value: 6
  misc_feature: MA Experiment 20000329 PARAMETER Experiment Name: At_4deg_Cold_Sub_P Parameter: Tissue Value: Aerial
  misc_feature: MA Experiment ID: 20000352 Result: Up-regulated in Transcription
  misc_feature: MA Experiment 20000352 PARAMETER Experiment Name: At_Drought_Sub_P Parameter: Age (day) Value: 7
  misc_feature: MA Experiment 20000352 PARAMETER Experiment Name: At_Drought_Sub_P Parameter: Organism Value: A. thaliana
  misc_feature: MA Experiment 20000352 PARAMETER Experiment Name: At_Drought_Sub_P Parameter: Plant Line Value: WS
  misc_feature: MA Experiment 20000352 PARAMETER Experiment Name: At_Drought_Sub_P Parameter: Timepoint (hr) Value: 6
  misc_feature: MA Experiment 20000352 PARAMETER Experiment Name: At_Drought_Sub_P Parameter: Tissue Value: Whole Plant
  misc_feature: MA Experiment 20000352 PARAMETER Experiment Name: At_Drought_Sub_P Parameter: Treatment Value: Drought vs. No Drought
atttctttctaatttcttctcttcatgaattaagccaaaccaacaaaaaaaatcatttaattttcgcggagagatggagaaattctcgtacaactcttatccagattcaaccgactcgtcaccgagatctcgtgagatcgaattcgataacccgccgcctccatgggatgatcagaaccagaaccagcagcaacatagctacaaggtgaagtttatgtgcagctatggcggcaagattcagccacggcctcacgataatcagctcacttacgtaaacggagaaacgaagattctttccgttgatcgcgggattagattccctgttttagcttccaaactctccaccgtatgcggcggcggtgatggcggcggaggagaagttacgtttaagtatcagcttccgggagaagacttagacgctttgatctcggttacgaacgatgatgatctggagcatatgatgcacgagtacgatcgcttgcttcgtttgtcgtctaagccagcgaggatgcgtttgtttctcttcccggcttcttctggatttggttctcaaagttcgactcaatcggatcgagatcgcttcgtcgaggcgttgaacactgttcctaggctatctgaatcggagaaatccgtaactgctcctccgaataatgcggattttttgtttggatcggagaaagttgcagctccgccgccgccaccaccggctgaggtgaaattaccggttcctgtggcgttagaaccgcctttgtttaacgatccgcgtgtgattcaaccggatcacgtcgtaaatccgatggaaattcaaagacaaatgcaggaatttcagaggatgcatattagggatcaagaacaacaacaacaacaggaagctgtatacagaaggaagagtaacgaagacggtttaatagaaaccggaggtggatacttctctccaccgtacatacaaaatcctgcgccaccaccgccacagcagacgattcctcaaacgaatccgcaagctcctccgatgacgactttctggcaaggaaaccacaatccaggagtcgtatttccaacaaccacacatggattaggattaccagagcaaccagtttacatgatcccatctccatctccatctccggtgtaccacgcgccaccaccaccgcaaccgcaaggtgtcatcagaccaatacttacaggacaagtaaaccaaggcggctactatcctcaggtacagagagtggcttcagatacttacagagaaccacaccaatcaccgtacaacgtggctcagccacttcaggcacctataggaacaaaagcagcacaacaacaacaacctcctcctcctcagccttttacctctggtcctccaccaccgcaatacaccgcagtaccaccgccacgacaagtagtaggattaccagatacatcagcgtatactcaggtgacttacactggaggaatggggaaacaagtttattacacggaggctccaccgccgcagtaccatggagttggcttacctgtaactggtatgagtgaattgagaactggaccggacgggaagcttgttgctatgaacatggcacctaaagtttcatctcagagttcagattcggctgtttgattgatgaggtatttcatatggttgaatcagattattgttaatctattacaacaaatttcatcatcttttatatatatatatatatatagtgtaattaagatcactttggtgtctgataaataatgtttttttctttttccc

SEQ ID NO: 106731 - protein, 513 aa, Arabidopsis thaliana
  peptide (1)..(513): Ceres Seq. ID no. 13620307
  misc_feature (59)..(153): Pfam Name: PB1 domain Pfam Description: PB1 domain
  misc_feature (1)..(513): Homolog of NCBI NO: 15237703 NR Description: octicosapeptide/Phox/Bem1p (PB1) protein [Arabidopsis thaliana] >gi|10178224|dbj|BAB11604.1| similarity to unknown protein~gb|AAD14519.1~gene_id:T12B11.2
  misc_feature (7)..(205): Homolog of NCBI NO: 18379168 NR Description: octicosapeptide/Phox/Bem1p (PB1) protein [Arabidopsis thaliana] >gi|17979119|gb|AAL49817.1| protein [Arabidopsis thaliana] >gi|20197587|gb|AAD14519.2|
  misc_feature (7)..(205): Homolog of NCBI NO: 21553908 NR Description: unknown [Arabidopsis thaliana]
  misc_feature (45)..(210): Homolog of NCBI NO: 9293928 NR Description: gb|AAF04880.1~gene_id:MFE16.2~similar to unknown
  misc_feature (45)..(210): Homolog of NCBI NO: 15231568 NR Description: octicosapeptide/Phox/Bem1p (PB1)
  misc_feature (9)..(213): Homolog of NCBI NO: 34895646 NR Description: P0480E02.2 [Oryza sativa (japonica
  misc_feature (38)..(190): Homolog of NCBI NO: 28393406 NR Description: unknown protein [Arabidopsis thaliana]
  misc_feature (38)..(190): Homolog of NCBI NO: 15240580 NR Description: octicosapeptide/Phox/Bem1p (PB1) protein [Arabidopsis thaliana] >gi|8777423|dbj|BAA97013.1|
  misc_feature (234)..(505): Homolog of NCBI NO: 15242462 NR Description: octicosapeptide/Phox/Bem1p (PB1) protein [Arabidopsis thaliana] >gi|11357503|pir||T49936
  misc_feature (26)..(398): Homolog of NCBI NO: 15232679 NR Description: protein kinase family [Arabidopsis thaliana]
MEKFSYNSYPDSTDSSPRSREIEFDNPPPPWDDQNQNQQQHSYKVKFMCSYGGKIQPRPHDNQLTYVNGETKILSVDRGIRFPVLASKLSTVCGGGDGGGGEVTFKYQLPGEDLDALISVTNDDDLEHMMHEYDRLLRLSSKPARMRLFLFPASSGFGSQSSTQSDRDRFVEALNTVPRLSESEKSVTAPPNNADFLFGSEKVAAPPPPPPAEVKLPVPVALEPPLFNDPRVIQPDHVVNPMEIQRQMQEFQRMHIRDQEQQQQQEAVYRRKSNEDGLIETGGGYFSPPYIQNPAPPPPQQTIPQTNPQAPPMTTFWQGNHNPGVVFPTTTHGLGLPEQPVYMIPSPSPSPVYHAPPPPQPQGVIRPILTGQVNQGGYYPQVQRVASDTYREPHQSPYNVAQPLQAPIGTKAAQQQQPPPPQPFTSGPPPPQYTAVPPPRQVVGLPDTSAYTQVTYTGGMGKQVYYTEAPPPQYHGVGLPVTGMSELRTGPDGKLVAMNMAPKVSSQSSDSAV

SEQ ID NO: 106732 - protein, 466 aa, Arabidopsis thaliana
  peptide (1)..(466): Ceres Seq. ID no. 13620308
  misc_feature (12)..(106): Pfam Name: PB1 domain Pfam Description: PB1 domain
  misc_feature (1)..(466): Homolog of NCBI NO: 15237703 NR Description: octicosapeptide/Phox/Bem1p (PB1) protein [Arabidopsis thaliana] >gi|10178224|dbj|BAB11604.1| similarity to unknown protein~gb|AAD14519.1~gene_id:T12B11.2
  misc_feature (1)..(158): Homolog of NCBI NO: 18379168 NR Description: octicosapeptide/Phox/Bem1p (PB1) protein [Arabidopsis thaliana] >gi|17979119|gb|AAL49817.1| protein [Arabidopsis thaliana] >gi|20197587|gb|AAD14519.2|
  misc_feature (1)..(158): Homolog of NCBI NO: 21553908 NR Description: unknown [Arabidopsis thaliana]
  misc_feature (1)..(163): Homolog of NCBI NO: 9293928 NR Description: gb|AAF04880.1~gene_id:MFE16.2~similar to unknown
  misc_feature (1)..(163): Homolog of NCBI NO: 15231568 NR Description: octicosapeptide/Phox/Bem1p (PB1)
  misc_feature (1)..(166): Homolog of NCBI NO: 34895646 NR Description: P0480E02.2 [Oryza sativa (japonica
  misc_feature (1)..(143): Homolog of NCBI NO: 28393406 NR Description: unknown protein [Arabidopsis thaliana]
  misc_feature (1)..(143): Homolog of NCBI NO: 15240580 NR Description: octicosapeptide/Phox/Bem1p (PB1) protein [Arabidopsis thaliana] >gi|8777423|dbj|BAA97013.1|
  misc_feature (187)..(458): Homolog of NCBI NO: 15242462 NR Description: octicosapeptide/Phox/Bem1p (PB1) protein [Arabidopsis thaliana] >gi|11357503|pir||T49936
  misc_feature (1)..(351): Homolog of NCBI NO: 15232679 NR Description: protein kinase family [Arabidopsis thaliana]
MCSYGGKIQPRPHDNQLTYVNGETKILSVDRGIRFPVLASKLSTVCGGGDGGGGEVTFKYQLPGEDLDALISVTNDDDLEHMMHEYDRLLRLSSKPARMRLFLFPASSGFGSQSSTQSDRDRFVEALNTVPRLSESEKSVTAPPNNADFLFGSEKVAAPPPPPPAEVKLPVPVALEPPLFNDPRVIQPDHVVNPMEIQRQMQEFQRMHIRDQEQQQQQEAVYRRKSNEDGLIETGGGYFSPPYIQNPAPPPPQQTIPQTNPQAPPMTTFWQGNHNPGVVFPTTTHGLGLPEQPVYMIPSPSPSPVYHAPPPPQPQGVIRPILTGQVNQGGYYPQVQRVASDTYREPHQSPYNVAQPLQAPIGTKAAQQQQPPPPQPFTSGPPPPQYTAVPPPRQVVGLPDTSAYTQVTYTGGMGKQVYYTEAPPPQYHGVGLPVTGMSELRTGPDGKLVAMNMAPKVSSQSSDSAV

SEQ ID NO: 106733 - protein, 385 aa, Arabidopsis thaliana
  peptide (1)..(385): Ceres Seq. ID no. 13620309
  misc_feature (1)..(385): Homolog of NCBI NO: 15237703 NR Description: octicosapeptide/Phox/Bem1p (PB1) protein [Arabidopsis thaliana] >gi|10178224|dbj|BAB11604.1| similarity to unknown protein~gb|AAD14519.1~gene_id:T12B11.2
  misc_feature (1)..(77): Homolog of NCBI NO: 18379168 NR Description: octicosapeptide/Phox/Bem1p (PB1) protein [Arabidopsis thaliana] >gi|17979119|gb|AAL49817.1| protein [Arabidopsis thaliana] >gi|20197587|gb|AAD14519.2|
  misc_feature (1)..(77): Homolog of NCBI NO: 21553908 NR Description: unknown [Arabidopsis thaliana]
  misc_feature (1)..(82): Homolog of NCBI NO: 9293928 NR Description: gb|AAF04880.1~gene_id:MFE16.2~similar to unknown
  misc_feature (1)..(82): Homolog of NCBI NO: 15231568 NR Description: octicosapeptide/Phox/Bem1p (PB1)
  misc_feature (1)..(85): Homolog of NCBI NO: 34895646 NR Description: P0480E02.2 [Oryza sativa (japonica
  misc_feature (1)..(62): Homolog of NCBI NO: 28393406 NR Description: unknown protein [Arabidopsis thaliana]
  misc_feature (1)..(62): Homolog of NCBI NO: 15240580 NR Description: octicosapeptide/Phox/Bem1p (PB1) protein [Arabidopsis thaliana] >gi|8777423|dbj|BAA97013.1|
  misc_feature (106)..(377): Homolog of NCBI NO: 15242462 NR Description: octicosapeptide/Phox/Bem1p (PB1) protein [Arabidopsis thaliana] >gi|11357503|pir||T49936
  misc_feature (1)..(270): Homolog of NCBI NO: 15232679 NR Description: protein kinase family [Arabidopsis thaliana]
MMHEYDRLLRLSSKPARMRLFLFPASSGFGSQSSTQSDRDRFVEALNTVPRLSESEKSVTAPPNNADFLFGSEKVAAPPPPPPAEVKLPVPVALEPPLFNDPRVIQPDHVVNPMEIQRQMQEFQRMHIRDQEQQQQQEAVYRRKSNEDGLIETGGGYFSPPYIQNPAPPPPQQTIPQTNPQAPPMTTFWQGNHNPGVVFPTTTHGLGLPEQPVYMIPSPSPSPVYHAPPPPQPQGVIRPILTGQVNQGGYYPQVQRVASDTYREPHQSPYNVAQPLQAPIGTKAAQQQQPPPPQPFTSGPPPPQYTAVPPPRQVVGLPDTSAYTQVTYTGGMGKQVYYTEAPPPQYHGVGLPVTGMSELRTGPDGKLVAMNMAPKVSSQSSDSAV

SEQ ID NO: 106734 - DNA, 1657 bp, Arabidopsis thaliana
  misc_feature (1)..(1657): Ceres Seq. ID no. 13620323
  misc_feature: MA Experiment ID: 20000173 Result: Down-regulated in Transcription
  misc_feature: MA Experiment 20000173 PARAMETER Experiment Name: At_42deg_Heat_P Parameter: Age (day) Value: 14
  misc_feature: MA Experiment 20000173 PARAMETER Experiment Name: At_42deg_Heat_P Parameter: Organism Value: A. thaliana
  misc_feature: MA Experiment 20000173 PARAMETER Experiment Name: At_42deg_Heat_P Parameter: Plant Line Value: WS
  misc_feature: MA Experiment 20000173 PARAMETER Experiment Name: At_42deg_Heat_P Parameter: Temperature (deg C) Value: 42 vs. 22
  misc_feature: MA Experiment 20000173 PARAMETER Experiment Name: At_42deg_Heat_P Parameter: Timepoint (hr) Value: 6
  misc_feature: MA Experiment 20000173 PARAMETER Experiment Name: At_42deg_Heat_P Parameter: Tissue Value: Aerial
  misc_feature: MA Experiment ID: 20000265 Result: Up-regulated in Transcription
  misc_feature: MA Experiment 20000265 PARAMETER Experiment Name: At_Open_Flower_P Parameter: Age (day) Value: 21
  misc_feature: MA Experiment 20000265 PARAMETER Experiment Name: At_Open_Flower_P Parameter: Plant Line Value: WS
  misc_feature: MA Experiment 20000265 PARAMETER Experiment Name: At_Open_Flower_P Parameter: Tissue Value: Closed Flower vs. Whole Plant
  misc_feature: MA Experiment ID: 20000286 Result: Up-regulated in Transcription
  misc_feature: MA Experiment 20000286 PARAMETER Experiment Name: At_Open_Flower_P Parameter: Age (day) Value: 21
  misc_feature: MA Experiment 20000286 PARAMETER Experiment Name: At_Open_Flower_P Parameter: Plant Line Value: WS
  misc_feature: MA Experiment 20000286 PARAMETER Experiment Name: At_Open_Flower_P Parameter: Tissue Value: Half Open vs. Whole Plant
  misc_feature: MA Experiment ID: 20000439 Result: Up-regulated in Transcription
  misc_feature: MA Experiment 20000439 PARAMETER Experiment Name: At_Roots__P Parameter: Age (day) Value: 14 vs. 21
  misc_feature: MA Experiment 20000439 PARAMETER Experiment Name: At_Roots__P Parameter: Organism Value: A. thaliana
  misc_feature: MA Experiment 20000439 PARAMETER Experiment Name: At_Roots__P Parameter: Tissue Value: Roots vs. Whole Plant
  misc_feature: MA Experiment ID: 20001451 Result: Down-regulated in Transcription
  misc_feature: MA Experiment 20001451 PARAMETER Experiment Name: At_Far-red-induction_P Parameter: Age (day) Value: 7
  misc_feature: MA Experiment 20001451 PARAMETER Experiment Name: At_Far-red-induction_P Parameter: Light Value: Far-red vs. White
  misc_feature: MA Experiment 20001451 PARAMETER Experiment Name: At_Far-red-induction_P Parameter: Organism Value: A. thaliana
  misc_feature: MA Experiment 20001451 PARAMETER Experiment Name: At_Far-red-induction_P Parameter: Plant Line Value: Columbia
  misc_feature: MA Experiment 20001451 PARAMETER Experiment Name: At_Far-red-induction_P Parameter: Timepoint (hr) Value: 24
  misc_feature: MA Experiment 20001451 PARAMETER Experiment Name: At_Far-red-induction_P Parameter: Tissue Value: Whole Plant
agtgtgagagagagagcgagagatatgaaagcttaaagctttgagaaagagcaactactgtgtgtataaactatcaatattattagtcttctcgtcttccttaagatcccaacagctattgaatccaatttgttcttgggtcttgttaaaagttttcgactttgctcaatttgtcgaatttgccatcgaaaatttagtaaaatgcgtggccttgatcgatggatagctgaagcaatcagatcagagtcattagatcacaatggtcaaatcatctgcggtgggttgtttctcgaagaatctcttccttcctcgtctgtctcttttctttcgtcgaaggattgttccgtcaattcgtgtcgcttcagtcaaaagtcgagttttttgaagtttaggagacgaaacgggaccagggaacctctgtttctgtctgttagtttatcgattaacgagagtaatggtgaggaagaagaaggtgaagggtataatggtcaaaacggctttaaatcggagaaaggttcggtgttgatcggtggtggtcaagaatctaaggagaagcgtagggttaaggaaaatggagcaggagctctcaacacaaccaagcatttatgggctggagcttttgcagccatggtttcaagaacttgcattgcacctcttgaacggatgaagctagaatacattgttcgcggagagcaagggaatcttcttgaactcattcagaggattgcaacaaatgaagggattagaggattttggaaagggaatttggttaatattctcagaactgctccctttaagtccatcaacttctatgcatatgatacatatagaggtcagcttctgaaattgtccgggaatgaagaaacgacaaatttcgagaggtttgttgctggtgcagctgccggagtaacagctagtttgctttgtctaccacttgatactataagaacggttatggtggcacccggtggagaagcattaggtggtgtagttggtgcattccgtcacatgattcaaactgaaggtttcttttccctatacaaaggtcttgtaccttcacttgttagtatggctccatcgggagctgtgttctacggtgtctatgatattttaaaatcagcttaccttcatacaccggaaggtaagaaacggcttgaacacatgaagcaagaaggtgaagaacttaatgctttcgatcaactcgagcttggtcccatgagaactttgttatatggagcaatcgcaggggcttgctcagaagcagcaacatatccgtttgaagttgtgagaaggcgtttacaaatgcagtcacatgctaaaaggttaagcgcagtggctacttgtgtgaagatcattgaacaaggaggtgttcctgctctatatgctggcttgattcccagcttattgcaggttttgccttccgcggcaatcagttactttgtttacgagttcatgaaagttgttctgaaagtagaatcatccgcataagacaataagcaatgagaaatgacacaattactgctggagctgcttcagaggagagttttttcgttttctttttggggtttacactgattcgtgtagtttttccacacttcatcgaaaacagataagaggttgtgaaacgtttttttgcaagaaataataagatttgggc

SEQ ID NO: 106735 - protein, 428 aa, Arabidopsis thaliana
  peptide (1)..(428): Ceres Seq. ID no. 13620324
  misc_feature (1)..(428): Homolog of NCBI NO: 15238315 NR Description: mitochondrial carrier protein family [Arabidopsis
  misc_feature (1)..(425): Homolog of NCBI NO: 25406546 NR Description: hypothetical protein T11I11.12 [imported] - thaliana >gi|12324250|gb|AAG52097.1|AC012680_8 putative
  misc_feature (1)..(248): Homolog of NCBI NO: 22330713 NR Description: mitochondrial carrier protein family [Arabidopsis
  misc_feature (404)..(425): Homolog of NCBI NO: 22330713 NR Description: mitochondrial carrier protein family [Arabidopsis
  misc_feature (133)..(424): Homolog of NCBI NO: 27369998 NR Description: calcium-binding transporter [Mus musculus]
  misc_feature (133)..(424): Homolog of NCBI NO: 33286910 NR Description: Calcium-binding transporter [Mus musculus]
  misc_feature (133)..(424): Homolog of NCBI NO: 11360341 NR Description: peroxisomal Ca-dependent solute carrier
  misc_feature (133)..(424): Homolog of NCBI NO: 34860155 NR Description: similar to calcium-binding transporter [Rattus
  misc_feature (133)..(424): Homolog of NCBI NO: 27694811 NR Description: Similar to hypothetical protein LOC229731
  misc_feature (107)..(422): Homolog of NCBI NO: 34895726 NR Description: putative peroxisomal Ca-dependent solute carrier
MRGLDRWIAEAIRSESLDHNGQIICGGLFLEESLPSSSVSFLSSKDCSVNSCRFSQKSSFLKFRRRNGTREPLFLSVSLSINESNGEEEEGEGYNGQNGFKSEKGSVLIGGGQESKEKRRVKENGAGALNTTKHLWAGAFAAMVSRTCIAPLERMKLEYIVRGEQGNLLELIQRIATNEGIRGFWKGNLVNILRTAPFKSINFYAYDTYRGQLLKLSGNEETTNFERFVAGAAAGVTASLLCLPLDTIRTVMVAPGGEALGGVVGAFRHMIQTEGFFSLYKGLVPSLVSMAPSGAVFYGVYDILKSAYLHTPEGKKRLEHMKQEGEELNAFDQLELGPMRTLLYGAIAGACSEAATYPFEVVRRRLQMQSHAKRLSAVATCVKIIEQGGVPALYAGLIPSLLQVLPSAAISYFVYEFMKVVLKVESSA

SEQ ID NO: 106736 - protein, 286 aa, Arabidopsis thaliana
  peptide (1)..(286): Ceres Seq. ID no. 13620325
  misc_feature (1)..(286): Homolog of NCBI NO: 15238315 NR Description: mitochondrial carrier protein family [Arabidopsis
  misc_feature (1)..(283): Homolog of NCBI NO: 25406546 NR Description: hypothetical protein T11I11.12 [imported] - thaliana >gi|12324250|gb|AAG52097.1|AC012680_8 putative
  misc_feature (1)..(106): Homolog of NCBI NO: 22330713 NR Description: mitochondrial carrier protein family [Arabidopsis
  misc_feature (262)..(283): Homolog of NCBI NO: 22330713 NR Description: mitochondrial carrier protein family [Arabidopsis
  misc_feature (1)..(282): Homolog of NCBI NO: 27369998 NR Description: calcium-binding transporter [Mus musculus]
  misc_feature (1)..(282): Homolog of NCBI NO: 33286910 NR Description: Calcium-binding transporter [Mus musculus]
  misc_feature (1)..(282): Homolog of NCBI NO: 11360341 NR Description: peroxisomal Ca-dependent solute carrier
  misc_feature (1)..(282): Homolog of NCBI NO: 34860155 NR Description: similar to calcium-binding transporter [Rattus
  misc_feature (1)..(282): Homolog of NCBI NO: 27694811 NR Description: Similar to hypothetical protein LOC229731
  misc_feature (1)..(280): Homolog of NCBI NO: 34895726 NR Description: putative peroxisomal Ca-dependent solute carrier
MVSRTCIAPLERMKLEYIVRGEQGNLLELIQRIATNEGIRGFWKGNLVNILRTAPFKSINFYAYDTYRGQLLKLSGNEETTNFERFVAGAAAGVTASLLCLPLDTIRTVMVAPGGEALGGVVGAFRHMIQTEGFFSLYKGLVPSLVSMAPSGAVFYGVYDILKSAYLHTPEGKKRLEHMKQEGEELNAFDQLELGPMRTLLYGAIAGACSEAATYPFEVVRRRLQMQSHAKRLSAVATCVKIIEQGGVPALYAGLIPSLLQVLPSAAISYFVYEFMKVVLKVESSA

SEQ ID NO: 106737 - protein, 274 aa, Arabidopsis thaliana
  peptide (1)..(274): Ceres Seq. ID no. 13620326
  misc_feature (1)..(274): Homolog of NCBI NO: 15238315 NR Description: mitochondrial carrier protein family [Arabidopsis
  misc_feature (1)..(271): Homolog of NCBI NO: 25406546 NR Description: hypothetical protein T11I11.12 [imported] - thaliana >gi|12324250|gb|AAG52097.1|AC012680_8 putative
  misc_feature (1)..(94): Homolog of NCBI NO: 22330713 NR Description: mitochondrial carrier protein family [Arabidopsis
  misc_feature (250)..(271): Homolog of NCBI NO: 22330713 NR Description: mitochondrial carrier protein family [Arabidopsis
  misc_feature (1)..(270): Homolog of NCBI NO: 27369998 NR Description: calcium-binding transporter [Mus musculus]
  misc_feature (1)..(270): Homolog of NCBI NO: 33286910 NR Description: Calcium-binding transporter [Mus musculus]
  misc_feature (1)..(270): Homolog of NCBI NO: 11360341 NR Description: peroxisomal Ca-dependent solute carrier
  misc_feature (1)..(270): Homolog of NCBI NO: 34860155 NR Description: similar to calcium-binding transporter [Rattus
  misc_feature (1)..(270): Homolog of NCBI NO: 27694811 NR Description: Similar to hypothetical protein LOC229731
  misc_feature (1)..(268): Homolog of NCBI NO: 34895726 NR Description: putative peroxisomal Ca-dependent solute carrier
MKLEYIVRGEQGNLLELIQRIATNEGIRGFWKGNLVNILRTAPFKSINFYAYDTYRGQLLKLSGNEETTNFERFVAGAAAGVTASLLCLPLDTIRTVMVAPGGEALGGVVGAFRHMIQTEGFFSLYKGLVPSLVSMAPSGAVFYGVYDILKSAYLHTPEGKKRLEHMKQEGEELNAFDQLELGPMRTLLYGAIAGACSEAATYPFEVVRRRLQMQSHAKRLSAVATCVKIIEQGGVPALYAGLIPSLLQVLPSAAISYFVYEFMKVVLKVESSA

SEQ ID NO: 106738 - DNA, 1725 bp, Arabidopsis thaliana
  misc_feature (1)..(1725): Ceres Seq. ID no. 13620334
  misc_feature: MA Experiment ID: 20000179 Result: Down-regulated in Transcription
  misc_feature: MA Experiment 20000179 PARAMETER Experiment Name: At_Germinating_Seeds_P Parameter: Age (hr) Value: 6 vs. 0
  misc_feature: MA Experiment 20000179 PARAMETER Experiment Name: At_Germinating_Seeds_P Parameter: Tissue Value: Germinating Seeds
  misc_feature: MA Experiment ID: 20000180 Result: Down-regulated in Transcription
  misc_feature: MA Experiment 20000180 PARAMETER Experiment Name: At_Germinating_Seeds_P Parameter: Age (hr) Value: 24 vs. 0
  misc_feature: MA Experiment 20000180 PARAMETER Experiment Name: At_Germinating_Seeds_P Parameter: Tissue Value: Germinating Seeds
  misc_feature: MA Experiment ID: 20000185 Result: Up-regulated in Transcription
  misc_feature: MA Experiment 20000185 PARAMETER Experiment Name: At_Roots__P Parameter: Age (day) Value: 7 vs. 21
  misc_feature: MA Experiment 20000185 PARAMETER Experiment Name: At_Roots__P Parameter: Organism Value: A. thaliana
  misc_feature: MA Experiment 20000185 PARAMETER Experiment Name: At_Roots__P Parameter: Tissue Value: Roots vs. Whole Plant
  misc_feature: MA Experiment ID: 20000264 Result: Up-regulated in Transcription
  misc_feature: MA Experiment 20000264 PARAMETER Experiment Name: At_Open_Flower_P Parameter: Age (day) Value: 21
  misc_feature: MA Experiment 20000264 PARAMETER Experiment Name: At_Open_Flower_P Parameter: Plant Line Value: WS
  misc_feature: MA Experiment 20000264 PARAMETER Experiment Name: At_Open_Flower_P Parameter: Tissue Value: Open Flower vs. Whole Plant
  misc_feature: MA Experiment ID: 20000286 Result: Up-regulated in Transcription
  misc_feature: MA Experiment 20000286 PARAMETER Experiment Name: At_Open_Flower_P Parameter: Age (day) Value: 21
  misc_feature: MA Experiment 20000286 PARAMETER Experiment Name: At_Open_Flower_P Parameter: Plant Line Value: WS
  misc_feature: MA Experiment 20000286 PARAMETER Experiment Name: At_Open_Flower_P Parameter: Tissue Value: Half Open vs. Whole Plant
  misc_feature: MA Experiment ID: 20000439 Result: Up-regulated in Transcription
  misc_feature: MA Experiment 20000439 PARAMETER Experiment Name: At_Roots__P Parameter: Age (day) Value: 14 vs. 21
  misc_feature: MA Experiment 20000439 PARAMETER Experiment Name: At_Roots__P Parameter: Organism Value: A. thaliana
  misc_feature: MA Experiment 20000439 PARAMETER Experiment Name: At_Roots__P Parameter: Tissue Value: Roots vs. Whole Plant
  misc_feature: MA Experiment ID: 20001773 Result: Up-regulated in Transcription
  misc_feature: MA Experiment 20001773 PARAMETER Experiment Name: At_Far-red-enriched-adult_P Parameter: Age (day) Value: 30
  misc_feature: MA Experiment 20001773 PARAMETER Experiment Name: At_Far-red-enriched-adult_P Parameter: Light Value: Far-red enriched vs. White
  misc_feature: MA Experiment 20001773 PARAMETER Experiment Name: At_Far-red-enriched-adult_P Parameter: Organism Value: A. thaliana
  misc_feature: MA Experiment 20001773 PARAMETER Experiment Name: At_Far-red-enriched-adult_P Parameter: Plant Line Value: Columbia
  misc_feature: MA Experiment 20001773 PARAMETER Experiment Name: At_Far-red-enriched-adult_P Parameter: Timepoint (hr) Value: 48
  misc_feature: MA Experiment 20001773 PARAMETER Experiment Name: At_Far-red-enriched-adult_P Parameter: Tissue Value: Aerial
  misc_feature: MA Experiment ID: 20001910 Result: Up-regulated in Transcription
  misc_feature: MA Experiment 20001910 PARAMETER Experiment Name: At_Drought_Reproduction_P Parameter: Age (day) Value: 37
  misc_feature: MA Experiment 20001910 PARAMETER Experiment Name: At_Drought_Reproduction_P Parameter: Organism Value: A. thaliana
  misc_feature: MA Experiment 20001910 PARAMETER Experiment Name: At_Drought_Reproduction_P Parameter: Plant Line Value: WS
  misc_feature: MA Experiment 20001910 PARAMETER Experiment Name: At_Drought_Reproduction_P Parameter: Timepoint (day) Value: 7
  misc_feature: MA Experiment 20001910 PARAMETER Experiment Name: At_Drought_Reproduction_P Parameter: Tissue Value: Flowers
  misc_feature: MA Experiment 20001910 PARAMETER Experiment Name: At_Drought_Reproduction_P Parameter: Treatment Value: Drought vs. No Drought
gcttccctcttttgtgttctttttgttttctgggtgaatattgtatgaacctttgactgggatttttccgaagaagaatcccagacgacgtaatttttctccaagctatggctgttgaagagatggagaagaagatcaaaggaagccaagagacggagctacataaaaacgacttatcaatcgaagacccatctccaagatgcgtgcttgaaattccggtaatgagttcagattccgataacagcagcagttgtagctcgtgttctcctgataaatcatcgtcgccattatcaacaactcctccaaacgtttcgtcttttcatcaatggaacaagatgatcgaatccatcaagaagaaatcaattaggagattctctgtcattcctctcctcgctagctacgagctcacccgcaaaaagaaacaaccgaaactatctccttgttcagaaaacgacttcgattgtgatcaaatcctcgtcgctaaaccttcgtggcgtaatttcaccttcgacgaactcgttgccgccaccgacaattttaatcccgagaacatgattgggaaaggaggacatgcggaggtgtacaaaggggttttaccggacggagagactgtggcgatcaagaagctgacgagacatgcaaaggaagtagaagaacgagtcagtgatttcttatcggagcttgggataatcgcacatgttaaccatccaaacgcagctaggcttcgtggtttcagttgtgatcgcggtttgcattttgtgcttgagtactcttctcatggcagtcttgcttctctactctttggatcagaggagtgtttggattggaagaaacggtataaagtggctatgggtatagctgatggtttgagttatcttcataacgattgccctcgacggattattcaccgagacatcaaagcttccaacattttgctctctcaagactacgaagctcagatttcggattttggactagctaagtggctcccagagcattggcctcatcacattgttttccctatcgaaggcacattcggatatctagctccagagtacttcatgcacgggattgtcgatgagaagacggatgtttttgcttttggtgtattgcttctagagatcataactggtcgtcgagctgttgataccgatagccggcaaagcatagttatgtgggcaaaacctcttctggagaagaacaacatggaagaaatagttgatcctcagctaggcaatgactttgatgaaaccgagatgaaacgagtgatgcaaacagcttcaatgtgcatacaccatgtatccactatgcgtcctgacatgaaccggttggttcagctgttgcgcggagatgaccagttagctgaacaaaaaccaggtggagcaagaacagtgagtctcgacgattgcgacttagatcacacctcttcctcttaccttaacgatctcactcgacatagacagctcttaatggagtaagcaatctgatgataccaatactttaaaaaaaactcctctcacagagaagaagaaacaacaagaagcaaaaatgttcttctttccctttttcttgtctgtgattttgcttcgtcttctccattgtaaaaatcttaaaaagagggaatatgttgtatgtattaatttggcttttgtcttcaaattctggttgtctcttatgttgtaaaattctaaaattcagatgataaaattcacaatttgtaatgcc

SEQ ID NO: 106739 - protein, 456 aa, Arabidopsis thaliana
  peptide (1)..(456): Ceres Seq. ID no. 13620335
  misc_feature (1)..(456): Homolog of NCBI NO: 30698132 NR Description: protein kinase, putative [Arabidopsis thaliana]
  misc_feature (1)..(456): Homolog of NCBI NO: 26452369 NR Description: unknown protein [Arabidopsis thaliana]
  misc_feature (1)..(456): Homolog of NCBI NO: 15810235 NR Description: putative Pto kinase interactor [Arabidopsis
  misc_feature (1)..(456): Homolog of NCBI NO: 18416299 NR Description: protein kinase family [Arabidopsis thaliana]
  misc_feature (1)..(456): Homolog of NCBI NO: 11358733 NR Description: Pto kinase interactor-like protein - Arabidopsis
  misc_feature (36)..(455): Homolog of NCBI NO: 30687061 NR Description: protein kinase family [Arabidopsis thaliana] putative protein kinase [Arabidopsis thaliana]
  misc_feature (13)..(455): Homolog of NCBI NO: 22330852 NR Description: protein kinase family [Arabidopsis thaliana] putative serine/threonine protein kinase [Arabidopsis thaliana]
  misc_feature (57)..(415): Homolog of NCBI NO: 15239245 NR Description: protein kinase, putative [Arabidopsis thaliana]
  misc_feature (126)..(435): Homolog of NCBI NO: 40253745 NR Description: SERK1 protein-like [Oryza sativa (japonica
  misc_feature (22)..(325): Homolog of NCBI NO: 6729024 NR Description: putative serine/threonine protein kinase
MAVEEMEKKIKGSQETELHKNDLSIEDPSPRCVLEIPVMSSDSDNSSSCSSCSPDKSSSPLSTTPPNVSSFHQWNKMIESIKKKSIRRFSVIPLLASYELTRKKKQPKLSPCSENDFDCDQILVAKPSWRNFTFDELVAATDNFNPENMIGKGGHAEVYKGVLPDGETVAIKKLTRHAKEVEERVSDFLSELGIIAHVNHPNAARLRGFSCDRGLHFVLEYSSHGSLASLLFGSEECLDWKKRYKVAMGIADGLSYLHNDCPRRIIHRDIKASNILLSQDYEAQISDFGLAKWLPEHWPHHIVFPIEGTFGYLAPEYFMHGIVDEKTDVFAFGVLLLEIITGRRAVDTDSRQSIVMWAKPLLEKNNMEEIVDPQLGNDFDETEMKRVMQTASMCIHHVSTMRPDMNRLVQLLRGDDQLAEQKPGGARTVSLDDCDLDHTSSSYLNDLTRHRQLLME

SEQ ID NO: 106740 - protein, 451 aa, Arabidopsis thaliana
  peptide (1)..(451): Ceres Seq. ID no. 13620336
  misc_feature (1)..(451): Homolog of NCBI NO: 30698132 NR Description: protein kinase, putative [Arabidopsis thaliana]
  misc_feature (1)..(451): Homolog of NCBI NO: 26452369 NR Description: unknown protein [Arabidopsis thaliana]
  misc_feature (1)..(451): Homolog of NCBI NO: 15810235 NR Description: putative Pto kinase interactor [Arabidopsis
  misc_feature (1)..(451): Homolog of NCBI NO: 18416299 NR Description: protein kinase family [Arabidopsis thaliana]
  misc_feature (1)..(451): Homolog of NCBI NO: 11358733 NR Description: Pto kinase interactor-like protein - Arabidopsis
  misc_feature (31)..(450): Homolog of NCBI NO: 30687061 NR Description: protein kinase family [Arabidopsis thaliana] putative protein kinase [Arabidopsis thaliana]
  misc_feature (8)..(450): Homolog of NCBI NO: 22330852 NR Description: protein kinase family [Arabidopsis thaliana] putative serine/threonine protein kinase [Arabidopsis thaliana]
  misc_feature (52)..(410): Homolog of NCBI NO: 15239245 NR Description: protein kinase, putative [Arabidopsis thaliana]
  misc_feature (121)..(430): Homolog of NCBI NO: 40253745 NR Description: SERK1 protein-like [Oryza sativa (japonica
  misc_feature (17)..(320): Homolog of NCBI NO: 6729024 NR Description: putative serine/threonine protein kinase
MEKKIKGSQETELHKNDLSIEDPSPRCVLEIPVMSSDSDNSSSCSSCSPDKSSSPLSTTPPNVSSFHQWNKMIESIKKKSIRRFSVIPLLASYELTRKKKQPKLSPCSENDFDCDQILVAKPSWRNFTFDELVAATDNFNPENMIGKGGHAEVYKGVLPDGETVAIKKLTRHAKEVEERVSDFLSELGIIAHVNHPNAARLRGFSCDRGLHFVLEYSSHGSLASLLFGSEECLDWKKRYKVAMGIADGLSYLHNDCPRRIIHRDIKASNILLSQDYEAQISDFGLAKWLPEHWPHHIVFPIEGTFGYLAPEYFMHGIVDEKTDVFAFGVLLLEIITGRRAVDTDSRQSIVMWAKPLLEKNNMEEIVDPQLGNDFDETEMKRVMQTASMCIHHVSTMRPDMNRLVQLLRGDDQLAEQKPGGARTVSLDDCDLDHTSSSYLNDLTRHRQLLME

SEQ ID NO: 106741 - protein, 418 aa, Arabidopsis thaliana
  peptide (1)..(418): Ceres Seq. ID no. 13620337
  misc_feature (1)..(418): Homolog of NCBI NO: 30698132 NR Description: protein kinase, putative [Arabidopsis thaliana]
  misc_feature (1)..(418): Homolog of NCBI NO: 26452369 NR Description: unknown protein [Arabidopsis thaliana]
  misc_feature (1)..(418): Homolog of NCBI NO: 15810235 NR Description: putative Pto kinase interactor [Arabidopsis
  misc_feature (1)..(418): Homolog of NCBI NO: 18416299 NR Description: protein kinase family [Arabidopsis thaliana]
  misc_feature (1)..(418): Homolog of NCBI NO: 11358733 NR Description: Pto kinase interactor-like protein - Arabidopsis
  misc_feature (1)..(417): Homolog of NCBI NO: 30687061 NR Description: protein kinase family [Arabidopsis thaliana] putative protein kinase [Arabidopsis thaliana]
  misc_feature (1)..(417): Homolog of NCBI NO: 22330852 NR Description: protein kinase family [Arabidopsis thaliana] putative serine/threonine protein kinase [Arabidopsis thaliana]
  misc_feature (19)..(377): Homolog of NCBI NO: 15239245 NR Description: protein kinase, putative [Arabidopsis thaliana]
  misc_feature (88)..(397): Homolog of NCBI NO: 40253745 NR Description: SERK1 protein-like [Oryza sativa (japonica
  misc_feature (1)..(287): Homolog of NCBI NO: 6729024 NR Description: putative serine/threonine protein kinase
MSSDSDNSSSCSSCSPDKSSSPLSTTPPNVSSFHQWNKMIESIKKKSIRRFSVIPLLASYELTRKKKQPKLSPCSENDFDCDQILVAKPSWRNFTFDELVAATDNFNPENMIGKGGHAEVYKGVLPDGETVAIKKLTRHAKEVEERVSDFLSELGIIAHVNHPNAARLRGFSCDRGLHFVLEYSSHGSLASLLFGSEECLDWKKRYKVAMGIADGLSYLHNDCPRRIIHRDIKASNILLSQDYEAQISDFGLAKWLPEHWPHHIVFPIEGTFGYLAPEYFMHGIVDEKTDVFAFGVLLLEIITGRRAVDTDSRQSIVMWAKPLLEKNNMEEIVDPQLGNDFDETEMKRVMQTASMCIHHVSTMRPDMNRLVQLLRGDDQLAEQKPGGARTVSLDDCDLDHTSSSYLNDLTRHRQLLME

SEQ ID NO: 106742 - DNA, 1524 bp, Arabidopsis thaliana
  misc_feature (1)..(1524): Ceres Seq. ID no. 13620338
  misc_feature: MA Experiment ID: 20000180 Result: Down-regulated in Transcription
  misc_feature: MA Experiment 20000180 PARAMETER Experiment Name: At_Germinating_Seeds_P Parameter: Age (hr) Value: 24 vs. 0
  misc_feature: MA Experiment 20000180 PARAMETER Experiment Name: At_Germinating_Seeds_P Parameter: Tissue Value: Germinating Seeds
atctacgaagagagaccatggccgagccaaaaccgaagcttcatgttgcagtgttcccatggttagctttaggtcacatgattccttacttgcaactctcaaagctcatagcaaggaaaggccatactgtgtccttcatctccacagctcgtaacatttcacgtcttcccaatatatcctccgacctttccgtgaatttcgtttctttgccgttaagtcaaaccgtcgaccatctcccagagaacgctgaggccaccactgatgtcccggagactcacatagcttatctgaagaaagcatttgatgggctttctgaagctttcacagagtttttagaagcttccaaaccaaactggatagtgtatgatatcttgcaccattgggtcccgcctatcgctgagaagctcggcgtgagacgagccatcttctgcacgttcaacgcagcttccatcatcatcatcggtgggccagcatcagtcatgattcaaggtcatgaccctcgaaagactgctgaagatcttatcgtgcctccaccatgggtcccgtttgagaccaacatagtttaccgtctctttgaagctaagaggatcatggagtatcccacggcaggtgtaactggagttgaattgaacgacaactgtagattgggtttggcttacgttggctctgaggttattgtgattagatcatgtatggaactcgaacctgagtggattcaattgctcagtaaactccaaggaaagcctgtgattccaattggtttactcccggctacaccaatggatgatgcagatgacgagggaacatggttagacatcagagaatggctagacagacatcaagcaaagtctgtggtttatgtagccttaggaactgaagtgacaattagtaacgaagagattcaaggtttagctcatgggttggagctttgcaggttacctttcttttggacgctaaggaagaggactagagcttctatgctactacctgatgggttcaaagagagagtcaaagagcgtggagtcatttggaccgagtgggtacctcagaccaagatactgagccatggttcagttggtgggtttgttactcattgtggttggggatcagctgtggaagggcttagctttggtgtccctttgatcatgtttccatgtaacctagaccagccgctagtggctaggttgctcagtgggatgaatataggcttggagattccaaggaatgagcgagacgggctgttcacgagtgcttctgttgcagagacaatcagacatgttgttgtggaagaagaaggaaagatctacaggaacaatgctgcatctcagcaaaagaaaatattcgggaacaagagattgcaagatcagtatgcggatggttttatcgagtttctggagaatcctatagcaggagtgtagagcaaaataatgaagaattatactgtcttctctgtcaacgtcagcgatgtgtgtaataagagttgagaaataaggcacaatcaatgtgataaccaatgttaatttt

SEQ ID NO: 106743 - protein, 471 aa, Arabidopsis thaliana
  peptide (1)..(471): Ceres Seq. ID no. 13620339
  misc_feature (6)..(471): Homolog of NCBI NO: 15238503 NR Description: UDP-glycosyltransferase family [Arabidopsis
  misc_feature (6)..(471): Homolog of NCBI NO: 26452040 NR Description: putative anthocyanidin-3-glucoside
  misc_feature (4)..(465): Homolog of NCBI NO: 21435782 NR Description: UDP-glucosyltransferase [Stevia rebaudiana]
  misc_feature (13)..(466): Homolog of NCBI NO: 15240534 NR Description: UDP-glycosyltransferase family [Arabidopsis
  misc_feature (6)..(466): Homolog of NCBI NO: 20149064 NR Description: putative anthocyanidine rhamnosyl-transferase
  misc_feature (12)..(464): Homolog of NCBI NO: 15450577 NR Description: At2g22590/T9I22.3 [Arabidopsis thaliana]
  misc_feature (12)..(464): Homolog of NCBI NO: 18400022 NR Description: glycosyltransferase family [Arabidopsis thaliana]
  misc_feature (9)..(464): Homolog of NCBI NO: 34393985 NR Description: putative UDP-glucosyltransferase [Oryza sativa
  misc_feature (13)..(464): Homolog of NCBI NO: 34908562 NR Description: putative anthocyanidine rhamnosyl-transferase
  misc_feature (13)..(469): Homolog of NCBI NO: 37530678 NR Description: putative anthocyanidin-3-glucoside
LRRETMAEPKPKLHVAVFPWLALGHMIPYLQLSKLIARKGHTVSFISTARNISRLPNISSDLSVNFVSLPLSQTVDHLPENAEATTDVPETHIAYLKKAFDGLSEAFTEFLEASKPNWIVYDILHHWVPPIAEKLGVRRAIFCTFNAASIIIIGGPASVMIQGHDPRKTAEDLIVPPPWVPFETNIVYRLFEAKRIMEYPTAGVTGVELNDNCRLGLAYVGSEVIVIRSCMELEPEWIQLLSKLQGKPVIPIGLLPATPMDDADDEGTWLDIREWLDRHQAKSVVYVALGTEVTISNEEIQGLAHGLELCRLPFFWTLRKRTRASMLLPDGFKERVKERGVIWTEWVPQTKILSHGSVGGFVTHCGWGSAVEGLSFGVPLIMFPCNLDQPLVARLLSGMNIGLEIPRNERDGLFTSASVAETIRHVVVEEEGKIYRNNAASQQKKIFGNKRLQDQYADGFIEFLENPIAGV

SEQ ID NO: 106744 - protein, 466 aa, Arabidopsis thaliana
  peptide (1)..(466): Ceres Seq. ID no. 13620340
  misc_feature (1)..(466): Homolog of NCBI NO: 15238503 NR Description: UDP-glycosyltransferase family [Arabidopsis
  misc_feature (1)..(466): Homolog of NCBI NO: 26452040 NR Description: putative anthocyanidin-3-glucoside
  misc_feature (1)..(460): Homolog of NCBI NO: 21435782 NR Description: UDP-glucosyltransferase [Stevia rebaudiana]
  misc_feature (8)..(461): Homolog of NCBI NO: 15240534 NR Description: UDP-glycosyltransferase family [Arabidopsis
  misc_feature (1)..(461): Homolog of NCBI NO: 20149064 NR Description: putative anthocyanidine rhamnosyl-transferase
  misc_feature (7)..(459): Homolog of NCBI NO: 15450577 NR Description: At2g22590/T9I22.3 [Arabidopsis thaliana]
  misc_feature (7)..(459): Homolog of NCBI NO: 18400022 NR Description: glycosyltransferase family [Arabidopsis thaliana]
  misc_feature (4)..(459): Homolog of NCBI NO: 34393985 NR Description: putative UDP-glucosyltransferase [Oryza sativa
  misc_feature (8)..(459): Homolog of NCBI NO: 34908562 NR Description: putative anthocyanidine rhamnosyl-transferase
  misc_feature (8)..(464): Homolog of NCBI NO: 37530678 NR Description: putative anthocyanidin-3-glucoside
MAEPKPKLHVAVFPWLALGHMIPYLQLSKLIARKGHTVSFISTARNISRLPNISSDLSVNFVSLPLSQTVDHLPENAEATTDVPETHIAYLKKAFDGLSEAFTEFLEASKPNWIVYDILHHWVPPIAEKLGVRRAIFCTFNAASIIIIGGPASVMIQGHDPRKTAEDLIVPPPWVPFETNIVYRLFEAKRIMEYPTAGVTGVELNDNCRLGLAYVGSEVIVIRSCMELEPEWIQLLSKLQGKPVIPIGLLPATPMDDADDEGTWLDIREWLDRHQAKSVVYVALGTEVTISNEEIQGLAHGLELCRLPFFWTLRKRTRASMLLPDGFKERVKERGVIWTEWVPQTKILSHGSVGGFVTHCGWGSAVEGLSFGVPLIMFPCNLDQPLVARLLSGMNIGLEIPRNERDGLFTSASVAETIRHVVVEEEGKIYRNNAASQQKKIFGNKRLQDQYADGFIEFLENPIAGV

SEQ ID NO: 106745 - protein, 446 aa, Arabidopsis thaliana
  peptide (1)..(446): Ceres Seq. ID no. 13620341
  misc_feature (1)..(446): Homolog of NCBI NO: 15238503 NR Description: UDP-glycosyltransferase family [Arabidopsis
  misc_feature (1)..(446): Homolog of NCBI NO: 26452040 NR Description: putative anthocyanidin-3-glucoside
  misc_feature (1)..(440): Homolog of NCBI NO: 21435782 NR Description: UDP-glucosyltransferase [Stevia rebaudiana]
  misc_feature (1)..(441): Homolog of NCBI NO: 15240534 NR Description: UDP-glycosyltransferase family [Arabidopsis
  misc_feature (1)..(441): Homolog of NCBI NO: 20149064 NR Description: putative anthocyanidine rhamnosyl-transferase
  misc_feature (1)..(439): Homolog of NCBI NO: 15450577 NR Description: At2g22590/T9I22.3 [Arabidopsis thaliana]
  misc_feature (1)..(439): Homolog of NCBI NO: 18400022 NR Description: glycosyltransferase family [Arabidopsis thaliana]
  misc_feature (1)..(439): Homolog of NCBI NO: 34393985 NR Description: putative UDP-glucosyltransferase [Oryza sativa
  misc_feature (1)..(439): Homolog of NCBI NO: 34908562 NR Description: putative anthocyanidine rhamnosyl-transferase
  misc_feature (1)..(444): Homolog of NCBI NO: 37530678 NR Description: putative anthocyanidin-3-glucoside
MIPYLQLSKLIARKGHTVSFISTARNISRLPNISSDLSVNFVSLPLSQTVDHLPENAEATTDVPETHIAYLKKAFDGLSEAFTEFLEASKPNWIVYDILHHWVPPIAEKLGVRRAIFCTFNAASIIIIGGPASVMIQGHDPRKTAEDLIVPPPWVPFETNIVYRLFEAKRIMEYPTAGVTGVELNDNCRLGLAYVGSEVIVIRSCMELEPEWIQLLSKLQGKPVIPIGLLPATPMDDADDEGTWLDIREWLDRHQAKSVVYVALGTEVTISNEEIQGLAHGLELCRLPFFWTLRKRTRASMLLPDGFKERVKERGVIWTEWVPQTKILSHGSVGGFVTHCGWGSAVEGLSFGVPLIMFPCNLDQPLVARLLSGMNIGLEIPRNERDGLFTSASVAETIRHVVVEEEGKIYRNNAASQQKKIFGNKRLQDQYADGFIEFLENPIAGV

SEQ ID NO: 106746 - DNA, 1464 bp, Arabidopsis thaliana
  misc_feature (1)..(1464): Ceres Seq. ID no. 13620342
  misc_feature: MA Experiment ID: 108488 Result: Up-regulated in Transcription
  misc_feature: MA Experiment ID: 108577 Result: Down-regulated in Transcription
  misc_feature: MA Experiment 108577 PARAMETER Experiment Name: At_42deg_Heat_cDNA_P Parameter: Temperature (deg C) Value: 42 vs. 22
  misc_feature: MA Experiment 108577 PARAMETER Experiment Name: At_42deg_Heat_cDNA_P Parameter: Timepoint (hr) Value: 6
  misc_feature: MA Experiment 108577 PARAMETER Experiment Name: At_42deg_Heat_cDNA_P Parameter: Tissue Value: Aerial
  misc_feature: MA Experiment ID: 108595 Result: Down-regulated in Transcription
  misc_feature: MA Experiment 108595 PARAMETER Experiment Name: At_Ler-pi_Ovule_cDNA_P Parameter: Plant Line Value: null
  misc_feature: MA Experiment ID: 20000445 Result: Up-regulated in Transcription
  misc_feature: MA Experiment 20000445 PARAMETER Experiment Name: At_100uM_NAA__P Parameter: Age (day) Value: 14
  misc_feature: MA Experiment 20000445 PARAMETER Experiment Name: At_100uM_NAA__P Parameter: Organism Value: A. thaliana
  misc_feature: MA Experiment 20000445 PARAMETER Experiment Name: At_100uM_NAA__P Parameter: Plant Line Value: WS
  misc_feature: MA Experiment 20000445 PARAMETER Experiment Name: At_100uM_NAA__P Parameter: Timepoint (hr) Value: 6
  misc_feature: MA Experiment 20000445 PARAMETER Experiment Name: At_100uM_NAA__P Parameter: Tissue Value: Aerial
  misc_feature: MA Experiment 20000445 PARAMETER Experiment Name: At_100uM_NAA__P Parameter: Treatment Value: 100uM NAA vs. No Treatment
  misc_feature: MA Experiment ID: 20001911 Result: Down-regulated in Transcription
  misc_feature: MA Experiment 20001911 PARAMETER Experiment Name: At_Drought_Reproduction_P Parameter: Age (day) Value: 40
  misc_feature: MA Experiment 20001911 PARAMETER Experiment Name: At_Drought_Reproduction_P Parameter: Organism Value: A. thaliana
  misc_feature: MA Experiment 20001911 PARAMETER Experiment Name: At_Drought_Reproduction_P Parameter: Plant Line Value: WS
  misc_feature: MA Experiment 20001911 PARAMETER Experiment Name: At_Drought_Reproduction_P Parameter: Timepoint (day) Value: 10
  misc_feature: MA Experiment 20001911 PARAMETER Experiment Name: At_Drought_Reproduction_P Parameter: Tissue Value: Flowers
  misc_feature: MA Experiment 20001911 PARAMETER Experiment Name: At_Drought_Reproduction_P Parameter: Treatment Value: Drought vs. No Drought
aattttaatctcggctacgagtttctgggtaatgataattaagcttttttctgctttaatggaaggaccttgacacttctctctctctttctctttgctattcatcttctacagtttcttaaaaattatactcttcttctccaaaatatctcagactctcttatttttgatcgtcttcttcttcttcgttgtgagcttccatttttcatccaggatttgttttttccgtttgaggtaaagcagctttgcagttaaagaaaccttgagtatccaatgtccccggaagaggagctacagagcaatgtatcggtggctagttcttcacctactagcaattgcatctccaggaacactctaggaggacttaaagagcataactacttgggtctctctgattgttcttctgttggaagctctactctctctccccttgctgaagatgacaaagctactatcagcctcaaggctacggagctgacacttggtcttcctggatcacaatctcctgcgagagacacagagcttaaccttttgagcccagcaaagctagatgagaagccattctttcctttgcttccttctaaagatgagatatgctcctcctcgcaaaagaacaatgcatcgggaaacaaaagaggcttttctgacacaatggatcagtttgctgaagctaaaagttcagtgtatactgagaaaaactggatgttccctgaagcagcagccacccagtctgtaacaaagaaagatgtgccacaaaacatacccaaaggacagtctagcactacaaacaatagctctagtccacctgcagccaaggcacaaattgtcggttggcctccagtgagatcctacaggaagaacacattggccactacttgtaagaacagtgacgaagttgatgggaggccaggttctggggctctcttcgtgaaggtcagtatggatggtgctccttatctgaggaaagttgacctgaggagctacactaactacggggagctttcttcagccttggagaaaatgttcaccactttcactcttggtcaatgtggatctaatggagctgctgggaaggatatgcttagtgagaccaagctcaaggatcttttgaatggaaaagactatgtgctcacttatgaggataaggatggtgactggatgcttgttggagatgttccgtgggagatgtttattgatgtctgcaagaagctgaagataatgaaagggtgtgatgctattgggttagctgcagctccgagagcaatggagaaatcgaagatgagagcttaaaagatggaacatgacaaagctttctaactatacaaaatatgtgcgatcttttggtggtgtttttaaatttcaaaacatcaatatctttagtttctgaatttttaaaatgaagtaagtaagactacgaatgtaaggaaatgaagaagaattaaaaatgatctatttttgttgttt

SEQ ID NO: 106747 - protein, 338 aa, Arabidopsis thaliana; identical to SEQ ID NO: 21776
  peptide (1)..(338): Ceres Seq. ID no. 13620343
  misc_feature (61)..(328): Pfam Name: AUX/IAA family Pfam Description: AUX/IAA family
  misc_feature (1)..(338): Homolog of NCBI NO: 30698143 NR Description: auxin-responsive protein IAA9 (Indoleacetic
  misc_feature (1)..(338): Homolog of NCBI NO: 21592701 NR Description: auxin-induced protein IAA9 [Arabidopsis thaliana]
  misc_feature (1)..(338): Homolog of NCBI NO: 30698145 NR Description: auxin-responsive protein IAA9 (Indoleacetic
  misc_feature (1)..(324): Homolog of NCBI NO: 10177324 NR Description: auxin-induced protein IAA9 [Arabidopsis thaliana]

SEQ ID NO: 106748 - protein, 212 aa, Arabidopsis thaliana; identical to SEQ ID NO: 21777
  peptide (1)..(212): Ceres Seq. ID no. 13620344
  misc_feature (1)..(202): Pfam Name: AUX/IAA family Pfam Description: AUX/IAA family
  misc_feature (1)..(212): Homolog of NCBI NO: 30698143 NR Description: auxin-responsive protein IAA9 (Indoleacetic
  misc_feature (1)..(212): Homolog of NCBI NO: 21592701 NR Description: auxin-induced protein IAA9 [Arabidopsis thaliana]
  misc_feature (1)..(212): Homolog of NCBI NO: 30698145 NR Description: auxin-responsive protein IAA9 (Indoleacetic
  misc_feature (1)..(198): Homolog of NCBI NO: 10177324 NR Description: auxin-induced protein IAA9 [Arabidopsis thaliana]

SEQ ID NO: 106749 - protein, 195 aa, Arabidopsis thaliana; identical to SEQ ID NO: 21778
  peptide (1)..(195): Ceres Seq. ID no. 13620345
  misc_feature (1)..(185): Pfam Name: AUX/IAA family Pfam Description: AUX/IAA family
  misc_feature (1)..(195): Homolog of NCBI NO: 30698143 NR Description: auxin-responsive protein IAA9 (Indoleacetic
  misc_feature (1)..(195): Homolog of NCBI NO: 21592701 NR Description: auxin-induced protein IAA9 [Arabidopsis thaliana]
  misc_feature (1)..(195): Homolog of NCBI NO: 30698145 NR Description: auxin-responsive protein IAA9 (Indoleacetic
  misc_feature (1)..(181): Homolog of NCBI NO: 10177324 NR Description: auxin-induced protein IAA9 [Arabidopsis thaliana]

SEQ ID NO: 106750 - DNA, 1148 bp, Arabidopsis thaliana
  misc_feature (1)..(1148): Ceres Seq. ID no. 13620354
  misc_feature: MA Experiment ID: 20001911 Result: Down-regulated in Transcription
  misc_feature: MA Experiment 20001911 PARAMETER Experiment Name: At_Drought_Reproduction_P Parameter: Age (day) Value: 40
  misc_feature: MA Experiment 20001911 PARAMETER Experiment Name: At_Drought_Reproduction_P Parameter: Organism Value: A. thaliana
  misc_feature: MA Experiment 20001911 PARAMETER Experiment Name: At_Drought_Reproduction_P Parameter: Plant Line Value: WS
  misc_feature: MA Experiment 20001911 PARAMETER Experiment Name: At_Drought_Reproduction_P Parameter: Timepoint (day) Value: 10
  misc_feature: MA Experiment 20001911 PARAMETER Experiment Name: At_Drought_Reproduction_P Parameter: Tissue Value: Flowers
  misc_feature: MA Experiment 20001911 PARAMETER Experiment Name: At_Drought_Reproduction_P Parameter: Treatment Value: Drought vs. No Drought
agaaaaaaaaaaaccactcctcgatgtctgatcaacagcttgaaacagagatcaacttctggggagagacttcagaagaagattactttaatctcaaaggcatcatcggctccaaatctttcttcacttcccctcgaggtctcaacctcttcactcgttcatggcttccctcttcctcttctccgccacgtggtctcatcttcatggtccatggctacggcaatgacgtcagctggactttccagtccactcccatttttcttgctcagatgggtttcgcttgctttgctctcgacatcgaaggtcatggccgatctgacggtgtccgcgcctatgttccctccgtagatctagtcgtcgatgacatcatctctttctttaattcgattaagcaaaaccctaaatttcaaggcttacctcggtttctcttcggagaatcaatgggcggtgcgatttgtcttttgatccaattcgctgatccgttagggtttgatggagcggttttggttgctcccatgtgtaaaatctcggacaaggtgagacctaaatggccggttgatcagtttctgattatgatctcaagattcttgccgacttgggcgattgttccgacggaagatctgttggagaagtcgatcaaagttgaagagaagaaaccgattgccaagaggaatccgatgaggtacaatgagaaaccgcggttaggtacagtgatggagctacttagggttactgattacttagggaagaagctaaaagatgttagcattcccttcattattgtgcacggaagtgcagatgctgtgactgatcctgaagtgagcagagagttgtacgaacatgctaagagcaaagataagacattgaagatctatgacgggatgatgcattcgatgttgttcggtgaacccgacgacaacattgagattgttcgtaaagatattgttagctggttgaatgatagatgtggtggagacaaaaccaaaacccaggtttgaattcattgtttgtctgattctctctcattggtgctgtaaggtttgtatagtcatattttatcatggaaaaatgtttggattaagtgactagaaattgatgtacacattgttcttgcaggtttttcttgataatattcagtttcattctat

SEQ ID NO: 106751 - protein, 331 aa, Arabidopsis thaliana
  peptide (1)..(331): Ceres Seq. ID no. 13620355
  misc_feature (92)..(312): Pfam Name: alpha/beta hydrolase fold Pfam Description: alpha/beta hydrolase fold
  misc_feature (8)..(331): Homolog of NCBI NO: 15220284 NR Description: hydrolase, alpha/beta fold family [Arabidopsis
  misc_feature (16)..(322): Homolog of NCBI NO: 34899776 NR Description: putative lysophospholipase isolog [Oryza sativa
  misc_feature (36)..(321): Homolog of NCBI NO: 34894592 NR Description: phospholipase-like protein [Oryza sativa
  misc_feature (38)..(324): Homolog of NCBI NO: 7487948 NR Description: lysophospholipase homolog F12L6.8 - Arabidopsis >gi|3355471|gb|AAC27833.1| putative phospholipase [Arabidopsis >gi|13877687|gb|AAK43921.1|AF370602_1 putative phospholipase
  misc_feature (38)..(324): Homolog of NCBI NO: 30687883 NR Description: esterase/lipase/thioesterase family [Arabidopsis >gi|19423964|gb|AAL87258.1| putative phospholipase [Arabidopsis >gi|21689759|gb|AAM67523.1| putative phospholipase [Arabidopsis
  misc_feature (33)..(320): Homolog of NCBI NO: 18417885 NR Description: hydrolase, alpha/beta fold family [Arabidopsis >gi|13430614|gb|AAK25929.1|AF360219_1 putative lipase thaliana] >gi|15293171|gb|AAK93696.1| putative lipase
  misc_feature (38)..(321): Homolog of NCBI NO: 18407407 NR Description: esterase/lipase/thioesterase family [Arabidopsis >gi|16323214|gb|AAL15341.1| At2g47630/F17A22.2 [Arabidopsis >gi|20196967|gb|AAM14848.1| putative phospholipase [Arabidopsis
  misc_feature (38)..(331): Homolog of NCBI NO: 30695682 NR Description: esterase/lipase/thioesterase family [Arabidopsis
  misc_feature (18)..(327): Homolog of NCBI NO: 15219082 NR Description: esterase/lipase/thioesterase family [Arabidopsis
  misc_feature (38)..(331): Homolog of NCBI NO: 30687879 NR Description: hydrolase, alpha/beta fold family [Arabidopsis >gi|20197113|gb|AAC27832.2| putative phospholipase; alternative
KKKNHSSMSDQQLETEINFWGETSEEDYFNLKGIIGSKSFFTSPRGLNLFTRSWLPSSSSPPRGLIFMVHGYGNDVSWTFQSTPIFLAQMGFACFALDIEGHGRSDGVRAYVPSVDLVVDDIISFFNSIKQNPKFQGLPRFLFGESMGGAICLLIQFADPLGFDGAVLVAPMCKISDKVRPKWPVDQFLIMISRFLPTWAIVPTEDLLEKSIKVEEKKPIAKRNPMRYNEKPRLGTVMELLRVTDYLGKKLKDVSIPFIIVHGSADAVTDPEVSRELYEHAKSKDKTLKIYDGMMHSMLFGEPDDNIEIVRKDIVSWLNDRCGGDKTKTQV

SEQ ID NO: 106752 - protein, 324 aa, Arabidopsis thaliana
  peptide (1)..(324): Ceres Seq. ID no. 13620356
  misc_feature (85)..(305): Pfam Name: alpha/beta hydrolase fold Pfam Description: alpha/beta hydrolase fold
  misc_feature (1)..(324): Homolog of NCBI NO: 15220284 NR Description: hydrolase, alpha/beta fold family [Arabidopsis
  misc_feature (9)..(315): Homolog of NCBI NO: 34899776 NR Description: putative lysophospholipase isolog [Oryza sativa
  misc_feature (29)..(314): Homolog of NCBI NO: 34894592 NR Description: phospholipase-like protein [Oryza sativa
  misc_feature (31)..(317): Homolog of NCBI NO: 7487948 NR Description: lysophospholipase homolog F12L6.8 - Arabidopsis >gi|3355471|gb|AAC27833.1| putative phospholipase [Arabidopsis >gi|13877687|gb|AAK43921.1|AF370602_1 putative phospholipase
  misc_feature (31)..(317): Homolog of NCBI NO: 30687883 NR Description: esterase/lipase/thioesterase family [Arabidopsis >gi|19423964|gb|AAL87258.1| putative phospholipase [Arabidopsis >gi|21689759|gb|AAM67523.1| putative phospholipase [Arabidopsis
  misc_feature (26)..(313): Homolog of NCBI NO: 18417885 NR Description: hydrolase, alpha/beta fold family [Arabidopsis >gi|13430614|gb|AAK25929.1|AF360219_1 putative lipase thaliana] >gi|15293171|gb|AAK93696.1| putative lipase
  misc_feature (31)..(314): Homolog of NCBI NO: 18407407 NR Description: esterase/lipase/thioesterase family [Arabidopsis >gi|16323214|gb|AAL15341.1| At2g47630/F17A22.2 [Arabidopsis >gi|20196967|gb|AAM14848.1| putative phospholipase [Arabidopsis
  misc_feature (31)..(324): Homolog of NCBI NO: 30695682 NR Description: esterase/lipase/thioesterase family [Arabidopsis
  misc_feature (11)..(320): Homolog of NCBI NO: 15219082 NR Description: esterase/lipase/thioesterase family [Arabidopsis
  misc_feature (31)..(324): Homolog of NCBI NO: 30687879 NR Description: hydrolase, alpha/beta fold family [Arabidopsis >gi|20197113|gb|AAC27832.2| putative phospholipase; alternative
MSDQQLETEINFWGETSEEDYFNLKGIIGSKSFFTSPRGLNLFTRSWLPSSSSPPRGLIFMVHGYGNDVSWTFQSTPIFLAQMGFACFALDIEGHGRSDGVRAYVPSVDLVVDDIISFFNSIKQNPKFQGLPRFLFGESMGGAICLLIQFADPLGFDGAVLVAPMCKISDKVRPKWPVDQFLIMISRFLPTWAIVPTEDLLEKSIKVEEKKPIAKRNPMRYNEKPRLGTVMELLRVTDYLGKKLKDVSIPFIIVHGSADAVTDPEVSRELYEHAKSKDKTLKIYDGMMHSMLFGEPDDNIEIVRKDIVSWLNDRCGGDKTKTQV

SEQ ID NO: 106753 - protein, 264 aa, Arabidopsis thaliana
  peptide (1)..(264): Ceres Seq. ID no. 13620357
  misc_feature (25)..(245): Pfam Name: alpha/beta hydrolase fold Pfam Description: alpha/beta hydrolase fold
  misc_feature (1)..(264): Homolog of NCBI NO: 15220284 NR Description: hydrolase, alpha/beta fold family [Arabidopsis
  misc_feature (1)..(255): Homolog of NCBI NO: 34899776 NR Description: putative lysophospholipase isolog [Oryza sativa
  misc_feature (1)..(254): Homolog of NCBI NO: 34894592 NR Description: phospholipase-like protein [Oryza sativa
  misc_feature (1)..(257): Homolog of NCBI NO: 7487948 NR Description: lysophospholipase homolog F12L6.8 - Arabidopsis >gi|3355471|gb|AAC27833.1| putative phospholipase [Arabidopsis >gi|13877687|gb|AAK43921.1|AF370602_1 putative phospholipase
  misc_feature (1)..(257): Homolog of NCBI NO: 30687883 NR Description: esterase/lipase/thioesterase family [Arabidopsis >gi|19423964|gb|AAL87258.1| putative phospholipase [Arabidopsis >gi|21689759|gb|AAM67523.1| putative phospholipase [Arabidopsis
  misc_feature (1)..(253): Homolog of NCBI NO: 18417885 NR Description: hydrolase, alpha/beta fold family [Arabidopsis >gi|13430614|gb|AAK25929.1|AF360219_1 putative lipase thaliana] >gi|15293171|gb|AAK93696.1| putative lipase
  misc_feature (1)..(254): Homolog of NCBI NO: 18407407 NR Description: esterase/lipase/thioesterase family [Arabidopsis >gi|16323214|gb|AAL15341.1| At2g47630/F17A22.2 [Arabidopsis >gi|20196967|gb|AAM14848.1| putative phospholipase [Arabidopsis
  misc_feature (1)..(264): Homolog of NCBI NO: 30695682 NR Description: esterase/lipase/thioesterase family [Arabidopsis
  misc_feature (1)..(260): Homolog of NCBI NO: 15219082 NR Description: esterase/lipase/thioesterase family [Arabidopsis
  misc_feature (1)..(264): Homolog of NCBI NO: 30687879 NR Description: hydrolase, alpha/beta fold family [Arabidopsis >gi|20197113|gb|AAC27832.2| putative phospholipase; alternative
MVHGYGNDVSWTFQSTPIFLAQMGFACFALDIEGHGRSDGVRAYVPSVDLVVDDIISFFNSIKQNPKFQGLPRFLFGESMGGAICLLIQFADPLGFDGAVLVAPMCKISDKVRPKWPVDQFLIMISRFLPTWAIVPTEDLLEKSIKVEEKKPIAKRNPMRYNEKPRLGTVMELLRVTDYLGKKLKDVSIPFIIVHGSADAVTDPEVSRELYEHAKSKDKTLKIYDGMMHSMLFGEPDDNIEIVRKDIVSWLNDRCGGDKTKTQV

SEQ ID NO: 106754 - DNA, 1512 bp, Arabidopsis thaliana
  misc_feature (1)..(1512): Ceres Seq. ID no. 13620358
  misc_feature: MA Experiment ID: 108595 Result: Down-regulated in Transcription
  misc_feature: MA Experiment 108595 PARAMETER Experiment Name: At_Ler-pi_Ovule_cDNA_P Parameter: Plant Line Value: null
  misc_feature: MA Experiment ID: 20000087 Result: Down-regulated in Transcription
  misc_feature: MA Experiment 20000087 PARAMETER Experiment Name: At_100uM_ABA_Mutants_cDNA_P Parameter: Plant Line Value: WS
  misc_feature: MA Experiment 20000087 PARAMETER Experiment Name: At_100uM_ABA_Mutants_cDNA_P Parameter: Timepoint (hr) Value: 6
  misc_feature: MA Experiment 20000087 PARAMETER Experiment Name: At_100uM_ABA_Mutants_cDNA_P Parameter: Tissue Value: Aerial
  misc_feature: MA Experiment 20000087 PARAMETER Experiment Name: At_100uM_ABA_Mutants_cDNA_P Parameter: Treatment Value: 100uM ABA vs. No Treatment
  misc_feature: MA Experiment ID: 20000224 Result: Down-regulated in Transcription
agcattgttttgttatcttcttcttcatcacaatttttctacggtcagagattcaaaagagttctttctctctatcttattctccgatcatcatgatgcagcagccaccacccggaggtatccttccacatcacgctcctcctccttctgcgcaacaacagtacggttaccaacaaccttacgggattgctggagctgctccaccaccaccacagatgtggaatcctcaagcggcggcgccgccatcagttcagcctacgaccgctgacgagatccggactctttggatcggggacttacagtattggatggatgagaatttcctctacggttgctttgctcataccggagagatggtttctgctaaagtgattcgtaacaagcaaaccggtcaagttgaaggatacggtttcattgaattcgcatctcatgctgctgctgaaagagttctacaaacattcaacaacgctcctatcccgagctttcctgatcagctctttagactgaactgggcatcattgagttcaggagataaacgagacgattcaccggactacacgatatttgtcggtgatctggctgctgatgttacggattatatcttacttgagacgttcagagcctcttatccgtcagtgaagggtgcaaaggttgttattgacagagtcactggacgtacaaaaggatatgggtttgttaggttttctgatgaaagtgaacagatccgtgctatgacggagatgaatggcgttccttgttctactagacctatgagaattggtcccgctgctagcaagaaaggtgtaactggtcaaagagattcataccagagctctgctgcaggggtaacaactgataatgatccaaataacacaactgtttttgttggtggattagatgcatctgtcacggatgatcatctgaagaatgtctttagccaatatggtgagattgtgcatgtgaaaatacccgctggaaagcgctgtggattcgttcagttttccgagaagagctgtgcagaggaagctcttagaatgctgaatggagtgcaattaggcggaacaaccgtcaggctctcatggggccgaagtccttcgaacaaacagtcgggggatccgagccagttttactacggtgggtatggacaaggacaggagcagtatgggtacacgatgcctcaagaccctaatgcatattacggaggctactctggtggaggatacagcggtggttaccagcagacaccacaggcaggacagcaaccaccacaacagccaccacagcagcaacaagtcgggtttagctactaaccccgagagtattgcttgagttaatgtcactctgcttgttgtttgcgtactttgttatgaacttgtttctgcgtgccttgttatgaatattttcccaaacacagtttatttgtctttgcttttctctaggtgtgtgttgagtttttaactcttaataatgtttctgcgatgcttctgtttttaatgttttcatcaccttttg
